United States Patent Application Publication US 2020/0377945 A1 - sequence listing, part 26

SEQ ID NO: 4783 - DNA, 208675 bp, Unknown
  gut microbiota DNA sequence
ggtttttatttgtttaatacatgtgtttttgtctatctttgcgtcaaatttaaatccgttacctaagaagtaacacaccagcatcagtactgattatcaaatttttaaccattcaaattcgacctagaggacaagtcttcacgtaatgtaaattcttacgatttacctctgtacgctctttcaactcaaaccccttcagataaatttgtgtcgtctttatagacttatgccctaaagattcactgatcatttcaattggaactccacggaacttggcagtagttgcccaagaatggcgaatcgtgtaagaagttaccggagaagtcaggtgcaaagccctcgccaaacttttcaaatgattattaaaccggcgaagtgcagactgatattcacgataagcacgttcatccttacgtttcttatcaccggaaaggatactgaaaaggtaatcggggcaacccggacgcgatgactgtgaattgcgaagctgattcatcatctcttttgccgtatccaaaacttccacactcattggagttctggttttaattcgattatatcgaagcacattacaatctaaagccgacttttccaaatgagccaaatcggcaaaagacatcccacagaattgaaacatcaaagcagcaatcgattgtgtgcgccgcaaacaatccgtcttgggatcttcgtaaagaagccgtcggagttcactcaccggaagagcccttttctgacggatatccactcctgtatacacatcacggaacaggccatgtacatagggcgcactacccaactctaccccacggttatagatactgcgaagcatacgcatatacgttgataccgtattcggttttaagcccgaatcatacagatgttccccgtaacgacgcaatcggtcacgagtgacttgcctgaaagatacactggcattaccacaaaatttattaaaagagaaaagagcattttgatagacatgtgccgtagaaaaacgaccttcttttcgtaaaaggccgatgtatagttccccacatcggctaaatccatttttattcattatttgcatcactagttattttatatacaattatagggcgaaaatttggaatttccatcttaatgccatttattaattttatttaaatcaaaagaaatgacaacgacaaaaaaatgcctgaaaaatgcaactggcacacaaaagaagagaagtcttgaaactgattatcaggatgatgacgaaattattgacatcgatgaggtcagaaaaagaaatggcatcacaggcgaaaaaaaacactatttcattgcctgtcttcgcacttattacgaagatgacgagtttaattcctacgtaaaatctttaacaggactagccaagtacattgcagactggagaatcttttacgtaaacacacatcatggatatagattaatgaaattcaggagtatactcagcgaaattagcagtttaagcaaaggaatcggaataatttcgaagcacgaaaaagaagagaaagaacaatacaaatcaaagtatcacagtagaaaatagcaagaataattggagcgaaaaaatacaacttatacttttgcccccgttttttagataaagaaatgaacgaactatcccgcagaaattatagtgtcactataacagcaagatagtgtcactatcccgacaggatagtgtaactatcatcgcacgatagtgtaagcatcctacagacagttccgccttttctttaaatataactattttactaacaaatttataatgtaatgacaaaagaaaaacggctgatagccactaacaaaacagaagaagaaagagatcgattaacagaagtatggaaaaaacgtatcgtatcagagaaaggttattcggaaacgatcgcagaacgaatagccgaaaaagtgaaatcactggcagactacatgcaatatggccatgccatcatcgcatactacagacagaacggtagttttcagttagttacaggcactcttatttcttattccaaagactttcaccactcttatgacatgaagcaggtacacagtaccttcatattctggtgcatggaagagaaaggatggagaacctttcagattgagaattttctcgattggaaaccaattgtataaacttaaaaacaaacaataagactgatatgagcacaacttatttaagcgtagactattttccgcttaccgtaaactttttcgacagagatgccattgaactggctgaagccaaatatggtatcagagtggatggagctgtatgcaaacttctatgtaaaatattcaaagaaggatattacatcccatggggtgaggaacaatcgttgatttttgcccgcaaactgggaggagaactgaaaggaaaagagatagacggaatcattcaaattttgcttgacaaaggattctttgacaaagaaagctatgagaagtttcagatattgacttcccttgaaattcagcacatctggatagatgctacctgccgcaggaaaagaaagttagaagatttgccctacctgttggtcaatgacacccaaaaacaggaaaaggaaaataatacaaaggatgcaaacaattcgtcagtacaaggtgaattgaaactggaaaatgagaacatttcacccgaaattgctgacatttccggacaaagtaaaggagagaaaagaaaagcagaagaggaagaagacaatacggcttcgccttcgctcgaaatccccggttatgcctacaacaagagtacgcacaacgtcaaaggacttctggacagcctggcacaacatggagtaacaaacaagaaagaaattacagctattctcaagctgtcggattacggaaagaaggggacgcagatatggatcacgctgtctaccaccaagtggggaaagattgataatccgggaaggtatatcatttcaacgttgaggacatagagataaaataaggcacggattacacgaattaacacggtttttagttactcaattcctgaaaccgtgaaatctgtgtaatccgtgcctaaaaaaaattaccacttatagttaataccgaagctcagcaattccttcagctggaaaaagctgccattttcaacggttggttttgaactgtcgtcaaaacgggcgtgtacgtaaagtttagtagaaagatagcggttcaaaacaaagttgaatgtattctcccactccacacgcacccattcgtaattggtcagatagttcagacgggattccagcgaaacagccgaaatgattttccagttgaacgttgactgcaactgagaaccgaagtcgtttttagagcatttgcctttctccagaccgaacttggtttcatctacttccgaattgtcgatatatcgcaagttataagtcagcggaccgatgaaaacagaaagattgaatttctgcttattcaatttgtagtccataccgatactgactgccaaatccgccggagacaggaatgcggaaacaagttcttcgctattggctttgtaaccgtgacagaactgagtcttaaactcggaagaaatagtatagtaccagttctttaacgctctcaatcctaacttattgtacaaacggaactggtcggtattaatcagataatcatggaatttatccgacggtgtggatgtcatacccagtttagcctccaactgattttcgaaaaggactttctcattatcattgtagttggcataaagctgcaaggtagccagaccggcaaagttactttctcctcccttgtaccagttctcagaaaggtggttctggctgatttgcaaagaaccgttacctccggtaacccaccagttaggacggctgattttcatttttgccttgcccacatcgttgctcatttcttccggctggaaaagatggacaacagatgccttcggagaaatcttcggtttcacatccctacggaagacatcacggctcatgatacggttttccgtggtgacaaccaattccggatgattgagataaagagccatcagtgctttattgaccgattgattggcacgctcggacttcgtatatgccaaagtatcataaggaagaagttccgctgtcaactttttcaagttgtcgggcaaagagtcaaactgtaccggtttccagtccacctttgaatactgcgccatcggagcataataataggctaacggagtaaacagacgaaaatagtcaggatcggacggaatataacgttccggtacagacgggtcattcaggtagtccaactgaccgatatacttattatataagattgatacagtgtccaatttaggagtttctccggacagattcaatttaagcattaaatacttctgaagttctgacgaaagcgtgtctgccttcacaattttcgcttttgccactacggtagaaggttgagtggcggtctgtgctgaaagcgataaagataaagtcgaggtaaaaactacgaatgataataactctcttctcataatattcctaatttggtgcaaatctacattattttgtttagaaaacataggaatctttcaaaattgcattttttaataaaattgtagaggggaaagtctgcattcttccccttttttttataattttgcgctttttaagttcgtaagaaactactaagtaaaaataattaaaacagttatagctgtgggagaaacaaagtatattttcgtcaccggtggtgttgcctcttctttaggaaaagggatcatctcatcctccatcggtaaattgctgcaagcaagaggttacaatgtaaccatccagaagtttgacccgtatatcaacatcgacccgggaacattgaatccttatgagcatggagaatgctatgtgaccgtagacggccatgaagccgatcttgacctgggacactacgaacgtttcctgggtattcagactacaaaggctaacaacatcactacgggacgtatctacaaaagtgttattgacaaagaacgtcgcggagactatctgggtaagacgatccaggtgattcctcatatcacggatgaaatcaaacggaacgtaaaattgctcggtaacaaatacaagttcgattttgtaattaccgaaatcggtggtacggtaggtgatatcgaatcactcccctacctcgaaagtatccgccagttgaaatgggagttgggtaagaacgctctttgcgtacacctgacatatgtgccttatcttgccgctgccggagagctgaaaaccaaaccgacacagcattctgtcaaggaactccagagcgtaggtattcagccggacgtattggtgcttcgtgccgaacacccgttgagcgacggactccgcaaaaaagtagctcaattctgtaatgtggatgacaaggctgtcgtgcagtctatcgacgcagaaacaatttatgaagtacctctcctgatgcaggcacagggactggacagcacaatccttgaaaagatggggctgcccgtaggagaaactccgggactaggtccgtggcgtaaattcctggaacgtcgtcatgctgctgaaacgaaagaacccatcaacatcgcattggtaggtaaatatgacttgcaggatgcttacaagtcaatccgtgaagcattgtcacaggcaggtacttacaacgaccgcaaagtggaggttcactttgtgaacagcgaaaaactgacagatgagaacgtagccgaagccttgaaaggcatggcaggcgtgatgatcggtccgggattcggtcagcgtggtatcgacggtaagttcgttgccatcaaatatacacgtacacatgatataccgaccttcggtatctgtctgggtatgcaatgtatcgctatcgaatttgcccgcaatgtattgggatatgccgatgccgactcacgcgaaatggatgaaaagactccgcacaacgtgatcgacatcatggaggaacagaaagcgatcaccaatatgggaggtacgatgcgtctgggcgcttacgaatgtgtgcttcagaaaggatcaaaagcataccttgcttacggcgaagaacatattcaggaacgtcaccgccatcgctatgagttcaacaatgactataaggctcaatacgaagctgccggtatgaaatgcgtgggtatcaaccccgaatcggatctggtggaaatcgttgagatcccggcattgaagtggtttatcggcactcagttccatccggaatacagcagtacggtattgaacccgcatccgttgtttgtggctttcgtgaaggcagccatcgagaacgagaagaattgacaattgacagttgacaattgacaatttattattcaaaaatttataattcataattaataggaatggataaaaacaccattacaggtctcgttttaataggtatattattggtaggattcagttatctgagccgtccaagcgaggagcagatagctgcgcagaagaaatactacgattctattgccgtggtgcaacagcagcaggaagcgctgaaagcaaaaacagaagccgcactcgccaatgaaaacaaaggtgcagcggcggcagcagattcttctgccctgtttttcaacgcgatgcatggaactgattccaaagtaagcatccagaacagcgtagcggaaatcactttcactacgaaaggcggacgggtatattcggctatgctgaaagaatacaaaggacaggacaagacaaaccctgtcgtactgttcgacggtgatgatgctaccatgagtttcaacttctacaacaagcaaggagccatccagacaaaggactattacttcgaagctgtcaataagacagacagcagcgtaactatgcgtctggctgcggacaacgccagctacatcgattttatctatacgctgaaaccgaacagctacctgatgaactttgaaatcaaagcaacaggcatggaaggcaaactggccagtacggagtatgtagacatcgactggacacagcgtgcacgccagctggaaaagggattcacttacgaaaaccgcctctcagagctgacttataaggtaaaaggtgacaatgtagataatctgtcggctgccaaggatgacgaaaaggatctgggcaatacagcgatagactgggtagcattcaaaaaccagttcttctcttctgtattcattgcagaccaggacttcaacaaggtttctgtgaagtcaagaatggaacaacaaggaagcggatatatcaaggattattctgcagaaatgagtaccttcttcgatccgagcggaaaacaaccgacagaaatgtacttctactttggcccgaaccacttcaagaccttgaaggcactggacaaaggacgtacagagaaatgggaacttaacagactggtatatctgggctggccgttaatccgctggatcaaccagtttatcacgatcaacgtattcgactggctgtcgggctggggcttgagcatgggtatcgtactgttgattctgacaattatggtgaaggtggtagtttaccctgctacctggaaaacatacatgtcttctgccaagatgcgtgtattgaaaccgaaaatcgacgagatcaacaagaagtatccgaagcaggaagatgcgatgaagaaacagcaggaggtgatgagcctttacagccagtatggcgtgagcccgatgggcggttgtctgccaatgttattgcagttcccgatcttgatggcattgttcatgttcgtaccgagcgctatcgagttacgtcagcagagcttcttgtgggcggacgacttgtccacttacgacgcgttcatcacattcccgttccatatcccgttcctgggcaaccatctcagcttgttctgcttgctgatgacggtaaccaacatcctgaacacaaagtatacaatgacgatgcaggatacaggagcacaaccgcaaatggctgcgatgaaatggatgatgtatctgatgccgattatgttcctgttcgtactgaacgactatccttcgggattgaactattattatttcgtgtcaacactgattagtgtaggaaccatgattttgttgcgtaaaactacagacgaaacaaaattactggctattctggaagctaagaaaaaagacccgaaacaaatgaaaaagaccggatttgctgcacgcctggaagctatgcaaaagcaacaggaacagttacagcagcaaaaacagaataaacgataagaaattatccgaagatatattctgagaaagccgggcaaccgaaaggggtttgtcggctttctttctctaaaaaacaaacttaatatgaagacaaaatatacttataaacaaatctggacgatcgcctaccctattctgatcagcctgattatggagcagctgatcggcatgacggacacggcctttcttggacgtgtcggggaaattgaattaggggcatccgccatcgccggggtttactacctggctattttcatgatggcattcggattcagcgtaggagcacagatattgatcgcccgtcgcaacggggaaggaaactacaaggaaatcggaccgattttctatcaggggatttatttcctggtagtggttgctgcgattctgtttacactttccatcgtattctcgccatttattttaaagaatatcatttcgtcccctcacatttatgatgcagcggaaagttatattcattggcgggtgtacgggttctttttctcatttgtcggagtgatgttccgcgccttctttgtcggtacgacacagaccaagacgctgacgctgaattccatcgtgatggtgctttctaacgtggtattcaactatatcctgattttcggtaagttcggtttcccgcaactgggcattgccggtgcagccatcggttcatccctggctgaactggtatcggtgattttctttatcatctatacctggaagcggattgactgcaagaagtatgcgctgaatatcctgccgaaattccaaagccggacattgaagcggattctcaatgtctccgtgtggacaatgattcaaaacttcgtttctttatctacctggtttatgttcttcctgttcgtggaacacctgggagaacggtcattggctatcgcgaacattatccggaatgtgtcgggtatcccgtttatgatcgccatggcttttgctgcaacctgcggatctctggtcagcaaccttatcggtgcgggcgaaaaagattgtgtacggggaaccatcaatcagcacatccgtatcggatatgtgttcgtactgccgatattgatattcttctgtctgtttcccgacctgattctgcgcatatacacggatatgcccgatttgagggatgcgtccatcccttctttatgggtattatgcgcagcctacgtagtgctggtaccagccaatgtgtatttccagtcggtatcgggaacaggtaacacacgcacggcactggccatggaactttgtgtactgacaatttatgtagcttacgctacttattttattctttaccttaaaatggacattgcgtttgcctggacaacagaaagtgtgtatggaatctttatcctcctcttctgctactggtatatgaagaaaggaaactggcagaaaaagcagatttaaatccttttttcattatcttcgcaagaaaataaacatttttataaaatatgagacaagcaaatctatttatgatgtcggcagcaatgttgttagctgcctgcggcggaacaaaagacgcgggcaaaacggatcaggtgcttatcgaaaaatccgatattaagatcgaagggaagcgtatgacgcctgaagccctttgggcaatgggacgtatcggaggactggcggtatcgcccgacggaaagaaaattgcgtatacggtagcatactacagtgtaccggagaacaagagtaatcgcgaagttttcgtcatgaacgcggacggcagcgataaccggcaaatcacccgcactccttatcaggagaatgaggtgacctggataaaaggaggatcgaagctggctttcctgagcaacgacaacggaagcagccaactatatgaaatgaatccggacggtagcggccgtaaacaactgaccaactacgatggtgacatcgagggttattctatctcaccggacggcaagaaactgctgttcatctcgcaagtgaaaaccaaagaaagcactgccgataaatatccggatctgccgaaagctacaggtattattgtcaccgacctgatgtataagcactgggatgaatgggtgacaactgctccgcatcctttcgtggcagactttgacggtaacggtatttccaatatcgtggatatactggaaggagaaccatacgaaagtccgatgaaaccttggggcggcattgagcagctggcgtggaatacgacttcggacaaagtggcttatacctgtcgcaagaaaacggggctggaatatgctgtttctaccaattcggatatttatgtgtatgatctgaatacaaagaaaacggataatatcaccgaagaaaacaaggggtatgacaccaatccgcaatactctccggatggcaagtacattgcatggcaaagcatggagcgcgatggatacgaagctgatctgaaccgtttgtttatcatgaatctggaaaccggagagaagcgttttgtcagcaaagcatttgagtctaatgtggatgcgtttgtctggggcaacgatgccaagaccatctattttacaggtgtatggcacggagaaactcagatttattctcttgacctgacgaatgattctgtaaaggcgattacttcgggtatgtatgattatgaaggggtagcactcttcggtgacaaactgattgctaaacgccactcaatgagtatgggtgatgagatctatgcggtagcattggatggttctgccactcaactgacacaggagaacaaggagatttatgatcagctggaaatgggcaaggtagaaggtcgctggatgaaaacgacggatggcaaggatatgttgacatgggtgatctatcctccccagttcgatccgaacaagaaatatccgacattgctgttctgtgaaggtggccctcaaagtccggtaagccagttctggtcttatcgctggaacttccagattatggctgccaacgactatatcattgtagccccgaaccgtcgcggattaccgggattcggagtggaatggaacgaacagatcagtggtgattatggtggccagtgtatgaaagactatttcactgctatcgacgagatggcaaaagaatcgtatgtagataaagatcgtctgggatgtgtgggcgctagtttcggaggattctccgtatattggttagccggtcatcacgacaaacgtttcaaggcatttatcgctcatgacggaatcttcaatatggaaatgcagtatctggaaacagaagagaaatggtttgccaactgggatatgggcggcgcgtactgggaaaaacagaatccgatagcacaacgtactttcgccaactcccctcacctcttcgtggaaaaatgggatactccgattctctgtattcatggagaaaaagatttccgtattttggctaatcaggctatggctgcatttgatgccgctgtaatgcgtggtgtacctgcagagttgctaatttatccggatgagaaccactgggtactgaaaccgcagaatggtgtcttgtggcaacgcactttctttgagtggctggataagtggctgaaggctcctgcaaaataaatctttgatataagacaaataatgaaggctctgttctcaaatcaaattgagttcagagccttctgcattacatctaaaatccgctagactttactcatgatatatattttcgattgctactatatacttagataaggtctatgattcaatctagacctgtttcataatccttttcaaatagctcaatcggagcctccattaaaacagttttttcagcacctttttcgtctgataaatcaattaatcccattttttgctcccttaattgttctccagtccatctgccttttaaatggtattcttcccctttatttacggccttcagtaccaaataaaaagttaaggtacatcgatatccacattcttgttttgttaactcataagttgaatagggaggtatctcatactttacatttccaatagaacgtgatccattctttacttttaatgtttctccaaaaatcaacggagtcttcgcacccgttccgtctataaaaagcttacctccagcatcaatgaaaggaacaggaatcttcaaatccgccaaattttcagcattaacaggcaaagaaccttcagtcaatacaaataaagagttctcttcctcttccacatcccatgcatatatcattggaagaggttcatctttatcatttactttatgttgcaagactactacaggatattcaacccgctctactacatccgtttcctcctgcacaaacttataggaaacaacctctaatatcgccggagtattggatggagaagaagacacatcatccgaatcactactacaagctgcgagtgcagcacagatacctgcaagaaagaacatttttgttttcataacgcttagttttagttgtgttacaatagtttagtttagggcaaatgtataatatttatatcacttatcaaagctttaccgataaaaaataaaaaaagggagaattaatctccctcccaaatattttcaatttctactatatacattttatgaaaacctccatgagcatcgtcataccatttttccaaggactctttatccaggaaacattcaggtttaatgttatccgcatacagttttcttccttccagactcaggcgggcctgttcgaaaagcacattcccctgttctgtgaagaccggctttaacccggttgctttcaccttatccgtatcacgaccggactttgagccacaaactgcatgaatcttcttatttgcttcgcccaaaaaagaaagtgtcagataatcacttttctcgatgaactcatacgtatatcgttcggggcggacaaaaacaaaagcaacgggcttattccaaagccagccaataccaccccaactggcagtcattgtattgaatttctctttggtgccagcagtaaccaacatccattctttgccaatcgcctcaaagaaattttctttcaggtcttttacttctaacttcttcatctctcagtttattttataattactttcttttactcagttttacgatttctcccagataagggatttctacacgaatctttcttttctttgcttctgccgcaaatactttaggcggatcatgcaagggttcatcagacaaatcaaatgtaccgtagtgcatcggaatggttattcctgcgtgcatctcttcggaggcagtcagtgattcataaggagaaatatgattgggacgcatgaaccaacggggtttatatgcaccgatacccaacaaggcatagtccggagctccgaacagatccgggatttccctaaaatgggtagaataccctgtgtctccgctataatagagagaaacaccattcccctgcagcatgaaagctccccacaatcgctgccctccatcacgtacggagcgtttgctccaatgctgtgccggcaagaaagttattttcagcccttcatcttccagttgctgataccagccggcctcgatcactctcatttccggaaaccagctctttatcagttctccggttcccaaaccgcaaaacagtttcatctgcggattattattcagcaaacgggtgatactttgcttgtccagatggtcaaaatggtcatggctgataagcaggtaatcaatttctgtaaaaatgtcgggattggcaggaaactcactctgtcttttcacaaaagggatgtttccgaaaaccggatcgaacatgattcttttgcctgccaactgaaggaagaaggaattatgtcccagccatattaaagaatctcccaccacagcatccagcgaacgaagataacagacttttgggtcccacttcaccgttttcttttctttccgctgaggattgggggacaaccgccatttcaacacacttcccataccggggcggaaacggtgctgcctgttaaaaaaacgtccgcgtaccatcggatttcctctccaataaggattgacggtagccaaacgttcgtttctcctgaaacatatatgttcacccattttctttatctattgaataagtcctcacaaacttaattaaaaatctcgatttacaaagagggacaaacaaaaaatgtaccccggacacactatcggggcacatttctcagaaaaagaataaatattattcttttttaatagaacgatcttacattaaaagcaatgcagtccatacaacggcagctgccatccgagagctgacaaattgataatcacgatgaccagtcccaatacccataggataaacagagaccatttcaagccggtccccatcggtgaccaatgaaacaactgacgcattatagtgtacagaaaagctcctaatggaatggcaatgagtgcaattcctgaaatggtgccaagcaatgtcatcacaggagatatggtagctatgggcgtccagtcaatagccggaagcatttcataaagcagagctccgccgccaacgaacgcagcaatcaccgcaaacacaagagctactatcaccacagcgagcacgaacaataccggacagcaaatgatgacaagagctaccaggaatatcttaagaatgatagcggcgatcgtgacaaatacatctcctactttttgcagaaaggtacgcggtttatccgagttcacaaagttattgaccccgtcggccacccgttcaaatccatccgtcaccgttttgcctatattttctatggttaccgcttcgccacgcatactcagcttctctgctgccgtacgtgcttcgggaatgataatccatcctataatataaaggataatcatcgggcaatagggaacaaacaataatacgatcatcaggatacgcaccaacgtgatatcccagtcaaaataagctgccagcccggaagctactcctccaagcaacttattatccggatcacggaacaggcgacgggctgtagtggtccgtgtatacccctgaccggaagaagctgtctgttccttcttatgcggttcggattcgtcgtcagatacaccaaaatcttccggtttgcctacccgggcaattatttcttccacatcggcaatggtaatgacttgcttccctgcggacactttctcggcaaacagctcggcaatacgaatctcgatatcattcacaatctcttccgccccctcctgtttgcgaaaaaaatgtttcaggttggacagataatcgtccagcaaacgataggcatcatcatctatatgatagacagttcctcccaaatttacagtcaatgtttttttcattattatttcttctttatcgaattatctactagcaatatgattcacggtttcgttcagttccttccaggatatctcaagctcgcctaaaaaagcctctcctttttctgtgagcttatagtacttgcgaggaggtccctgcgtggattctacccattcataactcaacaaatcgtcattcttcaaacgtgtcagcaatggatacaaggtaccttccaccacaatcagctgtgcctctttcaacttctgaataatatcagaagcataagccggctctttgtgcagtaaaagcatgatgcaatactccaacatgccttttctcatctgagattttacattgtctacattcattgttatttttctttttgacaggacaaatatatgcattactctagtaccttgcattacaaagtactataatttaataataattaaatcattaagaagttttctccttattataaaaagaaataatagctatatttgcagctcataaaaccacaaaaaagaaaatacgtatgtttactattcgaaaagcaaggatagatgattgcggtctgatcaaccaaatggccggtgaagtatttcccgccacttaccaagagatcttatctcccggacaactggactatatgatggactggatgtactctcccgaaaatatccggaaacaaatggaagaagaaggtcatgtttattttatcgcatatgaaggagatgagccctgtggctatgtctccgtacagcaacaggaagagaatgtattccatctgcagaaaatctatgtcctcccccattttcaaggcgcacactgcggtagttttttattcagagaggctgtcagatatatcaaggaggtgcatccggaaccttgcttaatggagcttaacgtgaaccgtaacaacaaggctttactgttctatgaacggatgggtatgagaaaattgcgggaaggggattttccgattggcaacgggtactatatgaatgattatatcatgggactggatatctgaaaagcaaggtaaccatatacaaaatgccccggaacagattgttactcaatcaatgttccggggcattcgtttatttattaccaagcgggcttatttcgctacgcgttccagccatttcagcatgaagatcatggtaaacattgaaatagtacaagctaccacaaatactgtccatgtcatccagataggaatggattcatacaaaatagcaccgatcaccaacagctgattgccaagtgcagtcgcacctaaccagcctccctgcataataccctggtatttcggaggagctactttagacacaaatgaaattcccaacggagaaatatacaattcagctaccgtcaaaatcagataagtcagcatcaacaagaacggagtcactttcaccggtgaagttcctacagcgataatgtccttgtgcaaaggcagattggcaaaataagaaccgacagccattacgataaaggccaatgcggcaatacccataccaattgcaatcttcttaggagtagaaggctcttttccacgtctgcgctggctggcaaagattgccataatcacaggagtcaggaaaacaacaaagaacggattcaacgactggaacaactcagcggaaataggcataccaaacaagttaaggtcagtgtattcctttgcaaagtatgtcaaagtcaaaccattctgatggaaagagaaccagaagaagataacaactccgaacactgcgaacagggcatacatacgttgtttcacttcctgaatactcatttctacagtagccgaagatgctgaagatgcaacggctttcttgctgggatcggggaagtttctcttattcagcaaatagatagtcaaagaaatgaccatagcaatgatagccactccaaatgcataatggaaacctgtagtaaagacgttcaggtaatcggatgcaaaagctgtataatcctgtaccggagcgttggaagctttctctaccaacgtatgataagtttcagtagcttcgggcgacagagtaccagccaaatgaccgtgacataatgcaggaagatcagcatcgtaattataaccgaaagtagacaaccaccagttacgtacacctaccgctgcaaacggagcaaagattgcaccgatattaatgaacatataaaacaaggagaaaccggagtcacgcatgctggcatattgaggattatcgtacatctgccctaccagagcttgcagatttcctttaaataatccattaccaaatgcaatcacaaacaagctggtgcaagtaatgaccagataaaaggtctgattgtctaccggagtcttggatggaatagccaacaacaagtatcccactgccatcagcacaattcccgtgaaaatagttcctttgtagtttcgtgtcttatcggcgataatacctccaaccaaagcaagaatgtaaatggaaaaatagaaagttgaataaataaatcccgcttcttttccattcattccaaacttagcttgcaagaaaagcacgaggattgccatcattgtatagaagccaaagcgttcacctagattggctaaagcggctgctatcagtcctttagggtgtttgtcaaacatagatataaatttattaattaatgattgataatttttctaatgacatatattctgcaaatatatacttttttggatttattcctcaaataaacggcaaatttctgccctcgattcgcggattaaatcacccggcgcaagctttatctgcagcccccgtacaccggcacttatataaatatacggaaattgccggcaggtttcatgaatataagtaggaaaatgtttcttcatgccaataggcgaacagccgccccggatatatcccgtcagcggaagaagttctttcaccggtatcagatcacactttttattgcccgaagcctttgctgccagcttcagatcgacttcgtgctcacccggaatgacgcaaacaaaataaccgcttttgtcaccgtgaagaaccagtgtcttaaatacctgttctatattctcgcctaagctggcagctacatgaatggcactcagatcgttttcgtcaacttcataaggaatcagttcataagctattttagctttatccagcaaacgcgccgcattcgttttattgattttcatcttgttgtttctttttagtaaaccgacacttatacttcaatattaaagtcctaattcctcgcgaagaaacttaggagtataacctttctggctcttcgcaacctcttccggtgttccgtagctaaggagtactcccccgcccttaccaccttcaggtcccatgtctatgatataatccgccatcttgataacgtccaggttatgttcgattacaatgacggtattacctttgtccaccagcttattaagtacccccatcaatacacggatatcctcaaagtgaagtccggtagtcggttcatcgagaatgtaaagtgttttaccggtatctcgcttggacaattctgttgctagtttcacacgctggctctctccaccagaaagggtagtagatgactgccctaatttaatatagcccaaaccaacatcctgcaagacttttatcttattcagaatctgcggcacattctcaaagaattcgacagcacggtttatagtcatatcaagcacatcagcaatagactttcctttgaaacgtacttcaagcgtttcgcgattataccgcttgccgtggcaaacctcacaaggcacatacacatccggcaagaagttcatttcaatcgtcttgtatccatttccggtacaggcttcacaacgaccgcccgatacattaaaagagaagcgtccgggcttgtaaccgcgaatcttagcttccggaaggcttacgaacaagttacggatatcagaaaatacacctgtataagtggccggattggaacggggggtacgaccaatcggagattgatctacgtccactaccttatctatgttttccagtccctctatagaatcgtattccagaggatcctgcaaagagcgatagaatttctgtgaaagaatcggctgcaaagtctcattaatcaacgtcgatttaccacttccggatactccggtcacacaaatcaacttccctaacggaaattcaacatctacatttttcagattatttcccttcgctcctttcagccagatagattttccatttccttttcttcgcttggcgggtacttctattttcatctctccgttcagatactgcgaagtcatcgtttcggtttgaagcatttctgacggggttcccgagaagactacctccccacccagacgaccggctttaggccccatatcaatcacataatcggcagccagcatcatatctttatcgtgttcaacaacgataaccgagtttcccatatcacgaagctctttcaacgagcggatcaaacgcagattgtcacgctggtgcaacccgatactcggttcatccagaatataaagcacattcaccaattgcgagccgatctgtgtagccagacgaatacgctgactttcaccaccggacaggctgaccgagctacggttcaatgccaaataatccaatcctacatccaacaagaatttcaaacgcgtacgaatttctttcagaatctcggctgcgattttcttttgtttatcggacagaaattgatctacgttcatcaaccagtcatatagctcattgatgtccatattggccaagtcattgatgttcttgtcatgaatacggaagtgcaatgcttctttattcaaccgggcacctttacattccggacaaacagtggtacgggcaaactgctccgcccacttctgcgcggtagcagaagcatccttttcctgaagcatctggatatattttacgactccttcataggttacaaagtaatcagaagaagttcctatcagcgaactcttgatcttgatccggtcatccgaaccatataatatttcttcaaccgcatcatccgacaattccttcaccggagtttttaaagtggcttcatacttctccagcaaagcaccgatctgccagaaaatcatggcattcttgtattttcccaaaggtgctatcgctccttcatagatggaaagttcacggtcgggaatcactttatcgacatcaatctgattgaccacgcctaatcctttacatttcgggcacgctccctgcggagagttgaacgagaagttatgaggagccggttcccgataagacagtccggtaaccggacacatcaggcgtttactgtaatgacggacactttctgtctgcgcatcaagaatcatcaataaaccatcaccttggcgcatagcagttgccacgctctgtttcagtcgtttatcatctttctcggctactatcagtttatcaatgactacctcaatatcatgattcttgtaacgatcgagtttcatgccgtgcgtcacttcacgcagttcgccgtctatccgtacatagagatatcctttctttcgcacctgttcgaagagttctttataatgtcccttacgcgaacgaaccaagggtgcgagcaagtatattttctttcctttataatctttcaggattaaatccagaatctgttcttccgtatatttcaccatctcctctcctgacaggtacgaataagcaatacctgcacgggcatagagcagacgaagataatcgtatatttccgttgttgttcccacggtagaacggggatttttattcgtagttttctgttcgatagagataaccggactcagccctgttattttatcgacatccggacgttccagattccccaaaaagttgcgggcataggccgaaaaagtctcgatatagcggcgctgtccctcggcaaatatcgtatcgaaagccaaggaagatttaccactaccactcaatccggtaatcactgtcaaactgttacggggaatttcagcatcaatatctttcaaattgtgcacacgggcaccatacacattaatatattctgtttcttgcatattcatatccttcataaacggtacaaaattaatgtttccgactgaaatatgctcctaaaaaagcacaatattattttcttaactcaaatcttatgaagatatagggcattattcgtacctttgttccttgatttcaagaaccaatagttataaattgatgaaaccgataagccgaatattcttatttttgctttttataagcgcctcatacgctattagttatgcacaagagaaccaatcttatttcttgcataccatcgaaaaaggacagagtttatactccattgccaagatgtataatgtcacaacaaacgacatcatacgtctgaatcccggatgtgatgagaaaatttatgccggacaagctataaaaatccctaaaggaaaagaaagccaaaaaggggaaacattccatacgattcaagccggagaaactttatacaaactgactaccatttataatatatctgcaaaagccatttgtgaagccaatccgggattaagcgccgaaaacttccgtatcggtcaggttattctcattccgttggaacaagagcaggaaacggaaactacgcaaacaccggctgaaaaacccgctatacaggggcctgtacaatctagatgcaaagatatgcataaggtaaaacgcaaagaaaccgtattcagtgtaagccgcgaatatggaatcagcgaacaggaattgattgcagccaatcccgaactgaaaaagggaatgaaaaagggacaatatctctgtatcccctatcccagtgcaaccaccatgcaaccgacgactcccaaagaggatccgtacgctatcccccccagtaacaatgagcttttccgcaagagcaaagaagcccctcaggcaatctctactatcaaagcggccctgctattgcctttccaggaagacaaacgtatggtggaatactacgaaggtttcctgatggcggtagacagcctgaaacgtacgggtacttctattgatctatatgtatatgactgtggaaaagatgtttctacattaaatactattctggcgaaaaatgagatgaagaacatgaatgtcattttcggtccgatgcaccagcaacagatcaaacctttatctacttttgcagaaaagaatgatatacgactggtgattcctttctcttcgaaaggggaagaagtatttaataatcctgccatctaccagattaataccccgcaatcctatttatattcggaagtatacgaacactttacccgtcaattccccaatgcccatgtcatctttattgaaccaaccagcgaagataaagaaaaagccgagtttatcagcggcatgaaacaagagctgaagagcaagggaatgtcaatgaaaaccgtcaatgaaaacgcaaccaaggatatgctgaaggaagctctccgctctgacaaagacaatattttcattccgacttccggcaaaaatgtcatgttaatcaagattcttcctcaactgattctactggtcagagatactccggagcagaatattcatctgttcggttatcccgaatggcagacatatacccgggatcacctggaaagtttctttgaactggatacctatttctattcatcgttctacacaaatacattgtttccggctgccatacagttcaccaacaattatcacaaatggtatagcaaggacttggtgagtaaattcccaagctacggaatgcttggtttcgacacaggcttcttcttcctgaaaggcttgtcacgctatggctcggaactggaaaacaatttaccgaaaatgaacctgactccgatacagacaggcttcaaattcgaacgtgtcaacaactggggaggattcattaataagaaagtattctttatccatttcacgaagaattttgaattagtaaaacttgacttcgaataagacgaaaatgacaaagataaaatcacttctgattgccgcttccctgatgatgggacttgcacttcctgccaccgcacagatcggcgaaccacgccagaacttttctgtcggatttaatggaggtgtcaacttaaacagtgcttcattcactcctaaaatcaaacagaactcattgatgggtattaccggaggtttgacggcacgctacatttccgaaaagtattttgcaatgatctgtggtgcgcaagtagagttaaatatctcacagcgcggctgggatgagttattcgaaatcatggatgaaaatgggcagaccgtagaagatcctacccgcaagtacacccgaaagatgacctatctcgacattcccttcctcgcccacttggctttcggcaatgaaaaaggactgcagttctttatcaatgcaggtcctcagatcggtcttctgatcggtgaatctgaaagcatggagaatatagacatgaatgccctgacagacactcaaaaagctgtttacggggataaaatccaaaacaaattcgattatggtatagccggaggcggcggaatagaattcagaacaaagaaagccggtagttttctgctcgaaggacgctattattttgctctgtcagacttttacagcacaacaaagaaagactatttctcccgtgcggctcatggcacaattacagtgaagctcacttatctattcgatttaaagaaataagaagcaatacccaaaaagatcaggcgcgaatctcgctcgaacctacggtttatatttccgtgagtctgcgaaatttgcgcctgttttattctatcaggaactcccaatgcgagagcttcccgcattcttatcgaagtctgtctgcagcctttaccatcacctcgtcacgtccgatagcacgaatagccagcacattcagaacgatagacaccaatggtaagcaaagcgcccaaccaatacggaacagattggcatcgctcttcaatgcaaaataaaaagcaatgaaggcaatataatagcccaccagcaacaagctattgaagattgacatacgaatctgcaacattcggttcttatacagaaaaatagtcgcaaaagctaccagagcgctcagcatcagaataccaaatatcccccaagtagactggaaaattccattcacgtctatccccagtgctttaaaaggatgttctcctgtagtgtcaataaaatatcccatcggtaaacacattgctgtaatcagcaaccctgttacaatcaataagtaaaaactttgaattcgttgaatcataagtattctatagtagttaagttaaacaataatagccaagcaataaggaataggaaaatgcttcccgcttactacttgactatcaattctttcgttagaaaataaattactgaagtttttctttctccttagccggatttctataataaattttcccttcgatgtattcctgtgtagcaatcaagtcaggtttcggcaatttctcataataacgagaaatttcgatctgttctctattctcgaatacttcttccaaattatcgttgtaagaagcaaactctgctaatttcttagaaagatcgtttttaatttccacactaatctggttagcacgcttaccaataatggcaacagtttcataaacattccctgtgtcagcacagagttccatcatgtcacgggttaccgtcgtagcaggagcgttcgtttttttgtagtccataaatctatttaaatttagtctttaattactttctgtgattcattgaatatcttttcagcctcttttaggtatttactttccggaaactcattcttgaaagcataatattcatctatcgtttcacggtaacgatccatcttcttgtcttctacactataaatggccatttcatgtctggcacgcagaatcaatatggaaagttcttcgcgataatctgtataaggataatctttcagagcattctgagctgtaattacacaggattcatagttattacccagatagttacccagattataatacaactttgcagaatagagttctttcaacaccagtttatcctgcaaagcaaaaatcatatcttgtgcttcctgcttcttggtactgttcgggaaatattccataaacatctgcagttgctggatagcctgataagtgcttgattgatccaaacgtggttccggagtatccaggaacagggatttacctgcatggaaacgtgccagttcagtgaaagtaccacggggataagtgttgaaataggtgataaacgtctgggcggctgtctgataatctttctgattatagtaactcatacccaacatatacagagactcctccgctttatcggttcccttaaggattgtaatcaattcgttcagcaaggtagctgagcggttatactgccctttagcaaaatagtttttggcggcctcgtacttgtattcgtaatcggtacttttcagcaacttattgtactctccacacgatgtcagagaggctgctgcgagcaaagttataatgatatttttcttcatccttttaaaaaatattgtgcaaagttacttattcgcggggaattaaccaattaatctatgttttttaatacataaaaggcgttaaacatcgacgaaaagagaaaaaacgacgtcgaacaggaagctataaacagtcaataataaacggtgaacgatcaacaagcgcgctatatgtcattggtataccagcgctatcgttcttcgttcaccgttcgcttatggtccgccgtccggttacagcttgtacaaatcacttgccgccaacaggtcgactttcttttctttcagtacttcaatacatttatccatattactaggacgaatcacaacgtttgccacgttattattggcaaacgaatacatatactcaataaagaccccttctgccgacaagaatcccagcacttttgccagagctcccggcacattcggacagctaatgccgaccacatctgttatattcacggcaaaatgattatctttcaatgctttatatgctttatccggatcggatacaattccacgcaaaatgccaaaatcagcattttcagcgatgcacaaggcagaaagattgatgttctcttttgccagcacttcagtcacttccgtcaaacggccggacttgttttccaaaaagatagaaagttgttttgctaccattatcgtaaagttttaagtattaggtattaagtaataagtattaaatattaggtaataggtaatagccacacggattccatgttgcagctacgataatacctaatacttattacctattacctattttaaatttttctgttatcaatcactcgtttagctttgcccacgctgcgttcaatgctacgcggttctaccagtttcacattgactcccagtccaagtacgctttggagacggcttgccagtttcttcttcaacgctagcatacggttaatctcatccgaatagaaatccgggcgcacttctacctgaagttccatcgtatcggtattgttttcacgccccactatcaacaaataatgtggttcgaattcttccatctcaagaatgacggactcgatctgagtcgggaatacattgacaccacggataatcagcatatcgtcactacgtcccaggatacggtccatacgaaccaatgtacgcccgcaggagcatttatcataatgcaaggccgtcaagtcacgcgtacgataacgaagcaatggcattccttccttcgtcaggtgcgtaaataccagctcgcccgtctgtccgggttctaccggctgcaatgtattcggatcaataatttccgggaaataatgatcctcattcaagtgcgtaccatgctgacattcacattcgtaacctacacccggtccggcaatttcactcagtccgtagatatcatatgctttaataccgagtttttcttcgatttcatgacgcatattctccgtccagggctccgcacccaaggctcccactttcagttggaattcctcccgcggatagccggaatctttaatggcatccgccagataaagtgcatacgaaggagtacagcaaagaaccgttgatccaaaatcatgcatcaatgtaatctgcttttctgtattaccactggacatcggaatcacagaagcaccaatattctcagctccggcgtgtgctcccaggccacccgtaaaaagtccgtaaccataggaaacctgaaatatatctgagcgtcctgctccataagcagtaaaagcacgcgatatacattctgcccacgaagaaaggtctttgcgggtatatcccactaccgtcggctttccggtcgttccggaagaggcatgaatacgcacgatctggctcatcggcacggcacaaagtccgaaaggataattatctcttaaatcatgtttcgtggtaaacggcagtttcacgatatcatcaatcgtattgatatcatcgggggtgatacccatttcctgcattttcttccggtaaaaaggcgtgttgtgataaacgtaatccacaattttcttgagtcgtatgctttgaatcttgcgaagactttcgcggtccatacactcaatggtctcattccaaatcatgttctcttggtattattagttgtatgaatctgtttcatgatattaatatgttgcaaagtaaaggatttatttggaaaaatgatttgttatctcaattattttgccgaatattgctccactttttaggatttaactatgaattttgaactaacatcagcttacaaacctaccggggatcaaccagaagcgatcgcccagcttactgagggggtacttcaaggagttcccgcacagactttattgggggttaccggatcgggaaaaacgttcaccatcgccaatgtgatcgccaacatcaacaagcctacgttgatcttgagccacaacaagacattggctgcgcagctatacagcgagttcaagggatttttccccaataacgccgtagaatattacgtttcatattacgactactatcagccggaagcctatctgccaaattcagatacctatatagaaaaggatctcgccatcaatgacgagattgacaagttacgtctcgccgctacctcctccctgctttcaggccggaaagatgtggtagtcgtttcctcagtctcctgtatttacggtatgggaaacccgtcggatttctataaaaatgtaatcgaaattgaacgggggcggatgcttgaccgtaatgtttttctgcgtcgtcttgtggacagcctgtatgtccgtaatgatatcgatttgaatcgtggcaacttccgcgttaaaggagacacggtcgacattttccttgcgtactcggacactctgcttcgtgtcactttctggggagacgagattgatggtatagaagaagtggacccgattaccggtgtgactaccgctcctttcgaagcttataagatctatcccgccaatttatttatgaccaccaaggaagctactcttcgtgccatccacgaaatagaggatgacttaaccaaacaagtagcgttcttcgaatctatcggcaaagaatatgaagcgaaacgattgtacgagcgagttacgtatgacatggaaatgatccgggaattagggcactgttccggcattgagaattattcccgttatttcgacggtcgcgctgccggcacccgtccttattgccttctcgatttcttcccggatgactttttgctggttattgacgaaagccatgtaagcgtgccgcaggttcgcgccatgtatggaggcgaccgtgcccgtaaaatcaatttggtagaatatgggttccgactgcctgccgcaatggacaaccgccctctgaaatttgaagaatttgaggagatgacaaaacaagtgatttatgtcagtgctaccccggcagaatatgagctgatacaatcggaagggatcgttgtagaacaagtgatccgccctaccggtctgcttgatcctgttattgaagtacgcccgagtctcaatcaaattgacgacctgatggaagaaattcagctgcgtatcgaaaaagaagaacgggtacttgtaacgacacttacgaaacgtatggcggaagagctgacagaataccttctcaacaataatgtgagatgtaactatatccatagcgatgtggatacattagagcgtgtgaagatcatggatgacttgagacaaggcgtttatgacgtacttatcggtgtcaatctgcttcgtgaaggtcttgaccttccggaagtatcccttgtcgctattctcgatgccgataaggaaggcttcctccgttcgcatcgctcattgacccagactgcaggacgtgctgcccgtaatgtaaacggaaaagtaatcatgtatgcagataaaataacagacagtatgcggcttacgatcgatgaaacaaaccgtcgacgcgagaaacagctcgcttataatgaagcgaacggcatcaccccacaacaaatcaaaaaggcgagaaacttgtctgtatttggcagtccaggttccgaagccgatgagttgctgaaagaaaaacacgcttatgtggaaccttcttcacctaatatcgcagccgacccaatcgtacaatatatgagcaaagctcaaatggaaaagagcatagagcgtacccgcaaattaatgcaggaggccgccaaaaaactggaatttatcgaagctgcccaatatcggaatgagctgctgaaactggaagatttgatgaaagaaaagtggggataaacggcttataaatatcaataaatctataagaaacccgagcttttgctaattagtgttataaaaacacctatttaagagaaataatttgcagatttcgcaaaagcccgtatctttgcactgtgtttttcatagtattagatttaaggttaacaaaggttggagcaaggcgttgctcctttttttatgcccataccccatcttagcatcttccaatcctacaaaaataccccttgaaatcttatcaaagggcattttttatctacactctatctataattaaagcgctttttcaatagcctgtttaatgagtgcttccatgatatcatatccttctcctgtaggatgtaccccatctttcgtatattgaggattcaaggccttattctcgcccaccaccattggctgataataattcacaaacggaattttattagctttggcgtaagcttctatgcgggcattcaatgactgaatcttttgaggagcatctttaatctcccgtctccacggaaattcagcagccggcaatactgaagtcagaatcactttgattttatttgccttcgccagttctgccatagatgcaatatttccgaatgtataatcttcattataagcacctgtattttcggctacatcatttgttcctgcattaatgacaaccaatgccggagaaagattgatcacatcttccctaaaacgaagtaaaaactgataagacgtctgaccactgataccacgaccgatatatccatttgttttgaagaaatcaggatgtgtcctcacccatccttccgtaatggaattgcccataaagaccactcttttttccttctttacaggttgtgcaagtgctgcattctctgtcgcataacgcttgtaattagcgaactcatgtttctgtgcataggtctctcctactgagaaactcaaacaaacgatggccaacaacatccattgacccagtcttttctttttcatatacgtatataaagattagtaattcaaattggttgcaaagataaaaaaactctttatatgaacgatcaaataccgaatatccgttaagcggaaaggagaaattcttaatctatgttatataacataagatttttcttggttaatttgcaaagttcacagaagtccgtatctttgtaatgtgtttttcatagtattagatttaaggttaacaaaggttggagcaaggcgttgctcctttttttatgcctatacgcttggtttcctaaaaaagaatggtatttttgtgaatcttaataccctaaaaaaaactgccatgaaaaagctcattactcttttatttataagcatacttagccttcaggtttattgttccgcacaagaaatattaaaagtggattatccggctatcaaagagtacgtaactaatcacaatacggagtttcaaaagctcatgcaacgttttgaagaaaatgatactttactcacccggcaagatcatgccatgctatattacgggtattcattcacaccagcttacaaaggaagtatggatgattttcaggatttccgaaagttgattaaagaagaaaagtatgaagatgcttataatatcggcaaagaactactaaaaaagaatccggtatctctccaattactatataatatgtacggaatagccggtttgctccagaaagatatccgggaaataaaacactattcaaaaagatacgcagccttgcttactatgattgcgcttacaggtgacggtacaagcgaagaaaccgcatttaaggttatctgcgtaaatgacgaataccaactgctgaacatgttattcaaaatggaaaacatgaaaggtcaatcgctagtcaataaatgtgatctgatagagtttgataaatgccagtactatgaaggaaatcaaatgtatttcgacattagccgttcccttgattatatgagtgaattattcggaaaatgaaaaaaaagctattctatatcacactgataattgccatactttgtgttatcagtatctttatctgcgactggaccatcaagaagaatgcagcctcctgcatctatactgaaatcagtgatattcctgcaaacaatgtaggtctgcttctcggcacctctcctaagctgaaaagcggaaataacaatttatattttgactatcgcattgatgcggcggttgaactgtacaaggcaggcaaaattaattatattcttatcagtggagataatcgcaaagaagattacaacgaaccggaagaaatgaagaaagcgcttatgcaaaaaggtgttcctgaaaagtctatctatttagattatgccggttttcgtacccttgactctgttgtgcgtgctaaagaagtattcggtcagacccgtctgaccatcatttctcaacgatttcacaatgagcgggctatttatcttgccgaaaagaatgggattaccgccatcggttttaatgccagggatgtagacgtctatgcaggattgagaaccaatatcagagaattatttgcaagggtcaagatgtttatcgatttagcgatagataagcaaccgcatttcctgggagaaaagtacaaactgccatccggcaaataagaaaatatcaaaaacaaaaagttattgaaaaatttatggaacaacaacctcaactcaatgatcacaacaaacaggagtatcctcctatgcatacagcagagcatttactaaatgccactatggtaaaaactttcggttgccctcgctcaagaaatgcccatatagaaaggaaaaagagtaagtgcgactatattcttcctacttgtcctacagatgcggagatacaagcgatagaagataaggtaaacgaagttatcagtcaaaatctgcccgtaactgttgaatttatgactcatgagcaagctaaaggcatcgtagatctgagcaaacttcctgctgacgccagtgagactcttcgcattatacgcataggagattatgacgcctgtgcctgtatagggttacatgtatccaatacctcagaggtaggaactttcaaaatcatcagtcatgattataatgaagaaaggcaaactttaaggttaagattcaaactcattgaaaaaaaatagattatcaaattaatatctatattatataaaataaatatactgcggttacattttgtcacaaaacaggcaaaattggcattattaaaatgacaaatagacattttcaatctcagttttcctttggcataaggtttgcactaatagcagtgaacgacggttcaaaagcagacggcaagagtcgggatacccccctctgcggaaagcagcgaaccgaaattcaagagtgaataaaccgaatgtttaactaaaagataggagactaagattatgatgcctgttagaagaactcaaagttggttaccaagtatttttaacgatttctttgataacgattggatggtaaaagcaaatgcaactgcacctgcaatcaatgtttttgaaacagaaaaagaatacaaagttgaactggctgctccgggaatgacaaaagaggacttcaatgttcgcattgatgaagacaacaacctcgttatctctatggagaagaagactgaaaacaaagaagagaagaaagaaggtcgctatctacgtcgcgaattctcttattctaagtttcagcagacgatgattctgccggataatgtagataaagaaaaaatttctgccgcagtagaaaacggagttttgagcgtccaacttcctaagatttctgaagaagaagtgaagaaggccgaaaagcaaatcgaagtaaaataatacagtaaccacgattcatcccaaggggtgaaaacaataataaaaacagctcttttccaaccaataaggataagagctgttttttatataatcaaattctcaattattgatttttccgataactgatcaccgcccaggtattgaaacccagtgcaaaaagaagcaggactcctatttcaggcagcagttccaacaagctgcttcctttgaggtataccatacgcattccttccataaagtacttcaaaggattgaaataagtaatcacctgtgcccattcaggcatactgctcaccggagtgaataatccgctcatcaacatcagaatcagcataaaaaagaacattacaaacatagactgctgcatagttgccgaataattggatataacgagcccgaaaccggacataacgaatacaaacaaaatcgccaaaaaataaatcacgatgaaatgccctacaggagttattccataaagcagccaggctaacaaaaagcacaaagtcaatacgataaagcctgtgatccagtaaggtaaaagtttagccagaataaaagtaaatttcggtacgggagtcacattaatctgttcgatcgttcctacctccttctcactaaccacattcagggcaggcaaaaatccgcatatcaaagtcaacaacattcccatcaaagcaggaatcatataaagtttataattcagattcgggttaaataatccctgcgtatcgatacgaatggaaggggcactgcccgacgcagatatggcatcaggatattctgcacgtaactcggctgcatagttcttgataatagtgcccagataagaactgcctagccctcctttcgttccatttaccgaattggctgcaatcagtatatgggcttctcctttgttcacccagtcccgctccaggtgcctggggatctccattataatatccgctgttccctgttcaatattccgtaatccatcctcataagatgccggcacttccgtcagacggaaataggtagaagccgcaatcttattcaccagccgctgagaaatcaccgaatgatcgttgtctacaatattcagctggatattctttatttccagattcacagcccatggcatcagcaacatgatcatgcagggaaagataagaatcaatctcggcaggaacgaattgcgaagcaactgtttaaactctttttctatcagaaattttatcataataaattcctttattccaatcgatatttaaatttcctgatactgatggtaataagcactactgccatcagcaacaaaataccaatctctttaagtaccagcacaaccggcactccttcaatcatcagtttgcgcacagcctgaatataccagcgggcgggaataatatccgatatggcccggagaatcaccggcatactttctaccggaaaaatcattccggacaaaaccatggtgggcatcatcaatatcattccggatgccagcatggccgccacctgtgtacttgtcacagaggaaatcagcaaacccaaagccagcgacacgaaaataaagagcaaagacaccatcaccaaccagaacaaactccccactaccggcacatccagtacaaagactgaaagcagcaaaatggttgtcagattgacaaaagataaaacaaagtaaggtaccgccttggccagcacgataaacaatggtcttaccggagataccagcaatacttccatcgtgcccgtctccttttcacgaacaatggaaatagaggtcatcatcgcacaaatcagcattaaaatcagccccatgactccgggcacaaagttgtaggcactcttcatctgcggattatacagcaatttgacatctggagtcaaacgcgaaacgaacacattgggaggcaacatctcctgtcctgccgaagaaacaatgctggctgcataattactctgcgaggtagacatattgggatcggttgcatcgactatcagctgcacacgggcatcccccgtataaagtccgtcggcaaaacgctctccaaatacaattgccatatctatcttatttttccggaaggcagtttccatctcctgtggagaatgaaaacgggtggtaaccgtgaaatattcactcgcatccaaccggtctataattttccttgtcaccacatcattcgaaggatcaagaactgccagccggacattcttcacttccgtactgatagcaaacccaaacagaataatctgcacgaccggcattcccaacaggatcagcatagtacgccggtcacggaaaatatgataaaattctttctttacgaaagcaataaattgtttcataatcaatccgctttacgcaccgcatggcgggcaagttgttgaaacacatcatccattgtctccacaccaaactgttctttcagccgggccggcgtatccagtgccttgatctggccgtccaccataatcgatatccggttgcaatattccgcttcatccatataatgtgtggtaacaaatacagtgattccacgatcggcagcctgataaatcagctcccagaactgcctgcgagtagcaggatcaactcctccggtcggttcatcaaggaagactattttcggctcatggaagatagagacagaaaaggccagtttctgtttccaacccaaaggaaggtttttcaccaacgtatcccgttcgtctgcaaatcccaggcgttctaacaattcatctgtcttttcttcaatctccatctccttcatcccataaattccggcaaagagacggatattctcccagactttaagatcctcatacaaagagaatttctgactcatatatccgatatgccttttgacttgttcggcttcccgaaagatgtcatagcctgccacctttcctactcccgaagtcggacggctcaatccgcaaagcatacgcatcgcagtcgtcttacctgctccattggctccaagaaaaccgaaaatttctccccgctgcacttgaaaagagatatgatcgactgccgtaaaatgtccgaaggatttggtcagctgctccacctcgataacaggagctgccatctgttgcgcctcctcccgttccaagggtggcggacaaagaatggaagcaaacttctgaagaatccgttcgggcgtatcgattccgtgcacctgcccgtgattaataaaagcaatccggtcgcattgacgagcctcatccataataggagtggaaacaatgatcgtaatcccctgttttctcaaattacggagcatctgccaaaattctttccgagacacaggatctacacccgtagtcggttcatccagaaataaaatatcaggtttatgaatcagggaacagctcaatgccagcttctgcttcatacctcccgacaaagcacctgcccttctcttcttaaagggctcgatctgctgataaatatctttaattaaatcatagttttcctgtatcgacgtatgaaataccgtagcaaaaaattccagattctcttctacggaaaggtcctgataaagcgagaaccgtccgggcatatatcctactttcgtacgaatctgcttgtaatccgtcaccacatccagtccgttgacagttgccgtacctttatcagccagcagcaaagtggtcagaatgcggaataaggtactcttccccgccccgtcaggaccgatcagcccgaaaatttctccctgctctaccgcaaaagaaatctctttcagtgcctctactttcccgtagctcttgctgacttcctttacaacgactatgggttctcctttttccataccacacctccatacataccaatcttcaacgaaccgtcatttttcacggcaatcttcactgcgtataccagattggcacgttcatttttagtcagaatcgttttgggggtaaactccgaacggtccgagatccaagtgaccacaccgggataggctttctgttccgaatttccataatcggaatacaccgtcacttcatcccccaatttcacttgggacaattgctctgaagtaacataagcccgcaaatacatccggtctacctcacccactttaaacagcggtttgccaacggatgccagttctcccgtttccgcatattttgccagcaccgtgccttcaataggcgactgaatatggcacttgctcaactggtcttccacctgtgccacttgtataccgaccgaatttccctgttccgtcagactgttcgtactcttcatcaatgaggattcctgagcaatcaactgccgctgaagcaaggttacctgtgcatcccagtcatccagttgtttctgattggcagctccggcagcaagcaggttctctacccgcttcttttccctttgcgctgtagtaatttgctgtttggtagcagctatctgtttggccagatcgggacgctggctttccaccgatttcatacttgcttccagttgcaactttttcagatatagctggacggtatctaccagccctacttcttcgccggctttcaatctcgttccttcttccacttccagttgcagcagttttcccgccgcttcggcggaaacaatcacttccgtagcctcaaaggttcccgttgcatcataatcgggcgttccgttcccacaggcagaaagcaaccatactgccatcccgtatattcctatttttgtcattcgtttcatatccgaaagatttttattaatgattagtagtatatttcaattgatagatacccatcaatcgttgaatctcatgcattgccttcgcctgacgggcaagactttcattcgtcagttctctgagcatctctgttactgtcaacgtaccattcgctactttggcttccgcagcccgacgaatattcgtacgcaaccggataatttcatcatcatcctgcatctgcttctccaacgaacggacagactgatcttgctgcgtcatttccagtctcgtattaaaaagaaacacatcccgattgctatccagttgcttccgtttattttcaatcacccgacggtcattcttcagcgtatacagactcccgaaattccatgaaagccggacacctgcaatataataaggagaaaattcattcttcagcatattcaatcccggattaccgtaagctccctgcacaaacaatccgatatgaggaagatggcgcacattcaaggctttctcttgtacctgcaaaccggccccttgtgcatcaaaccacgacagctccggtcggtgaatctcactgacagccgacaattcgttttgaagaacaggcttctccaatactgtctccggcgaaagcacctctcccatcaataacgaaagcatcttcaaataagccatacgggaaaaagtcagctccactctcttctgacgggtattcaactgctccactttcacagcatccaaatcggcctgattagctattccattttccacataagccgtaatctgacggaagttccgtcccagttcgtcttgcagcaaggcattctgagccaactgctcatccaacataagaattccaaaatacagatcattcacacggccattcaacgcatacatatcgacgttcaacttttccctgtcgatctccgcttccgccgtagcctttttcttctgcatccggattcctccgccatcccatatctgttgctgtaactccagcatcacctgatactggtctttagccatccctttgatatccacaccgggaatggtaataggcaactccgtcacatcactttgataagaagcctttgctgaaagagcaaactgaggcaagtatcccctcaccgcattttccagattatattctttcgtcttctccactaaatcatattgacgcaccaacggatagttatcctgcgttttttgctgacattcttccagtgttatatgtccggtctgcccatatattccggccatgaacagtaaaagcgaaagactaaaaataattcttttcatacgcattttttctatgaatttaaagatagacaaagatagacctttaagtaatagtttcacattctgatagttggaaaatatgtcccaatagttcgattcatcctaaaaaaagagaagattcaagggctatttcttatctttgccggaaaagaactgagaaaatggaacagaagaaaccgatggaattaggcctccaactgttgaaggatataaatatagtacgtcacaacgaatttcgcttcatcaatgccgaattcggctttgtgacaagtttctcaaaaatggaaacgactatcttcagtgtcggacaaccgtaccgactacaggaaggccgtattgctattgtcactaatggctcggcacgtgttttaatcaatttgattgaatatattttcctgcccgaccatatatccctgatagctcccaactctatcatacaaatcatagaagtatctcacgattttgatgctcacatgatggcagtagacctgaactttctgccgatatccggaaaggaagaattcttcacccatttcctccaacaaaagaaaaatctcctgtttccactgtctaccgaagaacaaatacagatagagaattttgtgacggtcatgtggagtgtattgcaagaaccagtattcagaaaagaggtcattcagcatttactggcaggattactatataatatagagtatatagccaaaagcaaagggcaggccgaactcagtccgttaacccatcaaaacgacatttttcagcgcttcatttctttggtcaacacctatagcaagacagaacggaatgtcagtttctatgcggataaactttgtctcactccccgttatctgaacactgtaatccggcaaactagccagcaaacagtaatggactggataaaccagtccattatactagaggctaaagtattgctaaaacatagcaaccgccttgtttatcagatatcagatgaattaaactttcccaatccgtctttcttcagcaagtttttcaaacgaatgaccggaatgacgcctcaggaatatcagaagaattaaaggattactttgaaaactcctttatccgctgttcttcatccagtttacagatcaacagtgtattatctttctcggcaatgatatatccatccaggccctgaataacgacccgtttctcttcactggtatgtacgatgcagttcttgctttcgtacaaacggacatcggcccctaccgtagcatttccggatttatcttgtggcaacagtccgcggagcgctccccaggtccccaagtccgaccaaccgaaagaagccggaagtacatagatttcctgtgctttttccattacggcatagtctatggaaatagcttcgcaggtagggaacagctttttaatcgtttcattttccttctccgtatagaaatcggggaaaatacgatcgaagatttgcgctatgcccggagcatatacacgcatcacggaagtgatagtacgcacattccatacaaaaattcctgcattccagaagtaattaccctcggccagatatctgtcggcagtctccctgtccggtttttccttgaatgcatctaccgtaaaaatctctttatcagtcatgatctgatctccggcagcaatgtatccatatccggtttccgggcgagtcggtttgatacccagcgttacgatagcactgctgttgtcagtaaaacgaagtgctttctctactacccggcggaattcacctgtattgataaccaatgcatccgacggagtcaccaccacattggcgttcggatgttttttcttgattttccagcaagcataggcgatgcagggagcagtgtttcgtgcacaaggctctgcaaggatattgctttcaggaatctccggcaattgctcccggacgatatcaatatatttctcagacgtcactacccacacattttcccgtggacagacgccatcaaaacgatcagcagtcagttgaatcaacgtacgcccgcatcccattacatcaataaattgcttgggacattccggtgtactcatcggccaaaaacgactaccgatgccaccagccataattacgatatgattatccatgctcatattactcccctgttttagaatatttgtgaaataattgcgcaatttacaccaatttgtccaatcatgcaacttatagacattaaaaaaagatagtgacactatacaggaaggatagtgtaagcatactgacaggatagtgacactatcccatgcttatagtgacaccatcccaaaaacagaaattcataaaaaaagccgcccccgaatgcacgggaacgacttttccaacttattatacaacaatttattatttcttacttatactcttcccagctcttgatggcaatatcatcaacggtcatcgtacagaaagcattgataaatgcacttgccagacgggcgttcgttatcaacggcacgttcaggtcgatagccgcgcgacggattttatatccattgtccagttctccggcagtcaggttcttcgggatattgactaccatgtcaatttccttattatgaagcatttccaatgcctgcggatgtccttcttcactcggccagtagacaagcgtactttcaatgccgttctcagcaaaggttttatgagtaccgccggttgcaaagagtttgtatcccttgtttaccaacatacgtgctgcatccatcatatcagccttctgcttcattgtacccgtagaaagcaggatgttctttttaggaatacggtagccgacagacagcatggctttcagtacggcacaggaagtgtcacttccgatacagccgacctcacctgtagaagccatatccactcccaatacagggtcagctttctgcaaacggttgaaagagaactgcgaagccttaattcccacatagtccagttcaaagagattcttttccggtttctccacaggaagacccagcatcactttggttgccagctcaatgaagtttatcttcagcactttgctgacaaacgggaaagaacggctggcacgcagattacattcgattaccttaatatcattatcttttgccaggtattggatgttgaacggaccggaaatattcaatgccttggcaatctcacggctgatgcgtttgatgcgacggacagtttccacatacaacttttgcggaggaaactgaatagtagcatcaccggagtgtacaccggcaaactcaatatgttcgctgattgcataggctatgatttcaccattctgcgccacagcatccatttccacttccttcgcatgttcgataaactggcttactaccaccggatgtttctttgatacattggcagccagtttcaggaaacgttcaagctcttcctgattggagcagacattcattgcagcacccgaaagcacataagacggacggacaagaaccgggaaaccgacttcatcgacaaactcgttaatatcttccagcgatgtcaactcacgccagcgtggctggtctacaccgatacggtcgagcattgcagagaacttttcacggtcttcggcattgtcgatgctctgagcacttgttcccagtatgtgaatgttctgggcatccagacgcaaggcaaggttattcggaatctggccaccggtagatacgatgacaccgtgcggattttccagttcaagaatatccattacccgttcgaatgtcagttcgtcaaagtagagacggtcgcacatgtcatagtctgtagataccgtttccggattatagttgatcataacactgcgccaaccttccttgcgaatggtattcagagcctgcacaccgcaccagtcaaactctacagaagaaccgatacggtaggcaccggaacccaatacgacaatggatttatggtcacccagataatgtacatcgtttgccactccgctataggtcagatacagataattggtctgcgccggatattcggcagccagtgtatcgatctgttttaccaccggaaggataccagcagccttacgatacttgcggacatacagacttccattttccatatcaccttcataaccgatagcacgggcaatctggaaatcggaaaagccctgttgcttcgcttttctcaattgacaattgacaaatgacaattgacaattaccttgcggatctttggttgcaagaacttctttcttcattgtcaattgtccattttcaattgtcaattgccgaagctccttggaggtttgcattatattcatcaacttctgaaggaaccatttgtcaatcttcgtcagttcatgcacctgatcgatggtgtatcctgcacggaaggcttttgagatcacaaaaatacgtttatcggtcggttcgcgcagtgctttgtcaatatcagggattactagttctttgttttccacgaatccgtgcattccctgtccgatcatacggaggcccttctgaatcgcttcttcaaaagtacgtccgattgccatcacttcacctaccgacttcatggaagaacccagttccttgtctacaccatggaattttcccaagtcccaacgtggaatcttacataccacatagtccaaagccggttcgaagaaagcagaagtagtctttgtcaccgagtttttcaagtcgaagagtccgtagccgagtcccagtttggcagccacgaatgccaacggatatccggttgccttagaggccagggccgaggaacgggaaagacgggcatttacttcgatgacgcgataatcttccgattcggggtcgaaagcatactgtacattacattcgccgacaataccgatgtggcggatgatacgaatagccagttcacggagtttatgatattcactgttggtcagtgtctgagacggagcaataacgatagactcaccggtatgaatacccagcgggtcaaagttctccatattacaaactgtaatacagttgtcgaaacggtcgcggacgacttcgtattcgacttctttccacccccgaagcgatttttccaccaacacttgcggagaaaaagaaaaggctttttctaccagtacatccagttgctcttcattgtcacagaaaccggagcccaagccacccagcgcataagccgcacggacaatgaccggatatcccaattccttcgctgcacgacgggcatcttccgcattttctacagcttcacttttaatggtcttgacattgatttcgttcagtttctgtacaaagagttcacggtcttccgtatccataatggcttgtacgggagtaccgagtacttttacattatacttttcaaggattccttctttatataaagcaactccacaattcagcgcggtctgtccgccgaatgccagcataataccttccggcttttctttctggattactttctctacaaaatacggagtgaccggaaggaagtaaatttgatctgccactccttcggatgtctgtacggtagcaatattcggattgataagaatggtttcaatcccttcttctttcaaggctttgagtgcctgcgaaccggaatagtcaaactcaccggcttcaccgattttcaaggcaccggaacccagcagcaatactttctttatattttctttcatgatagtcggttatttaagcaggtttacaaattcatcgaacaggaattccgtatccgtaggaccacttgcagcttcgggatgaaactgtgcagagaaccaaggatttttcttgtgtttgattccttcgttagaaccatcattcatattgatgaacagcggttcccaatctgcccccagcgtattattgtctaccgcataaccatgattctgcgaagtaataaaacaacgttccgtacccaccatgcgtaccggctggttgtggctacggtgtccatatttaagtttgtaaatctttgcccctccggctttcgagagcaactggttgcccatgcagattccaaagatgggaagtttctcgttcgccattgccttgcggatattctgcacagctgcatcgcaggtatccgggtcacccgggccgttggagataaacagtccgtcaaattcgagtccgttaaaatcataatcccaaggtacacggatcacttctacaccacgcttcaacaagcaacgaataatattggtttttacaccgcaatccaccaaaacaaccttctttaattgacaattgacagttgacaattgacaattaagctgcgcgacggacatggttaatggaaaagaacgggatgttccatcgggaagataggagattatttctttgcaggaaacacggtctacgtaattcacggcagcgtaattgtcaattgtccattgtccattgtcaatttcattgtcgaagacgatgcgtcccatcatgactccgtgttcacgaagtattttggtcagttcacgcgtatcgatgcctgtgatgcccggtactttctcacgtttcagccagtcgccgaggctttccactgcgttccagtggctgtactcagaagagtagtcacttacgatgatcgcttcggcatgaatcttttcactttccatgaaagtggcgagtccgttgggttcgatggtaaaaggaggaactccgtaattacccaccaaaggataggtaagagtcatcaactgtccggcgtaggaagggtcagtaaggctctccggatatccggtcatggcggtgttgaaaactacttcgcccgccaccggcttctcgtagccaaacgacttaccggaaaaccggctcccgtcgtcaaggattaatgtcacatttctcattcttatttttgaatcgttgtatggttgttagaattgatacatctgctcaatgtagttgataaatgcctgattcaccattttcacaccacccggcgtgggatagtttccactgaagtaccagtctccctgatggttcggacaggcttcatggagtccttccaacggttggtagacgatttccactttcgctttcgttcccttcggtgtcaggagttctaccatcttggcagatatttcttcatcggtgaacggcgcatagatatccttcacgtaattcaccatttgttctttcggcaatcctacctgatctttcgatttccggtaggcggcagcaatcacatccttcatatcccgctctttcagaagctcgatggcagctttgaaagcgataaattcgctcatcttcgccatatcgatgccgtaatagtccggataacgaacttgtggagaagaagatacaatcacgatcttcttcggaccaagacggtcgagaataccgatgatactttgcttcaaggtagtaccacgcacaatgctatcgtcgataatcacaagattgtcgacaccggaaaccagacttccgtacgtgatgtcatatacgtgggcagccaggtcattccgactgtttccctcggcaatgaatgtacggagcttaatatctttgatggcaactttttcactgcggatacggcgggaaagaatgacctccagctcttccatattgggatgatgccccaatgccgcaatctgccgtactttctcttcattcagatagtcatccagcccttgcaacattccgtagaaggcaacttcggccgtattcgggataaaggaaaatacagtatggtccaagtcgttattaatggctttcagaatattcggaaccagtttttctcccaagagtttccgttctttatagatatctacatcgctgccacgggagaagtagatacgttcgaacgagcaggcgtgccgctcgcgaggcttgttgatttgtgaagtccgcagtctgccttctttgctgatcagcaatgcctgcccgggttgcagttccttgattttttctacgggaacattcaaagcagtctgaatcaccggacgctcggaagccagtacggctatttcatcatcctgataccagaaagcgggacgaataccccacggatcacggatagcaaaagattcgccgcttccggtgagaccgcagatcacatatcccccatcccactcacggctggaagtacgcaatacgttggccagttcgatatgttcttctatataatgggtgactcccatccctgtcagtccttcggcttcagcaaggttgaagaggcgttccacttcacggtcaagacgatgccccacctgttccaacatgatataggtatcggcatacttacgtggatgctgaccgatagcggtgatgcgggcaaagatttcatctacattcgtcatattgaagtttccgcagagagccagatttttggcacgccagttgtttcttcttaaaaacggatgtacgtacgagattccggattttccggtagtagaataacgcagatgccccatatatacttcacccgcaaagggcaaagtacgtttggcaaatgccgcatcatgcaactgttcggaagtgaggtccttgaagttactctgtacagcttcgaagatttcggtgatggcaccggaacctaacgcgcgttcgcgaaacatatattcctcacccggatttgcttccagcttcacgcatgccagtcctgccccttcctgcccccggttatgctgtttctccatcaacagatagagcttgttgagaccgtacatccatgttccgtactttttctcgtaatactccaggggttggagcaggcgtatcatggcaacgccacattcatgtttcaattgttccattaatctatctcttactatttgactatttacattttaaactactcgactgttaccgacttagccaaatttctaggttggtctacatccatccccttacataccgcaatatgataagcaagcaactggagaggtaccgtagtaattaacggatcaaggcactcgattgtttccggaagttcgatactgcaatcggctattttactgatcaccgtatcgcccttggttacaaatgcaatcacctttccttttcgtgccttgatttcctgaatattgctaagtactttctcatacaacccgttttgggtagcaatgactactaccggcatttcggcatcaatcagggctatcggtccgtgcttcatttcggcagccggataaccttcggcgtgaatatacgatatttctttcaatttcaatgcaccttccaaagcaaccggataactatatccgcgtccgaggtaaataaagttatgcgcataggtgaaagttttcgacagttccgccagcttatcattcagtttcaatacttccttcattttgccgggaatgctattcaattcccgtacaatgttcaggtattgtgtctcgtctatcgtacctttctcccgggcgagagtcaatgccaacatggtcagcacagtcacctgtccggtaaatgctttggtcgatgccactccgatttccggtccgacgtggatgtacgaccccgtatgcgtagcgcgggggatggaggaaccaatcgcattacagataccatatataaatgcaccccgactttttgccagttccactgccgccagcgtatccgccgtttctccactttgagaaatggcaatcaccacatcgtgctcatcgatcaccggatcacggtaacgaaattcggaggcatactccacttctaccggaatacggcagaaactttcaatcagatgctttccgatcaatcccgcatgccacgaagtaccgcaagccacaataataaagcgtttggcgttcagcaacttttctttatagtctattactgccgaaagcaccacattattggcttccacattgatacgtccgcgcatacaatcgtgaatacagtccggctgctcaaaaatctccttcaacatgaaatgcggataaccgcctttttccagctgaccaagcttcaattctacttttttcacttcgggagtcatctccacattgctgagatcgactaccttcaattcttttccccgattgatcaccgctatctcaccatcttcgagatacaccaccttatctgtatattctacaatcggtgtggcatccgaagcaaggaaaaactcatcttcaccaatacctaccaccagcggactgctttttcgagccgcaatgatttcttccggatgttctttatcaagaatcgcaatcgcataagcaccaatcacttcattcaaagccaactgaacggcagtaagcagatcgacctgattggcaactttcatatattcgattaattgaacgagcacctcagtatcagtactacttttaaagacgtaacctttggcttggagtttttctttgagaacggcgtaattttcaatgataccgttatgaatgagagcgagtttttcggaagaagagtaatgaggatgagcattaacggaacaaggttccccgtgagtagcccaacgggtatgggcaattccgactgtaccggaaatatctttttgtgtgacgaaattttcaagttcggagactttccctttcgtcttgtacacatttaactgttggttatcactgatcaatgctacccctgcactgtcatatccacgatactccagtcgcttcagccctttaataaggatggggtaggcttttcttttaccaatatagcctactattccacacatattatgatatttttatttcgggtgcaaatatacacattcaaaatgacacaaagataactttttcaatatttatttgacataagcacataaaaaagttgcaaacacatcaaaacgttaaataatatattattttaagctcaaaaagaaacaaattacaatcaaaacaaaataaaaccggacagactgataaattataagcaaatcagagcattttgattacaaattaaaagaataaagaaaaggtatcttattttgtgtcacacaaaacaaacaatacactatcattatgaaattaaattcctaactttgccgaacaatttgatacatcaaacaggtattatcatacaataaagctaaaaagaatgaagaaacaagaactttttaacaacgcaacaggaaaaatcccctaccaacgacagcccggacaaatgggcttgtatgatgcggcatacgaacacgatgcctgcggggttggtatgctggtgaacattcacggagaaaagtcacatgacattgttgagtcggctttaaaggtattagagaatatgcgtcaccgtggcgctgagggggcggataacaaaaccggcgacggtgcaggtattatgttacagattccacatgagtttattttactgcaaggcatccccgtacccgaaaagggacggtacggcaccggtctgctttttctaccgaaaaacgagaaagatcaggcagctatttttagtatcattattgaagaaatagaaaaagagggacttacattgatgcatctgcgcaatgtacccacctgtccggaaattctaggtgaagcggctctggctaacgaaccggatatcaagcaggtctttattaccggttttacggaaacggaaaccgccgaccgcaaactgtatctgattcgcaaacggatagagaataaagtcagattgtcagctattccgacgagaaacgatttttatgtcgtttcgctctcgaccaaaagtattatatataaaggtatgctctcgtcattgcagctacgcaactactatcctgatctgacgaatagctacttcaccagcggcttggctctggtacactcccgtttcagcaccaacacttttccgacatggggactggcacaacctttccgcctgctggcgcacaacggtgaaatcaataccattcgtggcaaccgcggatggatggaagcccgtgaaagcgtactctccactcctatgctgggagatatcaaagaaatacgcccgatcatacagccgggtatgagcgacagtgcttctctggacaatgtgctggaatttctggtcatgtcaggattaagtctgcctcatgcaatggctatgctcgtaccggaatctttcaacgagaagaatccgatcagtgaagacctgaaagcattctatgaataccattctatcctgatggaaccttgggacggaccggcagccttgcttttcagcgacggacgatttgcaggtggtatgctcgaccgtaacggcctgcgccctgcccgctatctgatcactaaaaacgatacgatggtagtggcatccgaagtgggcgtaatggactttgaaccgggagatatcaaggaaaaagggcgcctgcaaccgggcaagattctattgatcgatacagagaaaggagaaatctactatgacggcgaattgaagaaacaactggccgaagcgaagccttaccgtacatggctatcgactaaccgtatcgaactggatgaactgaaaagcggtcgtaaagtgcctcatcacgtagaaaactatgaccagatgctccgtactttcggctattcaaaagaagatatcgaacggctgattatgccaatggcgagcgcgggtgccgaacccatccactcaatgggtaatgatacgccactggctgtactttccgataaaccacagctactctacaactatttccgccagcaattcgcacaggttacgaatccgccgatcgacccgctacgcgaagaactggtaatgtctttgacggaatatatcggagcggtaggcatgaatatcctgactcccagcgagagtcattgtaaaatggtacgtctgaatcatccgattttaagcaatacacagctggatattctttgcaatatccgctacaagggctttaagactgtaaaattaccgatgctgtttgaagtatccaaagggaaagccggattacaggaatcactgaacaacctttgcaaaatggcggaggaatcagttacggacggagcaaactacattgtactgaccgaccgtgacgtggatgcaactcatgccgttatcccttcattactggcagtaagtgccgtgcatcaccatctgatatctgtcggcaaacgtgtgcagacagcattgattgtagagagcggagaaatgcgtgaagtaatgcacgccgctttactactcggttttggagccagtgcactgaacccgtatatggcatttgccatcctcgacaagctggtaaaagagaaagatattcaactggactatgctaccgctgagaaaaactatatcaaatctatctgcaaaggtctgttcaaaatcatgagtaagatggggatttccactatccgctcttatcgcggtgcaaagattttcgaagctgtcggactcagcgaagagttgagcaaggcttatttcggcggactcggttcccccatcggaggtatccgcctggatgaagtggcaagagacgcaatcgctttccacgatgaaggagttgaaggaatggaaaatggagaattgaaaatggaaaatgaagcaccgcacggcaactctcaattttcaactttcaattttccattattaaagaacaacggactgtatgccttccgaaaggacggagagaaacatgcgtggaacccggaaaccatcagtacattgcaacttgccacccgcttgggcagctacaagaaattcaaagagttcactcatttggtagacaataaggagaaacctattttcctgcgtgacttcttaggattccgtcgcaatcctatatccatcgaacaggtagaaccgatagagaatattctccgtcgttttgtgacgggtgccatgtctttcggatctatcagcaaggaagctcatgaagcaatggcgattgccatgaataccattcacggacgcagcaacacgggtgaaggtggcgaaaatgcttcccgcttccacccgctgccggacggtacttccatgcgaagtgccatcaaacaggtagcttccggacgcttcggggtcaccgccgaatatctggtgaatgccgatgagatacaaataaaaatagcgcagggagctaaaccaggggaaggcggacagcttccgggattcaaagtgaacgacgtcatagccaaaacacgccattccattccgggaatctcactgatctctcctcctccccatcatgatatttattcgattgaggatttggcgcaattgatatttgacttgaaaaacgttaatccacaagccaaaatcagtgtcaaactggtagcagaaagtggcgtaggtaccattgccgcaggcgtggcaaaagcaaaagcggatttgattgtcatctccggtgccgagggtggtacgggagcctctcccgcttcatccatccgttacgccggcatttctccggaactgggactgagcgagacacagcaaaccttggttctgaacggtctgcggggacaagtcgtcctacaagccgatggccaattgaaaaccggacgcgacattatcataatggcattaatgggcgccgaagaatatggttttgccacctccgccctgatcgtgctgggatgtgtgatgatgcgcaaatgtcaccagaatacttgtccggtaggagtagccacacagaatgaggaattacgcaaacgctttcacgggcgcagcgaatatcttatcaactttttcaccttcctggcacaggaagtccgtgaatatctggcggaaatgggattcaccaaaatggatgatattatcggacgtacggacttgattgaacgcaaatccgacgaaaacgatccgaatccgaagcacgctctgattgacttcaccaagctactggcacgtgtggataacagtgcagccatccgtcacgtcattgatcaggatcatggtatttctacagtgaaggatgtggcaatcattgatgctgcccaagaagcgatagaacacgaaaaagaagtttcattggaatacacaattgccaatacggaccgtgcgacaggtgccatgctctccggtgtcattgcccaaaaatacggagagaagggattgccggaacataccctgaatgtgaaattcaaaggctctgcgggacagtcattcggtgccttcctcgtaccgggagtcaatttcaaattggaaggtgaagcgaatgattatctgggtaaaggattaagcggcggacgcattgccgtattaccgcctatccgcagcaacttcgaagccgaaaagaacacgattgcaggcaataccctgctctatggtgcaaccagcggcgaagtttatatcaatggccgcgtaggcgaacgttttgccgtgcgcaactcaggggctgttgccgtagtggaaggtgtaggcgaccactgttgcgaatatatgaccggaggccgtgtagtggttctggggcaaaccggacgaaattttgccgccggtatgagtggcggtgtggcttacgtatggaacaaagacggcaattttgactacttctgcaacatggaaatggttgaactgtcactgatcgaagaggccggttaccgcaaagaactgcacgaactgattcgtcagcactacctgtacaccggttcgaaactggcacgtaccatgctcgatgactggaaccattacgtagatcagtttatccagatagtacctattgaatacaaaaaagtactacaggaagagcagatgagaaagttacagcaaaaaatagcagatatgcaaagagactattaattcaagtattaggtattaagtattaggtattaaccgtagcttcaaacatctttaatccatatagttaatacttattgcttaatacctattacctaatacttattacttaacaagatgggagatcctaaagcttttttaaatatacctcggcaagaggcgggataccgccccgttagcgagcgcatcactgactatagtcaggtagaacagacattgaatacaaacagccgcaaattacaggcatcacggtgcatggattgcggagtacctttttgccactgggcttgtccaataggcaacaaacaaccggaatggcaggacgctttattcaaaggaaaatggaaagaagcgtatgaagtgctgtcatccacttgcgactttccggaatttacaggacgtatctgccctgccctctgtgagaaatcctgtgtactgaaactatcctgtgaccaaccggtgactatccgtgaaaatgaagctgccattgtagaagccgccttccgtgaaggatatatacaggtgcaacatccccaaagaaacggcaaaaaagtagcagttgtcggtgccggtccggccggattggtagctgccaaccagctgaatctaaaaggatacaccgtaacgttattcgataaagatgaagctgcgggaggattattacgtttcggtattccaaacttcaaactggacaaaaacgtaatcgaccgccgcatgaaaatacttgctgcagaaggtattcagtttgaaatgggagtagaaatagacgttaaccatttgccggaaggattcgatgcatattgcatttgcacgggtacatcgactgcccgtgatttaagcattccgggacgggagttgaaaggaatccatttcgcactggaaatgctggcgcaacagaacaggattctggaaggacaaactttccccaaagacaaactggtgaatgccaaaggcaaaaaagtgcttgtgatcggcggtggagacaccggttcggactgtatcggaaccagtgtacgacagggagcaaccagcgtcacgcaaattgaaattatgcccaaacctcccgtcggtcacaatccttctacgccctggccgcaatggccggtagttttcaaaacgacctccagccatgaagaaggttgtacccgtcgctggtgcctgacttccaatcagtttttgggtaagaacggtaaagtaaccggcgtcgaggtggaagaagtagaatggacaccgacaacagatagcggacgtccgaccatgaacctcacagggaagaaagaagtaatcgaagcagatatggtgctgctggccatggggttcctgaaaccggaacaaccgaaatttgcagaaaacgtattccttgccggagatgcagctaccggagcaagcctcgtagtacgggcgatggcaggaggacgaaaggctgctgcggacatagatcactatttggtgaagtaacccttacagcaaggaacaccatgaagtttatagactattatttattcgtttgacctaggttgaacgaaacaacaacctaggttgaactaaaagatgacccaggtcaaacgaaaggaaaagccagggaaaacgaataaatagtaacgaaccaacttttaagaaacagagaatcagcaaattatattaacttccaaatactcaaagttatgtgtggaatagcaggtatactcaacataaaaactcaaaccaaagagctaagagacaaagcactgaaaatggcacagaaaatccgtcatcgcggaccggactggagcggtatctacgtaggtggaagcgccattctggcacacgaacgcctctcgatagttgacccgcaaagcggaggacagcccttatactcccccgaccggaaacaagcgctcgccgtgaacggtgaaatctacaaccatcgggatatccgcgcccgctatgccggacaatatgattttcagaccggaagcgactgtgaagtgattcttgccctttataaagataaaggcatccactttctggaagagatcagcggaattttcgcctttgtactttatgatgaagaaaaagacgagttcctcattgcacgtgatcctatcggagtcatacctttatatataggaaaagacaaggatggcaaaatctacttcggcagtgaactgaaagcactcgaaggattctgtgatgagtacgaaccatttcttccgggacattacttttacagtaaagaaggcaaaatgaagcgttggtatacacgcgaatggacagactatgagtctgtaaaagacaatgacgccaaagccagtgatgtaaaagaagcattggaagatgccgttcatcgccagctgatgagtgacgttccctatggagtacttctttcaggtggtctggacagttctgtgatttcagctatcgccaaaaaatatgcagcaaaacgtattgaaacagacggagcaagtgacgcctggtggcctcaactacattcttttgccatcggtctgaaaggggcgcccgatttgataaaggcacgtgaagtggcagaatatatcggtacggttcatcatgaaatcaattatacggttcaggaagggctggatgctattcgggatgttatctattttatcgagacgtatgatgtgactacggtacgtgcctccactcccatgtatttactggcacgtgtgattaaatcgatggggatcaaaatggtattgagtggtgaaggtgccgatgaagttttcggcggttatctttactttcacaaagctcccactccgaaagatttccatgaggaaacggcacgcaagttatcaaaactgcatatgtatgattgccttcgtgccaataagagtttatcagcctggggtgtagagggacgtgtcccatttctggacaaggaatttctggatgtagcgatggcgttgaatccaaaagctaaaatgtgccccggaaaggagattgagaaacgaattgtacgtgaagcttttgccgatatgctaccggaaagcgtagcatggagacaaaaagagcagttcagtgatggtgtgggatattcgtggattgataccttaagagagattacagcggctgccgtcagtgatgaacagatggaacacgctgccgaacgtttcccgattaacactccgctcaacaaggaagaatattactaccggagtatctttgaagagcattttccgagtgaaagcgcagcccgcagcgtaccaagcgtaccaagtgtggcttgctctacagcagaagcgctggcatgggatgtagctttccgtaacttgaatgaaccaagcggcagagcagtgagaggagtgcatgaagaagcctatgccgaagagtaaaataaatttgttgaaaaattttagatgtctgaaataaactcatatctttgaatatatattcatcagtttgtaaagtcaggaataaaaagtatagacttctatgcataaaaagctgtcaattaacgcagattagcataataacaggctgatctgtgttttattttttataattttggactcataaactttttaaatgtactatcaatgaagataaaaagaattattctaatggttgcccttatcatttcagtagctagtgtccaagcgcaaaagtcgcaagttatcgcccatcgtggctactggaaaacagcaggttctgcgcaaaatagtatcacagcacttcaaaaagccgattctatccattgctatggctccgaatttgatgtatggcttaccaaagacaataaactggttatcaatcatgaccctgtctataagatgaaatacatggagtattccaaaggtgacgctcttacaggactgaaactatcgaacggagagaacctgcccagcctggaacagtatctggaagccggtaaaaaatgcaataccaaacttatattggaactaaaagcacttaacagcaaaaagcgtgaaacgaaagccgtacaggaaattcttgctctagtaacaaagatgggactggaaaaccgtatggaatatatcactttctcactgcacgccatgaaagagtttatccgcctggcacctgccggaactccggtattctatctcaacggcgagctatctcccaaagaactgaaagacctcggtgcagccggactcgactatcacatgggagtaatcaagaaacatcccgaatggatcaaagaagcccatgatctcggactgaaagtcaatgtatggactgtagataaagcagaagacatgaagtggctcatagaccaaaaggtggatttcattacgaccaacgagccgactgtggcacaggaaatactaaaatagttactctcagaaaatgtaaaaagccgacagaaactttttgcaaatattcgatagatacaagaagcaccattatacatatttatttgctgtataatggtgcttcttacataaaattcaaacaggacttatttaaaatcttccaatacctctttcaactctcctatggtcaactctcctacctgcctccacaattcatgtcctttatgcaacagaaggaacgcaggcaccgtatctatattatgagaatcggctacagttttattttcctcgatattcacgttaatcaattcaatgactctccgttcataagtacggagcacaggccctatccattcgtaatgaggtgaccagtcggcataaaacacaatcaataccaaatgatcgctctgcgccgcaacttccaattgtttctctatatccatattgctacattattatatttattagtgactaaacaatgctataacaaaaaggttctgcaaaactgcaaacaagcaatatgatatataaaagcgaaaatcactagcataccgacctattgtaaaagcgaaaattcacattttagatcgaatacaaggactgatttaccccaaatattcttcatatattatggaaggatatgcaaaacaaatcaagcaaataacagtttattaatataaaagtatgcataatttcaatttataacaaaacatggctttatttcccgcgattgtaagatcgcataaaataaatagagattagacatcttttcatcaaaagataaatcaaaaagtcatatctttgcattgtaataaaacaaaaggatacaacaaccgattaataaaaaacaaaatgacaaccaagattaagttcacaaaaatgcatggagcaggtaatgactacatatatgtagatactacccgatatccgatagcagaccctgaaaagaaagcaatcgaatggagcaagtttcatacgggaattggaagtgacggacttatattgattggcagttctgacaaagcagatttcagtatgcgtatatttaatgcagatggttcggaagcaatgatgtgtggcaatggaagccgttgtgtaggcaagtatgtatacgaatacggattaactgccaaaaagaaaatcacacttgacacccgttcgggcattaaggttctgaaattacatgtagaaggaggaaaggtgacggcagtcactgtagatatgggtagtcctctggaaacggaagcggtagatttcggcgatcaatttccttttcagtctacccgggtatcaatgggaaacccgcatctggtaacttttgtagaagatattacccaaatcaatctgccggaaattggtccgcagttagaaaattatcatctctttccggacaggacaaatgtagagtttgctcagatcgtaggtaaagacaccattcggatgagagtttgggaaagaggttcaggaatcacccaggcctgcggaacaggtgcttgtgccacggctgtagccgctgttctccatggattggcaggaagaaaatgtgatataataatggatgggggaaccgtcaccatcgagtgggaagaagcaacgggacacatattaatgacaggaccggcaactaaagtttttgatggggagatggagggataggtaataagtattaggtaataggtaacaggttttgcagaaacttaaaacaataacaatatggcattagtaaacgaacattttttgaaattaccggggagctatttgttctcggatatagcgaagaaggtaaatacattcaaaataacgcatccgaagcaggatattatccggttaggtatcggagatgtcactcagccgcttcccaaagcatgtatcgaggctatgcacaaagcagtggaagagctggcaagtaaagatacatttcgcggatatggtcctgagcaggggtacgattttctgattgaagctattataaagaatgatttcgctccacgtggcattcatttctcaccatcagaaatattcgtcagcgacggagccaaaagtgataccggaaatatcggcgatatccttcgccacgacaatagtgtcggtgtaacagaccctatttatccggtatatattgacagtaacgtcatgtgcggacgtgccggagtgctggaagaaggaacaggcaaatggagcaatgtgacttatatgccttgtacaagtgagaatgacttcattccggagattcccgacaaacggatagacattgtttacctctgctacccgaacaatccgacagggacgacactgaccaaaccggaactaaaaaagtgggtagactacgcattggcaaatgatacactgattttgttcgatgccgcatacgaagcctatatccaagacgcggatatcccccactccatatacgaaatcaaaggagccaagaaatgtgctattgagttccgcagtttctcaaagacagccggtttcaccggagtacgttgcggatataccgtagtcccgaaagaactgacagctgccacactggaaggcgaccggattccactcaacaaattatggaaccgccgccagtgcactaaattcaacggcacttcgtacatcacacaacgtgcagcggaagccgtctacagtacagaaggcaaagcacagattaaagaaacgattaactattatatgaccaatgcgaagatcatgaaggaaggactggaagctaccggattgaaagtatacggaggcgtcaatgctccatacttatgggtgaaaaccccgaacgggctctcttcctggcgattcttcgaacagatgttgtatgaagccaatgtagtaggaacccccggtgtaggtttcggccccagcggtgagggatatatccgactgacagcattcggcgatcacaacgattgtatggaagcaatgagaagaataaagaactggctttgatagtattttgcgcgctactatataacactggaccgtacatccacatttttctaactattaaaggtaaaaagacgatgaaaacgacgattaacaaaaaattgaggggcatagcagcagcgttattactgatcggccttgtgccatccaatatgatggcgcaggataaagtagaagcctccgtaggagcagacttggtaagtggttatatctggcgtggtcaggatttaggcggagtcagcattcagccttcattaggaatctcttacaaaggactgtcactcggagcatggggatcggtagggtttgagtcatcggatactaaagagttcgatttgactctcggttattcaaccggtggtttcagcatctcggtaacggattactggttcaacactcaggtacctaccaacaagtatttcaaatatggcgctcattcaaccgctcatgtatttgaggcacaggtaggatatgattttggtccgctggcaatcaactggtacacgaactttgcaggtgccgacggagttaaagaaaacgggaaaagggcttattcttcctacctcgcacttagtgcaccgttcagccttggaggacttgactggacagtagatgtaggaatggtaccttgggagacgactttttataatggatacacaagtgggttctgcgtttccgacatcagtctcggagctgtcaaggagatcagggttactgattcattctcggttccggcatttgccaaagtatcagtaaatccacgtacggaaggcgcttacttcacattcggattaagtttttaagagagagagtttatatagtcaaagagcgtatagggaacaggaaggtagttagagtttagattttatcggtttgttgtatggtaacctgcgatggctgccacctccctatacctcttctttttacaggtcaacactaatatttaaggtatatgaaaaagattgaagctatcatccgtaaaaccaaattcgaggacgtgaaagacgctctgctcgaagcggacattgaatggttctcttactacgatgtaagagggatcggtaaagcacggcaaggacgtatctatcgtggagtggtatatgataccagcaccatcgaacgtattctggtttctattgtagtacgcgacaaaaatgcagaaaagaccgtacaggctatcatcaaagccgcacaaaccggagagatcggtgacggacgcattttcgtcattcctatcgaggacgccatccgcatccgcaccgccgaacgtggcgacatcgctctctataacgccgaacaggaacgataactggcaaagttctggggccagatttactttcggatgataacataataaaaacaggtattaaataagataatcattatggataaaacatataagagacacagcttcacaaagctgtggatagccactgctatgttcattttctgctgtttcgcaaccagtgcttttgcacaggaagcagttgatgcagatacttttatgacaactacggagacaattactgaagtcaaaactacacctgaaattgctgaaaccgccactgcttctgccgaaacaactcccgatacaatcggggaactggcattaggattgaatacagtctggatgctgcttgcggcaatgctcgtattttttatgcagccggggtttgcattggttgaggcgggttttaccagagtcaagaataccgccaacattttgatgaagaactttgtggatttcatgtttggttccttgctctactggttcatcggtttcggtctgatgtttggtgcgggaggtttcatcggaatgccacacttctttgatctgtcattcctcgacagtgatttacccagagaaggatttctggtttttcagacagtattctgcgcaacggcagccacgattgtatcgggagcgatggcggaacgcaccaagttctccatgtatctggtctatactatctttatcagtgtactgatttacccaatttccggtcactggacatggggtggcggctggctgatgaacggagaagaaggttcgttcatgatgaatcttttcggaacgacgttccatgactttgcaggttcaacgattgtccactccgttggtggttggattgctttggtaggcgctgctattcttggtccccgtatcggtaaatatggcaaagacggtaagtcaagagctattccgggacacaacctgacagttgccgcactgggtgtatttatcctttggttcggatggttcggattcaaccccggatcacagttggcagcaagtaccgaagcggatgcaatggccatctcacatgtatttctgacaacaaatctggcggcttgtgccggtggcttctttgcactggcgatgagctggatgaaatatggcaaaccgtctttatcactgacactgaatggtgttttggcaggtttggtaggtatcacagccggatgtgacgctgtagctccctcaggagcggtattaatcggtgccatttgtggtgtagtcatgatatttgcagtcgactttattgacaaggtattgaagattgacgatcctgtcggtgcttcttccgtacacggggtttgtggtttcttgggaacagtgctcacaggattgttttctaccagtgaagggttgttctacggacatggagccggctttttgggtgcccagcttttcggtgcggttgttgtcggagtctgggcggcaggtatgggattcattatcttcaaagtactcgacaagattcacggacttcgcgttccggcacgtgtcgaagaagaaggtctcgacatctacgaacacggagaatctgcttataactaagctaaaaaaggaatttttactctaacatatttaacaacaaatcaaattaggtattatgtcaaaactaagattcagagtcgtagagacagctttcaagaagaaagcggttgaagtagcaacacctgccgaacgcccttcggaatacttcggtaagtatgtgttcaacaaggaaaaaatgttcaagtaccttccaagcaaggtatacaacgcactgattgacgctattgacaatggtgccccgctagaccgcagcatcgctgatgaagtagctgccggaatgaaaaaatgggctgtcgaaatgggtgtcactcattatactcactggtttgcaccgctcaccgaaggtacggcagaaaagcatgacgctttcgtcgaacatgacggcaagggaggcatgatggaagagttcacaggcaaactgctggtacagcaggagccggatgcttcttctttcccgaacggcggtatccgtaatactttcgaagcacgcggatatagcgcatgggacccatcatcacccgcatttatcgtagatgatacgctttgcatcccgactgtatttatcgcatatacaggtgaagcccttgattataaagcaccgttactgaaagctctgcgtgccgtagataaagccgcaaccgccgtctgccactatttcaatcctgaggtaaagaaggtcgttgcctatctgggatgggaacaggaatactttctggtagatgaaggtttgtatgccgcacgtccggacttacttatgacaggacgcacattgatggggcatgacagtgccaagaaccagcagttggaagaccactatttcggtgccatccctacccgtgtggccgcatttatgaaagaccttgaaattgaagcgttgaaactgggtattcctgtaaaaacccgtcataacgaggtagctccgaatcaattcgaattagctcctatcttcgaagaatgcaacctggcaaatgaccataacctactgatcatgtcgttgatgcgtaaagtcagccgccgtcacggtttccgtgtattgcttcatgaaaagccgttcaagggtgtcaacggttccggcaagcacaataactggtcactgggaacggatacaggtatcctgttgatgggaccgggcaagacgccggaagataacctgcgctttgtcacattcgtagtgaatacgctgatggcagtttaccgtcacaacggattactgaaagcttctatttccagcgctaccaacgctcatcgcctgggagccaatgaagcacctcccgctatcatctcttctttcctcggcaaacagttgtcacaggtattggatcatatcgagaacagcaccaaagacgatctgatcaaccttagcggaaaacagggaatgaagctggatattccccaaatccccgaattgctgattgataatacagaccgcaaccgcacctctcctttcgctttcaccgggaaccggtttgagttccgtgccgtaggctctgaggctaactgtgcaagtgccatgattgcattgaactctgccgtagcagaacaactgatgaaattcaaaaaggatgtagacgctctgatcgaaaagggagaaccgaaagtttccgctatccttgaagtaattcgcggatatatcaaagaatgtaaggctatccacttcgacggcaacggatacagcgacgaatggaaagtagaagccgcccgtcgaggtctggactgtgaaacaagtgttcccgttattttcgacaactatctgaaaccggagacaattgctatgttcgaagcaatcggtgtgatgacgaaaaaggaactggaagcccgcaacgaagtaaaatgggaaacttacacgaaaaagattcagattgaagcccgcgtattaggtgacctggcaatgaaccacattattccggtcgctactcaatatcagacggatctgattaataatgtctataaaatgcagtccttatttccggcagataaagcagccagactatctgccaagaatctggaactgatcgaagaaatcgccgaccgcaccgccttcatcaaagaacacgtagatgcaatgattgaagcccgaaaagtggcgaacaagatcgaaagcgaacgagaaaaagcgatcgcttaccacgatacaatcgttccggcactggaagagattcgttaccacattgacaagctggaactgatcgtagacaaccagatgtggacactgccgaaatacagagaactgttgtttgtaagataaaaaagaaatgaaggtgtgtacacacctacattaagatagaaattatctatttcttttgttggttgttttaagtttgcaggggaggggtaccgtgacggtagtcctcttctttttttattctataatcttagcatcctcaatatcctcatcgtgaggcgtaaccggagtcttaggacgacggcgtgcaaacttaaaccagttgatcagttcggacagagaataaaccaagctactgataccgataataatgaaagcagtattacgtactcccgtcggattgaacagcgcaataacacctgcgataagaatcaatgaaggcaccagatagaaaatccccggaacaggtgtccaacgacgggccatcgacaaagaggcaatctgctgcacacctcccatgatcaggataaagcccaaaaggaacatcaggacgtctgcaaaaaactcaggcatcacaatcagccaaagtccgaataacaaactgccgattccctcaataggaaaacggggagccggttcatgttccgatcttttccgtccgaaaaagctaaaaagactgatgacaccgggaatcaaaaaagccactcctatcgtaatgacaatataactagctgctgtattcggccaaagtaccaacaccagacctatgacaagcgcaaacaaaatgcgaatcagagagtaattcattgttttcatatattctatattttttaacgaagtccatttcaatacttttgcgaatataagtgtttctattcacatataaaaataacaaacgtagattgtaataagttcgtaacaaaatcgttatagccattacacctcacttagataattttgcagaaaattaataaacaggtttttcatcatgaaatcaagcgaaacaaaaaagaagtgcccttatgtagaacgtgacatcagctggatgtacttcaatcagcgtatcctgctcgaagctgcccgtccggaagtacctcttctggaacgcctgacttttcttggcatctattccaataatctggatgagtttttccgcgtccgcgtagctacgctgaaccggattatcgaatatgcagataaaaacatacagaaagaacaagaaacggctacacgcacactgaaacagataagcaaactacacaaccgcttctacgaacaatttgaagaaactttcgcttctatcatggaagaactgaagaaggagaacatctgcgtcatcaaagacaccgaaatgacggatgaccaaaagacatttatcacctccttctatcgcaataagctgaatggctccaccacccctcttttcctcaacggagcccgaccgctggacgaccagactgacgaagatatttatctcgccatccgcctgcttcgtaaagacgaaacaggaaaaataaaagagaaagattatgcagtgatcgaattacccaccgaagaatacggtcgttttatccaattgccggactcggaggggaaaacatatctgatgtttctcgatgatgtgatccgctattgtctgccgttgatttttgtcggcatgaaatatacggattacgaggcatatacctttaaattcaccaaagacgcggaaatggagatagacagcgacctgcggacaggcgtacttcagaagatttcaaaaggagtgaaaagccggaagagaggagaaccgattcgattcgtttatgacgaacagattcccaaagatttactgaaaagattagttgaccggctgaatgtggataaaaacgacacccgtgtggcaggaggacgctatcataacttcaaagacttgatgaaatttccggtgtgcggtcgctacgacttaaagtatcccgtctgggaaccggttttcaagcccgaactaaacggcaaagaaagcctgctgacattgattcgtcagaaagaccgttccctgcattatccattccatagcttcgatactttcatccgcgtacttcgtgaagcagccatcagcaaagaagtaaaaagtatcaagatgacactttaccggctcgctaaagaatcaaaagtgatcaaagcactgatctgcgcagccaaaaacgggaagaaagtaacggtggtcatcgaactactggcacgtttcgacgaagcatccaacatcaactggagcaaaagaatgcaggacgcaggcatccacgttatcttcggagtggagggactgaagattcattccaaactggtacatatcggtacccgtcacggagacattgcctgcatcagcacaggaaactttcatgaaggaaacgcacgtatgtataccgattataccatcatgaccgcccatcgtccgctggtacgggaagtgaatgccgttttcgactttattgagaaaccatacactcccgtcaatttcaaagaattactggtttcacccaacgatatgcgcaaacgtctgattgctctcatcagcaaggaaataaagaacaaggaacaagggaaagaagcctatattctggcaaaagtaaaccatattaccgaccgtgcgcttatagaaaaactctacgaagcctcgacagccggagttcaagtggaactggtagtacgcggcaactgttcgctggtgacaggcatcgcaggtatcagtgaaaatatccatatcaacggtattatcgaccgatatcttgaacactcccgtatctttatctttgccaatggcggagaagaaaaatattatatcggttctgccgactggatgccccgcaaccttgataaccggatcgaagtactggctccggtgtacgacaaagaaatacaggcagacttaaaacgaattgtctgctacggatatcgggatacggccaaaggacgtatcgtagacgggaccggagaaaaccgaccttgggaaaaccgaccttccacactctgcaaaaacttcactcctgcccttgccgaagcagagacagccactgtcgttttccgttcgcaagaagaattatatagaaaatacaagaatatattatgataagtatgaagaaagttaattatgcagctatcgacataggttcgaatgccgtacggctattgataaaatgcgtaaacgaagaaaacgctcccgaattaatgagcaaggtacaactcatccgcattcccttacgactgggagaagatgcttttaccatgggagttatttctgctgaaaaagaaaagaaactgatccggctgatgaaagcctacaaacagttgatgaagatatatgacgtagtagattaccgtgcctgtgctacgtccgccatgcgtgacgcacgcaacggaaaggacatcacccgacaaatagccaggaaaactggtatccgcgtagatatcatcgacggtcaagaagaagcacacattgtatatgacaaccatatcgagcaactttttgcttccggacaaaactacctgtatgtagatgtcggcggtggcagcaccgagattaatctgatcagtaacggagaactgaaaaattcccgttcatacaatatcggaacggttcgtatgctcagcggcatggtgaaagaagaagaaaaagaggctttacgcaccgacctcatagggcttgctgcggaatacgcgcctatcagcatcatcggttcgggaggaaacatcaataaactttttcgtctggcagacaagaaagacaaaaaggcttctctcctacccgtcgaatcgctacgtgaaatttacgaagcattgcaagctcttcctgccgagcaacgtatcaaacagtataagctaaaacctgatcgggctgatgtcatcgttccggctgcggagatatttctggaagtagctatgaatgtgaaagctaccggaatcattgtacctaccattggactgtccgacggaattatcgacagcctgtacactcagaagatgaatacacctgtcgcaccaaaggttcaataaatagataaaaggctcctgatatccgaatgataacttatttgcatcaggagcctttttctataaattccatctttcttcatgtataaaatgacattctgaaagataagtatgtttttgacagtttgtaattcgtaatgcatcaagaagggcttctttagccggtcatactactattgatattttttcgcgattgttgggcaactagcatatatcaaaaaatcagcatttacatccaattcagcacttattaatatattatactctacttatatatctacatgattatattttcatcagttctgtttattttcaacattagccatctgaactttccaaagagcgaaatagaaaacagagaaggtcaaaagtattaaataaagacagttttatcggtatgatgacactatagcaatggtttacttacatcatacctaccttttagtgacaccatctgcatcttttggttacttcatccgcatctttttcacaaacaatacggtgtttttcaccgaatcatacggtcatttcatgcaaatcaaccgtatatttgcgataattcaaccacctttccaagctaacagaagattattaaaaaacaggcaggaaagcaaatcggatctttctacaaacaaatgacagaagaaagacttatcaccgaacattatgataaaagcaatcatctattgatataataacaactgccctgtaatctgatatcagactacaaggcagttgctaaaacgttatactaaatctgtcagaatgggaaaatcagaggcagcaccaatatcatcacaattcccatgataatctgcaacggtaatcccacttttatataatccataaaagtatattgtccggcaggcatcaccagcgcattaggcggtgtagagaacggagaagcgaaacacatacttgcacccaccgtcacggcaaacaggaaaggaaccggactaactccgatctgcatagcactttgcaaagcaatcggtgcaagcaagacagcagtagcggtattactgataaacatagtcatcaatgatgtcgtaaaataaataccagccatcaatgctatcggtccgtaagatccaagcccacttaccaaagtattggagatgtactccgaagcgcctgttttctctaatgccaaagacataggaagcatagccgcaatcaatacaatactttcccagttgattgttttgtaagctgcttccacattacggaaacatcccgtcaaaaccatcaggatacctgctatcataacggccgtaacaggtgcaaccggaataaaatcgaataccatcattgctaccatcaataccatgatagcagcagcaacaggtgctttatagtccaaagttactttagccgcttctgccaaaggctgtcccaacaccacccaatccgaatcttccttactaagccgggcaatattactccaagttccctgcactaaaagcacatcaccactatgaatccgctcatttcccaaatcctgcaacagatattcctttttacgacggatacctaatacattcacattaaacttatcacggaatccggactctttaatagtctgattgaccagattggaagcaggcatcaatactatttcggcaataccgatatcataaaaatcaagcgaattagtagtgcttttcgtctcttccgtagcatgatcatccaatatatccagcagataatcttcggcaaattgctgcactttatcaaattctcccgtcacatacagaatatcttccgcttccagcatagtatccggttcggcaagtttctgagtaatagtcttcagaaaacggtgctgcgaagcatctccacgacggacttccataatattaagtccatatttacgacgaatatccagatcgaggatggtctttcccaaaaggcgggagtctttaatcacctgcatacggaacagattactggaaagaccatattcattcaccaactgtttcagtgacttacccgaacggctgttatcatctttctgccctttcttagaaagaaaccacttactaagcggcatcagcaccagcgtaccgacagccacactcaccaaacctacaggcaggaaagtaaagaaagaaagcggttcgaagcctgcggaagtcaatgtgttttgtatgacaaggttgggcggtgtaccaatcagcgtcatcatacctcccatactactggcaaaggccaacggcatcagcaaccgactcggattcattttggcgctcatcgccagactgaccacaatgggaagcatcagtgccaccgttccggtattactgacaaacgcaccgatagcggaagtgaccaacataacaagcaagaacaggcgaatttcactgtttccagcaagtttaaggatacgcgaacttatcatttttgccagtcctgtctgaaaaatagctccgcccacgacaaacaatccgatcatcataatgactaccgaattggagaaaccggaaagggcttcgtcgggtgttaatatctgaaagataagcaaagctactaacgcacatagtgccacaagatccgaacgtatcttaccgtttacaaaaaagatagccgaaagaacgagaatgataatggttatcaacataagctaaaaataaaatgattgttttatcctgaatgtatcaaagatttattttggaggagcaaaattaaaaaatactttgccgttataaaaacaaattagaattgtttttggttcatgggacatcatttaatattttaatacattcttactctttacgaaaatacgttccatcaaaaacattttaaaaccgaaccggaaatagaaggcaccaaagttctactaatcagtaaaggtattcttttcagaagagttttataaggctgataaacaatatatttcagaaatttcctttgtgaattacaaaaaatgcatatatttaccacagatttagtacaaacataaattatggcaaacaatatactatccgttatatggattacagaccagcattggagttattattatttactaataggctttttactcctgatcatctgctttttattatacagactacgacaacttaaaaagaatataggaaaagaacaggattactatcattctttattcgatatactcgataacctccctttccctattatggtaaaagatatccagaatagtttccgatactattactggaacaaagaatccgaactgcaatccggcattaagcgggaagaagcaataggatgcacagactacgaaatctatggagaagaacggggcagaaaataccgtgatgtggatgaatcacttgtgcaggcagacaagatataccgggcagaagaaagctacagcacagtggacggagcagtacatgatacaattgccgtaaaatcgattatcaaatggaaggaaaagaaaaaatggctgttagtgacccgatgggacatcacccggctaaagacttacgaacgagaactgattgccgccaaagaagaactggaaaaagcgctgaacaaacaaaagctagctttgaagagcgtcaacttcgggctcatttatatcgacaaaaactatctggtacaatgggaagaaacgacgcaaattgccagcctcgtgaaaggaaggcattatacaccgggacaaatctgctacaaaacaagtgcactccgggatactccatgcgaacaatgcgcctttcagaaagcgattgaacaaggaaaaatcatacgccatactatccagatagatcaggtagactttgaagtgacagctactccggtttatgataatgaaggaatagaaatcatcggcggtctgttgcgcttcgaagacatcaccgaaaaggtgaaaatggacaagatgctacaggaagcaaaagaaaaagcagaagaatcaaaccgtctgaaatcagctttccttgccaacatgagtcacgagatacgtactccgttgaatgcgattattggattctctgacatgatttgccaaacgggtgaagaggaagagaaacaggaatacatgaagatagtgtccagtaacaatgagttgttactgcaattgatagatgatattctcgatctttccaaaatcgaagccggaacgatggaatttagcctcgcccctaccgatatcaatgatctgatggaaggtatttgcaggcaaatgcaagagaaaaacacttctcccgacgtggcgatcaccttcacggagaaagcggaagaatgtattctcaacacagaccgcgtacgtctttcgcaagtaatcatcaacttcacaaacaatgcgatgaagttcactccgaaaggttccatccaaatgggatatcggattgacgaagcaaaagatgaaatctacttctatgtaaaagacacgggcattgggattccggaggataaaataaacgaggtattcgaacgtttcgtcaagctgaatacattcgcaaaaggtacgggactcggtctggctatctgccgggtgatcgtagagcgcttaggcggcactatcggagcagattctaaagaaggagaaggttcgtgcttttggttcagacttccgataacccaaaaatcaaataattaactgtaaatggctgtacacaccaattcatacttgtacagttttactcctttctgtttaggaatgaactaaacagtagtacacaatagtaactccattctcctccttcgggaaggaggagaatggaagatagaaccgactattatttagttcaaaacagtgtcaaaagaagcgatcagagggcagcctccaatattttacgggcaacggctcctgtcacattctcattttctccatacttggcaccacgttcattaaaccggcgttcaatttccaaaacggtttcttcaccgatattttcttcatgcagacgagtagtcaagcccaatgaacggaaaaactcttcagtacgatcaattgcttcatcaatgcgttcttctttcgttccggaagtaattccccatactctttcaccgtattgcaccaacttgtctcctttcgcttcccgaaggacacgtaaagttgccgggagaataatcaccagcgtatgcccatgtgtcagtccatgcaatgcagtgatttcatgaccgatcatgtgagtcgcccagtcctgagacactcccattgcaatgaagccattcaatgccattgttgcagaaagcatgaaatctgccataagctgataatcatgctggttctcacgaatctttggagctatttctaccagagtttgcaggataccttccgcccaacggtccatcacacggctttgtccggcaactgtcatgtattgttccatcacatgaacgaatgtatccgccaatccgcacgccacctgatgaggaggtagagtaaaggttacttccggatcaagaatagagaacaatgggaaattggaataaaaaggatatttttccttagtttcgtgacgagagatgacagctccgttattcatttccgaacctgtggcaggaagtgtcaatacggtagaaagcggaacagtcttggtaaccggacgtccggcaagtaccaaatcccatgcatcaccgtcgtacaacaaacctgcggaaatcaatttcgtaccatcaatcacagaaccaccgcctacagccaatagataatcgactttctgctccttgcccaaagcaatcgccttgcgaagcgtttcgatggccggattaggctcgatgccccaaaactctattgtaaaatggtctttaagcgcttcttttacctgatcatacacaccattctttttcacgctgcctccgccaaaagttatcatgatacgtttgtcggatggtatttctttgctcaaccgggcaatcattccatgccccataatcaactttacgggattctgaaagataaaattttccatatctgtctattgttattattttggttattagttactaaccttgcaaatatacgccaattatctgaaacctgtcgggatcaggcaatgaattgttgcaaggctgaaggaaccatagcggacagccaaggtttcatatcttcagctaccaataaccaataaagcaataatataataaaaatggcaatagcgatacctactaagacttttctctgtttcataattgtttttcgtttaaatattcaatatttataagaacagatcaggcagaaaattgttctatatcagaaaaatgaaggggaaaaagaaaaaaagtaagattttgtttgttgtttcaaacaaagtgtctatatttgtccccgataaataacaaaagacaatgagaacaatgttagtaaatacatattggtggtggcgcccgttacaactccgacagtcgtaagggagcagtgctcgtatgtatatacctcattaaagatataacaaatttgaaagagccctgtcgcaacctgcgacagggctctttttatttgcccgtttttgaaaatcgaataaataataataaataaaaataggattatgaaaagttttttagttgatcaggatggttactacggagagttcggcggcgcttatgttccggaaattctccacaaatgtgtagaggaactgaagaatacgtacctcggagtgctcgaaagcgaagatttcaaaaaggagtttgaccagttgctgcgtgactacgtaggccgcccttccccactctatctcgcccgcagactttcagaaaagtatggttgcaaaatgtatctgaaacgggaagacctgaaccatacaggtgcccacaaaatcaataatactatcggacagattttgctggcacgccgcatgggaaagaaacgtattatcgctgaaaccggagccggacaacacggcgttgcaacggctaccgtatgtgctttgatggatatggaatgtattgtctatatgggtaaaacggacgttgagcgccagcacatcaatgtcgaaaaaatgaagatgctgggagctaccgtaatcccagtcacttccggcaacatgacactgaaagatgcgaccaacgaagcaatccgcgactggtgctgtcatcctgccgacacttattatatcatcggctcaacagtaggtccccatccttatcccgacatggtggcacgcctgcaatccgtaatcagcgaagaaatcaaaaaacaacttctggagaaagaaggacgtgatcaccctgattatctgatagcctgcgtaggtggaggaagcaatgccgccggaacgatttatcattatatcaatgacgaacgggtaggcatcattctggcagaagcaggaggaaaaggaatagaaaccggaatgaccgccgccactatacagcttgggaaaatgggcattattcatggagcacgtacttacgttatccagaacgaagacggacagatcgaagaaccctactccatctccgccggactggactatccgggaatcggaccgatacacgccaatcttgccgctcaaagacgggctaccgtactagctgtcaatgatgacgaagcaatccatgccgcttatgaactgaccaaacttgaaggaatcattcccgcactggaatctgcccacgcactgggtgcgctgaaaaaattgaagttcaaaccggaagatgtggttgtactgaccgtatcgggacgaggcgacaaggacattgaaacttatttgtctttcaatgaaaagtgattatcaacatctagttttgtagtttgattttagaaattataaaaatgaaaacattcagttatacagcccatagcaaacaggtactcggagatatgcacactcctgtcagtatctatctgaaagtacgtgatatgtacccgcaatctgcattgatggagagttccgattatcatgcaggagaaaactccctctcattcatcgctctttgtccgctagcaagtatcggtgtcaatagcggaatagtcactgccagttatcccgacaacagccggaaggaagagccactcacccaatcattcacggtagaaaaagcaatgaatcaattcatcagtcagtttcaagtgaccggagaaaacaagaatgtatgcggactttacggatacaccacattcaacgcagtgaaatacttcgaacatatcccggtgaaagaaagtcatgatgagcagaatgatgctccggacttgctatacatattatataagtatatcatcgttttcaatcatttcaagaatgaattgacactggtagaaatgctgggcgaaggtgaagaaagcggtttgccggaactggaggccgctatcgaaaatagaaattatgcttcttataatttctcggtgacaggtcctgtcagcagcccgatctccgatgaggaacataaagcgaacgttcgcaaaggtattgcccattgtatgcgtggtgatgtttttcagattgtcctttccagaagattcgtccagccttatgccggagatgatttcaaagtttatcgtgctcttcgcagcatcaacccttctccttatcttttctatttcgatttcggaggataccgcattttcggttcttctccggagactcactgtaaaattgaagacggacgtgcctacatcgacccgattgccggaacaacccgccgtaccggagatacggtaaaagaccgcgaattggcggaagcactgcttgccgatccgaaagagaacgcggagcatgtgatgctggttgatctggcaagaaatgatctttcacgtaattgccatgatgtacgggtattgttttataaggaaccacagtattacagtcatgtgattcatctggtcagccgcgtgagcggtcagctgaatgaaggggcggataagattaaaactttcatcgatactttccctgcgggaacgttgagcggagcaccgaaagtacgcgccatgcagctgatcagtgaaatcgaacctcataaccgcggtgcttatggcggctgtatcggctttatcggacttaacggagaactgaaccaggcaatcaccatccgtacttttgtcagccgtaataacgagttatggttccaggccggaggcggtatcgttgcacgcagtcaggatgaatacgagctgcaagaggtaaacaataaattaggagctcttaaaaaggctatcgatttagctgttaatttaaaaaactaactgttcagagcgatctgcctgataagtcagaaacagtatttgaacaacaattttacaataacaataaaatgaaaatattacttttagataactatgattctttcacctacaatttgctgcatgcagtgaaagaactgggagctacagacgtcgaagtagtccgcaacgaccagataaaccttgatgaagtggaacgatttgataagatcatactttcaccggggccgggaatacccgaagaagcaggcttgctattgcccattatcaaacgatatgcaccgacaaagagtattttaggcgtttgtctgggacatcaggccatcggcgaggcttttggtgcacgactggaaaacctgaaagaagtatatcacggtgtacagacaccgatcagcatcttgcagaaagacgtactttttgaagggctgggcaaagagatacctgtcggacgttatcattcctgggtagtcagccgggaaggttttcccgagtgcctggagataactgctgaaagtcaggaaggacaaatcatggcattacgtcacaaaacctatgatgtacatggcatccagttccatcccgaatccgtactgactccgcaaggaaaagaaatcatcaaaaacttcttaaacgaataaacttatgaaacagattctatataaacttttcgaacaccaatatttgggacgcgatgaagcacgtactatcctgcaaaacatcgcacaagggaaatataatgacgtacaggtagcatcactgattactgtctttctgatgcgtaatatttctgtcgaagaattatgcggattccgtgatgcattattggaaatgcgggttccggttgatttgagcgagtttgctccgatcgatattgtcggtacgggaggagatggaaaaaatacgttcaacatttctacggcggcctgctttacagtagccggagcaggtattccggtagtaaaacatggcaattatggagctacttcagtcagcggtgccagcaatgtgatggagcagcatggggttaaattcacaagtgatgttgatcagatgcggcgcagcatggaacaatgtaatattgcttatctgcacgctcctttgttcaatccggcactgaaggcagttgccccgatccgtaaaggattggcggtacgtacattctttaatatgctcggtccgttggtcaatcctgtattgccgacttatcagcttttaggtgtgtataatcttccacttttgcgcctttatacctatacttatcaggagagtaagactaaatttgccgttgtacatagcctggacggatatgatgagatttctctgacgaacgagtttaaggtagctacctgtggcaatgagaagatttatactccggaaggtctcggatttgcacgttatcaggatactgatctggatggtggacagacaccggaagatgctgctaaaatctttgataacatcatgaacaatacagctacggaagcacagaaaaacgtggttgttatcaatgcagctttcgctattcaagtagttcgtccggaaaaaacgattgaagagtgcatcgccctcgctaaagaatcactggaaagtggccgggcattggctacactgaagaaattcattgaattgaataataagtaataggtaataagttataaatgataagtggcaaaggatgaatatgcgatatcctttgccttgattcaaaatttaagattaatgaaagatatattatccgaaattatagctaacaaacggtttgaagtcgatttgcaaaagcaggctatttccatcgaacagttgcaggaaggtatcaatgaagttccggctgcccgttctatgaaacaggcattggcttcttccgattccggtattatagccgaatttaagcgtcggtcaccatccaaagggtggatcaaacaggaagcacgtcccgaagagattgttccgtcttatgtggcggcaggtgcttccgccctctctattctcactgatgagaaattttttggaggaagtctgaaagatatccgtacagcacgtcctttggtcgatgttcccattataagaaaagactttatcattgatgagtatcagttatatcaggcaaaaattgtcggtgcggatgccgtacttcttatcgccgccgcactgaaacaggaaaaatgtcaggacctggcagagcaggcacatgaactgggactggaagtattacttgaaatccatagtgcggaagagttaccttatattaatagtaaaattgatatgattgggattaataatcgcaatctgggtactttcttcacagatgtagaaaactctttccgactggcaggacaacttccacaagatgcggtattagtatcggagagtggcatttccgatccggaagtggtaaaacgtcttcggacagccggattccggggattcctcatcggagagacatttatgaaaactccgcaaccgggagaaacgctgcagaactttctgaaagccattcaataaatacatgaacttccaaaaacggacagccctatgatcaacggaaaaatcatcaaagtatgcggtatgcgtgaagcccccaatatacgggatgtggagtcactacaaaaagtggatatgataggatttatcttctatcccaaatctccccgttatatctacgaacttcccgcttacctacccgttcgtgcccgccgtgtcggagtttttgtgaatgaagacaaagatgtaatcacgatgtacgccgaccgtttcgggctggaatatatccagctccacggcaaagaatcaccggaatactgtcagtcattgcgcacctccggcctgaaaatcatcaaagctttttctgtggctcacccaaaagacttgaatcacgtaagtgagtatgaaaaagcttgcaatcttttcctgtttgatacgaaatgtgagcagtatggtggctcaggaaaccaattcgactggaacattctgcatacctacaacggacaagttccattcctattgagtggcggtatcaactcacacagtgccaatgcattgaaagcattcaaccatccccgtctggcagggtacgacctgaacagccgtttcgaactgaagcccgggaaaaaggacccggaacgaatccggatgtttctaaatgaactaaagtcataaatttaaattctcaaaatcatgaacagaattaatcaactctttaatagcaacaagaaagatattctttctatttatttttgtgcaggtgatcctgcccttgatggaacagtcaatgtcatccgtactctcgaaaaacatggcgtcagcatgatcgaaatcggaatcccattcagtgatccaatggcggacggtattgtcatccaaaacgctgccactcaggcattacgaaacggcatgtcactgaaactccttttcgaacaattacgaaacattcgtcaggaagtaagcattccattggtatttatgggatacttaaaccctattatgcagttcggatttgaaaacttctgccgcaaatgcgtggaatgcggaatagacggcgttatcatccccgacttacctttcagagattatcaggatcactaccgtatcattgccgaacgttatggaatcaaagtaatcatgctcatcaccccggagaccagtgaagagcgggtacgtgaaatcgatgcacatacagacggattcatctatatggtttcatccgcagctactacaggcgcacaacaggacttcaacgaacagaaacgtgcctatttcaaaaagatcgaagacatgaatctacgcaacccgctaatggtaggtttcggtatctccaacaaagctacttttcaagcagcttgcgaacatgcttccggagctatcatcggtagccgctttgtcactctgcttgaagaagaaaaagatccggaaaaagccattctgaaactgaaaaatgcacttaaatagacataggaaatagtcagacaaatagtagctaaaatagccggacagcatcgttttgctttgcataaccattctttccgaacaattttagctacttgactatttttacgactcacttcattttttcttttaatccatcgtataattccgcataaatattcatatttataacatttcactgcaaactacgaacaaattcatcatttactattcataattcgcaattaatctatatctttgtcagcgttttaacagaaattcatcaattatgagagtagagcccccttctgttttgttgatttacacgggtggaactatcggaatgatagaaaatccggaaacaggtgccttagaaaactttaatttcgaccatttgctcaagcacgttcctgagctgaaaagattcaactatcgcatttcctcctatcaattcgaacctcctctcgactcctcggatatggagcctgcttactgggcaaaacttgtaaagatcatcaactataattacgaccattttgatggttttgttattctgcatggaacggatacaatggcctatactgcttccgccctaagttttatgctcgaaaatctgagtaagcctgttattctgaccggttctcaattgccaatcggaacgctgcgtacggacggaaaagaaaatctgatcactgcaatcgagattgctgctgccaagaatccagacggtacagctattgtccccgaagtatgtattttctttgaaaatcacctgatgcgaggtaatcgtaccacaaaaatcaatgctgagaactttaatgccttccggtctttcaattacccgccattggcacgcgtaggcatccatattaaatacgagcccaaccttattcgcaaaccgaccccggacaaaccactaaagccacactatctgtttgatacaaatgtggtaatattaactctttttcccggcatccaggaggagatcatccattcactactccatgtccccggattgaaagctgtcgtgatgaaaacattcggatcaggaaatgcaccgcaaaaagaatggttcatccgggaattaaaagaggctactgatcgtggaattatcattgttaacatcacacaatgtgcttccggagcagtagaaatgggacgttacgagaccggaatgcatctgctcgaagcaggtgttatcagtggatatgacagtactcccgaatgtgctgtaactaaactgatgtttttgctgggacacggactatctaataaagacatccgatacaaaatgaactcttgtttaataggggaaataaccaaaccctaaaaaagaaaatctctatagtaatctcctgattttcatcctataatatttctgcaaaagaaaaaatcaggagattactctttcgtttttcatataaagcgaaccaaaacggaaatatcgttgctttttacacaagaaatatcaataaatacatctttaatccaaaatatacaactatctttgcaacaaacaaaaaaacaatcaaacaatagacattatgatgaaaaaaacaattctgcttacatctataattgcgatagcaatagtaaggatgttatccagttgcgtagattccgagaaggatctatatgatccgtcttatcagacagccaatccaatgggggacggttttgctgcaccggatggatttgactggaatatgactacaactagtattctaagcatagaaattgatgatgaactatacaaccaaatagaaatattggacgcaaatccattttcaacgtctgattaccatatacttgccaaaggagtttccaaaaaaggtcaagctttttcacaagaaataaattatacagaaggaactaattacctatatattcgtaagacagactctagaagcagagtgtctattagtacatgggatgtatctaaaaataaagaaattgtaggttcaaggactacaagagtggcaaaagcgaccaccggaagctataatattccagaaaaatatcccgaagaaacttatgataccacaggagccattgaacttagaggtaatactaattggaatcaatcaaatcatcatttggaagcaggcaaaagctatatcataaaagacaaatttaatggtgaaatcaaccataccagtggatatttgaatggcggaagatttaccatatttgtagaaggtgaatggacaccctcgcaaaaccaaatacaaagtgcagatattattattttgaagggtggaaaaatcaacacagattcattcacgagttttcttattgctgacaactcaatattaacgattcaatcaggcggaagtcttattggcaataacatcaatcttgctgccataggagtactactgaaaaattttggaacaattaatgtcaatagtatgaaggacttgaatacgacgtctattttatacaatgctcctaaagccacaattaatgttacaggaaaatctgttgcttcttgggaacagtccatatttaccaaaggagctatttataactttggagaattgactattcaagaaggtgcattaaagtttaactctcaagatgcaacatgctatttttataatggaactgaagcaacaattaatactccaactttcattataggtggaattggtgtaaatgatggaactgttaatgctcaaaaaataagtaatgataatggcggtaaccctacttttactaataattgcagtctttatgccaaaaactctttcgaattcggaggaacaaacggaactatcataatgaataaaggtatattggctggtggcatagaaaatggtacttttatagctattccatcttttaaatgcggtaatagcggaagcacttttgaactgaataatggttctatgataaaagcagagataatggatattcctaatgtcacttttaaagctgccggaacccgttcattattaaaatctacaaaaagcatatctactggttggacaactaagttcaatggtaatttagatattgaatgcccggaaggggaattcgccaaaggggtacctgccaataaccctaattacattatggaaaattcagtagaattatatatccctaatggttccaaaacaatcattacttcatgtggtgaaatttcagaaatacctgaccctacccctgacccggaagatcctgaattccctattgaagtggaagacaacaaggattatacctacctctttgaagaccaatggccactatatggagattatgatatgaatgacatcgttctgaccattcagaaaaggaaaatatatactaataaagagaataaagtaacaaaattcgagttgagtattgacttatccgcagccggagcaacaaaaagcatcggagcagctattatgctggacaatgtacccgccaatgccattacacagccagttgaattcagtgacaatactcttgccaagaatttcaatctaaataataacaatatcgaaaatggtcaggattatactgtgattcctctgtttgatgatgctcataaagtattgggaagagatcggtatgagcagattaatactgtttcagactatgcaggcaataccaaacctaaaaatatcagtttctccattacattcaataatccgacaatatcagcagatgcctttaatgtcaacaaattgaatgtctttatcatcgtagacggcaacagaaacccacgtaaggaaatacatgttgcaggctaccaaccaaccaaactcgcaaataccgatctgtttggcggaaacaacgataacagccatcatgccagcaaaaaatattatatcagtaaagagaatctggcatggggcatcatggttccttccaatttcaaatggcctttggagtatgtaaatatcaaaactgcttattcacaattcagtgactgggtaacgagcggtggtacagaaaatgaaaaatggtggaatgattttgatgtaaacaaggtattccaaacaaataaaaactaatctcccttatcaacacgggtttcataaaaataatgaaatccgtgttttttttcctcactaaacgtatcagatatattctattaataaacaaaaataataatcttcatgaattttacttctgctaattggaagtttattctaaaattatatatatatttgcacgaagtgaaacaaaggcaagagattcaatttaatctatataaatcaagtagcaaagcaagcgatagaaaggttctatttgtatgaaaaaaaagatactattagttgacgataaagcgactattggaaaagttgcaagtatatatttaggcaaggattacgacgttatgtatttggagaatcctattaaagcaatagattggcttaatgaaggtaatgtacccgatctcattatttccgatattcgtatgccgttaatgagaggagatgaattcctcagatatatgaaagccaatgagttattcaagtcaattcctatcgttatgctgtccagcgaagaaagtaccacggaaagaatcaaattactggaagaaggggcagaagactatattctgaagccattcaatcctttggaactaaaaatccgaatcaaaaagattatcgactaatacagcctttaaatgcaatattttgtttacataggcagacacaacaaaacaatagaactgttttcgaaattaagtaccggagtattctatgcagcaccaaactgctataaggcaactaaagtgctagacaagatacgagaaaaatacgacgcagctttatttattgagcaggtagaattatcaaaagatatcgctgatattcgctctatacgaaaaatgtatccagggctttatatggtactggttatagattccattactaaggaagaagctacagaatacttgaaggcaggagttaataacacgattaagtacgaaaccaacagtgaagtactgaaagatctgtcaacttttctcacacgtagaaaagaacaaaaaatagaagcactgcaactccaaacacagaatttaaaagcctttcgcctgccttcatggaaaagaatcttcgatatattcttttccggaatagcactacttttcctttctcctcttttaatagctactgctatagccattcgcttggagagcaaaggaccgattatctataaatccaaacgtgtaggaagcaattatcagatatttgattttctcaaattccgttcgatgtataccgacgctgataaacatctgaaggatttcaatgctctcaaccaataccaacaggaagaagaagaggaagaagatatatggggagaagaatcctgtgtctctgaagaagcagacgaagaagaaattctcctgatatccgacgattttgtaatttcggaagaagactatatccacaagaaatcaaaagagaaaagtaatgctttcgtaaaactggagaatgaccccagaatcacaaagataggacgttttatccgtaaatacagcattgatgaattaccacagcttatcaatatcctcaaaggagatatgtctatagtgggcaatcgtcccctcccactctatgaggcagagttactgactagtgatgaacacattgatcgttttatgggaccagccggacttaccgggctgtggcaggttgaaaaaagaggtgaagcgggtaaactctccgcagaagaacgcaagcaactggatatccaatatgcaaaaaacttctctttcggactggacataaaaatcattctgaaaacagttactgcattcgttcaaaaagagaacgtataactccttcactacaggatggactactttatctacatagcagacgatttcttctttttgtgtatagggcttttgctcctataccttttcatattggctgttgcctcacatttcaaacattccaattatcccaaagccagaaaacaatatcagtgtgccatattagttcaggacggaagcctccttcctttcatgtatcaacaggaagcatatgaattcatcacatataaagatttgctggaagcaattaattcattagataaagaacgatacgaattagtcatccttctttctgataaagccagtgctttatcaccccattttctggaaaagatttataatgcctacgatgccggaatacaggcaatgcagttgcacacgatcattaataatcgtaagggagtacggaaacgtttccatgctctatccgaagaaatcaataacagtcttttcagatcggggaatactcagatcggcttttcttcaagtcttttcggaaccaatatggctttcgacttagaatggctacagaagaatcaaagaactgccaaaacaaatctcgaacgaaagttattcaaacagaatatatatattgaatatctgccggatgtgattgtacactgtgactccgcccctgtttatccctatcgcaggcgcatacggaagaccctctcttatctattgccgtctttattagaaggcaactggaatttctgcaaccgtatagcccagcagctgataccttctccgatgaaattatgcaccttcgtcagtatctggactttattgataacaggataccactggacctcgtcactcaagtggtggatattgcttttaggattggcaatcacatacagtctggcaataccggattatttagtagaagataaaaagaaacaaaaacattcaatatggaaaaaaggacactgaaactgcgaatcaaacaaaatccggctttgaaacaagccgtacatcgttttattatgcatcctgtaaagacacgccccaactggtggatacgccttttctattttgtatatctgaaacgtggaaaaggttccgtgatttatcgcagtgtccgcaaagaccttcctccttttaatcagttctcgctagggcgctattcggtagtagaagacttttcctgccttaataatgcggtaggagatttaatcattggagattatacccgcatcggattaggaaataccattatcggtccggttcttataggaaatcatgtgaatcttgcacagcatgtaacagtcacaggacttaatcataattatcaagatgcggagaaatcaatcgacgaacagggagtaagtacacagcctgtcactattgaggatgatgtatgggtaggtgcaaactcagtcatactgccaggagtaactttagggaaacattgtgtagtggctgccggaagcgttgtcagccgttccatcccagcatactctatttgtgccggttgccctgccaaagtgatcaaatcatatgatttcgcaacgaaagagtggaaaaaagtaaaatgatatccaccactaattattaatagtgagagcaactacgcaatataccttataaaggggattgtgacagatacagaaacgcactatctttgcagtatcagaattgaattaattagtcataattttattacgtagccacatttaagtaaaaatgaaatagggtcccgccgaagcgatttcgtcgggattttattttatacactcctggcattagcaatcccggtatttatatacctttcggctcccctgcgtctataaacaaaaaacgagtcaattcctagaagggaaccactcgccacagcatcagaaaagccagaaaggcttttcttttattacctcaattcctgaaaactaatcttctttttaccttttaaacttcttacctattgttatcctttttaccttttaccaaaaaatgtcctattgaatactaaaaaatttaataccttaattatttaaatctaataccttgaataatcttttcttttaccttttaaactaatagcaatttcccaattgcactgcaaaggtacgaaaagattccgtgttcgcaaacggattcagattttataacattcttttaaggttataaatctttcacatcatttagcgtaacaagcttatttacaatagcataaatagtcaggccagccgcactgtgtatctgtagctttttgctgatatttctccggtgagtaatgacagtgtgaatagacaagaaaagattctctgcaatctctttattcgtcatacctttcaccacacagatcactatctctttctcccgttggctaagcgtttcctgattgtcaagctcctcctctcccgaagccagatttagcagaccatgaatctttttagaaagaatatccagatcatcaaagatagaaatcgactcatcatatttagtcagcaaagaggcatctacaaaagagctaaccaaagcaatcaaacgtattttcttaccggcagtttcttcccggaacttatttacatcaaagtagtcaccaaaagtaggatttacaatcagcatttccggatattgcgtacgcaggcaatcactcagagcctctactgaaagtaattctataggttgcaccttcacattaggaagacgcttcaatgcagcggtcagcccaccccggataatcactgaggtttcggcgatcgcaattcgaatggcttcgttatttttcattttccctaatcctcctttccaacttcagaatggcaggaacaaaaatatagtcttcaaccttgcagtgagattccaaaccggcctcacaggcgtatatatcgaaaagagccgcattcaacagattctcattggctttggcaggacaatatttaatgatgatatttttcagttctgtcagcttctctcccacctggtcatgatgcttggagaatgtgctaatctgataattccggggagcattgccatttatcagcgcatccacatatttgaataccgttttctcctcataatccatgtgtttacgtacctctcgtgtatattcatcaaagaacttaagaatcagaaaagctacatcatcctgcgaacagtcaatcgcttcaatcagtttacggcgaatggcaggaagagaaaagtccagaaagtaaatatgggcttgccgcagataatcgattagtgcaggtatagaaatatcctcactgcttccatccatccgcgaaaagccttcagacataaagttgactacaatcagaaaagtcctgcaatctactccattaagctcgcaaacttctttcactgttttgtcaccaaatcccaacgaaaggccgaaacggctcatcacttgcaacaaggaatagttatcactgatgagatcaatcatcttatcagttggtttgtatttttgcaaattatccatttacacctatttatattagagactgcaaagtaacggaatatttcgaggatatgcaatcaccacaaataggtattttcgctacccacagtttccccaatactaattacttgttactaatttataacaggaggctaggctggctattctttttttagtaattttgtcgctatcaatttgtaatcagtaattcataattaaataatatggcaaacgaactcgaactgaaatacggctgcaacccaaatcaaaagcctgcccgtatcttcatgaaagaaggcgaactacccattgaggtattgaacggacatcccggttacatcaatctgctggatgcattcaacagttggcagttagtaaaagaactgaaagaagctaccggacttccggctgccgcatcattcaaacacgtcagcccggcaggtgctgctgttgctgtagaaatgagtgacacactgaagaaaatctattttgtggatgatgtaaaactgtctccactggcaacagcctatgcacgcgcacgcggtgccgaccgtatgtcttcttacggagacttcatcgcattgtccgatacttgtgatgaagagactgcacgcattatcaaccgtgaagtatccgatggtgtgattgcaccggattacactcccgaagctttggaaatcctgaaaaataaaagaaaaggaacttacaatgtgatcaagatagatccggcttaccgcccggctcctatcgaacacaaagatgttttcggagtgacttttgagcaaggcagaaacgaactgaaaatagacgaaagtcttttgaaagagttacctacacaaaacaaggaaattccggctgaagccaaacgtgacctaatcatttctttaatcaccttaaaatatacacaatccaattccgtatgttatacaaaggacggacaggcgattggtatcggtgcaggacagcagtcacgtattcactgcacgcgccttgcaggaaataaagcagatatctggtatctccgccaacatccgaaagtaatgaatctgccctggattgaaaaaatccgccgtgcagatcgtgataatactatcgacgtttatatttcagaagatcatgatgacgtattggcagacggcgtttggcaacagttttttacagaaaagccggaagtactgacccgcgaagagaaacgtgcatggctggatacaatgactggcgtagctttgggctctgacgcattcttccccttcggagacaatatcgaacgtgcacacaaaagcggtgtaagctatatcgcacaaccgggaggttcagtacgagatgatcatgttatcggtacatgcgacaagtacaatatggcaatggcattcacaggcattcgcttgttccatcattaaaacatatcaatcccctttataatagaaactaatccgtttctccattataaaggggattcttatgttttaagacctgctcagaaaaataagggtatcttttaaagcatcaactccacaaccaacaaaaatattttagtataattcatcctcatctacattctctgaaatagtggaatcaaaccaagacaagtccgtcttatttattacccacttgctataattcttataagccttcactactgacgatttttctttcggatatctccatgccgggtcgcttgctgaagtacgaggaaaatctaatgcccaacaagacatatcttccatccgataataaatatttcgtgatgcatcagaacagtcatccgcagtttgaagcaagtttgtatccatcttcgaagtcggagcaaagtctgttaaatgaatttcatgagaacggttgttcacaaatataaatggattgaatttcatcattgaaacattgtcaaccggaatagtcagcggaatagtgatttcaacttccgctgctgaaacaaaactcgtccccttttctgtatttacaaaaccatttatattaggaaagagtctgcttacatcttcccaaatcacaaaagtcgcctttgaattaccactttcgaaagtcgctcccatcacctttgcagcatcaatataactttctgccaatggaagttcaatgccaaaaccgatctttgtataagcggcagcccctttggctattggtttaaaacgcaatttaatgcttgtaatcttgttttccgtattctttcccaaaccgtatgtataatttactacaaagtcattcaggtcataatcaccggcattaggccactggtcttcgaaagccaatgtaccatgaatagattcagttacaactacttcttcttcaaccggaatatcctctcccggttcaattgctttttcaggagtagcagtcactttcaacattacatcattaaaatcataatctgattgattatcgccaaaaggacggatatcaaatccggtcacacaacaattataaccatctaactgacgagttacagcctgagattttccccatttattcaataccggagtagagtaatacattccagagacgtcaccattaacaacaggattcgttttatttttaaaagaatacgcattcttcgttgttacatccgtaccatccttcttataaccggcacgtgctacaacaaaacctatccgtgtcccttttgggaaaatctcagtatactcctttccattccaataaagtaactgaactttcaaacccgacggacactgcagctggttagtattaggcaacaacatagtcatccgaagatgatcaatgtcatttggactattcagttcttcctctttataattataatacatcaatgaattataaacagtctgattagcgacatagaaaccaccatcaccgacataagtcacccaaactctggctccattttcatcaacgacccgtaaatccgagtttttatccaaatctgctttctgaacattctgcctctctgggtaccaactatcaatctgattaatcaaagcaggagatagttgctctttagagaccaaagaacacccaccctgcagcggaataccatccctacttatttcaacattcttataagggatatacaattgatacagaccactgatcggtccggaaaatgaaggaatctcaatcgaaaaagcacgcgagacagccatatgaggaaaactgactccttgaaaatccaatgaaacaaaatcctgaacatccgcttccttcacctgaccataaccagcagtgagaggagccacataaattttggaaacattatttcctatcaccacttcagctttcaacttacctgaagcatccgtatatccgacaaagaccggatcaatagaaataactccttcgcccgtgtaaggctgactcataaacacaccgaatttcacaccggcctgtgattttccatcaccatcgacagcagtaataaatatactcctttgcgttttcaacaagaaatccgtagataaaccgagttgagcatcctcaggcgttccttcatccggattatacaaatttttctcttctacacatgaagcaagaaccatgccgataactccaaaagaaaaatactttaagcttctcatattcatatagtatatgtgtctgttttgatctctgcaaagataatacattatttaaaaacaactttaataaaagttgcatttcttgtagaaaaaaagcgagagaacatccccatttataatgagaataaagcaattattccactataaatggggatttcctatttctccgagaccctctatctttgcaccatcacattaaaatagaatcaaagatgaataaaattggagtattttacggttccactaccggaacaacagaagaccttgcccgtcggattgcagagaaactagatgttccttccgcacatatttatgatgtatccaaactcactgaagctttggtcggtgaatatgatgtactggtactaggcagttccacatggggagccggtgaattacaggatgactggtacgacggaattaaaattttaaagaaatgcgatctgtctcacaaatatgtagccttgttcggttgtggtgattccgattcttacagcgatacgttctgtgatgctatcggtattctttatgaagaactgaaagatacgcgctgcaaattctgtggagcggtggacacagccggttatacattcgattcttctatcgctgtcgttaatggcaagttcgtaggtcttccactcgacgaagtcaatgaagacggtcagacagatgaacgtatcagcgcatgggttgaacaagtaaaacaagaaatcagctaatctttatctccatataaaataacagtttacatcatggctaccgaaagaatcattcccggagaaatccggattttcctcaaccacatttatgagttcaagaaaggcgtacgcaacatggtactctatacgatgagcagagagcacgaagagtttgccatccgccggctgaagaatcagaagatcagttatatgatacaagaagtaggtactaacaagattaatctgtttttcggcaaacccgaatgtatggaagccatgcggcatatcatcattcgccccttgaatcaactgtctgccgaagaggacttcatcttgggagccatgctgggatacgacctttgccaacaatgcaaacggtattgtaataaaaaagaaggtataaagatagccgtttaaagaataacttttgcattgttagctttgttttgtatgtagtttatcttgagtagaatcgtttcaaaaaaaacaggttttcacaaaaacattttccactggaaacttgttctaataagaaacgattctctcaataacaaactaacaacaaacagtatgctgacacaacaacaagaaccatccaaagcctacgtacttgcgggcattttcactctctccttacgactgatcgtcggctggacttatttctcagctttttggcgcagactcgtccttgaaaacaaactcattccggatggaaccggatacattggagaaaagttcaatcatttccttcccaattccattggtatcaaaccgattattgaatacttggtcagcacaccggatttactttggtgggcaatggtaattttcacattagtagaaggcatcgtcgggttactctatatgctcggtttcttcacacgattaatgagtatcggcgtattcagtctggcattcggcattcttttaggctccggctggctgggtactacctgcctcgacgaatggcaaatcggcatcttgggagtgtcagccggattcactattttcctgtccggcggcggaaaatattctttggattatctgttattgcctaaactttccaagaacaaatggcttgtatggcttacttccggtgaacttccactatctatcaagcaattcagtaaagtcgcaataagcggtgcagtactgcttttcatactgaccttatatactaaccaagtcttccataacggtgtttggggacctttgcacaacaaatcggtcaaaccggaactggaaatatccaacgcaaagattcaagaggatatcctcacgttcaaagtataccggatagaaggagccgacgtgtacggttccttcctgatcggcataacactaaaagacgagaatggaaaaacaatacttcaaaagaatggagaagagctagcccgcttcccacttacccgaataaaaaatgactatgtagccaaagtagctccgggaaagcacagcctcatcattcctttgggaagtaaagcaacccttacaatcagaagtgatgtttttgtggacttgcccaaaggtgactacgaactaattctgacagatataagtggtataacctggaaagagaatattactgtcaaataaagcaagtcagaaaaatctaaaaacaaaagaaggtgtatatcagcaaaaaagcaaaaatgctgatatgcaccttttactcatttacccttttaaatttccttacttcccattcttagctaaaaattacctacatatactgaatttaagaaataactatgcctacttttaggtattgccagcctttttaacctcatataactttgcagtcgataaaattattaaaaagatgagaaaattaactgcaatcgttgttctttgcttcctgtcctctttctacacactttcggctcaggaaacgaaagataattctaaaaacgacaagccttctacagaggagtattcaaagttccgttttggcggatacggagagatggtcgctaacttcaaggactatggtataaaccgcttctatggaggaaatgacggtaaccctaacaaaaaaaggaataccatatccatccctcgtttcgtacttgctttcgattataaatttacatcgaaatggatactcggagcagaaatagagtttgaatccggcggtacaggcacagcttttgagctggagaactccgaaaacggtgaatatgaaacagaggtggaaaaaggtggcgaagtcgctattgaacagttccacatcacacgcctgatccatcggtctttcaatgtacgtgccggacatatcattgtccctgtgggattaaccaattcacatcatgagccggtcaacttcttcggaacatcccgtccggaaggtgaaacaacaatccttccttccacttggcatgagaacggtctggaattcttcggttccttcggaaaagggtatgccagtttcgattatcaggccatgattgtggcaggtttgaatccgaatggttttgaccgcaacacatgggtagccggtggcaaacaaggtatatttgaagaagacaacttctcgtctccggcttatgtagcacgcctggattacaaaggcgttcccggtttgcgtgtaggtgcgtcattctactattgtgccgatgcgggctccaattcagacaaacttgatagttattcaagtaaagtcccgttgagaatattcacggcagatgcacaataccgcaataaatatgtaattgcacgtggtaatatcgtttatggaaatctgggcaattctaccggagtcagtaaagtgaatatcggacaatcgaataaatctccttacagccggctaattcctgttgcaaaaaatgctgtaagctatgcagccgaagcaggtttcaacatcagttctcttttcaaaaacaataaagttcctgtgatctatccgtttgcccgatacgaatactacaatccgcaggaaaaaggagaaaaaggacagacaatggaaaagcgttgtcaggtcagtatgtggacagccggattgaactggtatgctctccctaatctggtagtaaaagctgactactcgacacggcagatcggaacaagcaaagtattcggaaccggaaaatacaacagcgaaaacgaattctctatcagcattgcttatgtcggatggtttatcaagaaataagaaacaatctattaattaatttttatacgatgaaaaaaagttttttctatgttgcagcccttatgttaggactggcatttacagctacttcctgtagtaatgatgatgataatgaagtatctgctgctgatatcgactacaactcagagaatgcaacaagctggcacaactatatgaaaaatgtaggccgccttctgcaaacagatgcaacaaaccttcaggcagcctggacaacaggcggatatggagacgcttttatcaaccataacggtgaattcacaactgccaagacctgtgtacagcaaatcatcgaaggttgtattgatattgccggtgaagtaggttcacagaaaataggcgacccggtgagcaaatataaagctggaaatattcaggaagcaatttatgccgtagaatcatggtatagctggcactcccgcgaagactatagaaataacatctattctatccgcaatgcttattacggaacacttgatggaaccgttgccgataattctatctcaaaaattatcgaaggcagcaattcaacattgaacaacaatgtaaaacaagccatcaataaggcagcgactgccatctggggtattccacaacctttccgcaacaacatcaacagttcggaagcagaagaagccatggaagcctgttcagatttggaaactgtactgaaagagttgaactcttatatcggaagtacagcaagcattaactctgatgccatacttcagccggtggtaaaaacttacgttgaagtagtcgtattgccgacttacgcatcactgaaaagtaaagtagatgcgttatatgatgcagtgatagctctttccaattctccatccaatacagcttttgaaacagcgtgtgacgcttggttacaggcacgccagccatgggaagtcagtgaagccttcttgtttggtccggttgccagcctgggtcttgacccgaatatggacagctggccactagaccagaacgctatcgtacagcttctgaattcaggagactgggaccagctgaactggagcggtgactatgatgaagacaacgaaggtatcgcagccgctcagaatgtacgcggtttccacacactggaattcctgctcttcaaagacggacaggctcgtaaagtgaaataagggattaccccataaaagcatatagaagtaaaggcgagattgactaaatctccttttacttctttggtatgtttgagcatattattttaaataaagtcaattaaagatgaattgcatactaaaatattcattctctctcctttctatattggcgtgcagcgcttgcgataatgacggaattgacatcttggatatagagataccggatggatacgctctgtcggcaggtacagctaccaattttctgaactcatcattagcctacgacactccggcagactgggtgtcgggtgtctatgaaaaccgtttcaatcaaggagacagactctacgatgatgtacggacaagcggtaatggtcatggcggcggactcggtcctgtttatgccggttactcctgtggtagctgtcatcggaatgccggtcgtaccaaaccgacattatggagcgaaggtggttccggcagctatggtttctcttccatgctggtttatatcagccgcaagaatggtgcattttttcaagactacggccgggtactgcacgaccaggcaatctacggcgtaaaaccggagggaaaattatctgtagaatatacctacgaaagtttctccttcccggacggtgagaaatacgaactctgcaaaccgacttacaccatatccgaatggtatgccgaagaaatcaaaccggaagatttgttttgtaccgtccgcatccccttgcgccatgtaggtatgggacaaatgatggcattggaccctaccgaaatagaagcacttgcagcgaaaagcaactatccggaatatggaatcagcggacgttgcaactacatcaccgaacggggagtaagatctctgggattgtccggcaataaagcgcagcatgccgaccttactgtagaactcggtttttccagtgacatgggtgttaccaacagccgttatcccgaagagatttgcgaaggacaaatacaagtcaaccaaggaagcatgatgggactctcctatgatcagctggatattaccaccgaggagatggaagacgtagacctctatatgcagtgcctcagtgttccggcccgtcgcaatgttaatgatccgcaggtggtcaaaggagaacaaaacttctaccaagcaaaatgtcacctctgccatacaactaccctgcacaccaaaccccgtggcaccgttctgctgaacaacacccagcttccgtggctgggcagacaaaccatccacccttattcagatttcctgttgcacgatatgggatccgaaatcatgggagtcggtttgaacgacaattatgtcagcggtctggcacgtggaaacgaatggcgtaccacccctctttggggaattggtctgcaagagaaggtgaacggacacacttacttcttgcacgacggtcgtgcccgcaacctgactgaagccatcatgtggcatggcggcgaaggcgaagcatcaaaaaacttattcaaaaagatgagtaaagaagaccgcgacgcattgattgcatttataaattcactttaataaaaaagcagtatatatcagttattatgaaaaaatatatattcattgccatgctgtcggctttgcctttcgtcgctatggcacaacatgaagaagatacggaaaacggcgtagtttcattggcaggaagagaaggattcaccattgagaccaaaaaaggagactttgtattcaaaccctatttgcttgtacagaccagtggcaatttcaactggtatgacgaggaaggactggacaaagcctacaatcaggataatgtagccaactccggtttttctatcccttacgccgtactcggtttcacggggaaagcttttggaaaagtatcgttcaatctttccatgaatgccgcagccagtggcggagccttgttacagcaagcgtggttcgacgtacagctgaaacaacaatttgcgatccgtgtcggcaagttcaagaccccgttctcacacgcctatctgacgacattgggtgaaacactcttgccatcactgcctgtatcgcttactgcccctgttattctcccccattcactgaatgcggtgacgcccaatatcggtaccggcttcgatctgggagtagagattcacggtttggttgccgacaagtttggctatgaaatcggtttgttcaacggcacaggcgcttcggtcaatacggctacaaagacgctgagtgatgattggcacatcccttccctgctctatgccgggcgatttacttatatgcccaaaggcgtgatgcccgccactcagggaaatccgaaccgtctgcatgaagataaaatcatgttcggagtatccgcttcgatgaatgtagaaagcgaaaatgaaagtaccaatgacttccgtgccggacttgaatttgcaatgctgaaaaacaaactctatctgagtgctgaaatgtattatatgaacataggattcaccaaccgacaaaagatttctgactcctacaattacttaggaggatacgtacaaggtgggtacttcgttgccccgcgcctgcaggcagcactgcgctatgatttcttcaaccggaatggaacagatacaaatggctttctgaatatgcctgccgtaggagtaaactatttctttaagaactgtaatctcaagttacaggcgatgtatcagtacattggtcgtacaggtcatgacacacagctcgatcgtgacaatgatgacttaggaatagccgtacactcagccagtatcttacttcaatatacattctaactaatgcgagaaaggatctgtttatgaagaaatacattcttttctttgctttttccctgcttgtcacgggattgacttcttgtgacgacggcaggatttatgaaaatacaggtttcgtaccgagagaaggacgggtactgaaactgtccggcaaattcagtggtatcaacaaatggtccgaaggatacagcatagtggtggcaggtttcgatgatgagagcgagtatgccattgtttccaaagttattcctactccggagaccgacggcggtgaagtggaagtgatactgtctggtatcagtgaggaagtgaccgagatagaactatgtgtcatcaacagactgcgaaaacgtgtcgtcagtttccagaccatcgaagatttcacggcaactgccgacactaccttcatggaagtaggcacgattgatgtcagtatgtatcataccatccagcaacaggttttcgataaaacctgtacagcctgtcacggaggaagtgccaagcccgcagccgaactgaatttgctgaccggagaaagctatgaagacttagtcaaccaaccttcgaccatcgtaaacgatgtgttacgggtgaaaccccgcaatgccaaagaaagcattttacaccagatattgaatacgaatatcagttcaagctgggggatagaccattcacagatggtcacttcatccaacatcctgacactgattgacaactggattgacgacggtgcgcaagagtaaaatagaactattagtcattgaaaaattgcatatgaacaacaaagaacaacagaacatccagtctgaaaagactctaactgagatttttaaatataatgcagaggcaggagcttcggagtatcacgtaatgatacattccacgaaaccggaagatacatacgaagaacagctgaatgcagttttgaatacttatgataatttacttgccaaagaactcaaaggtggggttgccgtattcaagcgctatttcctgagcgatgctgccaatcaggcagatacgctgctggctttgaccaccgaaggttccgactgcgcactttccattgtggagcagccaccattggacggaacaaagattgccctgtgggtttatctgcaaaccgacatacagacgcaagtactgcacaacggccttttcgaagtgaagcacggtgcgtaccgccatctttgggccggcagcgctttcaaccgtgcagccaactcagagtatcagacccgcctgctgctgaatgattacgtgatgcaacttatggaacaaggatgcagactggcagatcattgtattcgtacctggttcttcgtgcagaacgtagacgtaaactatgccggagtcgtgaaagcacgcaatgaggtctttgtgacacagaacctgacagaaaagacacattacatctccagcacaggaatcggcggacgccatgccgacccgaaagtactggtacaaatggatacgtatgccatagccggcgtgaaaccggagcagattcactttctttatgcgcccacacatctgaacccgacttacgaatacggagtgagctttgaacgtggcacgtatgtagactatggagatcgccgccaagtattcatttccggcacggcaagcatcaataacaaaggtgaagtagtgcaccccggtgatatccgcaagcagaccgaacgaatgtgggagaatgtagaggtgctattgcaagaagccgactgcacatttgatgatctgggacagatgatcgtatatttgcgtgacatcgcagactatactgtcgttaaaggtatgtacgacaaacgctttccgcacacgcctaaagtatttgttcatgcccccgtatgtcgtccgggatggttgatagagatggaatgtatgggagtgaaagcctgtaaaaacaaggattatgcttccttttaatatcaccaaaagattgtactgttgaaaaggctacttgttattttatatgtctgtctggtgggattgcttgctgtgactaccttcgtagagcaagcgtatgggacggactttgtggaaagaaatatatatcatacgatctggttttgttgtttatggggagcgatagccgtaataacacttgccgctctcatccggcgtgccttatggcggcggcttcccatattgttgttgcatggctccttcctcgttatcctggtgggggccatgattacgtttatcggcagcaagaagggatatatacatctgcgccccggcgtagcaatgaatagtttcgaggaaccggaaagcggaaagaatataaaactgccgtttatcatgcggctggacagtttccgggtagtatattatccggggacggaagcgcctgccgattacgtcagttatatcagtcattcccttcccgtctcactatctgactctctctccggacaaaaagacactttctttcatgaacaaatttcaatgaaccgcatatttacttcgcaaggcttccgcttctatcagtcgtctttcgacgatgacgggcagggaagttggctgacggtgaattatgatccatggggtacgagggttacttatgcaggatatattctgctgggcatctccatgatctggcttctgttctctcaaaacggtgagttccgtcgcttgttgaatcatccgttactgaaaaaaggaggagtgttcatcttattccttttctgccttgccggaacagcgcaggcgcaaaagagatcactccctgccctcaaacggatacaagcagatagcctggcacgcgaacaagtgatttaccacgaccgggtagtacctttcaatacattagcccgcgactttgttcagaagctgacaggcaaatcgtcctacaaaggactgactcccgaacaagtaatcggaggctggttactctatcccgaagtgtggagaaatgaatcgctgatatacataaaaagtgcagaactacaacagttgctcggcctgaaaacaccttacgcacgcctcactgatttattcgacggatcagtttaccacttacgggaacattggcaacgggaacagggacaaagcaaactggcaaaagccatccaagagacagatgagaaagtaggactcattctcatgctggagcaagggacattcattcagccattacctgccgatggcagtgtgaaacctctctccaagatacaagtaaaagctgaattgctctacaacagtattccattcagcaagattctctttatggttaatctggcttttggactgttgtctttcctgcttctgcttcacaactgcctgcggagcactgctcttccaccaaaagtcaaaacagtttcacatatagcaggggtctctttttccgtggtgctttatgcggcttttctatttcatttggctggatattgcctccgttggtatatcggcggacgcattcccctgagtaatggttatgaaacgatgcaattcatggcattatgtattctcctggtggcctgcctgctccatcgtcgcttccctttcacacttcccttcgggttcttgctttccggctttgtcctgttagtttcttatttgggacaaatgaatccacagatcactcctttgatgccggtgctcgtttctccatggcttagcattcatgtttcactaattatgatgtcttatgctctattggctttcatcatgctgaatggaatactggcactatgtctgcggaaaaaagaaacagaaaaccatgttaccggggggtatgaaagacaggataatcgggtagaacaattgacactgcttagccgtctgttgctttatcctgccacattctttctgggagcaggcatctttcttggtgcagtctgggcaaatgtttcatggggacgctattgggcatgggacccgaaagaagtctgggcattgattactttccttgtatatggtgtggcattccattcacaaagtctgcagattttccgcaagcctttgttcttccacatttatatgatactagcattcctcactgttctgatgacatatttcggagtgaactatgtcttgggtggaatgcatagctatgcgaatagttaacgttcattccaagaaacaaaatacaaattgtcaaaagtgacaatttgtattttgtaatgctcagagtttcgctaattccgccccttctctaccctcggaatttttatcggattctaggcaattagcgatttatcaatatcgaagttttatagcaattatgatatcactctgcaccttcatctttctcgttccggttctctaagcgagcaatttagccaatagtcttccctcctgctctaactatttcgttcaaggctatgaacgaaatagaaagggaaaagactaaaaacagtctatttccaccttcttttcaggatactgacgctatttgcagggtatagttacgctattcgcaggctatagttacactatacgcaccgtatacttacactatatgcaccgtatacttactctatatcttgtctaaccttactcttcacgctaataagccccgtgctgaagcactctgagagccgggccgggagtaaaagaactcctttctgagagcggggaatcgctatttgaggtcattctgcaatatacaacgacaggaaattacctaaaatcaaatcaaaaagaaagaatatcacagaaagtattgcactttttgctattacacataccttttcccaatatatgcgaaaaggggagaatatcaattcgcacatcctgtggataaatacctgtccccatttaatacggttttgtttaattacccacaaaagaatcaagatgttttctcctttatcccataagattgtatttcctgataccccattatacaatcatccccaatctctaaaatcatctcattcaaaaaataaaacgaacaatagagaacagccgattcaaagattaattatctttgtcccaacaagaactaaacacgttaataacatgagaaacaaatatctactaagtctgctcgccgctttaggcttttccggatgtggcaataataacgaaatctgggacgaaccttgttattatggtcccggtcccgactggactcctgacattataataagcagtcaagtacaaaatgaagaaaaagaaaatattaatggtattcgcgtagtatccagttatatgaatcaagaagattcattaattacagatactgcctataccgagtcacgtgaaatagagcattatacggtaggcggtatagcaatcaatacatttaaattcgaagagtatcctccaaaaaaatctgaaatgtaccttgagtatacagatgtagacggcgaaaagaatggcgcataccagacaaaaaagattagaatacaagaccttggaaaagagggaaaagtcacttacttaaagaggagaaaaaagaagaagaatgaaacgtatcatcccccttactccccgccgatggctggctttagaaatatttcgccggatgaaacacgaaagagtggaagaacatccgctcagacagcttttttgggaatgcaccttacgatgtaatgtacgttgccgccattgtggcagtgactgcaagtcctctcccgctactccggatatgcctctgcaggattttctaaaagtactggacagcataacaacacataccaatccgcacgatgtattcgtcattatctccggtggagaaccaaccgtacgtgaagatttggaaacttgcggtaaagaaatatcccgacggggatacccgtggggcatggtatgcaacggcctgtgtctcacacgcgaacggcttcacaacctgatccgcagcggtatgcgtagtatatccatcagcctggacggactgaaggatgcacacaactggatgcgacgacatcccgaaagtttcgattgtgccgtaaatgccatatgggaaatcacagctatccccgaactgacattcgacgtcattacctgtgtcacccgccgtagcctgccacagttgtcggctatgaaagagttacttatcagtctcggagtcaaacgatggagagtatctaccatctttccggtaggacgagccgccgaagaaccggaattccgtatgaacggagaagaactgaaacaagtgctcgacttcatccgtgacacccgaaaggaaggaattatccgtgcgagttacggctgcgaaggtttcctgggtaactatgaaggtgaagtacggaatactcctttcttctgtagcgccggaatatcagtcggctccgttttgattgacggttctatcagtgcctgtagcagcatccgctccaactaccatcaaggaaatatctatcaggatgatttttgggaaatatggcaaacgaaattccagccttatcgcgaccgttcatggatgaaaaaagacgagtgcgcccgatgcaaatacttccgttattgtcaaggcaatggtatgcatttgagagataatgaaggaaaactactggtatgtcatctgaacaggttgacaggaaactctgcaaatgttccggaataaaagattcagacccactatatattgctagtaacccacccaagaatacccatttcaggtgattgcaggaaatcgtcaaagcctctatctttgcaatatcagaattgaattaattagtcataattaaaaattacgtagccacattgaaaacattggaatcggccgaagtgattctcccgcattctcacatttggttgttagttttaaagaaccatataatgtattcaatattacagaataagtgtaaatagcataaattctagtaaacaaaaggcccggcttgtgaaagccggaccttttcgttttatctctgatgagccgtttttatagtttccatcccgatgtctgttcctgtatattccaaagtttggcgtacagccccggccggctcaaaagttcatcatgagtgccttgttccgcaattcgtccttcttccagcacaataatccggtcggcatttcggatcgttttgaggcggtgagcgataacgattaccgtccgccccgcaatcaaggtattgatagcctgctgcacttccacttcattctccggatcgagagaggcggtagcctcatccagcagcacgaccggagcttctttcagcatggcacgggcaatggagatccgttgtttttctcctcccgaaagagtgcagccgccttctcctaccatcgtatcgtatcctttgggcagacgcatgatgaattcgtgacaacaagcctttttcgctgccgctacaatctcctcatctgtagcatctgtcctgccgaaacagatattattcttcagcgtatcctgaaacagatagacatcctgaaaaaccatggaacaatgtttcattaatgactccggctccagttctttcatatccattccgttaaaacgaaccgagcctttacgcggatcatagaagcgtgcgcaaagtttcagcatcgtactctttccgcttccggaaggaccgaccaaagcagtgagcgtcccttttctaagagtcacagaaatatcatgcagtatttccttttcctgataaccgaaagatacatgatcaaaagtaatatctccgctttcgggcacatcacgatctcccttcatttccggttcgttcatcaacgtaaggatacgtcctcctgcgatggagaagtagcgaaactcggcaaagttagtcaaggcagatgtcagcggatcgaaaacacgggaaccgaccaccagaaacatgacaaacgtgagcagtgaaagttcgcctcctatcaacaggtacgtaccgcaaagtatcatgaatgtcaatccggcacgaatcaatgtgaccgagaataagataaatggaccgagaagcgcctcctgccggatacaggcacgacggagatcactaaaagccattttcaggcgttcgaacttgcctcccagcaaattatatgctttcatcacccgtatgccttgcagatattcttccaagcggtttccggcattaatcttggcttcaatctgtcgcacactcagcttacgctgggcgatattgctaagcaacaggacagcaaccgcaagcggtaaagctacgaacatggccaccgccatgcgccagtcaatccaaagcaagccaaggaaggcaaaaaccggcattaccaacgctcccatcaattggggcaagtgatgggatattcccgtttccgccatggtaaagtcagtgatcagcatggaagaaagatcccccggatctctgcgggacaggaatcccaaggataatttacgcagatgctcggctaaattaatacgcccttcggcactcatctcataagcaccgcgaaagttggcacgataggcggcgcgttcggcaaaagccatcaccaccatatacacgaccaatatagcaaaaatcatccaaagacgattcgtatccagcggtgtaccactaccgtcaaacgtacggaaaatcacatttatggcttcgatagaaagacagaacggaacgatattcaccagattggcaagcatcgtgtaaccgacaggtttacgcagacgttcggtatgtcctaccgtaatattcttgattgcattcattttgtttcctcctttttgatagttaattgccaacggaatgcgctggtataggcatcccacattcttttatatacaccgtccgttttgctcagcacttcgtgacgtccgctttgtacgagcttgccttctttcaggacaagtatctgttcggctgaaatgatggacgaaagtctgtgagcaataatgatgaccgttttatttttgataagttgctgaatggcttgctgcatcttatattcgttctccggatcggcaaaagcagtcgcctcgtcaagcaccagaatcggagcatttttaagaatggctcttgccacacaaacccgttgggactcaccgccggacaaatacactcctttgtcaccgatccgcgtatgatagccgtccggcagactctctataaaatcgtgacattgagccgcacgggcagcttcgatcacctgttcacgggtagcagacgtattaccgacccgaatattctcatagagcgtatcaaagaagagaaagctgtcctgaaaaacaaaggaaacgagattcatcaaatcctcggtcgctatctcttttatattaattccgccaatgcagatctccccttcactgacatcccaaaagcgcggaatcaggttggctaccgtagactttccggaacctgacggaccgaccagcgcagtaatcgctccctgtggcgcagtaaaagagatgtctttcagcgcttcggtacgggtagtctccgccttgttttcgtaggcaaacgatacgtgacgaaactcgatatcataggaagcgggcaaatgcgaaaccgcagtttcgggaagtacctgttcatcaaatatgcggtcgattcgtttcactccctcgtcaatctcgttcgtacttgaaccgagatacatcagtttatagataggagaaaccacgccgggccccataataataaagaagagataaactgccgccagaccaatattctgcgtctctctgctcagaagcaacagacctacgggcaaaatgaaggttatcagcgaattcagcaatacagtaaaagcaatcataccgggctggtaggtgtcgcagactcttaaagcataactcttataggcctctatctcactattaaactggcggaacgagcgcacactctgaccaaatatcttcaccacgggcattcctctcacatactggacagctgaagcactcatacgctcctgcgtatcataatagattttcgtaaactctttggcttttttcccaaagaagttcataaactgcaaaccgatactacaaacgatgcagaccacacaaatagccgccatccacccgttcagggagaagaagatgataaacatcagcacaatggttgccagcacattgaccagatcgggaatggtatgcgccacaaaattctctatcttctccacattctgttccatagtcttcttgatcgctccggtggaagtaccgttcaggtatcccagcgaaaggcgtccgatatgcccggacagacgaatgcgcaacccgtagagaatacggaacgccgccacatgcgatgccatcaatgctccatacagtaaaagcagtcctgccaccagaccgacaaatgccacccatccccagtgtataagcacactgctatccaactcgcttatcttgctgccatgcaacaaaagctctttcagcacttcatataccgaccaataaggcaccagcatacacaaggcactgaccgccgaaagtaccccggcaagcatcagtaagcctttcttctcacctgctatctcaaacaagcgactcacaccacttttctttctctgtttttctttcataccttttcatttatatatatctgatttttaaaaaagaacattcctctgaatcgttcaaaaaaagaaggagctcatacattcatgagctccttccaacctgccgtttcaaaggctatatattctgctataaatttctgcatttcttctttcttcacgtggtgcagcaccagttcttcgagcaaggcaaacagccataccgtattgagatgaataaagaaatcggtgatacctatattcaggtgcgggtacttctgcttcatcccctgaaaaaagacaaagatagtacgtgtcatcgcatcggtatactccgaacggaagttttccagggatgatccctgtgcctggaaaagtaacatacgcaaccgggcacggtgttcggaaaccaaatcgatatattcctgcacggattcctgctgatagtccgaattcgtaaaaacctctatggacatctgattggcatcatgactatatatcttggcatacaaatcattcagcacaggtttcagaatcgtgcggaatatctcatccttattggtgaaataatgatagatgttgctgactgtaatccctgttcgggaagcaatttcgcgcatggaagcatccttatatcctttttcggagaatacttcttcggctatgtggaggattttttcctgtatgtcttctttcaaatattgcatagtggcgttttattcactctgcaaagttgagaagaacttttgatttgggaaatacccatttatagggatatttcaacaagaattacctcatctatattaatacctaataaaaaatcttcaggagatctgtttattcatgtttcagccattctttagaaagcacttctttctcacccttttcattgactaattccatctgcaaaactccgccattgcaatcgaagtagcgtacttctatcgggtgcagtccggctttcaaggccttctgtactataatctctaccggtgagtgtgctccgtcattatctcccagtaattcgccgtccagtttcagcgtactgccgtcgtccgaaagaagagcaaatgtatagatgccatcggcaggtacttccaggtaacccgtgattatcaggccgatatctcctttcacctcttcggggatagaaacggattctacgacatactcaccattcacgggagccgcatcgatatccgcacaaagattaccacggaatttatgccatacggctttcagtccggaattcaaagaagccggagcagcagttgcctccgcataaggagctttgacgtatcgggtacgtgctacatccgatggagtaccgtcgggacggaaagtgcggaaagtaaaatctgtcgtttccgtcactttcagatttccttcataaagagtggattgcttagtcggcatacttccgtcagtagtataacggacttcaatgcccggcaacggacaagtcagatcaaccgaagcctcatcaaggaaagcattcactttgtagaatccttccagatcgggtacccggtagttcaatccaaggatatccatccgcttgaaatgcggaacaagctgacgatagaactctttcagatccggtttcgcctccggctgcacccaggctatttcactcaacgccaccatacggggaagtatcagatattcgatacgtttcatagacggaatccattctgcccagagattagcctgcacgccccagaaacattctttctgttcgggtgacaagcggtcgtctgcatacggatcgtatgccaatatcttcttcacggagtttttatcctgcgcataatcaaaatagaaatattcattcgggcaggcaatcactctttgtccttgcgaagtggccataggcactgcctctttcgaccaacttctccaccaggtaatagcagcatccgaagtcagtccgtcggcaacaacttcatcccagcctatcaacttctttccattggcaaggaagaatttctccatatcacgcacaaaccatgcctgcaaatcttctaccgatttaagtccttccgtgcggattcgcttctggcaacgggggcactttttccagttatttttctcgacttcgtcaccccccatgtgtacatattcataaggaaagagatcgaaaatctctttaaagacatcctgacagaattccagcgtcgtatcctttcccggacaaataggagaagagaatgtttctccccagccgatcagtccgtcacaagcgagatccgggtattgggtgatagcagccaggaaatgtcccggcatatctatttccggaatcacatcaatacctctctgtgcagcataatctacaatttctttaatatcttcgtgcgtatagtaaccaccatacagagtatctccttctacaatccgtattttgttttccggaatcaggaagtcggtattgtcctcttctaccgcacgctccatacaaccacggtcgtgcttgttaaatttacgccacgctcctttttccgtcagcaacggatatttctcgatttcgatccgccatccctgatcatccgtcagatgccagtggaacttattcagtttatataaggacatcagatccagcacatgtttcacttcatctttattccagaagtgacgggaagcatccagcataaaaccacgccattcaaagcgcggcgagtcctctatttgcacggcaggaatggagaaagtctgtttcgttccctgcacttctattccggcaggcagcagttggtggaggctggcaatggcggaaacgatacccgaataatctccggcttcaacctgaacagacttgggggtagcctgaagtttgtaagagccgggctttccattatcctgccctagctggagatagatatccgccttatcggcttcggtcacctctacagaagtagacaccacattccgaagaatatcctgcaaatatccggcagccggaaataaggactgatcggaaacgccgattttcattccatcctttaagacgaaagcacccgactgttccgtcagactaacgggggtaggtaaaattgcaatctcctgcttcaccgtaggcgtgcaagaggacaaaatacatgctgatgcaatcagtagagaagtacttagttgtttgaacataaggttaactgtttaataagttgattactttgacttttattgactatctatatataatacaactcaaacaggcaaactactaaaagggaaagaaaagtttttagtgatttactactaatgatgctccatcgcttccatcagactataaggatattcttccataaagattcggacaatctcaataatatttctctattccgccaaatccggttatcatcttattctctttcactttacagataaagttgtttaatcgcttttcaaattcttccggtcgcttccttgctgcttcaatgtatgcaattcggatacgcttatatgcgtcggaaaaatgccggtagtttctccatgctatttcatcttctttcaatctgtccattatgtcattgggaaaaataaaagggtcagataaaactgtgcgtattttatcttcaaattcagggtgtatcattttatttgccaataaccatttaagtctttctttgttggcttgcgagtatgtacttttaggttttctaggcgtgaaacgctgaattctatgttctttatcaagcggttttatcgtactgtcaatccattcgaaacaaagggcttcttcaacagcatcgttgtatgcaatacttttttcacctgacgatttaagaggaaatacaaaccaaatttcgtcttcggtttcaaagttgtccatcagccactttctccagtcttcccgattttcaaaatactttattttattttctgttgccataataggtcattcaaactaattattttactgcctttacattcgtaataatgaagcatttcgtccatcttctttttatcataatccgtaatacaatctgataagactttgaatcgcttacttacaatcgccaaaaatactaaaaatcggtcaggcagacatgattatcgttgaaatcatcaatgccaaatctgtcgcttatttataaaacatccgggaagcaatcgttttatcacattcccggatgcataaaatgttctgaaaataacagaccggtatcgtatcaataactaatcttcactccggcaaagaaacttctcggaagcgaaggaccgtagatatagttggaatcccggttagctcctctgtcgaagtctttctgatatgcttcaaagatattctgaacacctccgctaagttgtaagtctaccgttttatagagtttgaagtcatacgctatcttcactcccatatcgaagaaccggggtgtacggatggcttccgcctttcgctcgggcatatcgcccattgctacgttttctgcgctgatgtccatacgctgcacaagcatactgccggtatatgtacccgagagagcaatggacaacggtttgacgggagtataagtagccgtaaaataaccgtagatatcgggagtacggaagatttttctttctgccggcgcatcatcgtgccatttatgcggttcatcgtatcggctgcgctgcaatgtcagtcctgcctgtatttgaagcaaagaaagataagcaatctttccttccagagtcaatcccattactttggctcccggaccattgctgcgtattttcaccagcacaccgtcaccacggtcaaaaggccctcctaacacgaacacatcagtcagcctcgtataaaatccttctactaacagattagtctgaaaagcaccaaagcggtgatacatatctgcggatgcactgaagctctgcgatttttcctctttcaagtcctttgcacgctcgatcatcgccactgttccacctacattttcgatatgcatatcttcgtcaaatgcctgtggggcgcggaagccggaagaatagctcaaacgcagattgatattatccgtaggattgaaacgcaggttggcacgcgggctgaaaataacatcatccaccatattgtgcttatccagacgcccgccaatcaaaattccccaatgtttgtttttccattcgttctgtagaaaagcactgtaaaccttgaccgtctggtccgtatggcggtcgtatccccacatattatctttcagccggtcacggttatattcgagtcccgctgtcaggtcggaaggcatgaaaagacatttgtcgaatgtgtgcacatattgcacaccgcccatagcggtgaggtcggtcgtctttccgtatgctttcagaggatcgttgccgggaccataataactgtcacgatccgtattggctgccgaggcaaaaacacttaaacgattcttttcattcggtgagaaataatcgtatttcagacttccgccatctatggagtgttgtaactgctcggcaatatgggcttcgtgaggaggacgatccagcatatctccaccacggcggaattcctgcatatgatggtattcaaacgttagtttggagtaagtactcgttttcagataagaacggaaaccgaccgtctgattcttcagtttcggaagttccgtaaatccgtctccgtcataatcatatcccgaccgatgacggttctgcccgaagatatacaatccggcacgatgatcgtccgttacaagggaagcattcagcgaggtgttgttatcgaatgcggaactgccaccaatggaagtgatcgtatgcgataactgaccggaatttcgcagaggctccttcgtaatgatattgatcgttcccgcaatggccgaagagccgaacaatgccgatccacccccgcgcatgacttctacacgttcgatcatgctggcaggaatctgctccagcccgtataccccggaaagggcactgaacacgggacgggagtcgatgagtatctgtgtataggggccgtccagcccattgatccggacttgctgaaacccacaattctgacagttagtctctacacggacaccaggctgaaaattcaagccctgtgataatgtagaagaattagtggtttcaaacagtttcaaatctactacattgaccagagtcggtgccagacgtcgggtcgtttcactacggttggcagagacgactactccgtccagagcaatcgcatcttcttccagttcaaagttctcttccagcgttttaccttttttcaaggtcacactacgggtaaccgtcttataccctaccgagctgacttccatcataaagtttccttccggcagattcttcaggaagtagtgtccggtagcgtcggtgacggttcctatagtggttccctttaatgctatggtaatataaggcagatgctcacttgtctttttatccaatacatgaccaattatattcgcatcagattttttcaattccggatactccggatgttcagccaatgcaggcaacaaggcacaacataggctgaccaggactaaaagatattttttcattgtcgttagtcttttaatgttttaaatcaaaaataataaggatgggaagcaacagcagtttccaaagaagacctgcctgcttctacgtgatgcagactaaacgacaggaggcgctctgagagaaatggcgcccggacagggacgacaataccgcatacgctgcggagaggcgagaaaaatacataaaagagacaggacagaagtcacaaacaaaggtgtcaaaccattatctgtcaccaatgtatggtccaatatgtgaatcagctgaaactctactgtcgtatggctatgttcgccacctttcttaaagggatgtgaatgaacaatcgtaaccccgtttaccacatgggagtgagtaaacaaagtaatccctgccatgtacgaaataaacagtacaggcaaaaaccacttcattatattcaggtatatttgtttcattcgtcagtttttgtgcagcgaagataaggtttatcttctgcggcaaagatagggattgtccggttccgaaacaatccccatttataaggatttataagctaaaaagattattaaaccattattaatagctaattttcactccagcaaagaaacttctcggcagtgaagggccataaatatagcccgaatcacggtcggctcccttatcaaagtcattctgataagcattgaagatattctgtattccggcattcacctgcaagttcatcgacttatagagtttgaagtcgtatgccgccttcagagcgatatcgaagaagtcttccgtattgaccgtaatcggtttgtcgaggaatccgggaacaggttcgtgaggtatcagcatcgaacccgtataggtaccggaaagggcgatagacaacggtttgaccggagtataagtagctgtaaaatagccgtaagtattcggggtacgcatcatcttctttactgccggagcttctttgttccacacgtgcggttcgctgtaatggctctgctgcaaagtagccccagcctggatctggaatttattcagataagccatctttccttccagtgtcagtcccatcacacgtgctccgggagcattatagcgtgtacgtgtcagaattccgtcttttacttcgccatcagtcaatgcaaagacatccgacaatttagtatagaacccttccaccaaaaagttaatctggaatgcaccgaaacggtggtaaatatctgctgaagcacttaagctctgtgatctttcctctttcagatcctttgcaagctcaaccattgccacatttccacctacgttctccacatgcaaatcttcatcaaaagcctgcggtgcacggaaaccggaagaatagctcaaacgcaggttaatattttgggtaggattgaaacgcaggttagcacgcgggctgaatataatatgatcaatcaggttatgcttatccagacgaccgccaagcaagaatccccaatgatcgttcttccattcattttgcaggaaagcgctaccgatatttactttttgatctaccgtgcggtgatatccccacatattgtcttccagcttatcctggttgaattcgattccggcagtcaggtccgaaggcataaaaatacattttccgaagctgtagacatattgtgatcctgccatccagttcaggtcggtagtgtttccgtaagcattcagatcctgcccgccaccataatagctgtcacgattgatgtgttgtgcggatgcaaacacattaaaacggtgcttctcgtttggtgagaaatagtcatatttcaatccaccgccattgatggaatgttctgtctgttcggccacattcgcttcatgaggcggacggttcagtaagtctcctcccctgcggaattcttccatatgatgatattcgaaagtcagttttgaataagtagtcgttttcaggaaggaacggaaaccgattgtctggccatgtattttcggtatttcagaatatccgtctccatcatggtcgtatgccgaacggtggcggttctgaccaaagatatataaaccggcacgctgatcgtccgttacaagagaggcattcaaagcagtattattatcgaaagcgtctccatctccaataccggtaatggtatgagacaacattcctgaattgcgaatcggctctttagtaataatattgattgtaccggcaatggcagacgacccgaacaaagctgaaccgcctccacgcattacttccacacgctctatcatgctggcaggaatctgctcaatgccatatacacccgaaagtgcactgaaaatcggacgggaatcaagcaagatttgtgtataaggaccatccaaaccgttaatacgtacttgctggaaaccacaattctgacagttggattctacgcgtacttccggctgaaagctcaatccctgtgccagagtagtggagttggtcgtttcaaacattttcatatcgactacattcaccaaagtaggcgctaaacgacgggtggtctcgttacgattggcggaaacaactacgccgtccaaggcaaccgcatcttcttctatttcaaaatcttcttccagcgtacggcctttcttcagtgttacattgcgtcttacggttttataacctactgagctgacttcaagcacgaagttaccttcggggaggttcttcaaaaagtagtgtccggtagcatcggtcacagtaccgatcgttgtacctttcaatgccacagtaatataaggcaggtgttctttggtgtttttatcaaggatatgacctacgatgtttgcatccgatttacgtaaatccggatattcgggatgctcatggagagcagcttgtccttcgagggcaggcaacaatgcacagcacaagcagacaagcgaaaagatgtatttcttcatttttcgtttgttattcgttttcgttaagtgatgatgtgaacaaacagatgaggacttcccgctttaccataaagcaggataccatcggttcaaatgacggaaaaacgaatagcaggaggggctctgagtgccaccaccccatgatagggagaatagtagtgcgtatgctgcgtaacaccatgcaaccgccacaagaggaatggaataaaaagagagagagcaaacacaacagccgcaccgtccgttgtcagatgtgacaggaaatgaactaataacagttcgactgttgagtgcttatgtgccgcccctttcttgaaaggatgcgaatggacgattgtcacgccattgaccacgtgtatgtgagcaaagaatgtgatacttaccaaatacgatacaaacagtaccggcaagaaacagcgcatgatattcaatgacaatcgtttcacctcatcttaaattttgaggcggcaaagatacaaactattattttaacaatcaatacctatatatactgattttcattaatacacagctgaagatatcacctgtataaataaaataaggaataccatagcaatcggataaacggtcgcgtatgccacgcttggaatattactgtctaccatcgaatcggcagcagccagtcccggagtactggtcatacctcccgtaatggttcccagtagatcaagtatgttgatcttgaataccaagcgtcctacaattaccgcaaccagcatcggtactactgtgatagctgcacccactccgaacatcagtaatccgctttcctgaaaagtagccacaaggttctttccggcagaggttccgacttcagcaaggaaaagcaacagacctaactgccgcaacagttgattggcggggccggacatagaccaaatgataggccctgtcttaccaacggcactcaaaaccaacgccaccatcaatactcctccggtcaatccaggtgaaaacgacagtgtatcggagaaagaaatattcaacttaccaaataagacccccagcacaatacccatcgcgatggggaagaaatcagtatcggaaagtttcttcgcattgtttcccagtaggcgggctactcctttgatgccttccttctctcctaccaccatcagtttatcaccaaacttcaaagccaaatccggtgacggagataagtcaataccgcttcgacgaacacgggtcaccgtacaaccgaagtttttctgtaaattcagatcacccagttgcttattgatcatatctttcttggtcaatagtaaggactcgatttcctgtgttttatccaaaggaagttcaccttcttcacgttcgccaattaatacagacagctgattcagtgattcctcactgcctactgcctgaatatagtctccttcgtgcaatactgtatgcgcggtggggatggatatttcatctttatgtttcagacgggaaataacagcacctgtcattgcccgtgcattgatctgcatcaagctacggttgaatacgcttgcattagtgacacggtagatacaagtgcccaactccggaaattgtccgcggcgctctatttcaaggcgacgggcttcctgatccaaatttacacgcatgattttgggaagcagcttcacaaacaaaatcactccgattacaccaaacggataagcgataccgtaagcaatggatgctaacggagagtgggtactatcaattgctaccgccaatcccggagtactggtcaaagctcctgcaatcaatccgactacactcggcgtatcaatatcgaacgcatacttcaaacctactgccgtgaggcaggcagaacagataataagcatagtaatgagaatcagcgtctttcctttactacgaaaagagtcgaagaatccgggaccggcctgaataccgatggtaaaaataaaaagtaccaaaccgaagtttcctaattctttaggaataataacaccaaagtgtccaaaaagaagagcaataaagatcaccgctgacacatcaagcgatagccccttaatcttaattcttcctaacataaatcccaacgctactatcagaaagagcgagaaataagaggaatgcaataagtcagtaaacatgttttttaaaggttagttagtttaagggcgcaaaggtacaaaaaagtctccataaagctattttatagagacttttattatcttcacttaaaaagacaagctgccttaataactgttcaccatatcttcaggaacacaaatataaaagtctgcacggtctttattttcttcatccagttgatgaatggattcttggcgtacagaagtgactgtcactacttttgttccgggacgataacgaagcaaataaggtataattccacctttgaagtcagaatgatagtttccgttgatgtgcagaaacttatctttcatattatgagcaataaaccatcccatcgtggcatctttgacagcttgtgcctgagccagtttccggttatctccgctctgctttcctcccagcatattcatcatgctaaaagccgcttcactttctttctcattatattcgaaaggaacaggcaaaggtgcaatgtaccttttagcttcatctgacaaagaatcaagtacttcgattcctttatttttcacactattagcataacgtcgggggatattagttgcaacaaacggaatgccatgttccttagcgaagaaaacgaccggataataatccgtattataattatcccacaggcgggcttctgcctcaaagtgatcataagaaatctgacgttgcatatattcatccagaatcagctgattgtcactctccagcatttccgctcccagcatcagcttatctttatgaatagcgtacatcgaacgagctatctcaaattccagccaatgcgtaatcggacagttatgtatttctcccagaaagacaatgtcataaccggagagttgcttaactaactctccgtaagtaatctccttaccggtattatcaaataatacgtaagcgcgtttgttcatatctccctgtgcagataccacaccgagacagcagccacacaaacagaccaggcatagcaaccgtttaattattctttgtgtcatttttcagtttgtttttacttaaatatagcagactataattttcaagactcagatagctgttaaacgcctcacgcaaagtagcaggggtaatactctcaagacactgctcgtactgctcgaaatcagccaacgactctccattcttcagtaatccgactaaggtagtacgccagttggcaggagcttcttcattcaacgcttcgcgtttagctatcagaaaagagcgtttgatatttcttaattcctcttctcctatttcctgcaactgcagtttatgcaatatctctttcaacagaatatctatttcgggcatattacggttatcagcagacgcattgatatcaaagtagaatgtccgccagggaattccctcatacatcaacgatatataaggcgaataaaccaatgattcacgttccctaagcacggaaatcaaacgattacgaatcacatcacgcatcagtttcagtgttaacgtactcttcagacccggttgataatatccgaagaaaagataatcaaataaggtctgtgtctcattatcgttcggaaaaccttctatatgtttttcaaccggaagttcaaaatgaggataagaatactccgatggacacaacgaagcagggatcctcccgaacacagatacaaactgccgcatgatagtatccgtatcaaaattgccacagataacatacgtcgttccttcggggcgtgcgtaaagttctttatagaaaacagcgatagaatccagattctgactcttgatctgatcaatggaaagtttattggatgaacggggtatggcagctcccatcaattcatccatacgggcagaaagcaaacggtccggagcacgcttcagcattttttccagcatagtttctttgccataatccttcagcaattcctgacgaatctcttcaaaatcatcatatttaagttccggatcgaatatcttttcaaaaatcaaattaaaaaactccggagcatgggcaacagaggccatacctatgaaaccatgccagtgattctccatcgccatcgtgagcgaaatttctttttgagaaagataatccgaaagcatctctccgtctacttttgcaatgcctcccatatccatatatccgataccttccagcaaaggatacttttcatcaggcaaagaggaagttccaaaaggagcaaaagaggtcagaagcaaagctgtatctgcttcctgtgtaggcttcagtaccaagcggattccattttttagttccacttcccgaatccgtgtgtgaggatattctacaatacgggcaataaaagttgaatcaaaaaactgacgtgacgcaagacaaggaggtgtagctatttctgtttcctcctttctatccggacggacataagagtaagcagtacattctgtctgttctccctgtgcccatgcatcagctatttcctctttcgtcaacggagcacctaatccggtgtggctgctacatcctaccagcagagtttctttataataagaaagccattctttcaacaaagcctgtaaagagctaccttccacttttcttatgtcggttttgagttgttcctgtcgggttgtatccgtaagataccggtcgcctgatatcacataatccacaaagtcatcacaccatgcagaagaggaacgtgataaattgccagtacccgactgcatctgatgacaaaaatcatcttttatatcttccaattcttcctcttgccatccgtgacgaatcaactcattcaattcggctacggtagcagaaatcgccgccaataactcactcctgttttgtccttccactgttaagaccaaatgattcttgtcacttagataccactgatctgaaacactagtcttcaattttcgtccttgaaaacgggaagaaactgctctgacaagcaatctccccatctgtttcatcactgcatcttccatagtacgttctaccacacaaggatgcggaatcattagttcgactttcgttttagtctgcaacgaatcacggatttccgataaatggatacctttagtatattccagcggataggttcggaaaccattcaccggacgcttttgcaatgaagaaaaaccttccttaattttaatttctatgtcttgaggagaaatatctccgacaactattaaagtggctaaagaaggtacataccatttctgataatatccctccaatatctgtggcgttactttccggatatcttccactgtacctaacggtatacggtgtccgaatatcccctgtcctatctttaacgaataaaaatcatctcccaaatcataaccacgcagttcctccagtataattcctttttcattctccactttctctgaactcatggaaatgccatccagccaatcacgcatgataagtaacgaacgatcaatgacttcttctttctgatgatctgctggaacagcaaacatataaatggtacggtcaaaaccggtaaaggcattgatgtcttgtccatacttcattcccaaagactccaggtattccaccaacgaacgtttaggaaaatgagtcgtaccgccaaaagctacgtgttccaaaaaatgggcacatcctttctcctgttcggtctcttgtacagagcccacctccatcaccagacgaaattcgatccgggaggcaggagaagaattcctcaaaatcagataacgcaatccattgggcaagcgaccttccagcgttcctgccggaagcggaatgaagcttgtctgtgcataaacaataaggggagacatggagactatgaaaatagccgccattaaaatagaccttaatttacttctttgcatattccacttgtacacgagtatatcctcctgctaaagaatgatccattacaaattgaaataccatcttgccacctgcattaaaattgaaatttcctttaggctctataaaatttgcctcatccccaaattcatcttttattgcagaagtacgcaggagataataatcaggattcgccgttccatcctgtgcttccaggtctatagcatcaggattgccttctttaatcttttgtttctgtaactcccagggagtaaacacaaattcaaaaggaacaacaggaacagactctccatatacattagtctttatccctataaactcaacatcagctgtcccgtctgacagttcttttaatctgaggttatccagagacattgtcagagttcccggattctccctgttccagttcagcaaattcatgatcattgcatagctgggactggcatattccccataccagaactccgtattctcgaccgtttcttttcgcagtacccaagccagatattccgtcaatcccattggatcatccaccatttttagtaccggtatttctgctgtagccagttcactcaatgtgataatcgtttttctatcatattctttggtaaaagctgcagcaaaagcttccgaataaccgtctgccggactatgtacggtagtgtgacaagaaacaactcccagccattcgtttaagtcaatcccatacttcgtcttataaccctcaatcaacgccttctgtgcttccgtcagttggggaatctgtggattcggctttacacgtaccttcaacacagcactcaattccatattccacgaaggtagttcggatataccaatatcaaagtaggtatcttctacaagcaattctttctgattggataccacttggaaagtagcagatttgcttcccgccggaataactacaggattattttccaacttcaagatgccatcttcatcattcaggattttgaagttaaaagacatatcctgctcacaagccgaagtcaaatccacactaacggtcagtggtgtatcttccatctcttctatcaccggatcctgcgccgacagataaattttgttcacaccttcatatttagtctcatttttatcgtccccgcacgaagccaggaaaggaagaataattcctcccatagcataaataaaaactttcttcattttcttctcatttaaatttattgttatactattagttgttttcaattttagtccacccctcattctgtgatacattttcattatacaaatattccgctttcggtattggaaaagtccaacggtaatcatccttttccactcgtttatctttcatattactgttccatccggtaaggatacttttccgatagcgcttcaaatcaaaatagcgttctccttcgcctgcaaattctttccatttctcttgcagaatagctttcaacaactggtcaccagtaagctgtgtatccactaaagtagcccgccgctgtgcaagataattattcatcacttctatcgcctgtgcatcatgttcctttccatccttacaatacgcctccgccaagataaagcaagctccggctaccctaaatttatggatatattgtatttctttcttttcccaattcattttgttatattttcccaggcagtttgctataaccaccccacccgtttctcctgccatctccaacggatacacagtcctttcataacgaatatccccttcggaataaagattcaacaaagctgaattcaaagtcaagtgatcgcctttgttacgatcataattgatatccttataatatgaattggtagtgaacaaagaaaaaattctctctgcacatgcctcatttccccaaaacttactatagactgattctccaagcacatcatatcctcctttcgcctccatcacctttccggcataaatgatcgcctgatcgtagtttcgggaatataattccagcatagcccataaataataaccacttatctgagaaaaccagtaaatttccgcaggattattatccacttccgtagcttcggtcagcatagtacggatagccttcacgcactcttcaatactcgaacgtttcaggaatcccagtttaaactggtctttcaatattattccgtctttctccgcaccatctccatagtccggagcaaacaaccgcaataaattaaagtaacaatatgctttcagtatcttcccttcgctaatgatacattgtaattgcagcttttctctttctgtagtcactgatatgccatctacccgctctaatacggcattgacaatagctatcgtcgcataataatctttccacaaagacagggacaaatcttcgatcggttgtggctgccacttataaagattattcagattagcatttctgttaatcaaataggtcggaacaaaatcatcgcccaatacagccaactcaaaatccggatttggcagggaattataagcagttgccagcaattcacgggcagtatgcggtgtagtaatggcatccggatcggaaaattgattttcgtagggaatatcaagcgaacaagccgtacagcaaaataccgacaaaaaataacaaataacggtcttcatccgaccttgcattctatttctttttattatagtcatatttccatctgttagaaagtcaaacttaaattaatagttaacacaggctgcattgttcccgccaatgaaccggtttccggatcggattctttataaggagtaatcataaataagttagaagcttgaaaagcgatattagcatacttgataaatttacaattcttctccagaaatgcgtgcggaacacggtaacgtaatgacaccatcgatagcttcaggtaatcgcttttaccaaccgtttccgtattggcataatcagtcaatgaagcaagagcagatgagctaaagaaaggagaataataaattttcccttcatcccctttttgaaaccacatattctgcaactgtcctttaattgcatttttattggcattatcgtcatcgcgaacatacgaataattatatttctgataccctccgaacacataatagaaatccatatccaaatcaaactcacggtaagaaaagctcaggttcagtgtaccgctatatggtggtgtagaatgccccaatgctactatattctcttttttcggattctcggtagcgggaacttcgctgccatctgctcccagaaatacaggaagcccagttatcggattaatacccaacgattttagtccgtaaatcatatcataagatttccccacctcatagtcggggacaatagcctcttcacttgcatataaacgatctgcatgatataaatcgaccactttattacgattgtaagccaacgaaccgcgtaaagacatacgccagtccgtagtatcgaataacttcaccaaggcacttaattcgaaaccttcattacggagtattccaatattacgcttcattgtactgaacccattggatagagggacaggaacatcgagcaacgcatccgtcgtttcacgcctatagatattagcatccagtgtcagacgcttaaaaaattcaacggaaagactaaaatctgtagtaatagtctgttccggcttcaggtcggtattataaagttcggccaattgtaaaaggcgggcattgccgtaataactggtagaataagaaaaagtacctatcgttgaagaagctgatacacccgccaggtttgccatttgcccgtaggaagctttcagattcaggcgtgtaatgaatttattgtctttgagaaaaggatactgactgaccgtccatcccagtccgactgcccatgcggcattccaacgtttatctttgggaagaacagaagaagcatcggctttgtaagtggcaaaaaagtcataagtggtcgcaaagctataccccgccaccagacctacccccaattgagcagtcttttctttatgcgaacccactgatggtttccggtttccagtgatagattgattgataagtgccggagacatttgggtaccgactccataaccggtaatagaaacattatcaacatcagccatataatagtccatattaccaccaaaggtcagatcatgcttgcccgcaatttccttattataggtaatacggacatttgaagatacatttgttgttacattctttcccttcgtcaactttccccgttcctcttcccgtactcctccaacacgttctgataaagcggtagaaggtaccaaggtaagcatttcgttcaacaacacatcaatacctgccaccgcatcgatattcaatcccttcactggctctaagtttaaacttccacttactccaccgcgtttatctgtcgatttactattatactgtctgaccagatcattataagtataatcagacgatgcatttgaataagatactaattttccagttgtcgtttcgtaaggattgagttgatatacaagatcggtaggcgaataagaactcccgttcggtgtatctgtctccgaatatcctgcatcagtactcagagagagatatccccatcgtcccaatttctgatcaagactcatacgagcagtgaaacgatgcgtatcattccccggtacccgtcctccttgttgggcataattggcagatatataataagaggtgttctccgtccctcccctgacactgaggttatgtcgctgataaatactgcgatgtattaattcatcaaaccaatcggtatgaatattcctcaaggaatcaagcactccctgtccctcggcaatcatactattcaaatccggactgttcgggaaatatttccggtaataatcttcactataccgatagccgggagtagaggcattctgtaaacgccgttccagttccagtttttcatcggtatccatcatttccactcctcgtcgtccccgagtagtgatacccatattgaaactgtaattggttgtcagccttccatcgggatttccacgcaaagaagtgatttcaatcactccattggcagcctttataccgtataaggcacaagctacagcatctttcagaacttttatctctttaaggtctgacggattaagtgtcataaatgcatctgacgatataaccttaccatccattacgtacaatggttcattggcagtatctccttcacggaaagaagagtttccccggatacgtattttaggttttgaaccaagatcccctgtattggtcacaatcaaaccgggcaccgttccttgtaaagccaaggacatatcaatcattggtttactgttcaatcgttccatgtctacccgctgcacaactccggattttgcacgaatatccatttcattgatattaggacgggcaactactaccacctcttctaatgattgggtatcctgctgcatagcagcatcctgtaccttttgtccgacatacttcacacggacattcttcattccgataaaagaaaaaataactatatctccttcttcccatcggccacgtaacaaatatcgtccatctgcatccgttactgtaccaaactgggtattccgaacgcgaatggtaacacctggcaagggctctccctgatggtcagtaacggtaccagttaatacaatatctctttgttgggcacagattgtttgagaataaatagctgaaaaaataattataatcaaagaaaaaataaatgacctcattgtagtatttgttatatagaataatctagactgcaaaaatagatactctttacagcctggacaatcacaacatataactatattatatgctacaaatacctaacaacagttattttctgtttcacacgaaacgcctatacattcaaattctaaggtagcatgatgaatgcctgcttcatctaatcggctcttgatcaagtgttttatttcttccattttttccatattatcgatgacaacgtgtgcagtcaaagccgtttccgtggtactgatggcccaaatatgcagatgatgacagctttctacccccggctgttccactatcagttgctgaatctgctgagtatcgattcccaccggaaccccatccagcgataatcgaagactgtcgtgaagtaatccccaggtagaaacaataataatcacagcgatgcccaatccgataatcggatcgatgatgctccatcccgtatacatgataataataccggaaacaactactccgacagagaccagtgcgtcagctgccatgtgcaggtaggctccttttacattcaggtctttatccttatccttcataaaaagccaggcagtaagtgcgttgatcaccactcctactccggcagtccaagcaatggcggaaccgtcaacagataccggatgaaacagcttatctatgctttcagcgataattatccctacggcaaccaataatatgaccgcattcaacaaagaaacaagtatggtgcttttcttatatccgtacgtataacgactgttcggatgaactttctccaaccggaaagccagcatagcaagtatcagacttgccacatcgcccagattatgaccggcatcagaaagcaagcccagagaatcgtaataaaaaccgactccgaactcgactataacgaaagagatgttcagagcgatacctataataaaagctttattaagcgacgttatccggtgattatgttcgtgatgatgaggttccatattatataactattatacatttatatcataaagaacattcaccgaagaatttagttcaggtctttttcttaacattgccgacaacaaagccaaagcacaatggcaagaagcggtagagcagattaaaaaatatgccgctgcaacgaaggtgcaccgattagtagagggcaccgagttaccttgcattgtgatgtagtttcgtggttgggaattggaacggatggaagaattttccattcaagcggattaaaaaactgataactctgtcgtgtctgccttgatagctctgtcaagcctgccttgataactctgtcaagaccgccttgtcaccctgtcatgcctgccttgataatctatcaaggcagacacatcaaaaatccggtatattactaaaggacagggaggatatagggaggctattgctaccggaagctaccaacgcttatactgtagggtcgggtgcttcctcgtctccaccgcccgaacccgaaccacctccggcaggggcttcaccaatataaataatttgcgaggcttggcgaggagacttcaataacgtttttccggcaacaaattgtgtggtaacggtgagcgtgtattctccgtctttcaagccggaaggcagcaagatgataagtcgtgacggatcgtttactaccagcatatcagcgtcgagctttgtgacgcttcctccttcggaggcagtgagggtgatgcctaccgaggcgtcggtgcctgctacctttatgttcttccccagaactgtaaagttacgtccggcagtagccgaaaggttggtagcccgcgtggcggcatccaatgtgccgttgatgtacatagtagcctgtcggtcgcccaaaatctgtacggtagtgtctttaatctcctcccgcaacttttttccctgcgtcagcgacacatatatagagttcttttccggattccatgcattgccttcggcaagccctttgagctgcggaacggcacgaaaaagatccgtattgacactatatccattcatcaccagttcggagataacttcgtgataaaggttgatacttgccgacatcgtttcgcggtgcagaccgggatttttggcagccatccggtccagcacgaactgttggtcaacgctacgggtagattcgaggacgaaaattttgtccgttttgtcatcagtggtgacggtgttgtccgccatccatactttgagtaaattctttgccatattcttgtttttaatagacggaaagaggggcattcagcggctctctccgtccaggttatatttattgtaatcgtttgaaaagagacttccggcatatcggtcgaagtgtcattttgctccctctaatatggattcgccagataatcttctaccatcttatctatgttttcgataaagaaggatgagccactactaacaatcatggcacgtgtaccttttataacaagattttctccgctaatttctgtcagtgtaatacttgggtcccaatgtttcatcatttccagaaatcccccatccggattaatgatactccactttcctgtgccaggatctctgtagcaaatgtttattgcagtggttgtgcctgccaaggcataattcccgtaaatacctatcggcctgctttgcgctgctcttgcttttgcaccgtcccatgcttcctccaaatgtgtttccacattataaatacgcacatcggatatcgaacttccatcctgtgctatcactcttttcccatcagtggctacacgttggttttttccataggcagtattaaataactttttccatcccccatcactctcatcgtattcatacacaccggtattggtggcgagtatgtttccataaatggagcatttataggcacctattcctgccggtgaatcttgaacagcacccaaattaccgtcttcatcaataggatatatataagcgtgattataagcacttccactgtttacatgatttccgctaaccaaaaaatcattgctgatacagacactatatccatgcccttgaatctgcccgttcgcacaataccattttccggtagtcttgctctttttgatgaagaaagtagaattattgttatttccggtatcagcgctaaccacgacataatcaccggaaatatcgattgcgggactctttttcaggatgcttttgtactgatttgtcggaaacggtgtggttccagcctcatcctcatacacgagtactccttctccccacgaaccgtccggttgcaggtcatatatatgatagctaaactcatcggtagaattgtcttttatggcacagaacagtcgattaccggaaaaagcacttgttgcgttgggaatcgttgtcagtttcggttggaaagtcgaactctcgcttgcttttaattctgcggtcagaatggtcttctgccctgctgccagtgtgaggtcggcacttacgtggcaatcgtactccttaccgttggccagaatgattgtgacgttctgttcctcgcccagtatctggggtggcagcagacattcgaaatccaaatgaaacgcttcctggtccgaccacgaccgattcatacgaatactacccgtgcctgccttgtcggtcggaacgttcagcagatactctttggaggaggtatccgtagctacattccccgctgtatagatacggttgagccgtgccgttgctcccataacgtcttcctgcatcactatatcatccaccacatccacggagataaaaagtcgtgccgtaagatggtgaaatgtaaaatccagcgtattggttgtggaagacgccgactgatgtgccgccatacaaatggcggacaacatcttgctatccgaggtctggtccggcggaatggaaatattggtccccactgcgggcaaggtgctgctcatagttccataccaagcatatacttccttcgttgaggaggcattcagtagtcccgtccataattcccggttggcatccgaagcgttcggaacaaatacgttgtccgttcccgaacagaggtacttataagaggcgcttccgctccacccgataaaaatctcgtcatttttcgtgaatgaagtccggttatttttgtctgccacacgagacgccacatttgcatcctcaatggaggcggttatccggtagttccggttgtcttgcccgtatcgtcctgtatcgtccatacacgaagctgacgacaacaaaagcatccatactcctacaactatccgatatttcttcatgttccacatattcatgaatgttagtatcaaaattctatctatataaatccaactccactgtctctacagaacctgtagcggtaacttctttccagcgtgcccattccatatgtttgtccacctccgtgttcagagaggcgcataatccggtgaggtctgtaaaaccgacgatccctgctgccggatcatcaggcgtgcagccagtagcggtattccccgtcatgtaatgacaagtgctgaaattggctcccgacttactgcccgccagccaaccggcagcaggtgtatctccgccctgattgctcaacttggaaagctgtacatagcaattgcctaccgtcttgccggatgccacaccacctgccagtccaccgatgccgcttcccgctgaagctttgctgaaactaatcacggaggcagaagcagcggacgaaccctcataaacagcggaattcaggatattgccgttacaatagcctaccaatccacctatatacatggcgtttgtagctgaggtatttgtgttgatcaccgttgttttgaccagttccaccgaacagttcagcatatccccatcgaccctacctgccagtacgcccgcatacgtggctcccgaagactcgatgctgtaacctgcagtagaactgttgccgggaatggtcaccacccgcaggttactgatgccggactgcgtataccccaccacgcccgaatatttacctgcgataagttgagaattgttctgtaagtcgatgctgatttcccatccttgcccgtcaataggaagtgtaagcggatgactatccgtacctaccggttgatagagttcgcctgtagtgactcccgtcagcacaaacgaagaagtcagtttgatggtaaaaacccggttctctccttccgtctcataccagccatagtcttcatacaacgaataatcaggagttaccccgtcagacaaagtaggaagtccgttcgcattccatagcttggcaaaggttacccagtcggtagcggaagcaatacccttttctttccccgacataccgcctcccgacccggaagtccaatcctggcctacagtggcaatcaccgacccgtctttcttcacatcgagctgataattcacccccgctccttgtatccatgcggaagaggtgggtaaggctatattacttttcttaaattccaactttggttctccatcctgcacataagtaatggaaaacgtggcggatgccttattgggcagcagaaagaaggtagccagtgtttggaaatccgcggcattggctgtcacatacgtgccgccaccggcaagggttgccgtaaaagtttgtgtaccggaataacctccccaaccggagctatcgtcattaaacgtaagtgtggctgccgccggagcattattgaccgataaagcggtcactttaatccccacctcacttttcacgctgaatcttactttgctcagggtatgtttcatcgtgagtcctatgctgccgcttgttccctgataagtctggttcatcaatggcacggaggcaagcaaatcaacttgattggcttctgccgacggtacggtgtaggtaagtgcaggaaaacccttagccgtaatcttctcttggaaggacggattgctaccacccgttgccatctcgtcaacataaggggcataggcaaagaaactcagcctgtccgtcgtattgttcgaccagtattttacgggagagtacgtccacgggcttccattgcccgcccgttccaccttttgattgaacatgaatcccggcgtagcggtactttgatcgaaatcaccgtccgtcaggtaggcgaaaacccctatcgtggtgaggttggcagtgttcagttcggcacgtgtccgtagttcttctacggtggtcaggaaactcagcggaagaccgcctccttgtggggactcctgcggttcgccccctgtatcacaggcggtaaaaagcggagtagcgagaagtgtagcggtgagcaccgctacaacaagttgcctctgtctgcgaaaaatccctgctgtagattcgttcatattcatcattctttcctttttccagatttcttcattcagtctcttttctttctgtgtccgggaagggacattcaaccccgcccggccttttctttctgtcagtatactcatgggctgataagaagcctgaaccgacattggtttactctaccggagactcagtcacttcatttccccactcatctaccttggcatccgcaatcgtgatttcgtgcaggttgatgacgagcgtgtactggtaggtctttttgcgtttcaaatggcctgctggaattttcactacggattcagcatggctggcaatgtacttcaagttaggtgcggtagtcgtcttgtccggggtaacaatgtcgtaatggaacccgaaccatatatctcccgcggcgcagccgcttttagtcgcgtcggcttcattatcgcctacgggaatcaggtagagatattgcttgtcggggaacagggagacggcattaccgttgccttgcgagtctgcggttattttcacgcctgtaactgtaccactactgtggcctgcggtcgggttcgattccgtaatgccgccgtctatgttcagtatcttcttcaggctgaaatccttcgtaggaatgactgcttcgggagtagctccggttgtcccgtaattccagtgtagttccttccacgtggcggtggtgtagaatttggagttggtattgctctccgccgaagcgttgattagcgacatatagccatcggagcccgatgtaccgtggtcgcttcccacaatccacatttcggtgatatagacaaaaccgtccgtgccattcagggaggtgtatacgccatcgcccagttgtgcctggaacgaaatgcgcgagagcgtatgctcgaaattgaaggtgactccgctcttgctgttttcgtaagtcttgtcaagtgcgttagcgactacgaggtccaccattttgggaaggtcttcgccttcctttattttgaatttgacatagggaatgccttgtgtggtggcgtcacagacggtcacgcccgttttttctcccgactcccacttgttttcatagggtgcgtaggcgaaaaaggaaatcttgtcgttcttgttgttgggccagtacttgacggggctgtacgtccatccgcctgtattgctgttcagcgtttcgtcccatttcaccatctggttgtgcataaatccgggggcggtcgatgcttttgcgtcattccagcccttgctgcccgtaaaataccccataatgccgaagccaccgtacttattgccatcggtagggtcatccttgatactgttattgtccgtgtctactccacgggtcggtgttcctgtgtacactccgaacttcatctgcggatgagcgtccggactgacttccgtcacttcattctgcgagcaggctgctaccagcagagcggcaagtgatgccatcattacattaatcgttttcattttccaaaattttaaattactcattatattgaattaatctcttgttagtcactctatcggtatgtccgtatccacttcatccccccaaccgtctacatctacatcaaatcccgagttggaaccgccttcgggctttacatcgggaattttgtctgtcgtagcttccacataaatggtgataacgccttcgccgttgtccttctcggtcactctcacgttgtcataatctccctcgaaaacggtttttccatctaccaactgtgcttccagatgcaaccggtggctttgggtgaagtcgatgccgaatacattgaacgtccctgtcaatgttccgttgaaaggtgaaccctcgtcgaacaccggatgggagagcggaaactcttgtgccacactctgtcccgatgctttgcctgtggcaaggaagatagattctgagataccatccagacgacagatagcggaacggacgttgtttaatccttctacacgtatcacagctattacttcgctcgtccgtttttccgggacaaggtgcagcgtgcaacgatcatctcctgactcaacggaatatgccgacttaccggaggtagtctgggaatagttgcccagcatatcctctgttaccgtgaaaccttccattgtggcggaagctagcttttcaggagaaccggtaatggtgcgggtatccgtttctccgtctgtccgtgtttctattttcttgttataagcctccaatgtttcgtatccgtcgtttccccggaaagcgatattgctgaaatctgtaaaggaacggttgaaaagaatgacattgtaaactccttccggcagtcttatggcttcccgcgagtaatcacccatcaggaagattttaggctcaccgccattggtcgggtagaatatggcagtggcgcctcgcgccgcctcgtccttgttgtccatcccggattggctccaatcggcagtcagagtgatttccgccgcatcataataagtaagttccctgcgttcgcaccctgccaggaagagtaacagacaaaggagtatccatagatgtatgcaggtgaatggtaattcagcacgtatgtcgttcgtcaataatcgcttaccgttcatcttgagcctcctttcttcactctacgattcagtagccagacgagcgagattttcgcttttgtgggaccgaaccaggtatatttcccgttttcctgccagagcaaggtttggtaattgtcgcgtgcatgatagtggcggtagtccgtacgcagcaagcctatgcctatattaaattcaagatgcagatggcgggcaatacgtgtagcccatccgtagctgacgccggcagcgataaagaattcaccttgatagcctttttcgccccattgcaggtcgtattttccacctccggcatagagtcccaggaaatgtccggtcagcacttcacggtcttcacgactcttgcggcttcccagccaatagcgtccttccagaccgcccatcaacacctgcatacagtacttgcccctgtcgaactgccaccaagggaacgcatattctccatttaccgaccaacgcttgccgacaggcacttctatttccacattcggcatcagtgcagcgtcaaacaaaagattggttttcagtgccagcaagggacgtcggcggcaagaagccgctaccggatttctttgcggatacattgtttttcccgactggaggaaggtaagagtatctgtttctattgtgtgcggcatgatggacagaatggtgaacagttggtccatatgccggaacgttctactgttatccatgtagctgctgtccaccagcaccctgtcaaaatggaagtaaagcatcatcggcttaccagatacttcttcacctgttctctgttgggcatagccgtaagaaagaagggtcaatagcaatccgcagcagagagttctccggtttataaaactgatacattcaggtatgttcatgatgatggaggtattttgaaggtttaccagtcggctattttaatatctgccagaaatgtacgtgccacttgattgaaaacaccgattttgttggctatctgcctatggtatatataaaattcttcaggggtaggcatattgcaacggataggttcattcgtagcttcaagtacgtccagtaaagatatatccgacaaggggcggcttaactcatacgaagagagtattcctggctccttattcggcaaacgacggatgagccgccctgcttccagtttgtcgaacagatctttccattctccttcagaaaggaggaaattagccgtttgcaaaacagtatcgaatgaaagatcttgcagcacggcaatagctgtttgtgtgcgtatagataacatatggtttgctttgttcaaccgttacttaccaagtaacagaaaggttaccggaaattacttaccaagtaacagctaaaagcagtccgcaacagaaagaaaaagtgttttcttacaaaattcttaaacgaaaaaggtactttctacaaagattaagtaaatagaatagcggtccgtttttgaaagttcaaagatggataaaggcattatgtgttgtttcaaatgaaagccgaaacaatatgtcgttttacgtgtatatgtgctgcgaaacagttaaatatttacaggtttaaagataaattaaagcatttattttgatatatgaaggattatttccacctttgtcacccgaaataacctgttacttggtaagtaacggtatacctataaatctcttttgcacagctagatatttataatctttcctctccttaaaccttacaatagatacaatcaggtcatcattggcattatccactttttcgttttcaaaaggtttaaggtaagtttccgtcaccttgatagaagaatgtcccaatgccttactgataacccctatcagtagcccttgatagaatgccaatgtagcccatgtatgccgggcggtatacgaactgaccttcacatccggtaacaacaatgccgtcatcttctccaatcccttgttaaaatggcgcagagcacgcagataacaggcgtacaattcagcatcatctttcaccgtctcatccaaaatgggaaacagatagacagagtccggatgcttgctacgatattccttcaacaaactctgcgcctctttaggaacccgtactgtcatctgctgtcctgttttgtgacggcaatatacaatggagttaccctgtatatcctgctgacgcaaataagcaagatcgataaacggcatccccctaaaaaagaacatcaaccggaaataagccaacgcacgctgcacgtcttgtggcaatgacgcaaggtccgtagtgagcagcatccgcatctggtcttctgtgagcgaccgtttggtctgcgaaaccacccgcgtgtacacaccatcaaacagtttcgggcgatactcagcacttcccggaggacaaaccctattatacactgcccgaagcgtgcgcatatacgtagaaatagtattccacttaccattcttctgacgcagccacacctcataatccttcagccgtgcggctgtgaacacctcatctattgacatcttagcctcatcaccatcagaaaaagccttgaaagaattcagtgtactattataggtatgtacagccgaatatttcttttcttctttcaattggctaataatggaagccatacaatcagcaaggtgcatcatttctttctcttttgtaatctctttcgtttccataactttattatttttagttacgcatcccgcacgccccctacaacaagagtgcaatgcggaaggtttttgcgaaagtaaaataagagtaggaatacaaaagcggataggaacgataaaaacaatagggtcaggaaacagaacgattcttctttttggcagactgataaaacaggaaagccaacagagcgaagaaggcaagaagtatggtgatcatctcagtcttgtacgccatcggctctacccatatttcatgaaaaagattccagcgtccaagcacttccacaaatgtccagaacacaacgacagtggcaatagaaaaacggatagcgtatccccattgactgattttcaacaaacgcctgaacataaagaatgcaccgaccagacaaccgaacgcaacaacggcagtaacagggctatgttcgccaatgaaattttcatcatagcaaaacaataaaaccagataactggtccacatgataagattcagttccatgaaagttacgatagacgtatgccgcgtcattggctttactacaatagtggcagtacttttacggaaaaagactttttgaagataggtaaagaaatcgcatccgctcttgatgctgaaaagataaatcaacatgaacattacccaaaagccgaatgaggaaggcatgatcagatactccggtttcgtaaccacttctccggcagcattcagcaacggctgcacctcataacgatgcgcatagtaaacatatataaactccacccatccggtccagaagagcagtcccccaaaaagcccccacaacgtctgccgggtatctcctttggcaaatactccgacgatcaccatcactaatcccacagctcccatcgagaaagctgcataatgaagcgccacagacgaaagcgcatgttccatgcaaatcattaatgcatgccccaaaggcatagtaaacaaaacaatcaggaaagaagcaagtcctgtcaatacactttttctactgtagccacctttcattttcttctcaattttgtgtttttaatatttaattaatatagaattgcaaagataaagacttatgccccgccatccaatacctatatatgattaaacggttcatttcttttcatttcttttaggtattgccgtcacttatatatccccgtaactttgcaaacggaaatttaattaatcattatctatcaaaattcagtatgaaaagattaaacttatggatggttgctctcatggcactatcattctcattcacttttgtttcttgtagcgacgacgacgacaataccgacaatactgagcaagcgaaagcaattgccggaacttataagggttactctatcggtgaaagcagaatgttctctgactatctgatgggcagcgatgccagcgcaacaattactgcaaatacagatggtactattaatctcgtatataaatccgggtccggagattttactctgaacaatctgaaagtttcttctaaatctttcaaaggcgaaggtgaagttgctctggctatgggtggaaacactcccggcaactacgaatacacattggaaggtagtgtcagcgatgctaaagtattaactctgaaagccaatgttcctgtaccgatgggtggtatagatatcaatttcattcaaggagaaactccgatcgcttattatgtagcctccacttatcagtatgacacaaacctcgccatcagcgttcggggaacttcgtacggctctaccgaagattgtaaagcaatcgttaaacgtgcatccgaaactacggtagatatcactctgaacggctttggcaatttatcaggaggcggtaatatgaatttgggagacttcacgattagcggagtaaaggttgaaaaagcaaatagcggttacacgctcagtttaggcgcatttgaatctacagctgaatccgcaagcggtacccccactgcaattacaggtgaaagtctggaaggtacggttacgactgatggtaaagccgaaattacggtagccttcaaaccgggaagcatgcctatggcaatcaccgcagtattcaccggaaacgtcaatgaaactagtgcacaataaataattaaaagaggaaatgagaagaagcagtaacgctattttcagaaatatcatgatactgggagcggctatgtcgctctcagcttgtaatggaatgtttgaagggatttacgacgatcccatcgaagcggaaatggagattaaagagagtagcttttcacaaatcaatgctactgaatacactaactgggtctatatcgacctatctgaacgtaaagcaatgactattgaaatcggagaggaacataagagcgagataccggcagaatgggaccttgccatccaccgctacgacatcaaaaccaatgaaggtgcagccttccagacaacttatacaagtattgatgacctgaaggccagtggaaaacttcctgccgaagagaattttgtaaaagacgaatggacgacggataaaattgcaatcgacatgtccggtatgatggaaggaaacattaaatatacagaagactatcgtaatgatattttatccggctggttaaacgtagacacttcaagtatgcctcctatttacaccatgtccaatcaagtctatctgatacggttgaaggataatacctatgcagccattcgttttaccaactataccaatgccagaggcataaaaggatatatcgactttgacttcctgtatccgcttgatttcgaagaaaacaactaagcaaccaattacaaagaatgaaacctacatttatagtatccatcttgattttctcctttatagcaacctgttccacattcgcacaacaatcgactgaacatatcagcggacgtgtcactgatacgaacggtgaacctctcccgggagccaccatctccataaaaggggaaagaacaggagccgtcaccagtgccgacggaacctatacattacaactgcccggaatcggttcttatatcattactgcctcctacataggttatcaaacagaagaaaaaagaataaccaccgagaaggaaaagaaaataaacttccgtttatccgaagatcagttcgacctcggaacagtcgttgtaaccggtacccgtactcccaaattgctgaaggacgctcccatcatcacccgggtaatcacctcagatgatattaagaaagtaaatgccaacaacgtagccgacctgctgaagacagagttgccaggtatcgaattctccttcgccatggatcagcaaacctctatcaacatgcaaggtttcggaggaaactccgtactgtttttggtggacggtgaacgactggcaggagagacactgaataatgtagactacgaacgtctgaatctcgacaatgtagaacgtatagagatagtgaaaggcgcagcatctaccctttacggctccagtgctatcggaggagtaattaacattatcacccgcgaatcggacgatccatggaacttaaatcttaattcacgtttctccgaacacaacgaccagcggtatggtggcactgcaggatttaatgcaggtaaattcaacagcctgaccaacgtgcaatataataatgtagacacttatgccgtagataatccgggagatttctctactgtgttcggaagccgggtgtggaacttcaaagaacggttaatatatcgtccgctggaaacgctcaaactgacgggaagagccggctattatttccgtgaacgcaataaaccgggggatacccaggacagataccggggattcagcggtggaatgaaagctaactacaccttcaatataatgagtaaccttgaagtcggctatactttcgaccagtatgataagagtgattatcagtctctttataaaaatgacgtgcgtgattacagtaatgtacagcacaatgtgcatgcactctataattataccttcaacggaaagcatacgctgactgtcggtgccgactacctacgcgattatctgatgtcttaccagttcactgataacgcagaccacaccatgcatacggcagacgcgttcggtcagttcgactggaaccccacagaaagactgaatgtgatagccggattacgattcgactacttctccgactccaatgtacgccatctgtctccacatttgggaatgatgtataagataggcaactgttcattaagaggatcgtattcgcaaggattccgctctcctaccctgaaggagatgtatatggtgttcaatatggcaaatatgatgatgatttatggtaatccggaccttaagtcggaaacaagccataatttctctgtatctgccgaatataccaagagtcgttataacttctccattacaggatattataacctggtacacaatcgtatcaataccgtttacagcgaagaccccaaaggacaaatctataccaataccgacaaaatggatattgcaggaattgacgccaacgtttccgccaagtatccttgcggactcggttatcgtctgtcatacacctatattcatgagttcatgcgcgacggtcaaaagaaattcacagatacacgaccccatacggcaactgtaagaatcgactggggcaagactctgaacaaagtcgatttcaactattcactcaacggacgtttgctatcaaaagttaaaacaaacatctacaacgatagtttcaacaatccgtctgccggaagccaggcagtcgagtatccgggatatatgatatgggattttactttctcgttgggaattataaaagggatcaatatgaatctggctgtaaacaacctgttcgactatgtgccggattattattatttcaactctcctaccacgacgggaaccaacctgacattaggactatcactggatatagacaggctcttcaaaaaataaacggcaacaatagaactacatacaaagctaaaaataagagaaatgaaaaagaaaagtaaaatcattttaggtggatgcatcgttgtagcagccctgataggtctatccgtatggaatacctggttcagcgctaccaaaatagctttcgtcaacttccagaccatacagcagggaagcatctcgaaagccaacgacaattcattcatcaaactcagcgaagtgtctcttgacaacctcgatcgtctgaccagttatgacatggtattcatcaatggcatgggactgcgcattgtcgaagaacaacgtcagcaaatacagcaggcagcagataagggtatccccgtatacacctctatggctaccaaccctgccaataacatctgcaacctcgacagtatacagcagaatctcatacgcggctatctgagcaacggcggaaagaccaactaccgcaatatgctgaactatatccgtaaagccattgacggaaaggcttctgctgtacccgaagtggaagatccgatagaaagaccgagcgatatgctttatcatgccggaatcagtaatccggatgatgaacaggaatttcttaccgttgccgattatgagaaattcatgcaagagaataacctttataaagaaggggcacgaaaaatcatgattaccggacaaatggcagatgccaccgatctgataaaagcgctggagaatgcgggatataatgtttatcccgttcaatccatgacaagattcatgtcattcattgaggaagtgcagcccgatgccgtcatcaatatggcacacggacgtatgggagataaaatggttgattatctgaaagccagaaatatccttttgttcgctccgctcacaatcaacagtcttgtggatgaatgggaaaacgatccgatgggtatgtcgggaggctttatgtcacagagcatcgtaacaccggaaatagacggagctatccgccctttcgcccttttcgcacaatatgaagataaagaaggattgcgccattcgtatgccgtccccgaacgtctgaagacttttgtatctacaatagacaactacctgaatctgaaaacaaaacctaattttgagaagaaagtagctatctattattacaaaggtcccggtcagaacgcattgaccgctgccggcatggaagtagtaccttccctttacaatcttctgcttcgtatgaaacaagagggatataatatatccggtctgcctgccaacgctcaggaactgggaaaaatgatacaagcccagggggcggtattcaacgcttatgcagaaggagctttcaacgacttcatgcaaaacggacatcccgaactgatcaccaaagaacagtatgaaagctgggtgaaagaatcgcttcgtcccgaaaagtatcaggaggtggtagatgctttcggagaatttcccggcaactatatggtgactcctgacggcaaattaggtattgcccgtttacagttcggtaacgttgtgctattgccacaaaacgctgccggaagcggtgacaactccttccaggtggtgcacggcaccgacatggctccgccacacacctacattgcctcatacctgtggatgcaacatggcttcaaagccgatgcactgattcacttcggtacacacggcagtctcgaattcactccgagaaaacaagtcgcattatgcagcaatgactggccggaccgtttggtaggagccgttccccactactacctctactctatcggaaacgtcggagaaggtatgatggccaaacgccgttcttatgctaccttgcaatcatatctcactcctcctttccttgaaagcagcgtacgcggcatttaccgggaattaatggaaaagatcaaaatctataataactcccagaaggcaaacaaagatcaggagtcgctggctgtgaaaaccttgactgtgaagatgggaatccatcgtgatttaggactggacagtatggctaataaaccgtatacggaagatgaaatcgcccgtgtagaaaactttgccgaagaactggctacagagaaaatcacggggcagctttacacaatgggagttccttacgaaccggaaagaataacttcttctgtctacgcgatggcaacagaaccgattgcctatagtctttttgctcttgacaagcaacgcggcaaagctacagaatctgccgaaaaacaccgaagtgtctttacccagcaatatctcatgcctgcccgccttctcgtagagagactgatggctaacccttcactggcaaccgacgaactgatttgccacacagccggaatcactccgcaagagttggcaaaagcgagacagatagaagccgagcgcaatgcccccaaaggcatgatggcaatgatgatggctgccgcagccaaaaaggatcaggctgataatgagccgtcgggcaatggtcatccggcttcggcaaaaatggaaaaaggacctcatggtaaaatgcctgcaggcatgaaagaagccatgaagaaaatgggtgctaacatggacccggaaaaagcgatggaaatggccaaatcaatgggtgccagtccggaagctttaaagaaaatggaagccagcatgaaggctaataaggatacatccacagacgcttcgggcaaaccggcaatggcaggaaagactgaaaagccgcagggtatgtcagcaatgatggcagctatgggaaaggctccgaaagaatacagcaaagaagaggtggaatttgcgcttgcagtagctgaagtagaacgtaccatcaagaatgtaggcaattataaaaatgcacttctgacaagtccggaagaggaactgagcagtctgatgaatgccttgaaaggcggatacacagctcccacacccggtggtgacccgatcgctaatccgaacacgctacctaccggacgtaatatgtatgccattaatgccgaagcgactccgacagagtctgcctgggaaaaaggtattgctttggccaagcagacaattgataggtacaagcaacgtcacaacgactccataccacgcaaggtcagttatacactatggtcatccgagtttattgaaaccggaggggcaaccatcgcacaggtactttatatgttaggtgttgagcctgtccgtgatgctttcggtcgtgtcagcgatttaaaactgattccttcaaccgaattaggacgtccgcgcatcgacgtggtagtccagacttccggacaacttcgtgatcttgccgcctcccgtctcttcctcatcaaccgtgcagtagaaatggctgccgccgccaaaaacgacaaatatgaaaatcaggttgcctccagcgtaatagaagccgaacgggtgctgaccgaaaaaggattaagcccgaaagatgcccgcgaaatttcaacattccgggtattcggaggagccaacggtatgtatggaaccggtattcaggaaatggtagaatccggcgaccgctgggagaatgaatcggaaatcgccgatacttatctcaataatatgggcgcgtattacggcagcgaaaagaattgggaagtattccaaaagttcgctttcgaggctgcactgacccggacggatgttgtcgtacaaccacggcaaagtaatacctggggagctttaagccttgaccatgtatacgaatttatgggaggtatgaatctcgccgtacgcaatgtgaccggcaaagatccggatgcctacctcagtgattatcgcaaccggaaccatatgaagatgcaggaactgaaagaggctgtcggcgtagaaagtcgcaccactatcctgaacccaacttacatcaaagagaaaatgaaaggcggggcttcttcggcaagtgaatttgcagaagtgatcaccaatacctatggatggaatgtgatgaaaccggctgcaatcgacaaagagctttgggataatatatataatgtatatgtgaaggatgaactgaacttgggagtcaaacaatatttcgaacaacagaatcctgccgctttggaagagatgactgccgtcatgctcgaaagcgcccgtaagggattgtggcaagcaagtgaagaacaggtagcggaacttagcaaacttcatacggagattgtcaatacttaccgcccgtcttgttccggatttgtttgtgacaatgccaagctccgtgacttcattgcatcgaaagcagacgcacaaaccgctacacagtacaaagaaaatatctctaaaatccgtgaagcaaaagcaagcggcagcaacaagggagtggtgatgaaaaaagaagagatgaatcagacagccgaaaatcagacaaatacattaagcaatgtagccgtaggcatcgctgtcattatcgttattcttgctctgatactctttgtacgcaagcgccgcaaaagcagtcagatgtaacccacgtcctgtgaattatcaatcgtaacttgtaaattgtaaaatcatataatggatacagttgttcttgtacttatgcttcttacagcatttaactttctgttgaagcaaacgttctggaaattaatagcggtcggtattatcgccgctatctgcgctgtcttcgccggattgatgtggccgtatgctatcgagcaatcgaagactcagatagccaattggctaagcaatcagcccttgatgctagatacttccgtactcctcagtgtggaagtctgcatacaaatggcttatgccatgcttgccgtccacgtagccaatgactatccggtcaagccgcgcatgatactcatgtaccgttttctccgctggtttccgggattattgattttcccggttttattcagcgggctggtatatctcatctttgcttttccgggtacttcatttcaaacgatagcatggagctatgcagcctttatcctggcagccatcccttgcggcagatttatactgctctatttgttgccggaaaaagaactgcgcctcgaactatttttcctgaccaatgccctggtagccgttttgggaattgttgccacagtcaacggaaagacttccgcagcaggtgtcagtgaaatagactggaaagcattgacaggcgtcatagtcatcgcactggctggcggaattttcggacttctctggtggaacatccgaaacagaaacaaagaaaaaagtgtgaaacaataatagaataaataactcttcaaattatcaataacaatgaactttatatcagatattttatactggatttcaacaggcttgctcgttcctgtcatcgttttattaatcatcctcttttgccgcgcgattttacttgccggtagtttctatggtcaatatctgtccattcgtaaaacggaaaccctgctccgcaacgagctgagcaagctgactccggacacggtagaagaactgagttccaaacttccggaaaattctagatcacttgtcattacctatatgcgtcaggtattggacacccgtgatactccggcacaggtacaacgtttattggctaattttgaaatcgcagcggacaaagacttagccatctccaagaccctgaccaaactgggaccgatcttaggtctgatgggaacattaattccaatgggacccgccctcgcaggactggccagcggagatattgcttccatggcttacaatatgcagatcgctttcgccaccactgtagtcggactggtagccggtgccgtaggcttccttacacagcaagtgaaacaacgctggtacctgcaggatatgaccaaccttgaattcatatccgaattgctcaatgacaaacgttccattcataaaacctcagagaaatgaaacataacctattgcgaaaagaggaagactccgacccgatcagcgtagtatccaatctgttcgacattgcgatggtttttgccgttgcattgatggtagcacttgtcagccggtataacataacagaggttttctcgcaggaagactatacgatggtaaagaatccgggtaaagagaatatggaaatcattaccaaggaaggcaataaaatcaaccggtataccccgtccgaagatcaggacaagaaagaaggtaaacgtgggaaaaaggtaggcattgcctatgaactggataacggtgaaatcatttatgtacctgaataactaattaaggcatctttgtcgtccgaacaattaacatcgtgaagaatctcctctttgtatgtacagaagaagagattcttctttagcacaacacacatacaacttttatcattggtatggcgttgcacaacagcgataaccccgattgcatgtgccttgtctgcctgtataattgatctacatcaaatcatttgaaaagaatatgcttctcatgctccatcgtttacttttttagttacctttgcgccgattttaagaatccctttgaactaaaccataagtactgtgttgaaaccataacaggaatttacgtataacttaaaagggtaagaaagatgtctacagaaatattagtggatactgtaaccacaactacagatagctgccagatggtagcaacagaaacaacactgcaagtaacagcagccaccaagtctgacaatcagactacagccaacgaggcttataccgctgtacctccacgccgcactttcaatgaacagaaaccgtttgtattttcaatcgtaggctttgccgtggtgtacattgcagcgctcgttatcggacggattatcaaaatgcgaatgccacatcattcttaaaagaagcgcttacgaccaacaaaaaaaacaagtcaccaaaatgatcactcattccgatgacttatcccctttaaacacctttaaacaaaatggaaaatatgcctcattactaactaaactaactaaccctttgaggcatattttgaagaggctgacgcatcagcctcttttttatttatagatagctttcgctctctaatcttattttttgcgagcctcggcaatatagctaagagcttcttcgcattttgcagttacataagcccagtcttctgctgctaccttgtctttcgggaacagttttgatcccataccgacacagaatacacctgctttaatccatgcagtcaggttttccttggaaggctctaccccaccagtcaccatcagcttagaccatggcatcggagccatcaaacctttcacaaagttagttccatatacatcacccggaaacactttgcaaagatcacaacctacttcctgcgcaaaacctacttcagatacagaaccacaacccggagtataagctaccagacgacggttacatatcttagcgatttccggattaaataacggacctaccacaaagttagctcctaactgaagatacatagcagcagtagccggatcaacgattgaaccgataccgatagccatttcaggacattcttttgctgcatatttcacgatttcagcaaatacttcctgtgcaaagtcaccacggttggtgaattcgaaagcacgaacaccaccgtcataacaagcctttactactttctttgccacttccgcatctttgtgatagaatacaggaaccatacctgtagagccgattttattcaatacggctattttatcgaattttgccattttaatttcttattttaaatgaattgatttttcaaactctcaactctccattctcaactctcaactatcgctgtacgcgaccgcttgcgtcaccaccagccaatgcttccacttcttctacagaaacaaggttaaagtcaccattgattgtgtgtttcaaagcagatgcagcaacagcgaattcaagagctgcaccctggttaggcttagtcatcaaaccgtggataataccgccggagaaagagtcaccaccacctacacggtcgataatcggatcgatatcataacgtttggaagtatagaattcttcgccattgtatatcatagctttccaaccattgtgagtagcagagaaagattcgcgcaatgtagaaaccacatacttgaatccgaattctttcatcatctgctggaagatacctttatagccttcagcatctgtgtggcctgcttcaacgtcagcatccggtttgaagcccagacacagttccgcatcctcttcgttaccgatacatacatccacatacttcatcaacggtttcatgatagactgtgctttttcctttgtccacagtttcttacggaaattcaagtcaaccgatacagttacgccatgacgcttagctgcttcgcaagccagacgagtcagttcggcagctttgtcagaaatagccggagtgataccggaccagtggaaccagtcagcaccttccataatagcatcaaaatcgaagtcggcagcatcagcttcagcgatagcagaatgagcacggtcatagataaccttgctgggacgcatagaagcgcctgtttccagatagtagatacctacgcggtcgccaccacgagcaataaagtctgtctttacaccatatttacgcaatgcgtttacagcagactgtccgatttcatgtttcggcaatttggttacgaaataggcttcatgtccgtagttggcacagcttactgcaacgttcgcttctccaccaccatatactacatcaaaagagtcagactgaacaaagcgggtattacctggagttgacaatctaagcatgatttcgcctaatgtaacgactttctttcccataatcttatgttttaaattctaagttattaatattatgaagtttcaatttatcatttttaccccattttatgagttaaactactgattacatgactattaatacataaacagagttataccacacacctttcgtgtgcgggcacaaagatacaacaattttcgtaattacaaaaattgttatatatttgtatcgaaaatattaagattattattgtgtgcgagcacataaacctatataaataaggtgatcgtatgaataaattgcccgaaagaatcagaatcaaagacatcgcccgtttagcagacgtgtctgtaggaacagtagaccgcgtcattcacggacgcagcggagtatcagaagcaagcaaaaaacgggtggaagaaattctgaagcagcttgactatcaacctaacatgtatgccagtgccctggcttccaacaagaagtacacattcatctgtcttctgcctcaacatctggaaggcgaatactggacagcagtagaactgggtatccacgaagctatcgcgacctactcggacttcaatacctcggtaaagatcaactattacgatccatacgactatcattcgtttgtagacgccagcgaagctatcctgactcagcaaccggacggagtgatggtggcccctacggctccgcaatatacgaaaggctttactgatcagttgcaaacgttggatataccttatatatatatagactcaaatatcaaagacgtacctcccctcgccttcttcggtcagaactcacgccaaagcggatactttgccgcccgtatgctaatgctgcttgccagagacgaaaaggaaatcgttattttccgtaagatacatgaaggaattgtcggttctaaccagcaagagaacagggaaatcggattcaggcagtacatggaggaacatcatccgtcttgtactatactggagcttgacttgcatgccgaacgcaatgatgaagataacgaaatgctggatgaattcttccgttctcacccgaacgtaaagaatggaatcactttcaattcaaaagtctacattatcggcgaatacctgcaaagtcgcggaaagaaaaatttcaatctgataggctacgaccttctggaacggaatgtcacttgcctgaaagaaggaagcgtttccttcctcatcgcccagcaaccggaactgcaaggcctcaacggcatcaaggcgctctgcgatcacctcattttcaagaaagacgtgacttgcatcaactatatgccgattgacttgttgactgtagaaacaatagactattaccatagcaaataacaacaaaatccaactaaacaagtacatggaaacaaagtatttaagaattaatcctgccgacaacgttgccgttgccattgttaacctcccggcaggagagcatctatccgtagatggaatagagattacactaaacgaagacattcctgctggacataagtttgcattaaaagattttgcagaaggcgagaacgtaatcaagtacggctaccctatcggtcatgcccgtatggcaaaaaaacagggagactggatgaatgaaacgaatatcaagactaatctcgccggactgttggagtatacctaccatccgactcaggttactctggatatccctcataaaaacctcacttttaaaggctaccgccgtaaaaatggtgatgtcggcgtaagaaatgaaatctggattatcccgactgtaggttgcgttaacggtatcatcggacaactggccgaaggcctgcgccgtgaaacggaaggaaaaggggtagatgccatcgtggctttcccgcacaactacggttgctcacagcttggagacgatcacgaaaacacgaaaaagattcttcgcgatatggtacttcacccgaatgcaggcgcagtactgatagtaggcttgggctgcgaaaacaaccagccggacgtattccgtgaattcttaggagactatgaccaggaccgtgtgaaattcatggtaacccagaaagttggtgacgaatacgaagaaggaatggatattctgcgcgatttatatgccaaagcatccaaagatgaacgtacggaagtacctttgtcagaacttcgtgtcggactgaaatgtggtggttccgacggtttctcaggtatcactgccaatccgttgctgggcatgttctcagacttcctgattgcacaaggcggtacaagcgtgctgactgaagttccggaaatgtttggtgcggaaacaattctgatgaaccgttgcgagaacaaagacctgttcgaacagaccgtacacttgatcaatgacttcaaagaatatttcctgtcccatggcgagcctgtgggtgaaaatccatctccgggaaataaagccggcggcatctccactctggaagaaaaagcactgggatgtacacagaaatgtggtaaaagctatgtatccggcgtgatgccttacggagaacgtctgcaaaagaaaggactgaacctgctttccgccccgggcaatgacctagtagctgctactacccttgccgcaagcggatgccatatggtactctttaccaccggacgtggtactcctttcggcactttcgttccgacgatgaagatttccaccaattctactttggctaaaaacaaaccgggatggattgatttcaatgccggagtcatcgttgagaacgaaccgatggaaaagacttgcgaacgctttatcgagtatgtgattaaagtagcaagcggtgagttcgttaataacgagaagaaaggttatcgtgaaattgccatctttaaaacaggagttacattataagcgtttcaccatcaaaggaaatattacagttatggggagggtgtatcaaaacaccctctttttttatatcactcgttaaacatgccaatagccccatccgcagaaatcatttcagccgttatttttaacctgcggcaacgactgttgttatagaacctcacctgagcattccctgcttcatccggcatcacttccgggttccagtataatgtgcggcgatagtcctcttctttgggaagaacagaataatcgggatgataaaactctacaggttcgctatagccatccaaccaagtttttctgactcccctgcctccttttacgggaatctctccttccggataggtttcaataaaaacagcacaaccatatatttcatctacatccatcggagacatacggatgtcagcataacgacatcttgccgataactcctcgttgatataaatagacttgatagccaccaggcgaagtgtccggtatcgggtctgatctatttcagtagcctccgttcgtttatagtttatcacatacaagggagagcgacctttgtactgcaaccattcctcaccaccactatacctgcgtatgaaattgggattcatacggacaagtagcttgtggatatcttcaccgatataacctcccttatccaaaatatcatccatctccgaaggtacatcgtagtaagcaaccgacttcgaacgattttcataaatatccttctcacgactccatttcttagccttcaccaccacttcacccaaacggtgatttttctctctcataccccgttttgacagagaatcttcataagcatccataaaacgattataatcgatatcatcaccaatcacagtatctgtctgtagttcctgttctgctcccggtttatctctgccggacaggcttatctgcatttctcccagcggatattgtgtaggttgagggctgaagactctgtctaatacaatccggtggtctttccgcttacctttctccatcacagaaagaatcagattccacttgccaataatatcggtaataaaagcaaaacgtcccacactgtctgtttcaaacaggttaagagaaagcgctcccggcgaagtttcctcatctccccgcttcgccagaaaagaagagacttgtatatttggtttaggcttacctctaacaaatgaaacaacttgtccatgcacttcaatcccttgttcgggcatgtacttcaattcaaacggttccacccccgactcgtatttccatgcataacgccgccatccctgcaccaacaacaagtgatccaaagctgttctgtgctctttatcatccgcttcgaaataatagagcggacgatgaacgtagcctttaatctcagacattaacaataagtccgctaacatagaatgccggctttccacttcttcccatccgtcacgcacagatactgatatcggagcggacacaggcttacccgccgtgtcacgtactgaaaagtccaataagacacgatcaaacggctgataatcctctttgtttttccggacactgattgtcaatggctccggttttctcataaagataaggcggtcggcaataatctgtcctgctgtatcaaacaatacgatctgtgccacccctgccttccattccgtcttgtcaagtttgaaagagacaggtgtatttttccggatgttcaacagacaataattaagcagtttcccatgaccaagcacagctaagcctaagacagactccggtgtatgcggattcttttgtacactgactgctatactgtcttccgaagaaagattatcaacttgcaagacatatccctgcaaccgggcttccggcaaatcaaaacggtactttttgccattcaactccacctcagccttatgattctctccgttcgtaggagtatacacaaaggtgccacgtccttcgtgtacagtggcaaaggaggcgatttctttcttttcccggttgataaccgttccggacagtgcgatcggatttccataggcatccgttgcctcaaaagcaacgcgggaaggaatgccttcgaccaaatttcctccttcaggaaaaaacttcagattgacttttttctccttagccgtttttttccgtacctgcggatatttataaacagcatatttctgtatgttcttctctttaaaatcaccagctgcccgaggcttatcgaataccggaagaacccgggagaaaataacctcctctccaaagttcaacatatatttcgtataggcacgaacctcataaaaaccggaataaaaaggtagttgtgttaattcgaaactaccgtggcaacggccgttcctaacaggcaatacacgtttcgctatgacttccccacccggattcaacaattcgacataaagagttttactcaaatccgacgggcggttcagttcggatgtcacaacataacactgaaaccaaacagggtctccctgataataactggtattgtcgaaatgtaaatagactttttcctgtggcagcatttctccgaaattctgcactgcttcaatatagcccgataatttacgaacgatactgtccggcatctgggcttgcaaagaaaatggcagtgccgacaagaggaatagtaagacgaggatagccctgttcatcataattcatctatttcaaattcgtgtttaagattagatctgtcctactccggagagaatctgttctccagtgattaccagccaaatataggaaaaagaattgaaaaattgggatgatttactcatttttatatgctataccatatcatctcccgtcttggcaaatgtaacacgaatcgtcttatgaaacggaatgaaacgcgagataacagctattatgaccgatatcaccaacagataacctaatatttctttcagtgcaagcaacagactctgctcctgcaaagttccataaagagaatgggtagctatctgtaccgcttcatcatatctgtgtccttgtgcaagcgcattattcagagactgagtataacgggacgcagccagcgggtcggcagtcgtgatagtctccgacaaagaatatatatatttctgttgcagacgatacagcatattgctgtaaaaagaagtagccatgataggtgccagtaccgaacggaagattatcagaaagaaagcattcgacaacaaaaacttcgggttcaaatcttctacggcaaacagggcaaaggctataatcaaagtcaacatacccaatccgcggaaaaagatgggcatatataacatttcatacgtactgttcggcgcaatgccaaaatatagaataccaaagaaaataacaaaacaactcattccgcccgctatcagaaaccggaagcgccaacgttgccaacgaaaccaccagaaacagataaaagctccgattacataccccggaagcaaaaagatataaagagaataggtatgcgtgctgtccactttcaggatgatgctcaggtaattggtcaataatgtggtggatgtactgaaaaacataacaagcatcatatagaaatatccgatgattgctttaggctgaaacagaggggcaagactaacatagggattcttcgaatggtgctgaatccagataaataatgcaatcagtataggggaaattacaatataagcacaaagtttggcagaagccatccaatccagaactttcccataattgatgacgtaaatcagcatcagcaaccctaccgaaatgataaacatctcccgaatatgcaaatcggataacggtaccgatttaatcgggcggttatgccggaagcagatgataacaaacagaatagaaaccagaatcaaaagcatcatgaagtaatacatatacttccagttatagtgatatgccaattgcgcagtgaccagcatggaggcctgtccgcccccatacaccaatggataaaaataggaatagaactcgctacggatattcttcgcactgaaaatcttctgtgcataacgaataaaccataacatcagaaaacctttcagaaagccgatagcaaaactgcaggctatcagaatatcggcattctgcgaacgggcgcaaatccaactcaaaaagaactgcaggagcaagtctatcagcaagagaaacttgaccgaaacggctgccagcactttaggaataataggataagcaatggccatgcctgccgaagccgcataatatcccatcgttatatcttccgaattggttccaagcgtattcgatacttcgagcatacttccggtatacgaaccattcagcatggtaaccggaagaataacaatgaaaatgcaacagaaccccagccaatcgggcacccaggaacgaacgggtactcccaactctttcattgttatcatttgcgcaaagcttctgtttcaaccatcatacccgctcttaattgtgccatttcttcagtagagatattctccagctctatccgtaccgggatacgctgttgtactttcacaaagtttcccgcggaattgtctgtggggaccagagaatatttcgacccggttgcctccgagatagcagtgacttccccgttaaaaatcttcccgggcaacgcatctactttaacgcgcacctgctgaccaatatagatattggcaatctgtgtttccttataattagcagtaatccatttatccttgttgcgtaccagataagagatggtttgtcccgtctggacatactgtccgggttctaaggtgcgcctgcccatatatccatcgtatggagcagtgagtaccgtataagacaagttcaatttagccagatccaaatccgcttctttacgcaagataccggcttgaactccggttgtctttttactagtttccgcatattgcgacaaagcagcctgtttttgtgcgactaatgcctgatagcgtgcctcagctgcttcatacgcggctttggtctgctcgtactgttgttccggcaccgattcttctttcagcaaacgttcaaagcgatgatagtcctgttccaattgccagagcttcgccttcgcttcggctatattggcatcctgcacggctatattagtatgggaagtttcgatacctgagtgaagaacatcctgcaaaccgtgcgcatccagcagagctgcttcggcttccttcactttaatttgatattcacggttatcgagcactaacaaggtatctccctgacgcacatattgatgttccttgaaacggatatccttgatatatcccgaagcacgtatatttaacggagcaacgtattggtctacaaaagcatcattggtcacttcgtagttaatgtaacgccaaaaataagtaatagtccaccagagcccggagacagccaaacatacacacaccatatttaatatgatgttgcgagctctcatttttttaagtttccgttttttttcctttaatgttgccataaccctaatatattatagacgaccacaagccttctgaagttgataataagtataaatcacacgagtgcgggcagtgaccagctgcaactctacattcaaacggacagagttggcatccagcaagtcagtcagaatagccaactgattcagataacggttctgcataatacgatagttctcctgcgcctgccggacagacaactgtaaggcttctacccgttgcaaagcttcctgatgccgcagaaaagcagtgcgcacatccatacggattctctgcatcttctgctcttcatcattcttacgcaaagacaccatcagtttgctttcctttattttatgactgtttttgtagattgaggataaaggataagaaaccgacagtcctacattccagttattgttgtacatatccgccaatgtacgcgaaacagggcgtgccagtgtatttgaggcatacagcgatatgctgggaagagacaacgactgagccaaccggatctcgttccgggcaagttccgtttgttttctgagcaatttcattgccggatcatttgtgtaagcaagggtgatatagtcgtcatacgcttccagagcaactgcctgatgcagtagggtcgtatccggtttcagtaacaggttctcatcctgtcccaataaaatatccaactgctgcgacacgagtacgatgctattttccgtttcctgcaaagacaaacggtcgttcgtcaactgcatctcgctgcgcaatacatcattattcgttatcaccccctcctttttcatccggcgaatatcccgcaggcgtaattcggattcctcaatgttccgcatcaatatctcatgctgcttgaaaaggctgaacagattcatgtattggttcagcaaaccaagtttgatttccgcctggtctgttaatgtctgcaactcggcaacttgtttttccatctctgccttacggatagtcctccgaatcttgccaccttgatacagtggttgggaaaagtcgatggcgtaattctgtgaccagtccggaatatccggatatgtcgggccggacaatccccgttcccaaacgaccggctgtcccacaaaacctcctttcaatcccacttgcagatcgggcagtgatgatgtgcgtgccgtctgtgtccgttcttgtgccatggcttctttgagcgcatccgcctgaagctgcaaactatgctgcaccccccgttcgaaaagctggtctacggaaagaaataaagaatccgtctgcgcctttgccggctgaccggcgaacatcaggcagagcggccccatcagatataccctatacgttttcaagaacatcgtatactctctttaattccgataacatgagttcaatgctttctatgccaatcacctgttccgcgtatacataaacctgatccagtatgggacgaatctgttccttaaactcctctccttccggagtcagataaaccagtttgttgcggcggtctgccggatcttccttccggtggacataccctttcttctccagattgttcatcagattggtcagacatgctttgtcttttgcgatacgttcagccaatatttgctggctaatgccttgttcatgccataaacagctcagtacctgaagcatttcgaatgtgatacctgcgttgttctttctcagtgtccgctgcatcgacctacgaaaagccatgcgggtacggaaaacctgtagcatgagttctctaaactctgctccttctcttatcataaaagtactttttacctttttcgggcgcaaaggtatgtatttctaccgaattagtcaaatgtttgactaatttcgtataaaacaactctataaattgttccattcacccacactaatctctaattttcaaaataaatgagcagaatctttgttcatctgaaatcttttattttactttgcatcacaaagtactttttatatgaataaagataaagcattagaatcagtaaatgagataaaagagttgatggaaaagtcctccaagtttatctcgatcagtggattagcggctatcatggccggagtttacgcactagcgggtacatacatcgccacatgctttgttaccccggacacaacattaatcacagccttgaagctgatgattatagtggccatccttgtattggcagctgccgccgtcactgccggcatactgtcttacaacaagtccaaaaagctgcgacaaaaatttttcagcaagctgacctatcgggcattatggaatttttcacttccgatgctgaccggaggcgctttatgtatttctctgctgctgcatggatattatgacattttatcctcggtcatgcttttattctatggactgactttggtcaatgtttctaaatttacctatgccaatatagcttggttgggatacgcttttatctgtctgggagtcatagatagtttttgggaaggccacgccttactgttctggacgataggtttcggtggatttcatatcctctatggaatactgttctatttacattacgaaagaaagcagtcataaatgatagaagcatttcaaaatataaataaggcattcgagagtaaggtccggctaggaattatggctgttctgatggtcaatgaggaagctgatttcaattttctgaaagaacaactctcactgacagacggcaatctggccagccacacccgtgcgctggaagaactcggctacatcgaatgcagcaaaggctttgtaggacgaaaaccgcgaactgttttccgggccacaaagcaaggcagagaagccttcaaatctcatattgaagccctggagaattttctaaagtcaacataataattcactaaacactattatcttatggacggtttcaatgaaaaatcaactgagcaagtgcaggaacaacaaccgctgggatgcctccgccgcttctctaaaacaatcaaggtcatcattatcggaggattaatcattcttctgatgataccgatgttcatgatcgaagatcttatttccgagcggggacgcacgcaggaagaagcaattaatgaggtaagcgagaaatggagccttgcccaaaccattaccggtccctatctgaatatccagtatccggtaacgacagagaacaacggggaaaagaagatatcaatcaaggaccttttcttgtttccggacgaacttctggtcaatggacaattgaaaaccgaaatactcaaaagaagtatttatgaagtgaacgtgtatcagtcggaactgactttgaaaggtttattcagtcccgaagagctgataaaaagcagggtggatatggaacaactacaatttgacagagctgccatctgcctgaacctgacggatatgcggggcatcagcgaacagatcagtatcacgctgggagattcagtttacgtctttgaaccgggaatggataacagagggataggcgctacgggagtacacgccattaccgacttatccgatctgaagaagaacaagaaactgccttatgagattaaaatcaagctgaaaggttcgcagtccatcaactttatcccattgggtaaaacgacccgtgttgatttgaaagccaactggaatactccaagttttacaggaaactacttgcccaacaaccgcgagattacagaaaaagaattctcggcacaatggcaggtactgaatctgaaccgcaactattcgcaggttctggtgaattacaacaataccaatatcaaggatattgagaactccagtttcggcgtcaacttcaaaataccggtagagcagtatcaacagtccatgcgttcagccaaatatgctattctgattattctgctgacgttcggtgtcattttcttcactgaaatcatgaataaaacccgtattcatgcgttacagtatttattggtaggtttagcactctgcctgttctatagtctgctgctctccttctccgaacatatcggctttaatcctgcttatttgttatctgcggcactgactattatattagttggcggatatatgttgggaatcaccaaaaagaagaaaccgtcattgatcatgtccggactattaagtgtactctacctttatatcttcgttttgattcaactggaaacctttgcattattagcaggcagtctgggactatttatcattttggcaatggtaatgtatttctccaagaagatagactggttcaatgagtaaaattaattatggtgtaataattaccatgattgaaaatagtgtcactatccgctcgttatagtgacactatcacagagacatagtgacactatcgtgacgggatagtgtcactatatttaagccgttaatacaaccatcctatcaggaaccggcacaagacgtcaccaccaataattcctataagtgcgactgtccataacttccattgtttcaagttacaagacactttcaaggcattaaacatccaaatcaaagtaagtatcagaaacggcaatcccaacagtgtaagaatcattgccaggataaaataaggctgtgccagcatttcttcgggagacatattcatgttcatttgtgacatcatccgcatggccggcaacaggctgatcagattcattccaaacaacggcagctgagcaaacaaaacagtacccagtacatctatcacacgaatgcgggaatgagacagaaaaagacctcccagataaaagagcagtgcaggaatcagccacacaatcagatgttccgccagataacaccaccaagccggattgggggccggtccaaaatgaagcaaaccatgataatgataacccgatatccaacacaataaggtagatactattaagcccagaaagccccatatcaacgcttgaccacctgcaatccgaataaacggattcactattaattttactttgtttttcatcacatatccattttagttagtttatctattatatcgtccaacatattccgaactgtagggtagctgactcctatgttctttgccatatctttcaaactgccgcttgactttacaaaatcaagaacaaattgctgctctttctccgacaggcgcgccagtaaaggcaattcaaaattgccacaaacttccgtattgcattcttcacaaaacaaccgtcctactttcaatggagcatcacaggatggacattgcaatggtaaccgtttctttacttcattcatatcatcttcatttatgatgcaaaagtagagataaattcgaataaaacaaacgattacatcaataatattaatatagaatttaattttattcattattgatttaattataatcatttttatattcattcaaagaagaactttccattattattcaccatatctctgtttttttctatctttgctttgattaaaaagataaaacgatggaaatactatatataaaaggagatgccacagcaccgattggtttaggtgtcaaagtgattactcatatttgcaacgatatcggaggatggggaaaagggtttgtactggcactttctaaaaaatggaaaatgccggaagaagcctatcgccagtggtacaaatcacaggaagaatttactttgggagctgtacagtttgtaaatgttgaaaatgagttatatgtcgccaatatgataggacaacatggcatttataaagacagtaaaggactccctcccatccgttatgacgctgttcggcaatgtttgaaggaggtagccctgtttgcaattgaccacaaggcaagtgtacatatgccccgtattggctgtggactggcaggtggcaagtgggaacttatggagcaaatcataaaagaagagcttatcaccaaagaaatagctgtaaccgtatatgatttataaataaaatcagagctattcggtgaataatccgcttttcttatgaaacacttgacaaacggcttttaatgttgtatctttgaggaaagaaaactaaaaaagaatgagttttattaaaaaaatagatacataacacacacataaactgatatctctttatatcagagcaaccatgatatggggcaatagtcggatgattattgccccattttgtttatatttccgcttaattcattttatattttcttccaaaactcaaaaaatagtttttaataaactcggataccgtttctaataaacgtgcaaaaagtttattagaaactgaaactgcgtttattaataacgggaataataaatgtaagaataatagacctttctttttagatgaagaaactatcaatattacgggctcttctattgataatataaacatacagttctattattccatccacacaatcggataacctaaatctcttttaatagcttccatactctttcaccaaccgatttatatccatctccatcacaaagcaaatactaaaatgtctttttcagatataccatatccaccagttgcttgccgtcttcgtacataggatggtcgtaattgtcggtaaagaaattctttagccgatgggaaatggtgaagccacaatgttcgtagaaagaaagcgtagaaggtacatcgcctgtaccgaccagcaattctgagcatttcccccgataatgatcaaataaaaattgaatcaagcgttttccatatccctgccgctggaaaaaagagatcgtagctatgttcttgatttcataaattccttccccttcacgagttacgacacagcacgctttcaatccgttatcatacaagacaaacatatcgccacgttccagatagcggtcgatcatactctcctgttcatcagccaaaagcaacagttccaagaactcttttttatccgaaattactttttttatctccatattttaaaactttgaacctttcatcagtatcttgcaaaggtataaaaattcacctgataaacaatttcccgaaagtatatcttgaaaaaccggctcagcaatctcgcactatcaatacaaacgctgaactttaagggcatattcttgttaacttgtcactatcgtgactgatagttctgtgacagaattccgaacaggttgcatctcacagatgaataaccaataataaacctataactaaaaatcgaaattatgtgtacgagagtcgtttattcaggaagcaatggtatggtagcaaccggtcgttctatggactggaaaacagatatgcacagcaacctttgggtgtttcccagagggatgaaacggaacggagaaaccggagagaactcgctggaatggacttccagatacggtagcgtagtgacttccgctttcgagatcgccagtacggacggtatgaatgagaaaggattggtcgccaatctgctttggttgcccgaaaccgaataccccgtaagagataagaataaaccgggacttgccattacagcctgggtgcaatatatgctggacaattttgccaccgtagaagaagccgtagcatacattgacgaagatacctttcaggtcgtttcggatatgatgccggacggttcccggttggctactttacatttatctatttcggatgctacaggtgactgtgccatttttgaatatatcggtgggaaactcacggtatatcacagtaaggaatacaaggttatgaccaactctcctacttacaacaagcaactggcactgagcgaatactggaaatcgataggaggactgagctttctgcccggtacgaatcgcgctgccgaccgctttgccagagccagcttctacatcaacgcattgcccgagaccgatgatgaaagaatagctgttgccagtgtattcagtgttgtacgcaatgcttctgttccttacgggatatccactcccgaaagtcccgagatttccactacgcaatggagaaccgtttcggagagcaagaacctgagatactttttcgaatcaagtctgactccgaataccttttgggtaaatctgaaagatttcgatttatcggaaggggctccggtgttcaaactgtctattgccaatggagagatgtatcatggaaatacagccaagaattttaaaacagcgctgcctttcaaatttatgggcgtaaagggataaattgatagcagcttgctgcatcacatatatcagagaagtattttctccacgtcttcgggaacatatactgttcccgaaaactcctgagcagcttcttccgtataatacaacaaaatatttccgaatactattcacgcaccacaccactgacttccatttcaaggaagtagtcattctccaatttaaaggtgtactaaagaatcaaacaatcatccaaatcaatagaaaaataatacaatgcacttgttttctcttattattatcgtttactttgttggcaaaaattaattaacgagccatgaaaaacctactattagcagccatgcttttctgcacaaacatagccatcgcacaaggtactatagaagattaccgtcgtgcttactcagcaggagaaaaattcagtgcaaacaaagtattctattccaatgtcaatccggagtggattggtaaaacgcattatttctggtatgtacgaaatactcccgacggacgtatctatgtattagtggatgccgacactcaaaacagaaaagacttgtttgaccacaaactcgtggcagcagctttaagtgaggcatcgggacgcaaaatagaagccacttctctttatctggatcgtctgtctgtcaacaacggactggatacgctacatttcgttttcaacaatcatcgctggatgtatgtcatcgacaaaaatcagctgacagatgaaggtgctctgcccactccacgcaaacaacgccactggatggaaacagatgatgaaaagacggctgctcccgtcacctctcctgacaagaaatatacagcattcattaagaatcataatatatatgtaaaagaaacagctaccggaaaagaaaaacagctaagtctggacggtactttgggaaattattactcagcctatatccgctggtctcccgacagcaaaaaagtcgcttcctgcaagattcgtccggtagaaaaacgctatgtatattatgtggaatcctccccaagcgatcagcttcaacccaaactccacaaacaagagtatgccaaaccgggcgatgaacttccgtttaagataccctgcatatacgatgtggaaacaggacacagtgtgattccatcgacagatttattctctcaacaatattacattacggcccccgaatggaacagcgacagtcaagccatcactttcgaatacaatcagcgcggacatcaggtctaccgggtattggaattttctgccgcaacaggaaaggtacgcccgttaatagaagagacaagcgacaaatacgttaattattcccgtcgtttccgacatgatttacaaaatggaaaacgaatgatatggatgagtgaacgtgacaactggaatcacctgtatatgtatgaccgtactacagcccagcctattcgtcagataaccaaaggcgaatggtacgtacgtgatatcctccgggtagatgaaaccaaccaacttatttatttctcggcaaatggcgtacaagctaaagaagatccctacctgatccgttattatcgtatcggcttcgacggtaagaatctcacttgtctcactccgacagaaggaatgcataatgcatggttctcaaaagatatgcaatatttagttgatgtatattctatggtagacaaagctcctgtagccgtactccgggatgccaaaaacggaaaagtcatcatgccacttgaaacggctgatatcagtcgtctggaagctgaaggctggaaagctcccgaagtattcaccgccaaaggtcgtgacggaaaaacggatatgtggggaatcatcattcgtcccagcaattttgatcctgacaaaaaataccccgttttggagtatatctatcaaggaccgggtaatcaatacgtacccaaaacctttattccttataactactttatgagtggtattgccgaactcggttttattgttgtcatggtagatgggatgggaacttctttccgttcacgcactttcgaaaacgtatgttacaagaatctgaaagatgccggattgcccgatcatattgcctggataaaatccgctgcccaaaagtacccttatatggacatagatcgtgtcggaatttatggttgttccgcaggtggacaggaatcaatgacagcagtactgtttcatcccgaattttataaagcagcatattctgcctgtggctgccatgacaatcgtatggataagatatggtggaatgaacaatggctgggttatccggttggtgaacaatataaagaaggatcgaatgttgagaatgctcacttgctcagtcgcccgttaatgctggtagtaggtgaaatggatgataacgtagatccggcttctaccatgcaggtagcaaatgcgttgatcaaagccaataaagattttgagttagtggttattcccggtgctcaccacactatgggagaaagtttcggtgaacataaacgctacgacttcttcgtgcgcaatctattaaatacaactccgccgaaatggaatgaaataaaatagtgaatactttgtagaacagtatccactactttattcataatccggtcagttactttttctatgctccagaatcgtatccatattttccaaagcccagcctactaatccttcaatatgcggaatcaaagttcctcctgtatctgtcagataatactctacacggggaggtacttccgcatatattttccgttcaatcaaaccgtcagattcgagcgtacgaagagtaacagtcagcatccgctgtgaaatatcctctatcgttttatgaatatcgctaaaacgcatcgtaccattcgcattcaaagttatcagtaccagcatcgaccatttgtctcccaagcggcttatgacatctcttacggggcaattccctgtcgggtgaaagtttttcatctttttaacgttttgtgttatactgagtttcaacaatagttacttccatgtaactaccttattctgaggttcgttcttgtatttttcaattaaggtagatacatttgcatcacaaaagtaataaacttactaaaaataactattgtttcatttaaataattatgattatggcaaagaaagtagcagttttagcagtgaatccggtaaatggttgtggtttattccaatacttggaagcctttttcgaaaatggcatttcctataaagtatttgccgtatcggatacgaaagagatcaaaaccaattcaggaatggtcctaatagtagatgatgtgattgctaatctaaaagggcatgaagacgaatttgatgcacttgtattctcctgtggagatgcagtacctgtattccagcagtatgcaaaccagccatacaatgtggacttgatggaagtcatcaagactttcggagaaaaaggaaagatgatgatcggacactgtgccggtgcaatgatgtttgactttacaggtataacaaaaggtaaaaaagtcgctgtccatccgctggccaaacctgccattcaaaacggaattgccacggatgaaaaatctgagatagatggcaacttctttactgcacaagatgagaatacgatctggacaatgttgccgaaagtcatagaagcattgaaataatgccggaaagtatagaaaggaataaatccacacacaaaaagaattattcatacaattgaataataaactcattcgttcctttaaaaccaacggcccgttcctcggtgtgcaacgggtccttcctttaaaaccaacgagccgttggttttaaaggaaaaaacagtcacccatacaacattcataatcaacaatttacgcattctgcttttaacaagcaaatattgcagcttcattcattaataaaaacagacaacaataggccaattattgataaaaacaagtgcatcctttttcgtacacctacatatttttggtttacacatccgtataaggtcggattcgaaattccttgagcaatacatctactttattattttttaattggatgccatcgtttttcagattgtttttagtacttttgcccgtatcaaatcaataaataatatatcgaacacaaacatcatactctcatgaatatgaaaaaatatgtgctagcattttttctatgtttcatatctattactcctattttagcacaaagagaccacatagatatttcaaactatattttatgcatcaattcctatgcagaatcttctccttggagtaacaggatgatttcaaccgtatcggagtaggttcaaaagaacccaaaactggcattatatgcggaacatatgaatactttaatgatcgataacgatacgattttaggagaattcaagaatatgatctctcaaaaatacgagcatcatcgcccacggctgctaatattattgggaaacccttctctattactacgtgatgaatatagagagctttggggagacattcctattgtactctgttcggaagaaaagtttataggtcctaaagacacctacatctacaaacaaccagttacacaagcggagcgtgttccgatctcccaacttgccgatccctacaatctggtacttttatattcaaacctttatttacgggaaaatatccaactgatttctcacataatccctgatatgaagaaattcatatttatcggtgacgagcgagaaatcaatcagaccaataatttggaaatacagacaaagttaaaagccataaatcctaatattgaataccagtacatcacgccacaaaaaatgacaacgaaccaattattggattcattgtatcatgttgatccgaatacaaccggaattttatttgcttcctggttctacaaaacgacatttgcaggtaatacttcattagttaccaatgctcacaaacttatcgtaacaactacagctccaattttcacccttaatatggctgatataacagaagaaaacggtggcatgataggtggttatacttatgaccaaaaacactataaccagcaattaattcataccatttcagaaatacttacaggaaagccggctagagaaattcccttttatatgccatcagatggcgcacctattatcaactatacgatattactccgtaaaggattctctccttccatgtgtcctccaaacacacattttctgaataaaccgcttggattctggaaacagaacaaatatttcattatgggtaccttgtcttttatgatattactggcaatcgtattcttttatcgtatccatagcctgaatagcatcaaaaaagcacagcaaaaagaaattgacgcaatgacaaattataagaatctggttaataacatgcccattctctatatgcaggaagaagtgcttgctgataaaaatggcattcccgtagaactgatttaccgcaatgtgaatgcgcattttgagaaaaactttttccgcaaagaagaagttgtcgggaaaaaagcgagtgaaatatttccagaatcaatgccggacttcctgcacttcactcaaatagccttatcagaaaataaagtaataacattcccctactatttcaaaaaaatagataccttctacgatatagtacttaaagcaaaccggcaaaataatatgattgatgtattttgcctgaacagcacagagctccataaggcacaacaaaagctaagcactatcaacaacaaactcgccatgtcacttgacgtagctaatatcgtgccatggaaatgggatttgcgaagtaaaacaattttatgcgacatcaacaaaccgatagaacttagcacacaaggaaaagacgttgccgaagaacaactggcagtacccgactatcactatttttccaagatatttaaggaagaccggaaacgggtagaacaagcttatcagaacttaatagacggtcattcggaaaaagtaaaagaagaatatcgcgtagtcagcacacaaaaaggatttcataggatagaatgggtggaagcccaagcagccgttgaaacgcgggacgaaaatggcaacccattgactcttgttggctcctcactcgttatcactgaacgaaaaaaaatggagatggaactgattaatgccaaaaaccgtgccgaagagtccaatcggctgaagtctgctttccttgccaacatgagtcatgaaattcgtactcttctaaatgctatcgtcggtttctccggtatattggcatccaccgaagaagaagaggaaaaacaagaatatgtcagtatcattgaaaacaataatacgttattattgcagctcatcagtgatatccttgatttatcaaaaatagaagcaggaacattggacctgcactattccaatgttgaaatcaatgatttaatgaaagacctggaaaacatgtgtcaactgaaacttaagtcggatgctgtcaaactggaattcgtagctcctgaagaaccatgtttcgcacatatagaaaagaacaggttatctcagttaattattaacctggtgacgaatgccataaaattcaccattcaaggtagtatccgatttggatacaaacgtcagaacaatgaattatatttctatgtggctgatacaggttgcggcattcctcaagataagcaaaaaagtatttttggacgtttcgtcaaattaaattcatttgcacaaggtacgggtttaggactctcaatctgccagacacttgtcgaacacatgggaggtaaaatcggggtagaatcagaagaaggaaacggctctacattctggttcactttgccttacaagcaagcagagactgttaagaagagccttccaaaggacatacaacctattgccatagaaaaggataagctggtaattttgattgctgaagataatgaaagcaattataagttgttcgaatctattctaaaatatgattatcatctgcttcatgcctgggatggtcaggaagctgtaaacatgttcaaggagcataatccacaaattatattaatggatatcaatatgcctgtcctggatggatatgaagcaaccaaagaaatccgcaagtactctgccaaagtaccgattatcgccattacggcttttgcatatgcttcagacgagcaacgggtgatggaaagtggttttgacgggtatatgccgaaacctatcaatgcccgtcagttgaaggcgcaactgacagatatcatgcaaaaacgtattgtattgctatgacttatgtgtttccttactatctttgcagttcgaatatataccacaatatcaatttatgactgaagaaaaaatacataaagaacgtcatggcagctggtgggcattgagtccgttactcgtctttctctgcctttatctggtaacttccattcttgttaatgacttttataaagtacccatcactgtggctttcctcgtgtcttcctgttacgcaattgccattacgcgaggattgaagctcgaccagcgaatctaccagttctccgtaggagccgccaacaagaatatccttctgatgatatggatattcatccttgccggagctttcgcacaaagcgccaagcagatgggagctattgatgcaaccgtcaatctgacactgcatatcctccctgataatctgctattggccgggatattcattgccgcctgttttatctcattatccatcggaaccagcgtagggacaattgtagcccttactcccgttgctgtcggcctggccgaaaagacagatatcgcccttccgtttatggtagcagtcgttgtcggaggttctttctttggagataacctgtcgtttatatccgatacgaccattgcctcaaccaaaactcaggaatgcgtgatgcgtgataagtttcgggtaaattctatgattgtggttccggcagcgattatcgtactgggaatctacatttttcaaggactatccatcactgcgcccgcacaagtacagactattgaatggataaaagtcataccttatataatagtactgggaacagccattgccggaatgaacgtgatgctggtattaataattggtatcctgaccagcggtatcatcggcatagctaccggaagttttggcgtattcgattggtttggggcaatgggtacgggtatcacaggcatgggtgaattgatcattatcacattactggcaggcggtatgctcgaaacaatccgttataacggaggtattgatttcatcatcaaaaaactgacccgtcatgtcaacagcaagcgtggtgcggaactgagcatcgccgctctggtaagtatcgccaacctatgcactgccaacaatacgattgccatcatcaccacaggacctattgcaaaggatattgcaaagagattccatctcgaccggagaaaaacagccagtattctggatacattctcctgtctgatacaaggcatcataccctatggagcacaaatgctgattgctgcagggttagccaacatctctcctatcagtatcatcggcaatctctattatccgtttacgatggggatctgtgccctgctcgctatcctgttccgatatccgaggaggtattcataagaaaaagaaaggaaatatttgtcaatcaaaagaaaagctgtatctttgcgcccgctattacgagttagtagcataattcaaatcattaattaaaaacaattattaaaaatggcaactagaatcagattgcaaagacacggacgtaaaagttacgcgttttattcaattgtaattgcagacagcagagcaccacgtgatggtaaatttattgagaagattggtacttacaacccgaacaccaatcctgctacagtagatttgaatttcgacgctgcattggcatgggtactgaaaggtgcacaaccaagtgacactgtacgtaatatcctttctcgtgaaggtgtttacatgaagaaacatcttcttggcggtgttgcaaaaggcgcattcggagaagcagaagcagaagctaaattcgaagcttggaagaacaacaaacagtcaggtctggctgctttgaaagctaaacaagacgaagaaaagaaagctgaagctaaagcacgtctggaagcagaaaagaagatcaacgaagtgaaagcaaaagcactcgctgaaaagaaagctgctgaagctgctgaaaaagctgctgctgaagcacctgcagaagaagcaactgaagctccggctgaagaagctgctgcaacagaagctgctgctgaataaatttcggcaggttcctaacaagacatttggaaaaagctataaatcctcttcggttcgccgaaggggatttttttatttcctgctatagaacatattaaaatagttctctacttctgaataaatttcttttctttgcaacagcatagctcagcacagtcatttatcttataacagtatgagacgaactgataaaaagaaaacattcggtcaacagtccagcaaagttacgcaattagcggatacattaagccaggcgatttccatgaaaaaatttcgtgaaggagattctttgccttccatcaatcagttaagtgcagaatatggagtatcacgcgataccgttttcaaggcctttcttgatttgcgcgaacggggactgatcgattccactccgggaaaaggatattatgtaaccagtcaggtgaccaatgtcctgctcctgctcgaccagtacactccttttaaagaagccctttacaatagtttcgtcaaacatctgcctattaattacaaagtagacttgctgtttcatcaatataatgaacggcttttcaataccattatccgcgaatctgtcgggaaatataataaatacatagtgatgaatttcgataatgagaaattcagtatggttctcaataagattcatccaacaaaattattgcttcttgacttcggtaaattcgagaaagaaaagtattcttatatctgtcaggattttgatgaagctttctatcaggcattactcatgctgaaggagaaactacggcactacccacaacttgttctgttattctctaaaaatctgaagcatccccaaagcagtaaagagtattttacccgtttttgtgaggaacaaggatttttatgcgaaattcaggaagatatcgagaatctgaccgtacgcaaaggagtagtctacatagccatcaagcaacaagatgtagtgaaggttgtgaaacaaggaagactggaaggactgaaatgcggaagagatttcggtctgttggcatacaatgatattccttcctacgaagtgatcgacgaaggaattacttcattgagtattgattgggagatgatgggaaatgaagcggcaaactttgtcctgaacaatgtcccgatacaaaagtacctgcctactgaagtaagactccgaaagtccctgtaatttttttgctgtattgacagcacagttcagcacagaattcaatcaccaaataaaaatttagaaaccatgaaaaagtatccgaaaatcgggattcgtcccactatcgacggtcgccagggcggcgttcgtgaaagccttgaagaaaagactatgaatcttgccaaagcagtagccgagttaatcagcagcaacctgaagaacggtgacggaagtcctgtagaatgtgttattgcagacaatactatcggacgtgtagccgaaagcgctgcttgcgcagagaaattcgaaagagaaggcgttgggtccactatcactgttacctcctgctggtgctatggtgcggagacaatggatatgaatcctcattacccgaaagctgtctggggcttcaacggaaccgagcgtccgggagcagtataccttgcagccgtattggcaggacacgcacaaaaaggactccctgcattcggtatttacggacgcgatgtgcaagacctcgacgataatacaattccggaagacgtagcggaaaaaattcttcgttttgcacgtgccgcacaggcagtagcaacgatgagaggcaaatcttatctgtcaatgggtagtgtatcaatgggtatcgccggctctatcgtcaaccccgacttcttccaggaatatctgggaatgcgcaatgagtcaattgacctgacggaaatcatccgccgcatggaagaaggtatctatgaccacgaagaatatgccaaagcaatggcatggactgaaaaatactgcaaagtaaatgaaggagaagacttcaagaaccgcccggagaaacgcaaaaaccgcgaacaaaaagatgctgattgggaatttgtcgtgaagatgatgatcatcatgcgtgacctgatgaccggaaacccgaaactgaaagaaatgggattcaaggaagaagctttgggacacaatgctatcgctgccggcttccagggacaacgccaatggacagacttttatcctaacggtgactatccggaagcattgctcaacacttctttcgactggaacggtattcgtgaagcattcgtagtggctaccgaaaacgatgcttgtaacggtgtagcaatgctgttcggacacttgctgaccaatcgtgcacaaatattctctgatgtacgtacgtattggagccctgaagccgtgaaacgtgtaaccggtaaagaactgaccggcttggcagccaacggtatcatccacctgatcaactccggtgcaacaacactcgacggttccggccagtcattagacgcagaaggaaatcctgtcatgaaagaaccatggaatctgactgacgcagacgtagaaaactgcctcaaagcaacgacctggtatccggcagaccgcgattacttccgtggcggcggcttctcgtccaactttctttcaaaaggtggaatgcctgttactatgatgcgtctgaacctgatcaaaggcttgggccctgtcctgcaaatcgcagaaggatggaccgttgagattgatccggaaatccatcagaaactgaatatgcgtaccgacccgacatggccgactacgtggttcgttcctcgtctgtgtgataaatccgctttcaaggatgtatattctgtaatgaacaactggggcgctaaccacggagccatcagctacggtcacatcggacaagacctgattacgcttgcctctatgcttcgtatccctgtttgcatgcacaatgtagatgaaaacgaaattttccgtccggctgcatggaacgcattcggtatggacaaagaaggagcagattacagagcttgtacaacttacggtcctatctataaataaacaagaatctttcgtcctatttgatttaataatttaactttgccgtatcatagtggaagcagtcttcaaacacaagcttccactatatgacggcttaaataaaaacactatgataactgacgaacacatcgaactgtttctggcacaggcacaccgctacggagacgcaaaattaatgctttgcagcagcggtaatctttcctggagaatcggagaagaagcactgatttcgggtacaggttcatgggtccctacccttgccaaagaaaaagtttctatctgtaatatagccagcggtacaccgacgaatggcgtaaaaccatctatggaaagcacattccatcttggcgttctccgcgaacggccggatgtaaatgtagtactccatttccagtcggaatatgccactgccatctcttgcatgaaaaacaaaccgacaaatttcaacgtaacggcagaaataccttgtcatgtcgggtcggaaattcccgtgattccttactaccggccgggatctcccgaattagccaaagcagtagtagaagcaatgctgaaacataattccgtcttactgaccaatcacggacaagtagtatgcggaaaagacttcgaccaagtttacgaacgggctaccttcttcgaaatggcttgccgcatcatagttcagtccggcggtgattactccgtactgacaccggaagaaatagaagacctggaaatatacgtattaggaaagaaaaccaaataagtatccgggaataccatgaaagataccacaagaaacacatatttagcagtagactttggaggaggaagcggtcgggtcatcgccggctcccttctccagggaaagctggaattagaagaaatacaccgctttaccaaccggcaggttaaactcgggaatcatgtttactgggactttcccgccctgttcgaagatatgaaaaccggactgaaacttgctgcacaaaagggatatcatgtcaaaggaatcggcatagatacatggggagtagacttcggcctgattgacaaaaaaggaaatttactgggcaaccctgtctgctatcgggatgcccgaacagacggaatgccggacaaggtatttcaaatactggatgcacaaaagcattacgcctgcacaggcatacaagtaatgcctatcaatacgctgtttcagctttacagcatgcaacagaatcaggatgtactgctagaagttgcacagcggcttctctttatgcccgacctcttcagctattacctgacgggagtagccaataatgaatattgcatagcttccacctccgaactagtcgatgcacaccaacgaaactggtcgatggataccatccgtactttgggactccccgaacacttattcggagaaattattctgccgggaactgtcagaggaacacttaaagaagagataggccgtgaaacaggattaggcaccgtcgacattatcgctgtcggctcgcatgacacagccagtgccgttgctgccgttccggcaactgaaggtcaagtagcctttctcagttccggcacctggtcattgttgggagtcgaagtggatgaacccatattgacggaagaagcgagactggctcaatttaccaatgaaggaggcgtaggcggtcacatccgattcttgcaaaacattaccggactgtggattctgcaacgcttgatgagcgaatggaagctacgtggcgaagaacaaagttatgatatgattcttccgcaagctgcggacgcagaaattgacacgattattcccgtggacgatgcagagttcatgaaccccgaaaatatggaaacagcccttctgaactactgccggaatcattcacttaaagttcccggaaacaaggcagaaatggtcaaatgcgtactacagtcactggcctccaaatatcgtgaggcggtagcacagctcaatcgttgtctcccctctccgattcaccggctaaacattatcggaggaggctcacaaaataaactgctcaaccaacttactgccaacgcactcggcatccctgtttatgccggaccggtagaagccacagcaatggggaatatcctgactcaggcaatggcgaaaggagaaatatccagcctccgggaaatcagagaaatagtaagccgcagtgttacaccacaagtatattaccctgaaaaataagaaagatatggaaacacctcaaactggctatcaagtaaaaacctacaacgtccctgtcaagcgatattgccagactcttgatctacgggattcaccggagttaatagctgaatatcggaaaagacacagccaggcagaagtttggcccgaaatccttgcaggaatccatgaagttggtatccttgagatggaaatttacattctcggcacccgtttattcatgatcgtcgaagcacccgtcgactttgactgggacacagccatggcacgtctgaacactctcccccggcaacaagaatgggaagaatacatgtccatcctccagcaggccgctccgggaatgagttccgctgagaaatggagacccatggagagaatgttccatttatataatacctaaaataacaagaaattaccatgaaacacactaagcagtctattatctcaaaggatggcgtcagctatcttattccattcatacttattacctcctgctttgcactgtggggatttgcgaacgatattaccaacccgatggtaaaggcattctccaaaattttccggatgagcgctaccgacggggcactggttcaggtagccttttacggtggatattttgccatggctttccctgccgccatgttcatccgcaaattctcttataaagccggagtattgttaggactcggcctgtatgctttcggagccttcttattctttcccgccaagatgacaggagagtattacccgtttctgatcgcttactttattctgacctgcggactctcctttctggaaaccagttgcaacccctatatactttctatgggaacggaagagacagctacaagacgtctgaacctcgcccagtctttcaatccaatgggatcgctgctcggaatgtacgtggcgatgcaatttattcaggctaaactgcacccgatgggcactgatgaacgcgctttactgaacgacagtgagtttcaggccatcaaggaaagcgatcttgccgtattgatagctccttatctcactatcggactcgttattctggcgatgctgcttctgatacgatttgtaaaaatgcccaagaatggagatcagaatcacaaaatagatttctttcctacgctaaaacgtattttcacccagacacgctatcgggaaggtgtaatagcacaattcttctatgtgggtgttcagattatgtgctggacctttatcattcagtatggtacacgcctgtttatgtcaccggaatatggcatggatgaaaaaagtgcggaagttctgtcccagcaatacaatatcgtagcgatggttattttctgtatcagccgctttatctgtactttcattctgcgctatctcaatgcagggaagttgctcatgatccttgccatcttcggaggcattttcacattaggaacgatcttccttcagaatatcttcggactgtattgtctggtagcagtttccgcctgtatgtctttgatgttccctaccatttacggaattgcattgaaaggtatgggagacgatgccaagttcggggcagccggtctgattatggccattttgggaggttccatacttcctcccttgcaagcaagcattattgacatgaaagagatagcttccatgccggctgtcaatgtatcattcattttgccattcatttgtttcctggtaatcatcggttatggctaccgtacagtgaaaaggaactggtaaaaactaactttaagatagtgacactatcctgttgcgatagtgtcagcatcccactcatatagtgacactatccggaccggatagtgtcactatcttttttcttttttataaactattccttttttcttcgtatcttaatttaatttgtttacatttgtctttcgatttcaataatctgttaacccgatgaccccagatcaagacgaaagacttttagcgcaacaattcgaaacaatattcacgaagtattattcagtagtgaaatatttcgccctaatgctgcttaaatccgaagaagacgcgaaggatattacccaagatgttttcactaaactatggactaagcctgaattatgggcagaagttcctaatccgactccttatatctatactcttactaaaagtacaactctcaattttatcaaacacaaaaaagtagaattggcttatcaggagaaaattatagaaaaaactctcatcgacgaacttttccaatcagaagatacactcaaccccatctattataaagaggcgcaactaatcatcaaattagttctcgaacgtctcccggaacaacgcagaatgattttcgaaatgagtcgtttcaagcatatgagcaatcttgaaatagccgaaaaactaaatatttcgagacgaacagtggaacatcatatctacttaactctgcttgaaatgaaaaaaatcatcttttttgcattttttctgctactcccttaagtaagctgccttagttaattgaagtattaatataacagttataacattaatacctcaatatgaagaattactttcagaaaataataacattattcaccggaaatgactatccggaatctacccagcaagatttctacaagtggctggtagatgaagagcatacttccgaaaaagacgaagcattacaaaaattatgggatgaggctcataaacagagaactgcaaccgacatgcaggaggcttatgaacttttgaaaaagaatgccggaatacctcccatacaacgaaaaagaacaatccgaccgattcatatatggcaggctgccgctgcggttttctttttagtagcggcttcttctgtttacctttctaccatcggcaaagaaatacaagaaactcttattcagcaatacattccaactgctgaaataaggactctcactttacccgatggaactcaggtacagctgaactcacaaagtacacttttatatccacaaaactttaccgggaaagatcgtagtgtctttttgatcggtgaagctaactttaaagttaaaccggataagaaacatccgttcatcgtcaagtccaatgattttcaggtgacggcgttgggtacggagttcaacgtttcggcttatccggaaaatccggtgttggcagccacattgatttcaggaagcgtattggtagaatacaataatttaaaatcgcaggtgattctaaaaccgaatgagcagctggcttacaacaaaaatactcattgccatagcctggaccatccggatatgaaggaggttaccgcctggcaacgtggagaacttgtgttcagagaaatgtccgtcaaagatatcatcacaatacttgaacgtaaatatccttatacattcgagtatcagctcaaaactctgaaagacgacagatatagtttccggtttaaagaccaggcaccactatctgaggtaatggatgtgatagtaaatgtagtaggccaaatgaactataagataaaaggagaccgctgctatttaatcccaaaataatggctatcccccaaacaaaacagtaaaaaaacaacaatataataacctttttaaccactaaagacttatgcaaaaaagtatccggaatggagccctaactctatcccggatatgaaatcaaaattctcaatattagagttttactctatccaattaccgtgaaataatttagttaataacctaatactaagaaaatgctacaaatttatgaatttatagtagatcaaaccgcaaagggaagaagttttttactttttttctgtttgttaatgatgcaagcaccctcctttgcacaaagtagtgccaagatcacaattcagaagaaaaatatatctgttatcgaggcacttaaggaagtagaaagacaatccgattattctgtcggatacaatgattcgcaactgaaaaacaagcctgttttaaatcttgacctaaaagctgtggcattagagaatgcccttaaacaaatcctccaaggaagtggatttacttatcagttcaaagataagtatatcatgattattcccgacaaaaagccaaaagaaactcctgcaaaaaaagtaagtggaatggtcattgacgaaaacaatgaaccactgatcggagtgaatataaaagtagaaggaagctccgaaggtgcaatcaccgatattgatggaaatttcaatataatggctcctcaaggtagtacattaagcttcacttatgtgggatatacacctcaaactgtgaaaataacagataagagcatctatgaaataagattggcaagtgatactaaacagctgaacgaagtggtagtcaccgctctaggtatcaaacgcgaacagaaagcgttgagttacaatgtgcagcaagtcaaaaatgaccaattgacaacaatcaaagacgctaactttgtgaacagcttgagtggtaaggtagcgggtgtcattatcaatagcagttcttccggtgtcggcggtgccagcaaagtagtgatgcgcggtacaaaatccatcgaaaagagtaataatgcactttatgtaatcgacggtatacctatgtataacttcggaggtggtggcagcacagaatttggttcaaaaggagagacggaaagcattgccgacctcaatccggatgacatcgaaagtctgtccgttcttacgggagcagccgcagccgccctttatggcagcaatgctgcgaatggcgctattattgtcactacaaaaaaagggaaaatagggaaattacaggccagtgtttctaccggcatcgactggttgaaaccattcgtaatgcccgaatttcaaaaccgttacgggacaggaagtaacggtaaatctgacggttccaccgtatggagctggggacctaagatgggaaacagtcctggctacacccccaacgactttctaaaaacaggagctgtttacaacaattcagtcactttatccaccggtacggaaaagaaccagactttcttctctgccgctgcgctgaactccgacggaatgattcccaacaataggtataacagatataattttactttccgcaacactacaagtttcctcaatgacaagatgaaactagacgtaggagccagctacatcctgcaaaacgaccgtaatatgactaatcagggacagtattccaatcctttagttcctgcttacctttatccgcgtggtgataatttctctacagtcaaggtctttgaacgctacaacgaagctcgcaaaatcaacgaacagttctggccatcgggcgaaggtgacctccgcatgcagaatccttattggatagcctatcgtaatctacgtgaaaacagtaaaaaacgttatatgctctctgcaggattaacttacgacgtactcgactggctaagtttatcaggacgcatccgcatagataattcaaacaacacgtatgagcaaaaatactatgcaagtaccatcactacacttaccgaaggtagcgaacaaggatactacggcatagaaaagagtggaaacagccagacgtacgctgactttcttgtaaatattaacaagagagtgggcgacttcactatcgtagccaatattggtacatcattaagcgacaacagctatgatatgctaggctacaacggtccgatacaggaaaaaggaatacctaatgtattcaacgtattcgaccttgataacacaaagaaacgcgccacacaagaaggatgggaagaaatgacccaatccatatttgcaagtgcggaagtgggatggaagagtatgctctatcttactttaacaggacgtaacgactgggcttcacaattactgggttcgtcacaaacctctttcttctatccctccgtcggactttccggcgtgatcagcgaaatggtcaagctccccgaatggattgattatttgaaagtacgcggatcattcagttccgtaggtatgccctaccctcgattcctgactatcccaacttataaatatgataccacgatattaggatggctacccaaaacacattatcctatcggtaagctttatccggaacgtacggattcatgggaagccggcttagacgccactttcttcaaagaccttcgcctaagtgcttcattctactatgccaatacttataaccaaaccttcgaccccaaaatatccgcttccttcggatactccaaattctacgttcaaacaggttacgttcgcaatatgggtatggaaggaatgttgagctacggacaccgctggaatgaatttggctggaatagcaattttactttctcatggaataaaaacaagattattgaattagtaaaagacttccatcaccccgagacaggcaagatactcaatatacccgaacttgaaatgaatggcttgggctattcacgtttcatcttgaaagaaggcggaactttgggcgacctctactctaaagccgaccttgtacgtaatgacaaaggttatattgagatggacgccaatggtgctttggccaaagatgccaacgtagaaccgatcaaattgggaagcgtgttacctaaagccaactttgctttcagtaacgagttcacatacaaaggtgtttctgccggcttcctgctttcctgccggttgggaggtatcgtttattctgccacgcaagcagctctcgaccaatacggagtatctgaagccagtgcaaaagcccgcgacgcaggtggtgtagttatcaacggacgcactatgatcaatgcccagcaatggtacgagacaattggtagttccagcggactcccgcaatactatacttacagcgcgactaatattcgcctgcaagaagcacatatcggatatactattccccgccgttggttgaaaaacatatgtgatatcaacgtgtctttggtaggacgtaatctctggatgatttattgcaaagcacctttcgatcccgaatcagtcgctactaccagcaactattatcaagggatagattacttcatgatgccgagcacccgcaacatcgggtttaatgttaagtttaacttctaaaaccatgaaatttatgaaaaacctgcgatatatgctgatagcagcatgttcagcctgcctgcttctacctttgggaagttgcatggatacggacatgaaccgtaataaatacgaagtggacagcgaagaaatcggccgtgaaaactacgacctcggctccactatcagaggcctgcaaggcttagtaatacctgcacaagagcatctttaccaattcatggaagccatgtgtggtggttcttatgcaggatatttcggtgaaacacgtaccggatggctggagaaatactctacctataatcctaaaaccgactggttgaaggcaccatttacagatgttatatcagaaacatatcctaaatattatgccgttttacaacatgaagatgcccctgtagcccttggattagccaaactgctacgagtaactatcatgcaacgcgtgacggacatttacggccctatcccctatagcaaagtgttagtatccggagaaggttctgaaagcgatggactgaatgcggcttacgattcacagaaagatgtctacatgcgtatgtttcaagaacttgaagaagccgatcaggcacttgaagacaacatgacagaaggcaatagcggatttgaaaagctggatgatgtctactacggaaaactacaacaatggcgcctttttctccattcactacaactacgcatggctatgcgcctatgctacaccgatatggctgccgaagcccaaagcattgccgagaaagccgtaacggcaggagtgatcgaaaagaacgacgacaatgccttattccatgtagcagaaaatcgctcagcactctgcttcaacgattggaaagactatcgtgtaggagccgatatcatctgttacatgaatggttatgcagacccacgtcgggataaatattttaccaaggtgaagaataacgaccaggaaggttattacggcatgcgtatcggcataaattcaccattttctgatgacgacatgataacatcgtactccaatcgtttgatgaccgccagcgatccttatgtatggatgactgcctccgaagtagcattcctgcgagccgaaggagcattacgcaaatggaatatgggcggtgaagccaaagatttctacgaaacaggggttaagctttcttttgaagaacatggagccagcggagcggaagactacctgaattcaatagcctctccaagtggctatactgacccgctaggttcgtatagcacaggtagccccgccaacattacagtaaaatggaatgaaatgggagaacaggcattcgaagagaatttggaacgtatcattacccaaaagtggattgcacttttccccaacggcattgaatcatggagtgaacacaggcgtaccggatatcccaaattattgcctgttgtcgtgaacaaaggccgcaatgttagtaccgaagccggcatgcgccgactcatgtatcccaacgaagaatacacccagaattctttccaccttaacaatgccattaatgtattgataaaggaaagtagtaataatcaggggggagataccggtggtacccatgtatggtgggatcgtaaagcaaacaagtaagaatctttaaaaactaagataatatgaaaaataaaaaccttatattcagtttcctaactgtcgttactctcacgattggtgcaggctgtctgtggacatcgtgtgacgattggaccgaaacggaacaggtggattacggagtaactacccccgatggtcagaaccctgaactatatgcccgctacacacaagctgttcgcaactataaaagtcgcaaacactatgccgtatgtgtacgcttcgacaatggacatagcggagacggagaaaaagactttcttcgttcgatgccggatagcattgatgccgtcattctggaaaatgcggcaacacttaattcagccgatctggaagacattcctgtattgcagactaattttgcaacaaaggttctttttagtttcaatctgaccagtatcaaagagaacgcagaaagttcgggacaagaaatcaaaacacttctggctcccgctttagagcaaatggtatccgccattaccgacaatgggcttgacggagcttcaatctcctacaccggtgacatcggacttggtaataacgcagcagtcaatgcaagtataactgagatgcgtcagttactgcttgacaagattacaccgttagcaaaaaatgggaaaatcttttttctggaaagtaatccactttttattcccgaagcgaaccgggatgtattcacccgctacgtactcaatactacgtcctctaaaaatgccagccagttacgtcttctgattaatgaagctatctattatgcaggtattccctcagacaagctgctcattaccggcgatccggagctaatgactacggacaataatgacgggcttgtctcacaagtgcctttcttcgccatacaggtaatagattgcgggcctatcggcggcttaatgatacagaatgtcgctgcagactattcgcacgctaacatcacttataaggagacacgtggtgccatacagactttaaacccttcacctttaaaataaacacaggaggaatctaagatgaaaaagcaaaaaatacgattcgcaattttcatgttgttacttgctgtcactgcttgcgacaatgccgattatagtaaaagtgctcctttcgacaacggtgtctatttaagtgtagccgaaagcaaaacatcggagactatgacattcaacaaaacgattattcagcgcgaaaagagcttcacagcccggctggcatatcctgctggtactgatgttacggtcaacgtaacagttgacccttcacaagtagaagcctacaactcacgcaataataccagctatgatatattgccggccaaacattaccgattggagagcaacgaaatgacaatacgcgcaggcaaaatcaattcagctccgttacatatttattttgaaaacctgacagaattggagattgataaagcatatctctgcccagtgtctcttaattccgcacaaggtgtaggcctattggatggctcaaccacctactggtatatagtgaaacgctccagcgccatcactaccgctgttgacttacgctattgctacgtcgaagttcccggattctatgtacccaaatggggaacagagcctgccggcaatgctgctcatctgaacaatttgaaggctgtcacctttgaaataatcacccgtatatccaatttcgacgaagccaatacagacatttccagtctgatgggcatcgagcaatatttctgtttccgggcaggcgatgcaggcttcccacgtcaacagttgcagatacagactccggcaggaaagttccccgaagccaacaaagccaaattactgaaagaaaatgaatggtaccatctcgcactaacgtacgacattgccaccaaaacaattattttctacgtcaatggaaaagaacaaagtcgaagcactaactatggcaacagcgagttctctgaaataaaacttgccaaccgcaaacaggaaagttttcccggtgcaagcgacggtgactggcttttctacataggacgttcttataatgaccgctggcttatcgaccgacaacttaacggtaatgtctgtgaggcacgtatctgggatgtagcacgtacacaacaggaaatatggaaaaacatgtacgacattgaagatccggaaaatgaagcacacctcgctgcttactggaaattcaatgaaggaagcggcaatgatatcaaggattactccaaatatcataacgatgcacacattgttcgttattggaaagatttcaatagtaaagaagaatatgacgtaaaaaatgaggaactatggccaagcggcatagaagttccgcaagtgaatagggaagattagaaatgagaaacttataaaaatcaaaatatgaaacaaatattgaaacatatactgattctggcatttgcggcaggttttattgggactgcctgcgaaaataacgatcttactatcgatgccggcacattccccgaaaccggaggtataggtctttctatgggtatattacaaagcgataattatgcgatggaaaacccgcagataaacatggaccatgccagtttgagcgatcaatttcacatcagcttaacagaaccggcttcacaaacaggaaattataccgtaaaagtagacgaatccaaagtactggacttcaattcgaaacacggaacgaattaccctctgtatcctacagaatacgtagatttaggtaacagtggaaaaatgacaatagagaaaggagaacagcagtcaaactctgtctctattgctttcaaatatgatgaagccatagaagattctgttatttatgtactccctctgacagtggaagagaacaatagttccccggccatgtctagtgaacgcaaaacattatattatataattaatgtatggggaatggctcctgccgaatataacgccataaagaaaaacttcattcagatagcaggggtagatcccgaattcaccaatcctctactgctcaacaagctctattttgaatctctgtctctttcatcaccagaagtagattactacaatccattcgatataatcaacctacagttcgctaccgtcaaggcagacgataatcagttgccatccttatatctaaaagatgatctggcatacgtactaaaaaaacgtgagaagtacattgtaccattacaacagttggatcacaaagtttgccttgccattaagggagccggagaaggaattgggttttccaatctgggagaaaaagaaatgatgatatttgtagaaagaataaaacaagtgattgatatatatcatttagatggagtcaatctatatgatgctaatttctcctatgaagaaagtaatgaaaacattaattactcaaacaatctatgcaaattcgtagcatctttacgagataagctaggaaacaagatcataacctatacacaaacttctgaatctccggaagggattactaatgacgctaatttgaaattaggagaacttgtagattatgcttggtgtgatcaattgaacacaattattgatccttggagtactcctgaaaaatggacacgtcctattgcaggattaaacaaagaaaaatggggagctttgaacactgatatacatatatcaagtgaacaaactaatattttagatcaagtgatagaaatgtttactcaaccctcaccaatgataaccgctggaataaaccatgtatttgtagtaaatagagtagactatgttagtgcaggaacagaatcttatgcaccgacttatatggcttatggtgctatctgtaacttatgtgatatggaaaaagaatattttgtaacaggtattaactctccaaataatcaatacctcaacattcatgatcttctcatgcctaaagattattaagatataacattcatatttataaagcatctgtgaatatggacaaactgagaaaggagatgcagaatatttacgcataaaaatcagactatgaaggaggaacttccaccaaacacgtatcctatcaatgccaaagacatgtcttccgcattgattataagaaaagaaaaatcattaaatcaattttaaaatttacattatgaaaaacttgtataaaattttagcgtcatctatcgctatatttgcattttgcgcatgctcacaagaagaaatgccagtaaaccaatcagataataatcaatctgaagtagtcacccgttcggccacaggtattaaaaacatcgtttatattgaagtaaatgatatcaatcctcttaatgcagggtcatatattatggatgatgctccatttttcgattatgtaattctgttcgctgccaacataagaggtgtaggctcagacgctactttatataacaatccaaatgtacagtacattttggaccacaaagacactctgattaagcctcttcaagacaaaggtatcaaagttttactcggtctattaggtgaccatacaggactcggattcgcaaacatgaattcagctcagactgaacagtttgctaccgccgttgccaatgctgttagtcaatatggattagatggtgtagactttgacgacgaatgggctgaatacggtagaaatggttatccatctggaagtacaggttctttctctaatttgattactgcgctccataacaaaatgccaggtaagacgattactgtattcaattatggctacacaagtgagcttacaggagttaatagctatattgattatggcatttacgcattcttcaactatccatcatggggtacagattttggtatgccgaacagtaaatgggcaccattaaccatcaaccttaacagtaccccatctgctagtagtgcccaactttatgcaacacaagttgcaaataaaggttttggtgctattggttactatgaccttagagccaacaacattgtaagcgtattgaatggtgttgcaaaaggagctttcaagtctacttgtacttatgacggtaattcttatccaaagaattattaatcaaaggctttaaagcatcacacttgatgaagtattaaaatacacttctccctcttttgttgaaagagggagaagtagtttaaagtgagagagtaatgtatttcttcacatgttcctttttaatgaaggaaacatgtgaagaattactcatacaacatttattagataatatatccttcgggagctactcactcttctaacgctcatataattaactggagggaaagttacgggcaagaaaagaagagaagtagcaaccgaggataatcagatgaatgctgtgacatttttgtatctaatctaattattataaggggaaaagcaaaaatgtcacagcattactaatcaacactttaagcccacaaaacagttcttttttctacaagtttacaaaaatcatctatatacttttcactttttcataggagaaaactgcactttttttcattccccctatccaatcataaagaaacaataaagttacagtggagtaatcagacaggcagacttgtgcaacaagtctgctacagttatgcatccctgtagctatacaagtgcaacagaataaaacataagcaacaaacagctaatagctggcgagaatttattaattcatatggtagaatgcttcaaaccaacctgataaatataggaaaagatatatagcattataccaatttattaagcatactccatagaaccatactataaatctacgtatcaatctcccaaatcaggaataaaaacaaagaattccatgactgttttgatctaattatgattttattaaacataaattaataataagcagaaccttaaataagcaagcattattattttctacgaacaataaatataacattgtattaaaaatatacaagttttcaatacattttatcgcaaacatcatacaaaaagtaacaagtctctatttttaatcagatattatatcaattttttataactatggcgtatatttaccttataagaacaagcaatattatattataaaaaaatacgtatatattatccaaaaacccaaaaatgagagaatctgaattggtactaaatggaagttattccaaaagtacccaaccaaaagcacgggcacctcctgagcagcccgcattacttacaatatatttaacatttatgtttaataaaaaataatcaaattaattattgttacttggaggagatttgccctattcctttcaaaagggttcaaacattagaattaaaactctacatatatactacgcattcccgatatcagccttcaaagaacaaataattttgagatcatgttatttgaacttattgatatacaatcatgagaccataatactgtgcatttttccttgcttcaaacccgaacaagaggaatagatcaatttcaccaagtgacgttactaaaaaaacagattaatatgaaatatttaattataacgtcattatacacttctattatcgcagttacaaccacccaaagtgaattatttccaattttattttcaacagcaggaatacttttattgtattggttcttgtctcattcttttgccatgcggaaagaaattgctttcttaaaagaagaaaatcagtacttcatggattccttccgaaacattcgcaccccgatcacattgcttcatacgcctttgaagtcaacctatagtaataactgtccagacaatatcaaaaaagagctgtcactggctatccgcaacatagattgccttaatgatcatttaaccagattaatggacctgaagcaaatagccgctcattcccaaaaaatgaatattacggaacatgaattaggaaatttccttaaaaataaaatatcttctctgaaagatcacgcagcaaacagacatattaaattagaaatccaaacagaattcaaatatgcaagcgtgtggatagatcaaagtaaaatatctcccgtaatagagaaattcataaagaatataatagatcatacagaatattcaaaaaaagttattatacacgcatctttatgcaacaaatattggataataaaag

SEQ ID NO: 4784 - DNA, 1478 bp, Unknown
  gut microbiota DNA sequence
aattcatgtcatacgatcacattacgttttcctgtaaaaccctcttatgaaaatgtatccgaacgcagtttggttcatatagagaagaatatagaagaagaaaagatcgatgccttattccataaaagttcgcagaaaagaaattcatccagacctgtcgtgattatggtcgacagtaacgaagaattcagatcctatctggagacctgtttgtcagaggaatacatagtcagaggttttgaaaacggagcggacgcattgggatatatcaaagatgaacatccggatctggtaatatgcgatacagtgctcaacggaatgggcggtgatgaactttcttcaaggctgaagacgtctaaagaaacatctattataccagtcatcctttacggatcgcatatagatgccgaccaacgcagtaaaagggaagcgtcattagcagacacattcatgcatactccttttcatgtggaggatttaaagatagagattgctgttcttatcaggaacagccgccttcttagaaaagcattcctgcacaaagtattcggagaacattttctgcaagtacaaccaaccgaaatgatcaaggaagctactgaaggaagcaaaagcctattgatcaatgaagtaaaagagtatattcttgaacgcatagagaaagaggatttgactatcgatgcgattgcctcacatttgaaaatgagcagaacgaaattctacaataagtggaagtcagtgaccggcgaggccccgaccgtctttattgaagcggttcgaatggaaaaggcacacgagttgttagaaagcgggaaataccctgtcggaaccataccggaaatgatcggattgaaggatgtaaaaaacttccgcaacaggtataaagaatacttcggaattacacctaaagaatcgatcaagaaaaaatagtcggaataaaacggacaactaaaagcatgtccgaatgtactccagcacggtcttcacggagaaagtgactggagtacttttttatttccatgatgcagtatttcgttatttccggtatttactctatgtacgtacaccttaattttgagaattaataacctaatttgtttaacaagtatgaaaactttaactaaaatgaaaaaagtatgttgcttaagtcgttttgttttattggtaatggcattgggtatgaccagtatctttacctcttgtagtagtgatgatgatgaaaatattccggtatattctctcaaagatgtagaaggcacctattccggcaaaatgcagacaacctctatcgctcctttggaaaatgcagagaatgaagctgaagacggagtcaccgtaaatgccgaattaaaagataatcatatattaatcagcaaattcccggtagaggatctgatcaaaagcattatcgaagatccggacgcagccgaagccatcatcaaagcggtaggagatgtagaatacaaaatcccttatca

SEQ ID NO: 4785 - DNA, 166 bp, Unknown
  gut microbiota DNA sequence
aaagaagaaaaacacagcttgctaaaaaagatgctaggtagtatcggaatgaaagtttcggttgccagtccatttatttgtgattatggctgcaatatacatataggggataatgttactgtaaataccggttgtacctttgtggattgtaataaaatcactatcg

SEQ ID NO: 4786 - DNA, 524 bp, Unknown
  gut microbiota DNA sequence
ggattaatacgcttatccgatcctaaaaaggaggctgataaattcttccctgcgccgggtacggtccttgtgttacgacacagcaccagagatcacgccggtatcttcatttaccacagtatggatacaaagctagagaacgtaaagctattccatacctgcggactgggaattctgtcacaatatagcaagaatatctctttcaatgatgtacatatcatccctaacacttccaagaaacgtgtgctgagcggacatgacgacggtttccacttcatgggatgcagcggattactcaagattgagaactgtagttgggcaggattgatggatgaccctattaacatccatggaacatgttcccgtattatggaagttctttctcctacccgtatcaaatgcaagttcatgcaagacatgagtgaagggatggaatggggacgcccagacgaaacaatcggatttatagagcataaaaccatgcgtaccgtagctaccggtaaaatgaataaatttgaagcact

SEQ ID NO: 4787 - DNA, 1297 bp, Unknown
  gut microbiota DNA sequence
actgccatttcggaagttgccgggcacgtggtctgcttgtatctactcccggcaaggttattattgagaacaatgtattcgaatccagcggctctgccattctgattgccggagacgcaaacgcatggtatgaatcaggagctgtcaaagatgtgctgatacgcaacaatgatttccgttacccttgcaattcttcaatttatcaattctgtgaagctgtgattagcattgacccggaaataccgacaccggaacagaagtacccctatcatcgcaatatccgcattatggataataccttccacctatttgattatccgatactcttcgcacgttcggtaaacgggctcaccttctcctccaatacactcatacgtgatacgacttaccagccttatcactatcgcaaagaaggtattacgctggaagcatgtaaatctgtagttatttcaaacaataagattgaaggggatgtattaggacgtactgttacaattgaaaagatgaaaccttcggatgtcaagattagcaagaatcctttctttaaactgaaaaaataagaaacaccatataggcaattaaacgtattcagactcaagcatgggtatgaatacgtttgagcctttatcccataaatacgacaaataaaggaaggttctctttgatgaacttcaatgctaatgttatctgccgttctattgctttttcactgactgcacaacgttccgcgatttcccgattagatagatgctcttcgcggctcattctaaagatctgctgtcgtctggccggaagttgcgaaatcaatttatcaatatagttcttcaaatcagcagcatccaattcctcttctatatcataagaattttcaagtcctttcagaactgtcattttaaaattcagctcgttaaaatgtctacgcgaataattgaatataatattacgggtaatcataaaaagcaacccatcaaaattcttggtaatatcaagaaactctttggactcccaaactttcacaaaaacatcctgaactacttctgaaatcacggaagatgaagtgatataaagtcgtgcaaagttataaaccttcagccaataaaggtcatacagcaaagaaaatgcagccgcatctcccgcttttaccttttccagaattattgtctcctccatctcttttcaattgtgttacaaaaataaagaaataactattaaccgcaacattttttttgatttttatttataataaagttaccttttttcctttaataatgtcttcaaaatctattctaattattaa

SEQ ID NO: 4788 - DNA, 457 bp, Unknown
  gut microbiota DNA sequence
gtagccttccagcaccgattccagaataatgccctccgggccagccgaaatgacttccgttgccgataccagtttcacgccgtttcgcttcagctgagtcttgtaccgggcactgtcgtagcggtttcgggcgaaacggtcaagtttccagaccagcacgatgtcaaacagccgtttctcgctgtccttgatcatctgctggaactgtgggcggttgtctgtttttgcagagattgcccgatcaatatagtgtttgaccaccgtgaagccgttcttctccgcataggcggtgcattcccggatctgaccctcgatggattcttcgcgctggttgtccgaggaataacgggcatagatcacagcggtcatggcaagcacctcctatttatacatcattgaacggtggagtgttctttcaaggcaatgtttcgtataatttatataccacattttgcaa

SEQ ID NO: 4789 - DNA, 548 bp, Unknown
  gut microbiota DNA sequence
aattgcggaaaaatataaggtcaacgccaaatgggtgtggacttacactcggcaacataaagtgccgaaagtgagaatccgccagttcaactattacagcaagaaacatatcgatgctgcctttgctaaatacgaggtagattccgaccttactgaatggtacacaccggaagagattcaggagaagtacggcatgacacgtgtcgccatccgttcgcaagtgtatcggaacaacattccctccaagaaagagcatgggcagatattctactcaaagctccacttcgacctctcgaagagttccgaacaggagagcaaggcggaatactacaccgtcaaggaggcgatggagaaattcaagctctctcgtgattcggtttacggtattctacaattccaccagatcaaccgtgagaagaacggacgattcgtcagattcctgaaagtggagtttgaccgggtaatgggtgttcgcaaatagtctaatttatggctatccgtaaattattcaaaaattaatccctgctgtaggtaatctgcatgattac

SEQ ID NO: 4790 - DNA, 659 bp, Unknown
  gut microbiota DNA sequence
gtagaaccgtaagtcggttcgctgccgtctgtggtgtatctgatttccgcattcgggtagaatgtttccagcaataccatcaacggaccgttttcatccgcatgagtattgatgtttacgtcgaagaagttgaggcagggtttggtatccatgacttccaggcgctcaaattccgtaaccatgcgttcgcagaaactcttccagtttttgttggcatccagcgtccatcccgtttccgcgattgccattgcacgtgggaaggcctgataatctacccggtcggaagttttcatatattctctccagaggttgccttgcataccgataatatgctttttcactagttcatcggcatcatccggaacaggattgtagctataagtcttcttcagcgttgtgtatccgccgatggtagtcggggcgatttccggatcttcctgatagaagtccagataagcataaggcatgggagccatgattgcgttgtgtcctgctttagctgcattcaatccgccttcaacgccacgccatgataagacagtagcgttcggagccagaccgccttccaaaatctcgtcccagccgatgatattgcgtcctttgccgttcaggtatttttccatgcgggtaacgaagtaactttgcagtttatcttcctt

SEQ ID NO: 4791 - DNA, 289 bp, Unknown
  gut microbiota DNA sequence
gctctgttcaggatgccgtacaatttattgacttcattaataccttacgtctcatgcatattactatatatatataagacaagtattgacggttctattttttttcttgtactacttgtattgtttatcaatatttcaaagaacttgctgctttcgttttaaaagcgggtgcaaaggtaagaggttttattttaaccaccaaatgttttcggaagtttttttcgcttttctttttctatcgtttctcagactctcttagcgaaagggaaagaaggtaaagaagaaaaac

SEQ ID NO: 4792 - DNA, 720 bp, Unknown
  gut microbiota DNA sequence
cttttcgtcatctctcggtggtcgaacatagcgtagcatttcttttacacaagcaccgaattgcaagaaattggattttgcttcttttagtgttattccatgattggagtcgcttggctcgttatcagaagtgatgaacgggtcattctcccaaaagcaaacgggacaaatatacccacaatcttcatctgccgggacattgtaggtaagaaatccacaacaaggacatggatattttttcattacggagtttgttcgcccctttcatttttcaaatttatagacctattttaatgctgccaaatattgttttccaaatcccgcagccgtcccttatagtcatctatcagagcctgaacattttccccctgcgggaaggtcaccagatagccgtccccagcttcatgaaagccgatgattccggcaagccctgccatctcggccactttcagcagggtgtggtagtcatactcggcggcactgatatataaattcatgggagaaacctcgcgtttcaaagagatgattctattatagcaacatcttttcataattgcaaagaaaatgctgtatcgtccagaatcggaagatacagcattgcttttttatatgtaatggccctttagcccaatttgttgtctggccttgaccgagcgattgctctggcatggtctaaggcgcagtggtgtgcgggatgcttcccgcgtttgttttgattac

SEQ ID NO: 4793 - DNA, 972 bp, Unknown
  gut microbiota DNA sequence
tttacagtcagcaaggaagcgacctatatagtcaaggtagacctgctcgacctgacaatgaccatgaccgaaacggaaaacatcggatggcgctttgaagaattctatattgtcggctcctttaccggcgacaatggctggggattcgaggcactgtctaaagatgccgttcagatgaatctgttccattatggtgccgtgattccgtggaaggcggacggtgattttaagtttacttccgtgacggacttcggtcagtcggatgctttcttccatcccaccgaagggaatgctccgtatacttccacttcagttgtactgggaggtgaagacaataaatggcaaatgaaggaaagcgaatgcggcaaggcctataaagtgctgttcctcacagccaagggaaaggaaaagatgctgatgcgtccgtttaccccctacgaaggactgtatctggtaggcgatgccactccgaacggatggagcatcgacaacgccaccccgatggctaaaagtgccgacagcccttacatctttacctggagcggtacactgaatacaggggagatgaagatctcctgcgacaagcagtccgactggaacggagactggctgatggcggacaagagcggaaaggcaccgaccggtgaagtggagacagccttatttaccagtaaaacggatgcggaactgaagaatatgtatccggatacagacctcggcagtctggacaataaatggaatattcaggaagctggctcgtatcggattacgattgaccagttgaaagaaacgatttcgattgtaaaacaataaacaagtattcaagatgaagaagataatatatttggtggctgccttcctgtgtctggcttgcagcgacgatcatgaatcgaacccacagaacggaggagcgtcgggcagtgtgaccgaagtaactccggtgacatcggacttatgcgtggaactgacaac

SEQ ID NO: 4794 - DNA, 756 bp, Unknown
  gut microbiota DNA sequence
aatatgctgactctgtttgcattggtactggtcatcgggacagtggtagatgatgccatagtcgtggtcgaagcggtgcaggccaagtttgatgaaggatacaaatcggcttatcaggcaactattgatgcaatgggtggcattacttcggcactggttacaactacctttgtttttatggcagtatttattcctgtatgctttatgggaggaactaccggaactttctatactcagttcggattgaccatggcagttgccgttgcaatttcgctggtcaatgccctgaccctgagccctgctctctgcgcattgattatgactccccatatggaggctgttaaaggagaaaaactcagtttttcttcccgcttccacatggcgtttgatagtgcgttccatcgactggtactgaaatataagagtggtgtgttttttatgttgaaacgtaaatggctggctggcgcattattattggtggcctgtgccggactattcattcttatgaaaaccacaaagaccggacttgtacctcaggaggatatggggactatctttatagatgtgcggacatcacccggaaatagtctggaagaaaccagaatcgtcatggacgacatagataagcggatcaatgatatcccgcaaatcagaatgttttcgaaagtgacgggcaatggtatgattagtggccagggggcttctaacggtatgtttatcatccgattgaaaccgtgggatgaacgcaaggaaaga

SEQ ID NO: 4795 - DNA, 889 bp, Unknown
  gut microbiota DNA sequence
agcagctgtaactaaagctttgtcaggtgcaaaacctgaaacagtgaatgctatggtagccttcttcaaaactcgtttatattcgttgatgggatctgcatctggtattacagaaacaacccgtacttataatacagtgaacgtaaacggttatactacaatgacttatacttgctatgctaagactcgtactactacattatcaactacagtgaagtataatggtaaagatgtgaaaatctcagtaatagcaacacgctataccggaactgatcatcagtataagacagttactactaatcctactcatagtggtggtcagggtggaagtaactaataaataataaagatcataaaaataacccttttttaataaaacccttttttataaaccctgttgggtaataatcatatgggatatgaggaggaagaggtcactgtgaagtggtttcttccttttcgtttatgagatatatggatgtttcttgaatgtccatttcaaacagaattctactaatataagttaatgtttataattatgatttgtatcctgtaaataaagcctatctttatcacccaatacaacataggacaaataaaatgtcatgagcataattattaagaaccttaataagatctatccaaacggaaatcatgccttgaaagatgtcaatctggaaatacctgcagggatgtttggcttattaggacccaatggcgccggcaaatctactttaatgcgtattcttgtagcccttatggaaccaacttccgggcaggtagaaatttgcggttatgatttgatgaaacagcgaaaagaaatacgcggtattctggggtatcttcctcaggactttcgtttttttgccaaatacaaaacgtatgagtt

SEQ ID NO: 4796 - DNA, 912 bp, Unknown
  gut microbiota DNA sequence
ctcccagtctttccaaggttccgtcatgccgcaactataaagagcaaagcagcacaacgacaacattatataagtcaatttcttcatgatattcttcttttaagatttgaaattaaaaattagggatatatcctcccaagtccggtcccaccccatagtttttggctgctcccggggcacaaatacgcaagtcaatcatcggcggaatccggttgtcatttttcactttcatcacaccgtcagtagtgcctccccaaggattacgcatcttgaatagatgagagtcatcgtccggtaaaataaaggtaaacgcatgtccactagtcgtctgccagttttcatccacttgttcaccacttcttgtaaaaccaccaataaccaatcgaccttgtttaagtgacacttctacagcacgttgcaagtcttcagcaattaatgcacctgcaccaaaacctacactttctccatcgccggtaaagatggcagatacatattccgtaccgatacctccgacattagaactacccagataaacctgacgccacttcatcatcgccttctcaaggattgtagcccaagtaacctccttatttctaccgcctaatgctcctaaatcaccactgttaccgataaaatagtctccacctacacccacaggtatttgtttccctgtcggatcatacatagtaaccgtgtatgttttatccttattatccttaataatatgcttaatgaaacggggatagagataagccatcgaagcaaatactgcacatgcgcaacagtcacctacccaacgttgatttacatcagacaaagcgggacttccattcggataaagcgatacaacgttgaatgtattccaagccatcttcgttccattgtctccaaaaggttccggctcttctgcag

SEQ ID NO: 4797 - DNA, 1151 bp, Unknown
  gut microbiota DNA sequence
tcccgttatgcgttttacgtgaatggatgttgtgtccaatggttcaaagatactaaattgaaagcaaatcacaactaacttaaacgctggtagcagaacgatttagttgtgtccaatggttcaaagatactaaattgaaagcaaatcacaactattcactcaaatgttcgcgaagggatatggttgtgtccaatggttcaaagatactaaattgaaagcaaatcacaacgaagactggatacggttttatggtttgatggttgtgtccaatggttcaaagatactaaattgaaagcaaatcacaactacttcattgaagaacttattcagctctggttgtgtccaatggttcaaagatactaaattgaaagcaaatcacaacatatccaatcaactaaaatattagcgaccgttgtgtccaatggttcaaagatactaaattgaaagcaaatcacaacgtacaggtcggcgataagctgaagattggtgttgtgtccaatggttcaaagatactaaattgaaagcaaatcacaactagtcaggcgcttcacccgctgctcgttgagttgtgtccaatggttcaaagatactaaattgaaagcaaatcacaaccaggttcaggttccggcaattccggtatcgtgttgtgtccaatggttcaaagatactaaattgaaagcaaatcacaacataatcaagatcctgaaagtttggttgaaagttgtgtccaatggttcaaagatactaaattgaaagcaaatcacaacaatctcggcggcggggatctcgatatggctgttgtgtccaatggttcaaagatactaaattgaaagcaaatcacaactccggtcagcatatacccaatcgtcccaatgttgtgtccaatggttcaaagatactaaattgaaagcaaatcacaacagcttctgcgctgtctatcccatatttcttgttgtgtccaatggttcaaagatactaaattgaaagcaaatcacaactacacatcggttgcctttagctgcgtgttggttgtgtccaatggttcaaagatactaaattgaaagcaaatcacaactactattttagctgctttttgtctagccagttgtgtccaatggttcaaagatactaaattgaaagcaaatcacaac

SEQ ID NO: 4798 - DNA, 42263 bp, Unknown
  gut microbiota DNA sequence
tgcaacgaagtctcctgcgttagaaacaggttgtgtccaatggttcaaagatactaaattgaaagcaaatcacaactctgatatcttcattattttgattttatagttgtgtccgatgattcaaaaatactaaaatgaaaacaaactatagtaacaaattttagttatatttctctgcctgttatttctgctgcctcaagtattgtagtttgttcatatgatgttaaattgctaatgatgtgagattatactttgtctattaccctttctttatctttatccaagtccatcgatgccaaatggtttccaatggtccttgtttatgcttcgacagccaccatttacagaactgtacctgtaataggaacagaatgattccgataatcagactgagcgtatatccgcaatagggagccagataaaatccgaatgggaagtagatgatagctcccataatagattgtgtgatgtagttagtcagactcatttttccgtaaaagcgcaggttggaaacggttttctggaacttagccttctgataaagtaagatgaaggaagcaatcagtacgatagtaaatgcgaatttctgccacatatcaaaagctgtccctacggtctgttgaatcaggctgctgtcactttgcatgatctgctctttcaaagagtaaagcggagcgaaactgatagctgcaatgatcagtgctttggtccagaatttcagatgagactcggaagtgacgaacagttctttgcgtccgatgtacagaccgaacaggaaaagtccggcagtctgcaagaaacgtccggcaccaatggcccagaacaagctcgctttctgtcctaatgtgacgttgccaatgaggaattcccaaaaagttccatttttggtgtaatctgccacttcgctatacatggctccgacattcagatcgggcaaggtataggcaggattgaacagactcattatataatggaaccattcaataggctgtaatgaaaataagatagcagtgattaaaatagccttatcgctccatttgcgtacaataaataatatgataccgacaacaacaaacagaagcaaaacatctccagccggaaagaaagccgcgttaagagtggcaaaaccggcaagtaaaaccagtctccataaaaaacggtagccgaaatctttgcctttcaactgctgattatgcgattggatatagaaagtaaatccgaaaagcaaggcgaatatggcataagattttccggcaaacaatgagaatattgcattaaacactccggcatctaaaacgctaagccattcgggagaactctccggataaacagggaaaatgaaatgttccagattatgtaccaagaggatggccataactgcaaatcctctgagggcatctactacttcaattcgtggtgtcttttttaataattccatgggtttgatttatgattgttttttagttagtattcgttttacccatttattggcgggtttttcgaaataatagtaagaaagtaaactaagtataatggtgataccgaaaatgaggggaacactgatcatccatgacacctgccattgatagagcgctgccattttcgtatatgtgagtataataaacaaatgtatcaggtagaaactatagctgatttctccacctattatcagaaaccgattggataatagccgggatatacctcccttctggaaggcaaagatgagtatcatcagagaaacaggtaaccagtaatagcaagaataacggtatactttaggtatatctgcggcacaaagataaaaaagaagaaataaagcgacggatgctacttccaagaatgttcccgtggaagaagaaatctttttattgtgtaatgactgatagatctgataaagcaatactcccacaaaaaagtctggcaggcgggtgatgggattgacataccaatatgctttgatttgttcgtcggcagtcagatacatacctgccagcatgaccggaagacagattgagagtacaaccaatagttttcgcctgctgcttaagaaaggaatcacgaaaggaaagcagaaataaaataactgttcgcaccccaagctccatgaaggactgttgaaagagaaaaaataatcggcagaggggaagaagggctgtaacagaaaggtagaggcgacaaagtgtttgatccagtccgtcgtatcgctatattgaacatatcctcctatacatgcggcaattaatagtgtaagtagatgcaggggataaatgcgggcaatacgtgctacccagaacgtgcgtttagtagtcgtttttgtcagtagtttttcctgataattgtaggtaataataaacccgctgaggacaaaaaagaaactgactccgacaaatccttctttaaagaagtgggcatcgaaacttgtatccagaacataacaatgtgctccgaataccatcaaggcaaagaatattcgtaaagatgttaatgtgttgatcacgacgtttatctgtttcttttttgtattcggctgtaaaagtacagtttttctgtgatataaaaattcacatagattaaaaagaactcaggattcggagcgcaggcggcttaaatgttgtggagtcatcccaagaaaggaagctatatatcccagttgggcacggtgaattacatccggctgttcgcgtagaagttgttcgtagcgttctttggccggtaggtatagtcggtttatgtggtgtatgtccatgtagagcagacattcctgatggataatgcgtccccagttggcaatttcgatatttgtttcataaatctgatttaattcatcaatgcgtatggcatatagttcgcaatcttccagtaactctacatattcgtatcccggttggttgtggtataagtctttcatcgcaaaagtgatatcgccttcgcgtgagaaccagatcgtgatttcttcaccgtcacgcaggcaataggagcggcaaaatcctttctcaataaagtagacgtgacgatctgatactccgccgtgtatcagtaagtgtttctttggcaattccagctttttcatgtggctgaaaagcatttccagtgagctgtcagataccggataatatcggcggattcctttgatgatgttctccatgtctgtttatttgtgggagcattccagccaccagtcgatcattttccgtgccaggctcagttttcgtggaagttccggcaaattatctcttgtatagaaatcaccggagcttaattcttcttcttgcaatttgatttctcctccggcataatcggcaatgaatcctaccattaatccgctggggtagggccagggctggttgccgaaataagtgatgttcttcacgtccagtccggtttcctctttcacttcgcgggctacacattcttccagtgtttcgcctgtttcgaggaatccggctacaaggctgttgaatctgcctttaaagttgcgggcatgaacgagaagtatggagtcgcctttgcgcactaaaacaaggacggctgtcgagatagccggatacacttcacggccacaactcggacagcgtttcatgatggattctttttgttccatcggagtgccgcaagccgagcagaacagactgtttctgtcccaatgcagtatttcgtgggctttgcctgctgcctggtaatgtcccagcgggaggtattcgtaagaagcgcgaagccctatcattgcatattgttctgtctcttcaataggttgggatacggaataggctttgcagtttcttccttccagtgtggtgatattgtgtactgtagtcttgtctttgataaggataggaggaatttctccgcagggaatggcaaatgtaccgttcccctccttttcaagcagtagttcatctttgtaaaagacaaaccacagggattcagctgtttgattcattttatatttttctattttcttcgcgctgcgaagttataaaaactgtatcgatatatgtagggtttaccggataaaatatgaatagattaacttaaaaatatactttgttccactccaatctcttgaatgaaataattatcgtgtgagatggctatcacagtacctgcatagtttttgatggtagcagtaataatttcgatgctttgtatatccaggttattggtcggttcgtccagtataaacatatcgggcatattattactgatcatcaggcaacaaaaggcaagtctcattttctctccgccgcttagcttccggcaagatttatcccattcggaagccggaaataaatatcggtttagaataatctttatttcgtgctccggcaggttgcggccattgaaggcataggcttgttccaaaatactgtttcgatcattgatgatcgaatattcctgattcagatatacataggtgaaatttgcctgtatgagcgtgcctttcagtggttggagttgtccggttatgattttcagcagagttgtttttccgctgccattgcctccttctatacgaaggcggtctccgcttttcaactgaaagctgagaggggctcgccaaagttgtggctgatcgggatgataaccgaagttaatctcttttgccgtaaccagtattttaccggtatgaagtccgggactgttaaagtcagtctttagtgcggctgtcggcgagagtgagcttcggagttggttacgctcgtcagttaacttctcggttttttcctgatgtgcaccgcttagtttggcagtacttttttccgatttgctttgcaaaccgttcagtacaatacgcgggacaccttttttcagatttcttttttcaccacgtacattttgtttatccctccgttcagctgtttcgcgggctaccttgcgggcagtgcggagcgctttctctttttcttcgatgcgttgttgcagggcttcttgcatcagtgttttttgttctttgtaaaattcatagtttccaccgtaatagctgatctgatgcttttccagttcacatatttcgggaagaagattcagcagtgtacggtcatggcttactaccaacagcgtggaacgccatttttccacccagtcatacagacgttgtctgcctgacgaatcgagatgattggtcggttcatccatcagtatgacagacggattatgaatgtccatacctgcgaggaatacacgtgtcttttctcctccgctgagcagattcatcgggtaggatagtgggaattggcccaatccccacgaatcgagggcggcgacggaacgttcttctatattccagtcgtcgttcaatatgctgaaattttctattgaggcatctcccgcaaggatagcatgtagtgctttctgcttatggtctatctgtaaggcttgcgcgatggtcaacgaatcatattgcccgaaatgttggggaatataatagaggtcgtccggtcggacgatgacgccggaagagggtgttaattgtccggcaataatttgcagcagggtagatttgccacagccgttattgccgactaatcctaacttctgccctttactgatggcaaagttaaggtcactgaataatacttctttatccggatggatatagctgatttgttgaatactaataggcatgatggtctattgggtttgaggttgaaaactgggtgaggataatcacggggcaggggaacgacaaacacaatactggctaaacaacacgaatttcgtgatgcttaacgataaagaaaaagcatagatgaaaagtgatgtttactagaagtgttgtcttacttagaaattctcattgtggtaagtatatagtttaacttgggcgcaaagatagtactttcttttataatattgttgggttttggctggaaaaatggattctttgaactaattcagaatatggaataaaaaaatgaagagcagagactacaattaaaaaatgtcccgctcttcattttcactacctactttattaacttattacatcttttccactcgaaaatcaaaccataatttcattttaaaaccgtcatccccttttttaatgcgaatactgcttggctgactgtggggaccaagttcaggaatggattttccggaacgcatggcgggaatatcataaagaaaagagatgtcaccttccgggaattcccacattgtgttttcaccattacgtcgatggacaggttccagcggagtaaatacacggaagaacaagccatcactttcagagtaaacagtgaaaggtacgcgatctgattctaatgttgcccaataaacattggcatgataacctttgaattccggatagattaaatgatcaaaactttcaccggttatggtattattgtattctttctcccaaatgccataattggtaccttttatacgattcttccatacacggtaagggccacgtcccatccatttcatgcctttcacttctttttccggaaaagagaaagtgagcccgagattatatattttcttatcaaagaaggctccctcaaaaccatgacctttaggatcattcagcagtacagcttccatacctaataatccgtctccggacatacgccagacaattgaatctattcctccttcatatttggcaatgtaacaggcgtcattaccttgcatgtactcatagccttctttaaaattagctttcataccgacaggtaatggaccgttatttaacgggatgatttcatccttctgttttatttcgataagtatcccatttctaaaggtggcagagataccattagcaaacaaagtgacctctccattctgctttttaatacttgcggatgaagtactaatatgtttattatattgcattgcaaaatattcattggcatatttaattggccaagtccaattgcagatagaatgcccctgtttatcataagcttccagttccagcacatccccttggaaaaaaatagcaggtaatttcatatgtaccttgccggtttcacccggagcaatatccggaaggggcactgtaccttcggaaagcagcgtttgtgtccccttctttaaaggtgatgaaagggaatagactcgatatttcatactgcactctttcagattcgtaaaaagatagttgttacttatcatgaaatctcctttaaaagatggggtgataaagaggttctggaattgtataggtgcccagacttcacggacggtataaaaacttccttctttttcccgtctggggcctacaatgccatccggaccgttaggaccatccgagtccagacgccctccttggtcggtccttttaacggcttcatcaacgtatgtccataaaaatcctcctgcaaataagggattagacttatagctatcccaaaaatcatccaggccggctccttgtccgcgatcataaagtccatgtagaaattcggtaggcataaatacattatatccgtttgccaagcggtaaggacctgtttgataagctggatagtgatgagtatcaagcccgttgaaatcagcccacggatggatgacatgacgtttctgcggatcataatctgcaaagtgggcatctatatttttattccatcctccttcgtttccattactccacataaagatacagggatggtttacatcacggtttatcatctcagacagtaattttaatcctgtttccgtgtcatagctattctgccagccggcaagttcgttcagatagaatataccaagcgagtcacatatttccaggaaatgtttgtcgggaggataatgagaacgtacggcattcatattcatttctttaattaataaggcatcttgcaggctgagttcacggtttgttgtacgtccgccatcaggatgaaaactatgacggttggttccctttactataattttggttccattgacataaatgccgtccttggggcggaactcaatggtacggaatccgatacgctcttcatggatgtggacaatttgcttctgaggattgataagttccagctttaaagtgtaaagattggggttttcacagtcccatgtctgaatgcctttccattctgtagttatagtttgtatctcatcactgttcagtgaaatgatttgcctgccaatacttgtcttactatctacaggagtaattgttgccgctactgaatagtcttgggaaatatttttcagatgtagctctgttgctagttttccatttgccatcgcgtttactgcgatgcgttcgatatgtgttttgggcatggctttgaggtatacgggccgataaataccgccatagagccaccagtctgcacgtcgttcggcggcattcactgatttattggcagattctttccatacctttacttccagattattcttttttccaaaatttagtttatctgttatgtcatagctaaaacgatagaaaccgccttggtgaatgtcgcctgccggtatgtcgtttattttcacttcagtatctgtcattactccttcaaaaacaatactgacttgcatatctttccatttagcgggtaccttgaactgatatcggtatagcccggtttcatcgctggggttagctcccttattcaaatagaaacgtccgtaagtgtattcgccaaacccttgtaattcccattgcgaagggacctctatcttgctccatttgccactgttcatgcctgcggaacaataaaactcccatgtctttgtgtcttgatatccgcttcccgacagatattggatttccgtagtctgtgcatttacagctaaggagaataaacaacttaagattataaaaataaatgttttcatataggttcattctttaatattgataggttggttctatagggaatacataaaactgtctttccggtttgaaatcaatcatccattggtctattaatacatgattgtctaaagcagtaatggatagagtgtgcattccttttgtcagtctgtgcttggtatttcttactgcttgtccgcgaagaacattctgcttccaggattcggtacgaaaaccttctttaaaggaacatatctgaggcgtttcaccatctatgctgacactaaagcgaatatctcctttatcgttcggctgtgtcgggatgacggctgtacgcagaatagcctctccttcccatgcactttcaaaatcaaaggtgattgtctttccttttggtagggatacagcgttcatgctgtgtcccaatgactgaatgacgatcaccccgtctgttgctttggtatagttgcaagcattggcaacaatacatttgtcttttgatacctctttcagggggagcgacttggtactttcaggaaaagtatattgctcaatttcctgatcagttaaccatatagggagggtaggcggataaaatacgtataaatcacgtggattgtaacacatggaatatttccatttaccaccggctaatttatgattataataatctgtcaagtcacgaatttcctgataggctttgatactttttgcacaagcattcatcaattggctttcacgagtccacaagttagtatcacaacttcccggaaaaatgcagcgcgccctttgtgcttccagcattttagtactcatagctgctgcaccgaatacaggatatttaatttgtgcaaagaaagcgtcttttctctcttgaggaatgatcggttctacttcggacaggattctttttattgactcataagattccagataacggtctagttctccaccgaattcagtgagactgaaatctgtgtttttgattggagaccatccttttatatatttctttttatctagttctacttggttccagcccataaactccggcttgcggataccgcacagacgataaaattccagcatggccggcaataacttttctcccgcttctgtaccgaattcgcggcaaagccaatttttctgatgctgtacgagggtagagggagatacagagttgatgtcccatgccatatccagaaaaagctccaggtcataggctgcaggttttaaatcatgcacattgacaatccacagacgacgggcattgcaatcataggcttgtttcatttcactatagaccaaccccggttgggtagtgcatagccacatatagtcatgcggacgtccccaatagctgagatgataatatacaccggcacctccgctgcgtttttgctgttcctggtcactcagacgagtcatgtagccataattgtcgtcacaccatatgagtgtaatatcatcgggtacctgtaaaccgttctccataatctgaagtacttctttatagggaacaaaagcctgtgggattttcgctacatccttttttacatatttagataataaggtgcgttggtcatttataacttgctgcaaagcatcggttttttcctgaagagtttttactccttccataccgctgtcgtgaatacctctcatgcctatcgtatagaagttttcatagcgtccggcttctttcaagcgttctgtccaataggactgtacactttcacgattcgtaatataattatactcgcctcgttcgctgactttccattcacctacattattacgcatcaaaggttcacaatgagaagtgccgataacgataccgcagctatcggcagcctctttggctcctggtacaaagtagaaaggagtcgtaattccgtgcatacccggccagatggcgttggcacgaagacgcatcagcagcttgaaaatctccttataagtacgggcaccgattcgtccttttgtgtcagacggttcgaagtttttccaactccaaggttgtaaactccagtcttcgtcattcaaaaagattccacgatactctactgaggggctttgaaaggttgtataatcggcaggcaatgttaattgatttttctttatgggtgtgacgtctccccaccatacccatggagacacaccggctaaacgggacaattcgagtattccgtaggcagtccctctgccatcactgcctaccaccagcaattgtttcttattggagctttcggtaactttgataaaaaaagcatcctttttactcataaggctatctacaggaacatcctgtttaagaagttctttcagtgcagatctattcttgtccaattgtacaattttaatagctgtatttcctgtatgagttttttgaggtaatactcctgtcacttgtttcatgtcaccggtaaacatatccagtgcaattgtcaccacaggagatacggatttggatacggaataggtgattgcttgtttcccattataccagacaaactcaccctcgttgtgatttgccgcggtgcaaacaatccgatttccgaaaagaaaaatagaacagaagcatatcgctataagcgactttctgtttccataaaaattagatttcataagccaacctttttaaattagacattagagttttaatgtcacaaaggtaaccggctgttagtattaaagggggggaggcattgcccgataaggttgaaagatgttccttctaccttttcggaacatctttcaactctctttctttagaattcaattaagtgttttttgccgatttcatcgagtattctgtaggttgcataccgaattctttcttgaaacagatcgaaaaatatttaggatcgttgaaccccactttgtatgccagatcagagatgcggatattcttattctcatccatgattttgcaggctgctttcaaacgaatgctccgtacaaaactggttgtattgagtcctgtgagtgatttcatctttttgtgaagtgtggtacgacttgttgccatctcattgacaaattgagttacgtcaaactcaggatcatccagatgtcggtttacacagtcaatggcatcctggaggaatttctcatcatctgaagtaatattcgaaaagaattgtagtttgatatggtgtactttgtctgtttctcctttttgcagatacttccgattacgcaacataagtcttcggcgtatttcccaccatatcaatcctaaaaaagatgcagttagtaaagcgtaaataagatatgcccaccaggtagcccagaaaggaggttcgataaggatttccattgtccgcatttctccccagtctccattctcattggtggctcgtaattcaaatacatactctcccgcaggtaattgagaataatatgcattacggttggcggcattcacatagtgccagtctgtgtcaaaaccttgcagcctgtatgcgtacttgttcagttggggctggttgtaagtgagcgatgcaaagcggatagtaaaattggtatatgctgacgggatgatgagagtctttgtataatcggcagtaaaagaggatatcttgcttttttgctgttccggtatttgttccaatgatttgccgtctattaatatatccgttatgcgcaaagaaatatcagagtgtttctccttcatcatttcggagtcaaaagtaactattccgcggctacatccgaaatagaaagttccattgcgataaaaagatgcgttttgattaaagaagttatctgctaatccatctgcaacagtaaaagtccgtactcttcctttttcctccccggtgatagtcaatcttgccaatccttgattagtgcctaaccaaaggtttccatgattatcttcttccatactgcctaccatatctcccggtaaattgtatgcttgatggacggattcaaaacaatcatcttgtacattatacagacaaagtccgcttccttctgtgcctacccatattctgccgcttttatccaatagaaaacaaaggggagtattgaccggtaacagtttgttctccatacagtagttttggcaatgtaatgtttccggttgctccatatttccagttacatgaactataccattattgttggttgccagccacaaggagccgtcattatcttccattatgcaggtaatttctttagagagtaaggcatcaatgccaggcatacggctgaaacaatattcacgaccatccttatatcggactccaactcccttataggtgcctagccaccaattccccttatggtcttcatgtatccaatataccagatcatgaggaatgaaaccacaatttgaagtcttatattggtggataatctttccattctgacaagccatcactccgccatcatgaatggcgagcagcacttcttgggaagtagggctgtaggaaatgtgatagggacgtttggagggtattaaagatatcttcttgtctctcgactggtaatccactccatatccgaaaccaatccaggaagctccattctcttctatatataaggtagagatcaaatcagtaaagaacttcccgttaccacgtgggtagaggacatcaaaagaacgtgcgtgtgtatctgtatgaaaaactcctgttccttttgttccaatccacatcaatccgtttttatcccgaaaaacggtgttcacttcgcgtacgggcaaataatgttctgggttcgattctttgtaattgatgaacgtcccttcgttagccatattcataatgccaattccatcccggcttcccagccataacgaatgtgtctgcaagtcttcatggatagaataaatataatcagaagggatagaggaaatattcagaggatcgtatctgtaatttttttcaatagacaatgtctgcttgtccgaagagaaattaaccttataaagaccatacccgcttgttcccacccatagaactcctctggaatcctgaaataatgacaaaacggaattgttttcgctcaatggagggtaatgggtgaacttattctcttttatgtgataacggtagagcccgtcttgccaggtaccaatcagtaaatcaccattttcatcttcaagtatggtttgaacattcttttgttcgggtacttcgcctttacaattcttgtgtgtcatcaggaccaatgtatcctgtcctgcatcataatatgccattccacggatatatcccagatagactttgttctctttggttacgtggatttcgttcaaacgatgtttgttgattccttccagttgcatttttctcatttgtcccgtttgcttatcgagtacacagagaccttcatgagttcctatccatagtctgtgggaatagtcttcttctatgcaaagtacattattattggtcagtagtcccggagtgtaaagatttgatttatatgttctgacttcataaccatcataccggaataatccatagaaggtgggaatccagatgtaaccgtcccgatcttgatagacctgatgaaccatactgttgggtaatccgtccggagttgagaattgtttgaattctaaattcttcagacgatcctgtgcatggacgggaaacattaataaagttgttgtaataagaagtagccagaatattctatataccattatactgcattctattagattccatttaacaaatatacaagattatctttagattcttgcgtaaataaataaaaatatggaatccgggaattacagtctatgattttagagcctctattctcttagtttagaggctctgtttagtactaatagagcctctgtttactagatttgcaggctctgtttattattaattttatacgtcgaataattgattcaacccctcgctcatactcggatgtgtgaagatgaagtcacgcaggaacgtagaagtctgtcctgtcttcatagccattgcaaccatattgatcagttccggagcatcggtacagaatagggtacatcccataatcttaccgctatggctattgataatagctttcagcatcccatcagtctgttgcaaggtacgcgaacggacaacggaggttgccggcagtcgggagactttgaaagaatacccctttctcagtgcctcctcttccgtaattccgatatgtgccaatggcggatcgataaatacagcataaggcagaggatctctgtcgttgatgtcacgtttcttgtccccgaaaagctgatcccggataatacgaaaatcatccagtgagacataggtaaattgcgctcctccttttacatctcccattgcccatatatgagtggcattggtatgtaattggtcattgactacaattgccccgtgcgcatcgacttctacaccagctgcttgcaggttcagtccttcaatcattggtttgcggcctgtggcaataaggatcgcatcaccgtctacaaaataaggagtgccgtccgaagtatccgaataagtcagagttaccccgtcgtgtgtatcatggatcgattgagtacggacattcagacgaatctcgactcctttcttctccatcacttcccgaacgctttttgcaatatccgaatcattgcggggcatgaatctgtttcctgcttcgagaagagtcactttacttccgaagccagcgtacatcgaagcaaactccagtccgatatagcctccgcctacaataatcaggtgctttggcagaatatccaactccagaagagtggtactggtgtacacatttcgactttgctgaatcccctctatattgggaataataggtgtagagccggtattgataaaaatctcttttccctgcagttcgatttcttcttcgggaagagcaactttcaccgtattggctgaaacgagagaccctttacctgtgtaaatagtcacattagggcgtttgcttaatttctcgtagttattttctcttaaaaaagaggtaagtttgttttttctggcaatcgcctgcctatacatgttactctgcttatcaaaatcattgtgataaagcagggtggaaatctctgattcgtgaatcaaagttttggttggtatacaggctacgttagggcaagcccctccgtacatttcatcggactgttcgacgacagcgacctgccatcctctgttggaaagttcggcagccagtgtttttcctgccttgccgaaccctataataattgcatcatattgtttcataacttcctttcattaacgatttatactcagctattataacacatgaagagtatatttgttttgcgccatatccgggaagcaaaggtgtccgtagcggacagaatcagctttttttcagtgttttgagtacgcgttgtgacgagtctgaaagaagcactacggctcctgcgagaataacgatatctttgataaccagtcttccggcaccggacaatagcgggaagccaaattcatctccacccagattcggaacccagacttcgggcgtggtgacaagaaaggatagtgtgcctaacgtcataatgatggcgagcgtgtcacctaccagtgctactttcgggaagaaaatgcccaggaataccagaatgccgatactcatgatgagcgctcctaatccataggagaaagtataagtgcgattggcttcgtgccaggcgcggttttccggaacgaaggctccttccggatttttgtggtctttgtattcaggagcatctttcgcatagaagaagctcatgaagggactgttggctacgaaaggaacaattccgtcggcttcgtagtggaaatatttcagtccaccgatccatacgaatacgactaagatagctacacggataaacttaattccgaaattcttcaagctggaagtgaaggtaagcaaagcaataaatttctctttcattttgcggtctttttatgggtttaactttataccgcaaaggtcgtgctttctgcatacctccgaaatggcaatacttccgcttcacttatcaattcttcccaacttccgtatttctgaactgtacggcactctgtcctgccatgtttttgaaaaaacggctgaaagaagcctggtcttcaaatcccagaatatcggcaatttctttcgcgctcttattgctgtagagcaggaggcgtttggcttccgcttccacccgttcgtggatgacccttagcggagaaggcaacttacatgttgagaaaatgttcgaaagtgtcttcggtgacttgtgaagcatatcggcatagtcctgtacctgctttttggtccggtaatgctcgtctaccagattgtaatactggcggacaatctcgaagccggattccttttcgcgcgtgatatccagtcgctgacgggcgattcgggtgcattggatgatgaaacgcttcagcaggatacgcagcatttcttcctgcaggctgtcggaaacggtgaactcgttttccatggcttcggtaatctggtccagttgccggcgctctgcttcgtttagtgtgaagcggacaaggtgggacgaaccgttgaaaaggaagccgctgcacgacacttcgtggtcgtttccatagatacaatagaagttgctgttgaacagcaaagtcatatattcaccatctatggacttaaattcaagatgctgcagatgagtcagtgagataacgtcgtcttttgaaagtaccatctcttgatggtcgatttctactgtaatgcttccttggcggacccatataaacttatagagtcctttttctttttgcaaagctttctctgtcagataagaatctgtgagagcgagtgttccttttagtttggtgtgatactgttgtaacataatttattcctccatggctgatgcgtcaaatgacagcggtagtaaatcgccgatactttttacttcgtagatacattccctgccgtatagcagaatacggataggctggccgtaacgtttttccgtttccagaatcacttggcggcaggcgccacaaggaggaataggagtttctataaagtccttttcggttcttgctgcgatagcgagggtatttaccggttggtcgggatactgcgagttggcatagaacagggtagtacgttccgcacaaagtcccgacgggtaagctgcgttctcctgattggttcccgtcacaatggttccgttgttcagcagtgcggcggcgcctactgagaaatgcgaataaggagcgtagctgcgggcggttgcttccatggctgttttcattaatgaccggtcagcttcgttcagttcatcgtattgatatactttgattatagcggtaattgtgaggtccttcatatcggtaaataggttagttctacattattaatgttacaaagttagaaaagagattgataatcccaattatttttcagatttttgtgtccgataatccacatataagttaaaatggagaacaaattgtatagactagtctttctaactgccattatcttctttgccgtaggagtacaggcacaaagacggaatgcacgttatgtagaatatataaataagtatagtgacttggctgtggagcagatgaagcttcacaaaattcccgcaagcatcactctggcacagggattgcttgaaagcggagccggaaacagccagttggcacgcaagagtaataatcatttcggtattaagtgtggcggtagttggcgcggacgttcggtacgtcatgatgacgatgcccgcaatgaatgtttccgtgcctacaagcatccccgcgaatcgtacgaagaccattccgactttctgaaaaggggtgcccgttatgccttccttttcaaactcgatatcaccgattacaaaggatgggcacgcggattaaaaaaggcaggatacgccacagacccttcctatgccaatcgactgattacgattatcgaagattacgacctgtataaatatgacagcaaaggtgtctactcggaacgtaagttgcgaaagaacccttggctgctgagtccgcatccggtgtatatcgccaatgatatcgcctatatcgtagcccgtagtggggatactttcaaggatttaggtaaggaatttgatatcagctggaagaagttggtgaagtataacgacttgcagcgtgattatactttagtagccggagatatcatctatctgaagagcaaaaagaagaaagcatccaagcctcatactgtatatattgtgaaagatggcgattctatgcatgccatctcgcagaaatatggtatccgtctcaagaatctgtacaagatgaatcgtaaggacggagaatatattccggaggtaggagatcgtttgcgtctgcgttagaaaactttatgccatactcatgtgttattatgtatgataaaacatgattaatatatgagtctaaatattgcaaaggacagtaagaaacgggtcgtcattgtagggggtggtttcggtggcttgaagttggctaataagctgaaaaaatcaggctttcaagttgtgttgatagataagaacaactatcatcagttccctccgttaatttatcaggtggcctcggcaggtatggaaccgacttccatttccttccccttccgcaagatattccagcatcggaaagatttttatttccgtatggcggaagtacgtgctgttttccccgaaaagaacatgatacagacttccatagggaaggcggaatacgactatctggttcttgccgcaggtacgacgaccaatttcttcggtaataaacatatcgaagaggaggccatgccaatgaaaaacgtgtccgaagctatggggctcagaaatgcgcttctcgccaacttggagcgtgctgtgacctgctccaacaaacaagaacagcaggagttgctgaatatcgttgtcgtaggtggtggtgccacgggagtggaagtggcgggagtactttcggaaatgaagaaatttgtattgccgaatgattatcccgatatgcccagcagtctgatgcatatttatctgatagaagcgggtccgcggctacttgccggaatgtccgaagactcatctagtcatgcagaacagtttctccgtgaaatgggagtcaacattcttttaaataagcgtgtcacggattaccgtgaccataaggtgacacttgaagacggcagtgagattgctacccgtacttttatttgggtaagtggagtgaccggagtttcttttgggaatatgaatacgtccgtaatcggtcgtggaggccgtatcaaagtagatgcctttaatcgggtagaaggaacaaataatgtgtttgccattggtgacttatgtattctttccggtgacgaagattatccgaacggacatcctcaactggcacaagttgccatccagcaaggggaattgctggcaaagaatctgattcgcctggaaaaaggaaaagagatgaagccttttcattatcgtaacttggggtcgatggcgactgtcgggcgtaatcgtgccgtagcggaattcagcaaggtgaagatgcagggatggtttgcttgggtaatgtggctggtagtgcatctgcgctctattctgggagtacgcaataaagtagtggtgttgttgaactgggtatggaattacttcacctatgatcagtccatgagaatgattgtctatgcccgcaaggcgaaagagatccgtgaccgggaagcaattgaggcaactacccattgggggaaagacctcatacaggagccacaaccggccaaacaagaaccgcaaccaaactcaaaagaaatagtatagcaccgttttgcgatggtgtcactatccggtcggtatagtgacactataacaagaagatagtgacactataataacagtatagtgacaccatgtttttttgaacggtaaattcgtacaaggtgtccgatatcggacaccttctcttttttattattctctgttaatcagttgattatgcttttggcatagatttggtataataaaaggtaaaacaactgaaagtgaaattgtaaatacttagatatggacagagaaatacccaaagaagtgcgtaacaaagaacgcaataaaaagatcatccgttattcatcgataggagtggccggtatagttgttatcggcatacttatatctgtcatgcggacaggagtggaaaaaaaggatctggtactttctacagttgataagggaatgattgaagttagtgtcagcgcctccggtaaggtagtccctgcatttgaagaaatcatcaattctcccattaacagtcgtatcgttgaggtatacagaaaaggaggggatagtgtggaaatcggtactccgattctgaaactcgaccttcagagcacggaaacggaatataaaaaactgcttgacgaagaacagatgcgccgctataagctggatcagcttcgcgtcaataatcagacgaaactttccgatatggcgatgcagattaaggtctctgccatgaaattgagccgcatgaaagtggaacttcggaacgaacactatttggacagtctgggagcgggaacaacagataaagtgcgtcaggcagaattgagctataacgtagcacaattggaatacgaacagctccaacaacaatataagaacgaaaaagaagtagcagctgccgaactgaaagtgcaggaactagatttcaatatcttccgtaaaagtcttgccgaaatgaagcgtacactggacgatgcccagattcggtctccgcgtaaagcgattcttacctacattaataatcagatcggtgctcagatttcgcaaggcggacaggtggccatcatctcagacttaagccattttaaagtagaaggtgaaatagccgatacctacggtgaccgggtagctgccggaggaaaagcggttgtaaagataggcaatgacaaactggaaggaacggtcagcagtgtgacacccctgtctaaaaacggagtcatttcttttacagtgcagttgaaagacgataataaccaccgtttacgttcgggactgaaaacggacgtttatgtgatgaatgccgtaaaggaagatgtgatgcggatggcaaacgcttctttctatgtgggacgtggtgagtatgatctttttgtccggacatctgatgacgaactggtgaaacgtaaagtacagctgggcgattccaactttgaatatgtggaagtggtgagtggcttacaaccgggagatgtagtggtagtcagtgatatgagctcttataagaacaagaataagctgaaaatgagataaaaacgatctaaattaaatacttatagttatgataacattgacttctctctctaagatttaccgtacggacgagattgaaacggtagcactggaaaacgtgaatctgaccgtagaccgcggagaatttctaagcattatggggccgtccggatgtggcaaatctactttgttgaatattatgggattgcttgatgcacccacaacaggaactgttgaaattaacggtacgcacactgagggaatgaaagataagcaactggcggctttccgtaacaaaacactgggctttgtattccagtctttccatctgattaattcactcaatgtgatggataacgttgagttaccgttactctatcgtcgtatcggcagcggtgaacgcaagcgtttggcgaaggaggtactggaaaaagtcggattgagtcatcgtatgaatcactttccgacacagctttccggtggtcagtgtcagcgtgtggccatagcgcgtgcaattatcggtcatccggagataattcttgccgatgaacctaccggtaatctggattctaagatgggtgccgaagtcatggaacttctccatcggctgaataaggaagacggccgaactatcgttatggtgacgcataatgaagaacaggcgaaacagacttcaagaactatccgtttcttcgatggccgtcaggtacagtaatccccttttaaactctaaaaaagctaatcatgacaaagaatatttttataactgctgttgcggtattattaagtgtagccctttgcccgctttgggcacaaaatgtgagtgaagattgtaaagtaggcgaattttccgctatcaatctgcggtcggtaggtaacattattttcactcagtccgatacttattcctgtcggatggaaggtccttttgaatatgtcgataaaacaaaagtaacggtaaaaggagaaacattggttatcgaatataagcagaagaatgtaaaaaacgttaagaacctgacgttctatatcacagcccctgatttgaagagtgtaaagatcgatggtgtcggcaacttcaatgctaaagaaaccctgaaactgaaaaatataactttcaaactcgatggagtgggaaactgtgaggtgaaaaagctccattgtgatgagttggaattaatggtagacggggtcgggaatatgaatgtcaatgtaaactgcaatactgtgaaagccaaagtggatggagtcggaaatatcaaattgtccggcaaggcagacagagcttctctgaagcgtgacggagtaggcagaatcaatcataaaggcctgaaatgcccggatgtgagcacgaaaggctggggattctgataagtatgaaaatgaatgagaagataatgagattacaatgataaaactctatttcaaacaagcatttcacctgttgaaggagaataagttactttcttctatctctatcataggtacggcattggctattgctatgattatggtgattgtgatcacattgcgtgctactattgcaccctttgctccggaaagctatcgtgaccgtatgttgattttcaggtatgcgggatttcagtataaaacaaacgagaactggcagagtaacggacctgtttcttataagacagcgaaagcctgttttaaagaaatggctgcccctgaagcagttactataaccagcagtttctcggaaacgatgctggctgccaagccagcgggagagaaggttagttgcagtgtattgcaggtggatgatgatttctggaaagtatttaagttcgatttcctttcgggatatccgtttgataaggctacttttgatgccggtgcaaccaaagcagtaatatctgaggatatagcccggcaattgttcggaacatcggatgtagtcggaaaaacattccttttaaatcactccgcttatatgatttgtggagttgtgcgtcccgtatccaaactggcacggtatgcttatgcccagatttggattcctttaagttcaacagatgcgtttaccgccagttggggtgaatatggaattatgggaatggtgagtgtctacattctggctaaatctcaggatgactttccggcaatccgtatggaagctgaacgtctcagggacagatatatggaaggttatccggattatgaattgctctatcgtgaccagccggatacttattttgtggcggcgcaacgatattcagccaataatcctccggctgtgaagcaggctgtccgtcagtatataataacgttaatcattctgttgatcgtacctgctgtcaacctttccggactgacattgtcgcgtatgcgcaaacgcctttctgaaatcggtgttcgaaaagctttcggtgcgcccagacgcgaactgatgatacaggtactttctgagaatatgctttattcactgttgggtggagtgctcggattaattctgagttatggcgcaactttctttttgggaagtatgctgttttccattgactttatgggtaatggtgtgacggatttgcggaccatgtgtatggatctgctgtttgacccggttgtgttcttgctcgcattttttgcctgctttgcacttaatttattgagtgctgccattccggcatggagagtgacacggacaaatattgtggatgccatcaatgagagataaccgaaacattcaacaaactaatttttaagaagatgcaactgttaaaacaaatatggaacgaacgtcgctcgaacgggtggctgtgggcagaattgctgattgttttcgtggtgttgtggtatattgtcgattggacgtatgcaacagcgcgtacttattacgaaccgctgggatatgacatcaccaatacttactatctggaactcagtctgaaaaacaataagagtgattcttatattccgaaagggcagaaggaaacgacgacgggacaggacattgttgaactgactaaccgactccgtcgcttgccggaagtagaggctgtctcgatatcagtgaatgcacgtccgtatataggaagtaattccggcatccgttttcgccttgatacgctggtgcgcagtccgttgagacgtccggtaacaccggagttttttcaggtgttccgttatcaaagtgcggatggacagggatatcagcctttaatgcaggctataaaaaacggaaatgcggttctcagcgagaatatatggcctgacggttataagggtgaccgtacgttgttgggaaaagaagtcgtgaatgtggatgattctacagacgtttataaaatagctgccgtatcgactaaggtacgttacaatgatttttggccaaattacagcgatcgctatatggctattcctcttacggaagcacaattggccgagattaatgatgacctgtatccgctcaatacggaagtttgcctgcgtgtaaagccgaatacggctcccggctttccggagcgtctgatggaacagtcggatacccagttcagtgtgggaaatctttttatactgaaggtacacgattacgagatgatacgtgaggattataatcgtaccaatgtcaatcagatgcagacgcggttttggatgatgggctttttgttggtgaatatcctgttgggaatagtcggtacattctggtttcgtacccagcatcgtcgtggagaactcggacttcgtgtcgcagtcggttccacccgcatgggactctggcatcgtcttaataaagaaggcttgttgctactggcactggctgctttgcctgctgcaattatttgttataatataggttatctggaactgacggaaggtggtatagagtggagtatcattcgttttcttatcactttttgtgtgacaagtcttttgatggctttgatgatactcataggcatttggttccccgcccggcaggcgatccgtatacagccggcagaagccttacgcgaggaataaaaaactgaagctatttgcattgttttcaatataataacttatctttgtaggcaaaatgttgaaaacaatgctgttttttgcttatgaaccgacaatattactgtttgtttgttgttttgttcttcgttgtttttgcccgggcggcggcagcagaacatacatacaacatactttttattcaatcttatacctcgcaaaccccttggcataacgacctgaatgaggggctgaccaagggattcaaagagaatggactgaaagtaaatattactactgaatatttggatgccgatttttggtcattcagttcggagaaagtgattatgcagcgtttttgtcagcgtgcccgtgacagaaagacggatatgattatcacagccagcgatgaggctttttacactcttttctcttccggcgattcgttgccttaccaggttccggttgtgtttttcggaatcaaatatcccgataaagaacttatagcgagtcttcccaatgtatgcggattcaccgctaatcccgatttttatgtgatcttaaagcaggcacaaaaggtatttccccaacggaaagaagtgatatgtgtgattgacaacagttttctgagtaataagggacgtgaggacttcaaacaagaatggcagctttttcaggaagagaatccggattacaagatgaaactctacaatacccagcatgaatcaaccaatcatattattgcggctatctgttatccccgtaatagttatgctcgggttgtggttgctcccaaatggtcaccgttcctttcgtttgtaggcaagaactccaaagcaccggtcttctccagtcagaatgtggggctgatgaacggtgtatttgcggcatatgacgcagacgcctatacctctgcgatgtctgctgcaaagaaggcatcgcgagtgttgaagggggaatctcccttgaaactgggtgtgacggagacggaacagggatttatttacgattataaacagctggacttctttcatatagacccggataaggtttcctccagtggcagtgtcgttaatcagccgtattgggaaagatataaattattgtttattcttctttatccatctatcctggcattgttgatcgtctctatcgtgtggctcattcgtgtcaaccgtcgtgaagctaagcgacggatacatgcccagacccgcttgttggtgcagaataaactggtggaacagcggaatgagtttgataatatcttccattccatacgcgacggtgtgatcacatatgatactgatcttcatattcactttaccaaccgttctctgctgaagatccttcatttaccctcagaatcgggcggacggaattatgaaggaatgatggcgggcagtattttcaaaatatactataacggtcaggatatcctttacaagatattgaagaaggtgggagagactgggcagagtgtcattattcccgatggggcttttatgaaagaagtacatagcgaacattatttcccggtttccggggaagttgttccgattcattcaggcgggcagattaccggtatggcactttcggcacgcaacgtatcggatgaagaaatgcagaaacgtttctttgacatggccgtggaggaaagttctatttacccttggcagtttgatgtggagagtaatagtttcatctttccgcaaggttttcttgttcgttttggttatgatgagtcgattacttccatcacccgcgacgaaatggatcgtatggtttatccggaggatttgaaggaaatgcgtattctctttgataaaacattggcgggaaaagaaaccaatacccgtttgaatttccgtcagcgcaatgccaatggagaatatgaatggtgggaataccgttcctctgttatttccggtctgacgagagattcgctatataatatattaggtgtatgccaaagtatccaacgttataagacagcagaacaggaaatgagggaggcgcgtgataaggcacttcaggctgacaaactgaaatctgctttccttgccaatatgagtcatgaaatccgtacaccactgaatgctattgtcggtttctccgacttgttgagcgatacaagcggctttacagaagaggaaatagggcaatttatagcaacgatcaataagaattgcggattgttacttgcattgattaatgatattctcgatctgtcgcgtatcgagtcaggaacaatggaatttatgtttgccaatcataatttgcctctgctgctgaagacagtgcatgattctcaacaactgaatatgcctccgagagtggaactgttgcttcgtatgcccgataatgagaaaaaatatctggtgacagataatgtccgtctccaacaagtcgtcaataatctgatcaataatgctgccaagtttacgacttacggttccattactttcggatatgaggaagatgaagatcccgaatatacccgaatctttgtggaagatacgggagtcggcatttccgaagaaggtatccgtcatatcttcgaacgattctataaggtggacaactttacacagggagccggtcttggattgagtatctgccagacgattgtcgaacgtctgagaggaacgatctttgtgacttccgaagtaggcaggggaactcgctttactgtacgtatcccgaatttctgcgaataagactgaacgttcatttctgtgcatagtgtccgaaaatgaacactgatacatttctctaaccgattgatagtaaatgtattattcttttggcacatggtttgattctatctgactggaaaataccgtgtacaatgaaaaagaaaagtatattgtttgttctggctgcaatctgtctgcctttggcagtgtcggcacagaaagagagggaaatcaccttgaacgaagctatcgctatggcgcgtatgcagtctgttgacgctgccgttgccttgaatgagttgaaaacatcttattgggaatatcgcacattccgtgccgatcttcttccggaaatcaatctgaaaggaacactgcctaattacaataaatcttacggctcctatcagaatccggacggttcttacagctttgtccgcaacagcgccttaggtctttccggtgaactttccatcgaccagaatatctggcttaccggtggacaactttcactaacctcttccctcgactacctaaagcaactgggtaatagcggtgatcgccatctgatgtccgttcctgttactttaaaactgacccaacctattcttggtgtgaataatgtgaagtggaacaggcgtatagaacctgtgcgatatgccgaagcgaaagcggaatttatcacagctaccgaagaagtgacgatgcgggctattacctattattttgatctgctgttggcgaaggagactcttggaaccgcccgtcagaacttgacgaatgccaatcagctttacgaagtggctatagctaaacgcaagatgggacagatttcggaaaatgaacttctccagttaaaactttcggcattgaatgcaaaggctgcgttgaccgaagccgaaagtgatctgaatgccaagatgttccagcttcgtgcctttctgggagtgggagaggatgaaatcctccgtcctgtcgttcccgagtcggtagattgtggtaaaatggaatataatatggttttgaataaagcgctggaacgtaattcttttgcccagaatattcgtcgccgtcagttggaggccgattatgcggtagctacggcacgtggtaatctgcgtagcattaatttgtttgctagtgtaggatatacgggagagagtcgtgaactttccagtgtctacaggaacttgcaggataatcagattgtgcaggtaggcgttcagattccgattctggactggggaaagagacgcggaaaggtacgggtagcgaaaagcaaccgcgatgtagtgctttcgaagatccggcaggaacagatcaacttcaatcaggacatattcttgctggtagagcatttcaataatcaggcacagcaattggagatagccaaagaggcggatggcatagctcagcaacgttacaaaaccagtattgaaaccttcctgataggtaaaatcaacacgctggatttaaatgacgcccagaacgccaaagacgaggcgcgccggaagcacatctccgaactttattattactggtattacttttatcagatccgtagtctgactctctgggatttccaggctaacacggagttggaagcagattttgatgaaatagtgcggcaatagggattaatcgggctatttgttgcttgtattgagtatttacaatatctttgtcacaagtaatttaaactatgattttaataatagacgacgacagtgcggtacgctcttcactcagttttatgttgaagcgggctggatatgaagcacaaacggtttccggtccccgggaagctatggaggtggtgcgttccgtagcaccggatttaatcttaatggatatgaacttcaccctttctactacaggtgaagaagggctgactttgctcaggcaagtgaaaatattccgtccggaaactccggtgatactgatgaccgcctggggaagcatacagcttgccgtgcaaggtatgcaggcaggagccttcgattttatcaccaaaccttggaataatgcggcattgttgcaacgtatcgagacggctttggaactggcaggctctcccaaagagacaacgcaggaacagaatgacgctttcgaccgccgtcatatcatcggccgtagtcagggactgacggaagtactgaacaccattgcccgtatagcaaagacgaatgcttccgtactgatcaccggagaaagtgggacgggcaaggaactgatagccgaagcgatacacatcaacagccagcgtgccaaacagccttttgtcaaggtgaacttgggaggaatctcccaaagtctgttcgaaagtgaaatgttcggccataagaaaggagcttttacggatgcttcctccgaccgtatcggacgctttgagatggcgaataaaggaaccatctttctggacgagatcggtgatctcgatccttcctgtcaagtgaagctcttgcgggtgttacaagatcagacgtttgaagtattgggagacagccgtccccgtaagacggatattcgtgtcgtctctgctaccaatgccgatttgcgtaagatggtgggcgaacgtactttccgcgaagatttgttttatcgtattaatctgattaccgtcagactgccggctttgcgtgagcgtcgggaggatattcccttgctggcacgtcactttgccgatcgtcaggcagaggccaacggttttcctcgcaccgaattttcagcggatgccttgcagtttctgagtcgcttaccttatccgggaaatatccgtgaattgaagaatctggtagaacgtacgattctggtcaatggaaagccgacgcttgatgccgccgactttgatgctcagtatatccgtcacgaagatcagaaagtcgccgaaggcgcatcctttgctggtatgactctggatgaaatagaacggcagacgattttgcaggctttggagcgtcataagggaaatctgagtcaggtagctacagcgcttggcatcagtcgtgccgccctttaccgtcgtctggagaagtttggaatcagtgtttagcagatagatgttactattattatgcgtataaaaggattctttggtatactcgttttcctgcttctggtcttggggggtggattgcttttcctttcaagccggttgaatatgatctatttctatataggagaggggttggtcctttttatcctgtgttatctcccgtttttctatcgtaagattgtgaaaccgctgaactctatcggaagcggtatggaactgttgcgcgaacaggatttcagcagccggttaagtcccgtggggcaatatgaagctgaccgtatcgtgaacgtcttcaaccggatgatggagcaactaaagaatgaacgtctccgtctccgcgaacagaataacttccttgacctgctgattaaagcctctccgatgggagtcatcctcactacattggacgaggacctttccgagctgaacccgatggcgcagaaaatgctgggtgtccgtcaggaagatgttctgggtaaaaagatgaacgagatagattctccgcttgccgccgagttggcaaacgtaccgaaaggagaaacggctaccgtccgtctgaatgattcgaatatttataggtgtacgcattcctcttttattgaccgtggatttcagcaccccttcttcctgatagaaagtctgacggacgaagtgatgaaggcagagaagaaagcctacgagaaagtgatccgcatgattgcccacgaagtgaacaacactactgccggaataacctccacactggatacggtagaacaggcgctttctaccgaagaaggcatggatgatatttgcgatgtcatgcgtgtatgtaccgaacgctgtttctctatgagccgtttcatcacccgttttgccgatgtagtgaagattcccgaaccgacgctcacacttgtcgacctgaatgacctcgcatttacatgcaaacgttttatggaaggtatgtgtaccgaccggaacataaaacttcgtctggagatagacgaaacgctgaaagaggtaaaaatggatgcctccctcttcgaacaggtattggtaaacatcatcaagaatgctgcggaaagcatcgagaaggatggagagattatcgtccgcaccctttctcctgccattgtcgaagtggtggacaacggcaagggaatcagcaaagaggtggaagcgaagctgttcagcccgttcttctccaccaagcccaatggtcagggaatcggactgatctttatccgggaggttctgatgcgtcacggctgtaccttctctctgcggacttatgccgacggattaaccagattccgtattctttttccctgatcaaatgtcaaacgagaacagttcttccgctatatagacctttttttgttctgaaatccctcctacctttgccccgctcaattcaataggatgttaaggtataagatatgagattaataattaaaggtgcagtagcgctctttcttttattggctatcagtattccgctaagtgcccaatacatagtgcagggtgtggtgactgattctctgaccagagaacccttatcttatgtatctgtacgtctgaaaaacacgaccgaaggaacgactaccggaagtgacggacgcttttatttcaaaactcatcgctccgaaggagtgcttgtgatctcaaccgtaggctataatgaatatagccggctgatccatccggcacgtaatctttcgtataaagtagcactttctcccgctacatatgcgctcaacgaagtattggtgaagcctaaacgcgagcattaccgtaagaaagacaatcccgctgtggagtttgtccgtcggatgatagaacatcgtgacgaccattctcctaatgagaaagacttctggcagcgcgaccgttatgagaagactacctttgcgctgaacaacttcgacgaagagaaacagaagaaatggctataccgcaaatttgatttcctgacagaatatgtagacacctctgccgtcaccggaaaaccgatactgaccgtatctgcccgtgaacttcttgctacggactactaccgcaaatctcctcattccgaaaagcagtgggtgaagggacgcaagcaggcaggagtcgatgaattcctttccaaacaaggtatgcaggctgctattaatgaagtctttaaagacgtggacatttacgagaacaacatctccctgttcaccaataagttcgtcagccccttatcccgcatcgggacaggattctacaaatattatctgatggataccttgcagatcggcggtgaaacctgtgcggaccttgctttcaccccctttaattccgaatctttcggttttaacgggcacttgtatgtcacgctcgactctacctactttgtcaaacgtgccgtacttaacttcccgaagaagatcaatctgaactttgtcgattatatgctgcttgaacaggaatttaagcgggcagaagacggtactcgtctgctcgaccatgaaagtatcaccgtagaattcaaactgaccgaaggacaggatggtatctttgcccgtcgggtggcggattacagtcgttattctttccttccgaccgaggaagccgataaagccttcaccaaaccggaacgtatcatcgaagaaaccgaagcgctgtcccgacccgaaactttctgggcggagaaccgtccgcaagcagccatctcgcaacaggagaactccgtagaccgcctgatggcgcaactgcgtggctatccggtctattattggacggaaaaggtgctatccattctcttcaccggatacatcccgacctccaaagaagcccctcttttctatatcggtcccatgaatgccaccatcagcgggaatacgctggaaggaccgcgtatccgtgctggtggaatgacgaccgcatggctcaaccctcatctgttcggcaaaggctatatcgcttatggcttcaaagacgaaaggctgaaaggactggcggaagtagaatactcctttaaaaagaaaaaggaatatgccaatgaatttcccatccattcactgaaagtacgttatgaatcggacgttaaccaatacggacaaaactatctgtacacaagcaaagacaatgtcttccttgccttgaagcgtgaaaaagatgatcgtatcggctattaccggcaaacggaaatgacctataccaatgagttttattccggcttctccttccagctaacggcacgcaggcggacggatgaatcgagctacctgattccttttctgcggaaagacggtgaggcttactctccggttaaagacttctctaccagtgcggcggagttgaagctgcgctatgccccgaacgagaaattctttcagacacaatggaaccgcttccctgtatcgctggatgctccggtgtttacactgtcgcacaccattgccggaaaaggagtactgggaagtgattacacctataatcataccgaagcgggtgtgcagaaacgtttctggttttccgctttcggctatacggatattatcctgaaagcagggaaggtatgggataaagttccctttccgttgctcattatgccgaatgcgaacctttcctacaccattcagccggaatcctattcgttaatgaatgctatggagtttatgaatgatgaatacttttcgtgggacgtcacctatttcctcaacgggtggttgttcaatcgtatcccattgttgaaaaaactgaaatggagggaaatagtttcctgtcgtggactttatgggcatttgagtgataagaataatccggatatgacagacggtttgttcgcttttccgatagcaagtacccgtacaatgggaaaaacaccttacgtggaggcgggtgtgggtattgaaaacattttcaaggtattacgtttagactacgtctggcggctcacatatagggattcgcccgatattgacaagtccggcctgaggataagtcttcacatgaccttctaaaagttaaatcctgctaattgcaatgtttatatagcaaacaaaggtcgctttagtaattaattaatcttatttttgcatcaattttagtttaattttaatagaatagaaatgaaacaagaaattaaacccgctactggacgtcttggcgtgttggtagttggagtaggtggtgcggttgccaccacaatgattgtaggtacactagcctctcgcaagggactggcaaaaccgataggatctattacacagttagccacaatgcgcatggaaaacaacgaagaaaaactcatcaaggacgttgtgcccttgactgatttgaacgacattgttttcggtggatgggatatcttcccggacaacgcatatgaagctgctatgtatgccgaggttttgaaagaaaaagacctgaacggtgtgaaagatgaactggaagctatcaagccgatgcctgcagctttcgatcacaactgggcaaaacgtctgaatggtacacatatcaagaaggctgctacccgttgggaaatggtagaacaactccgtcaggacatccgcgactttaaggctgccaataactgcgaacgcgttgttgtactgtgggctgcaagtaccgaaatctacattccgttatcagacgaacacatgtcactcgctgctttggagaaagcaatgaaagataacaacacagaagttatctctccgagtatgtgttatgcatacgctgctatcgcagaagatgctccgtttgtgatgggtgctcctaacttgtgtgtagatactccggccatgtgggaattctctaaacagaagaatgttcctatctccggtaaagacttcaagagcggtcagacactgatgaaaaccgtattggctccgatgttcaagactcgtatgctgggtgtgaacggttggttctctaccaacatcctcggtaaccgtgacggtgaagtgctggatgatccggacaactttaagacaaaagaagttagtaagctgtctgtaatcgacaccatcttcgaaccggaaaaatatccggatctctatggagacgtttaccacaaagtacgcatcaactactatcctccccgtaaggacaacaaagaagcatgggataacatcgacatcttcggatggatgggctatccgatggaaatcaaggtaaacttcctttgccgtgactctatcctggctgctcctattgcacttgacctggtattgttcagtgacttggctatgcgtgcaggtatgtgtggcatccagacttggttgtcattcttctgcaagagcccgatgcacgatttcgaacatcagccggaacacgacctgttcacacaatggagaatggtaaaacagacattgcgtaacatgattggtgaaaaagaacctgattatttagcttaattaaataagtggagagttgaaagttgagagttgaaagttgttgcaatgtaattgcagcattagacaacttttaactttcaacttttatttttggagcacatccaatcatcctccactctcaattttcaactctcaactctcaactattaatgaagagaccttcctttctacctgttttaataggcacgggctttggctctggtttttctccttttgctcccggtacggccggggcattgctggcttctatcatctggattgcactttacttcctgcttcctttcactgctttattatggacgactgctgctttggtggttctttttacctttgcaggtatttgggctgccaataagttggagtcttgttggggcgaagacccgtcacgtgtggtggtcgatgaaatggtaggtgtgtggattccgttactggcagttcccgataatgaccggtggtattggtacgtgatagcggcttttgctctgttccgtatttttgatatcgtaaagccattgggagtacgcaagatggagaactttaaaggtggagtaggggtaatgatggatgatgtactggcgggtgtatatagttttatcttgatagcggtggcacgatgggtgattggctgaaaagagttgcacggatgatctcgcagaagggtggagtctttatgtttttaagggcgcagctttcggctcaaatggcgactattgcagactttctggtgactatccttctggtaaggctatttgatgtctactatgtatatgctaccttggcgggcgctatctatggaggaattatcaattgcattatcaattataaatggacttttaaatcgaaagggaaaaaaacgcatgttgctgtaaaattcataatagtgtgggtttgcagtatttggctgaatacgtgggggacgtacactctgacggaatcgttagcgaaaattccgtgggtacgtgatacactcagccaatatttcggtgacttcttcatcatccctaaagtggtggtggcagtcattgtagcgttgttctggaattataatatgcagcgtttctttgtttaccggaatatagatataagaagcttgtttaaaagaaattgaaagaaaacagaagatttagataaaaacagatttaggtatatgaattacagagattacttacagcaactgatttataagattatcaatcctttgatacatggaatgattaaaataggcatcacccctaattttatcactactaccggatttattctgaatgtggtagcggcaggtatgtttgtctatgccggtatctgtggcggacagaatgatttgtccattcttggatgggcaggaggtgtgatcctttttgccggattgttcgatatgatggacgggcgtgtggcacgtctgggaaacatgagttccaaattcggtgccctctacgattctgtgctcgatcgttacagtgagttgatgactttcttcggtatctgttactatttgtcagtcaaagactatttcatttacgctatcattgcgtttgttgccctgatcggttcgctgatggtgagctatgtgcgtgcccgcgccgaaggtctgggcattgagtgcaaggttggatttatgcaacgcccggagcgtgtggttctgacaagtctcggagccttgttctgcggtgtattcaaggatattaccgcttttgatccgatgctgatattgatggtgcctttgacaatcgtcgctgtgttcgccaatatcacagctttcgcacgcgtgagacattgctataaggtgatgacagcgaacgaaaagaagaatgactaattaaaataacatccttaatgataaaaacaattcaaatgccgtcgaagaaagaaaccctgaccgttattgtcatcatggctctttttcttctgctgacagctgcctgtatcggactccgttccgaacatctgctgatggcggcactctatctggttttattttttgccggactacctacccggaagctggcagtggccttactgcctttcgccattttcgggatctcgtatgactggatgcgtatctgccccaattacgaagtaaatccgattgatgtggccggactttataatctcgaaaagtcgttgttcggagtgatggataatggtgtgctggttactccttgtgaatactttgccgtgcatcattgggcggtggcagatgtcttcgccggcatcttctatctttgctgggtccctgtgcctatcctgttcggactctgcctgtactttaagaaagagagaaaaacttatcttcgctttgcattagtctttttgtttgtcaacttaatcggctttgccggctattatatccatccggctgctcccccctggtatgctatcaactacggtttcgaaccgatactgaatactccgggtaacgtggcgggtctcggtcgcttcgacgagatttttggagtgactatcttcgactccatttatggaagaaacgcaaacgtctttgctgccgttccttcccttcatgcggcatatatggttgtggcattggtgtatgccatcatcggcaaatgcagatggtatgtgattgcccttttctctgttatcatggcaggcatctggggaacagcgatctactcttgtcatcactatattatagatgtactccttggaatctcctgtgcactgctcggctggctgttctttgagtacggactgatgaagattcgcggattcagaaacttctttgaccgatattatcagtatattaaatagtgaagaacaaataccgcaatatattcctggcttttggcattgtcgccgtcctgatcatgatattcactttcgatatggattatcaggaactttgggcaaatttgaaaagggcaggagtatatttgcctttggtattattgctgtggctgttcgtttatctgattaatactacatcgtggtacatcattatacgtagcggagggaagccggggttttcatttgcccggctttataagtttaccgttacgggttttgccctgaattacgtaactcccgtcggactgatgggcggtgagccgtatcgcatcatggaactgaaaccgtatataggagtggagagagccacttcttcggtgattctctacgtgatgatgcacatcttttctcatttctgcttttggctgagttctgtcttgctatacctttgcctctatccggtagggtgggtgatgggaaccattttgggtgcaatcaccgtcttctgcctgctggtagctatgttgtttgtaaaaggctatcagcatgggatggcagttgctttcgttcgtctgggcagtcatcttccttttctgaaaaagaaagtaatccgttttgccgactcccatcgggaacagttggagaacatagataaacagatagccctgcttcatcaacagaagaagggagctttttatgccgctttgtttttggaatatacggcacgtgtggtcagttgtctggaaatctggctgatcctcaatgtgctgacaaggagtgtcagttttgcagattgctgcctgattgctgccttctcttctttactggccaatcttttgttcttcttgcctatgcagttgggtggccgtgagggaggatttgcccttgcggtaggcgggctttccctttccggagcttatggagtctatgcggcattgatcactcgcgtgcgtgagatggtctggattgtgatagggcttgctttgatgaaggttggaaataaaaagtagccttattttactataatttcccagtatccgtttttgtttgatccaactcgctgaatcatacctttttgctttaatgatgtgatcaggcgttcgctatgccttaggctgtgtgatatgaattgtaagttttgatggcgtttcgtacttcctgtatttcacggatgggagctactatatgctttccgtcaaggatatctgtaatttgactttcagataaggtgtttccttcaatagccagtgaaccttgaatggttttaattcggttgattttccgcaatagcaaagcatcttcctgttccatgcggatggcatatcgttctaccaatgcggagatatccgctattaagtggatagcgcgggaagatatggcgaaaggcggagtatacatgctggaatataaaaagtttataagtttattactttctacaaagatagcattaatttccttcagaggagacatcctgatgatctattttataaaggtagaaactccaactgctccgacttagtttggtcgggcaattggagttttcttgtttataggctattcaattaaaacttttcttgatttctgcctcatgctttccagttattttccgcatcgaagcaagggcacgctttcacccattcttccggttctatctctccgttctcattccggtcgggactaaggtcacggtgaccgcatacgcggcattccggataatctttcagtaaagtaagaaccagtacccgcagtgaatgtttctgccattcggtccgggtatctttggggcgacctttgctgtcgagcccgccttcatagcagataccgatactttctctgttgaaacctttggcgtgggcaccgaccttttctatcggtcgggtagactttatatccccgtttttgcggatataaaaatgataacccgctccgttgaatccgcgtcggcgatggcagacgtccaggtcatattccgtgaaatccttgtcttcgcgtgtggcggagcagtgaattacgattaagttgatcgttctcataatctgtccggcattaagcttcagagatggatgcctcgctttgtgtacgctgtaggcactctttgtttacgcactgtaatgtggcagcttgtgccagttgttctctcaacgaaaagatttcggtgtgcatttctttcactctcgcgctcaggtcgaaataatctttcagtaccttttccagctgttccatcaggaaggtatactggtctttcaccagttcgctgaattctttgacgtcttgcgccatcgctttacgctttttacgattacccaggaaagggaggatagtcataataatctcgataattttatctagcattttttttaatggataattgataattgataatgggggg

SEQ ID NO: 4799 - DNA, 16601 bp, Unknown
  gut microbiota DNA sequence
ctaaaagtcggtagtatcttacttctcctccttcgggaaggaggagtccccgtagggggaggtggtaggtgaatgcataactctgttatttacaatagaataggaataaaccttgttttacctaccaccccggctttcagccacccctccttcccaaagggaggggaattgagatactattgacttcttagtcagtttcaattgggagggctgctccagtgttttgtactgctctttcccaaaaaagtcctgttaaactgtcgggtccggagcttcttcatcgcctccgctgtttcctccgcctccgctatttcctccgcctccggtgtttcctccgccggcatttccgccttccgtgtcacctttgcttgctagtacgaattccacgttgttttcgcttcgtgtgctggtgtgacttgcgttcaccagatgcagtgctttatccgctacaaaccggacattcaccttgcggatgcttcggaccgtgcaatctttttccttctctgtcccctcgctgcacagtgtgatgtgaaacgtacccagaccgtcgatcttcactttgtcaccttgggtgagtgacaggcggagttgctctacaaaagcttcgatggcatgttttacatctcctgctgtgagtgaagagttggcttcgatggcatctgccagtttttcgacgtccatcactcttactgtacccgatttctgacgtacgtaatacagcatcggggaattctcctgacttacgtactttcttcgctgatagcgttctactgaaacattcataaatttaaaaagttaaggtttaagtaataattattttgtttctctatgacattacaaatatacgaaatataagaggcgaagtcaagcattatgccatttatttcattgtaaatatgaaataaaatcggaaaatattagaaataatattatgtaatataatattgttttgattctgtttttattttgcttgtttcagtaatacttccaatggtggtgtatagtccgtaattttcgttagagaaggattgtggctgaagtatgcgttccctgtctctccattgcgttgtttggctacgatgactacccccagtccttcggtcggataaccgctttcccggtcggtagtgagccgtgccagtgcagggcggtagagcagcattactacatccgcgtcttgctcaatggcgccgctttcgcgtagatggaacagttccggccgaccaccgggacggccttccgattcgcggtttagctggcaaagcaatacgacgggaacgttcagttccttggcgagcaatttagccttgcgggtggcttgtgccacttcctgttcacggttgcggttcttctgtccggtgttcatgtcgcaaagttgcaggtagtcgatgatgatcagatcgcatgcactcttgcttttaaggagccgtgcgctggaacgtacatggtccatactgatcgatgtgctgtcgtctacgtgtatcggtagccgtgccagttctgcggcggtggtgtgcgcttccgctacttcgtgcgggttagggatgcctgtgcgccagcggtaagggttgatgtcgctggcggacaacagccagcggtcggcaagtcgttctccttgcatctcaaggctgtagacggcgacggcatgtccctgcatggcagcctgccgcgccagatggagggcgaaggcggtctttccgaccgaggggcgtgcggcgatggcaatgagttctccgttttgcagtccggacgtcatgcggttcaggtccgtcaggccggtggggatgccggtaattccgtttacgcttttggcgatacgctgttcggcttcttccattgtgtcggtcatcagtgcgtccatgtcgcgcatgtggtcgttgtggccgaattcaccttccaggcggtcgagcaggttgtgcgcatctatcagcgtatcggctatgtccattgtttcgtccagggagcaggcgaggagtttgttgagtcccagtatcatttcccgccgcaggtatttctcgtgtacgatctgcatgtgatattcgatgtgtgccgaggtggctactttgctgctcagttgcgtgataccgaatgctccgccggcttcttcgagcttgccccggtgggcaagctcttcttttacggtgaggatgtcgatcttcattcctgcctggtacatggccagcagggcggcgtagatcacttggtgacgcatgctgtagaacatttccggacgcagcgtgtcggctacgagcggcatggcttcctgttctatcaggcaggcgcccagtatggcttcttctatctccggagcctgcggagaaactctgttgtcagtattcatattcattcagaaaggctttattggataaataactgcaggcatgtaacgtgaatttcatgtttgtctgatgataataatattcttcgatatggtcgatggcgagttgctgttctttttcgctcagctttttccagatacgctgtgccttggcgatgttctctttggggagctgcaggatgttgtggtagtcgtcccagaagaggcggaacttttcgttgctggctttttgtgtgttttcttttttctcgccgaggagtgtcgagatatttgtccagttttcgtagtcgactactcggatatgcagggcggtggtgtcgttgtgaggaatgatttcgatgattccgtttgttttcagttgttgtatgaagcggtaggttctgctcgttggccagtggaaaatggcgctccaactgcggtagctgtgcaggctttcacctcttttgcacacgatggtgcgtctttgatggtcggtgagctttgtttccgagtagttgacttttataagaagcttcagaaaagcttctatttctccttcatgtgggctgcagtctataagttgctctttcagcagagcttttgggataatgatgtagccatatccgatggcttgacaatccattttttgcatatgatattctgtttttaaattttgtccaaaagtaggttgatcgttgccggaatcctaaacggatgtgcgtgtttggacgtgttgggatgtaatattccttgtgtggacgtaaattgctgtttttgacatgtgttgtttttgtgtggtacacgttggaggaagatcgtgaaacagaggcttcgtttgatgcgaacagagcttctgtttatagtaaacgaagcctctgttcggtcattttggagcctctgtttggagggtggaaaaagggcatttttgtggaacgcacagcggaacactctggagagtgaggtaatcttctgacatttaatggaatatgtctgttgagaaaaatcttttgaaacgcagggcggaaccataataagggataactaataaattatatatttaaaaatatatagttcgattttcgctttttgggcgttcaaactcgtttgttgtccgactcgtttgcgtggttttccgacagtgaaatgatgggtggtccccagtgcgcccagatgatttgctgcattttcggacttagcaaagtcgtatgttcggtgtagcttgcagcggtgagctctgctttgagctgcaagttggcgtctatcgtgtcgcgcatcctttttctagctgcattgcagtccgaatgtccttgaaagtattccgtagctaattgggtaaaatgtttaaatcccttgatgatgtaatctttggatacttctttttctacttttatcatattattatatttagtttgtataaaccattgtttgtggtttattttctgcaaagttatgaaaaataaattgattgaatagtataaaataatttagttttattttttgtttttacatctgtaaatttatatgtatgtacctgcttaattaaatttgtaattagggatatttgttgattataataactatttatttgtggcggaaattttatgaaaaaaaacatagcggtttctttttttgttgttttactctcagacgcatggcgaaatttgttggtcggatcattctgctgatgaatgagtatatgtctgaagggtattttggagagatgctaaaatacccttatatttatcgcgtaatttatttaatagtgattaaaatgttaaaagtagtagcatttatgaagcaagtagccaagggactacagatggagggaaactttggtactgcacacgtctaccgtagcagtctcaatgccatcattgcttatcgtgggaaaggggattttacatttcatgaggtaacccctgagtggttaaaaggcttcgagattcaccttcgtggccgtggatgcagttggaatactgtatctacttatttacgcacatttcgtgcggtctataatcgtgcggtagattgtcgtggggctgtttatgtaccgcatctgtttcgttctgtatataccggcacgcgtgcggaccgtaagcgggcgttgtgtgatgaggatatgcagaaggtttttgccaaattaccttcgtctcctgccgtgactcctgctatgcgtcgtacgcaggaactatttgtcctgatgtttcttctccgtggtctgccttttgtcgatcttgcttatttgcgtaaaagtgatttgcacgacaatgtgatcacttatcgcaggcggaagaccggtcgtcccctgtcagtaacgttgactcgggaagcgatggtcttattaaagaggtatatgaaccgtgacagttcttctccttatctgttctctcttttggagagccgtgaagggacgaaggaggcgtatcgtgaataccagttggcattgcgcagcttcaatcagcaactgttgttgctggggcaattattagggctgggcgacaggctgagctcatacacggcacgccatacgtgggcaacaacagcttattattgcgaaattcatccgggtattatttccgaagcaatggggcattcgtccattacggtaacggagacgtatttgaaaccttttagaaataagaaaattgatgaagccaatcaactggtaacggattttgtgaaacggacagtttctggattaatagcttgattattagtgatgttactttgtaggtaacggagctgaatagcgttgcaaagatggatatattttggaaaacatgcaaacaaaaatgatattttttctgataaacaactaaaaaaagacaaataacacgataaaacagcggatttcttagcattaaacttttgtagcttttaattttagataatagatttccctcccctctgccgcctcttagaagcaggggtaaagatgtttcagcattcaacaaatgatttttcagtattatctaccctctcagggcaggtacaaaggttttcccgttacctacaaagtaacgggtaaaaagtattgggagtaagtttcttgttcatccccctgtggagtatgaacacaagtaaaacaaaaaagaaaaggaggttatactgaaaatgaatggggacaacacatgagagttttaaatcaacaatgcgagactatatttttattatttaatttataaattaaaagtttttttattatgaacaaaaagtttttaagtgtagtcgtgtttggggcgctgttggcgtcttctgcaggtacatttacgtcttgtaaagactatgacgacgacatcgatgcagtaaacggcagaatcgatgaactcgcaaaaagtctttcagacttacaggccaaagttgggtcttttgtaaagtctgttacttatgatccggctacgggaaaattgactgtggtagatggagagaacaacagtgtgtcttatactatcggacagaatttgccgacttattcaattagtgtggataaggaaggtaaaatttcgctgttgaaagacggtgaagttgtttcgtccggtactattacattcccggatgctcctacaactccaaccattcctgatgcttttgatccttctaaattgacagtggatcctacgacaggcaaagtaatgtatgatggtaaggaaactggtgtaactatacctggtgacggagttcttagtattgaagataagaaaaacgctgaaggcgttgttatcggctatactattaagtacaaagatcaggctgttacatttgctttgaatgacgtattgactctgaaaggtcttgttttcaaatctgatttgtttgtagacggtatcgaagctatcgaatatccttatttggattatacatataaggcaggaagcactgcagctactactcaatgggaagatgagcaagcagagaaagttctgtgtaaagtaattactgattcgaaagaatggaactatacaggtggtaccggagctcaatataatccgattgaatatattaattatcacttgaatccgtctagtgcaaaagtaagtaaggaagatttgtcttttgtatccagagatgttgaagtgatttcttctcgtgcttcagtggctcttcctgaagttgctgacatgaaacctgctgatgaaggtatccttccggtaggactcagagcaataggaaaagacatcaaacaaggaggcgaaggttctatcttggctttgcaggcaattgttaaagcaaaaagtgatgctcaggcagatacaactgtaacatctgattacgcattgctttatgcttctaaggttactcctcaggctattgcatttaatgatgctactttagctgctgaagattgccaggaatctgctaatccggacgagttgttcaagactgtagaaggtgctatcacacatgctcctactttgacagttgcttataatagctttattgatttgaagaatctgttgacaattcactataatcgtgaaggtcagcctgaagcaacaaaaaatgatggtactcataaagtttgggcttatggagatgaagctaagtatggtttgaagtatgacttcgcgttcattcaatatacatcaggtcaaaatgtaacttctgacagtaaatatgcagatgcaaacactattaaagaaggtgtacttactccgcgtattgtaaactctgccggtgagactcttaacgaacaaggtgtatcttctgtaggaaaacgcccgttggttagagtacgtgtgacagatgcggatggccgcgttgtcttggctggattcattaagattgaaattgcaaaacaggttgatgatatcgttacaagtgtattcgacaaaggcactcacaactttggatgtgatgaggctgatgctatcttgacatggtctgagatttcttatcaattgcttgaaaaagcagctgttcagtctaaggatgaattcgatgctttatatgaattcgatgtagatgatagtggtgtagccaaacagtttgctaaatcagccgatggtaagtcattcgttccggctgcgattgcacaggttattggaacagtgaaagaaaaggtggatgaaactggtacaacaaatacagttcttcactggactttgactactgcagaacagtctggtatttatgaaatggcaggtcatacagctactatttatgtaagatatgtcagcaagctgaatactacatctcatgctcctatctacatgcctttgcagatagctgtcgctaaacctcagggaactgttgttactaagttgactaactactggtacagtgacggtgacgttgctaaggatggtcagaatactcgtctgaatgttccttatccgcaagataacggcaatacattgaattatgtagttgacttgaaccaggtatgggaaaagggtatgcctacatttactcctcctgcaaactttgcttcttatactgatgtaatatttgcaaatcaaaacggcgctgccggaggttataagtattacttcgacgctgatcagaatgtattgactgttgatggaactaagtatacattgtcagtagataatactacagctgcttgtattacaggcggttcatataaagctacagctcagaacatgatcgatcatgctttgaaagtagatgcaggtgtattcactaatacgaagttgtatgctaatggaactgttgttgcaacaatcgatcagaacaccggtaagattacttatgaaaacaatgatacttctaagaagttgttgaatgcatatagccatagtgctgctaagcattttgctaagatcggtatttgtgcatacagtccttgcaacattgcaatgtctttgacgaacaatacatacaatgcatacttcctccgtcctatcgacgcagtaggtacagatggtggagaattcgttgatgctcatgctaatggttctactctggatatcgctaagttgttcaacttccaggattggcgtaatgttaagttcgtagatggaactgactattcaaacagctggttgtatgcattctacggattgaataaggtagaagtgaaaatagcagatgctacaactaccttaagtggtggtaagctaggagagactttattgtcaagcaaaacagagaaaatcgtattgactcagacagataaagatggtaataaagttacttctgctactttaaatctttcttcttataatactgaagcaagtggtactcaagctacatatgatgcaattgttgcagctatgggtaagatcaagtatgtaaacaacggtaacaacgttcaaacatttgaactgcgcatcccggttgagttcacctatacttggggtactgtgaagactacagtagattgtacagttaagagtacaatgggtaactaatagtaaaggtttcattactaaacactgataaggagggtgcgccgatcattggtgcaccctccttcacaataagaattgaaggcggaatgaaaaagaaagatctgttatatatatgtgtgttggttgccgtttcttgtttcttgttctcatgcggagaaaaaaagaagcagctcactcccaaagaagaattcttaatggggttgacagctgaagatacggtgcaagtacttaccatatcacgcagttgcatggatacattgaaagccggaaatatagatgaagcgctgaagatgctttttatcttgcgcgatggaaaagcgatacctcttcccgctgagaaggaacaacaactgaggaaaaaattcaagtattttcctgttgtagattataaattggattattattctttttcaagtacggataataacgatgtgaagtttcagatagagtttttcaagcacactagttcggatgatcatacgccaaatacaattggatttatgtttaatccggtgaaaatagacggagtttggtatcttgccgttaaagaggctaccaaggaagctactgataagtagtagatgaatggtgacgagtactgttatcattggtttttagacttttaaacaggttttgattatgaatataaaaaaaatattagttgctgtatttgcgttgagtactacaatagcatttgcgcaggagcaacgtatcaaagaagaaagtaaaacgatatttaaacctcattggtttattcaagcacaaataggagctgcacatactgtaggtgaaggagaatttactgatcttatttctccggcagctgctcttaatgtcggttacaagtttgctcccgcattcggcgcacgtgtcggtgtaagtggctggcaggcaaaggggggatgggtcaatccacgtcagaactatcagtataaatacctgcaagggaatgtagacatcatggccgatctcagtactttgttctgtggcttccatccgaagcgtgtgttcaacggctatctttttggtggagtaggactgaaccgtggttttgacaatgacgaagcaaatgcgctcgatacccgtacttatgagatggaatatctctggcaggaaggtaagttcctcgttgctggacgtttcggtcttggttgcgaccttcgcctaaacgaccgcctgtctatcaatatcgaagcgaatgccaacgccttgtctgataagttcaactccaagaaggccggtaactgtgactggcaactgaatgcccttgtcggtgtaagtatcagactgggtaaaagctacactaaaaccgccccggtctattacgaaccggaaccggtagtgacggaacaacccaaaccggctcctgtagtagaacaaccgcaacccaaaaaggaagtggtgattgaactgttgaagcagaatatcttctttgccttaaactctgcaaagattcaggacgatcagcaagccaagattagttctttagtagaatatctggagaaacattctgccgccaaggtaagtgtgacaggatatgctgataaggaaaccggtaacccgaatatcaatatgactttgtcggaaaaacgtgcaaagaatgtgattgagatgttgaaagctaaaggagtggcagctgatagaattgttattggttataagggagatacggtgcagccttatcagaaacctgaagaaaaccgtgtatgtatctgtatagcggaataatatttgtgattataactctcttttcttaaaaaagatattccctattctcatgtgaggtgttttttcccacatttttcgtattcgtacgagaatcctcacatgagatgaataggaagtgcgggcttgtgaaagtctgtgtttccacaatagacccctttcttcacttgaatgtgaagaaattgtatcagggggtaacagtataagattatacttgtgaaagtgtaccttattctgccccaaggaggatgcctgcccttttttccctggaggcatcctcttttgttttttttgtatctgaaggtacgtgtatcaaaagttaaaagtaactaaactctcctcctttaggaaggaggagtacccgtagggggaggtggtaggtgaatatataagctattgatcttcagctgtgaagtacacctaccaccccggctttcagccacccctccttcctgaaggaggggaatttagttacttttgacacactttctttttgttattatacagatcgaacattgattaacatactgtccatacagctctaaaatcaatgaatatatgtgtattgggtggcttcggttacgaaaatactcttatatttatcgcgtaatttatttaatagtgattaaaatgttaaaagtagtagcatttatgaagcaagtagccaagggactacagatgggggggaactttggtactgcgcacgtttatcgtagcagtctcaatgccatcattgcttatcgtgggaaaggggattttacgttcaatgaagtaaccccagagtggataaaaggcttcgagattcaccttcgtggccggggatgtagctggaacactgtttccacctatttacgcacatttcgtgcggtctataatcgtgcggtagattgtcgtggggctgtttatgtaccgcatttgtttcgttctgtatataccggcacccgtgcggaccgtaagcgtgcattggataccgaagacatacagaaagtattcaccaaattgccgcagtcgtccgctgtgacatctgacatgcgtcgtacgcaggaattgttcgttttgatgtttctgctccgtggtctgccttttgtcgatcttgcttatttgcgtaaaagtgatttgcacgacaatgtgattacttaccgcaggcggaagaccgggcgtcctttgtcagtgactttaactccggaagcgatggctatattaaagaggtatatgaatcgtgatacgtcatctccttatttatttccgttattaaatagtcgagaagggacgaaggaggcttatcatgaataccagttggcactccgcaatttcaatagacaactgatgttgctaggtgaaatgttaggactgggggataaacttagttcgtatactgcccgccatacatgggcaacgacagcttactattgtgaaattcacccgggcgttatttctgaagctatgggacactcttcgatcacagtgaccgagacgtatctcaaacctttccggaataagaaaatagatgaagccaataaaaaggtggtggattttataaagcgctcaattccaatagcaatgtgttgaatttaagcctgttacttcataggtaacggagctaaacagcgttgcaaagatggagatattttggaaaacatgcaaacaaaaaagatattttttctgataaactactaaaaaaagagaaataacacgataaaacggcggatttctttttattagacctttataaccttctaattatattcaaagatttccctcccctctgcctcctctttgaagcaggggtaaataagtttcattactaaatcatacagtttttcataaagaaggcttcatgagagccaggacaaaggtttgcccgttacctatgaagtaacgggcaaaaagtattgggagtaagtttcttgttcatcctctatggagcatggacacaggtaaaacaaaaaaagaaaaggaggttacactaaaaatgaatggggacaacacatgggattattgaatcgacatcgagagattatatttttattatttaatttataaattaaaagtttttttattatgaacaaaaagtttttaaatgcagtcctgtttggagcgttattagcgtcttcgacgggcacatttacatcttgtaaagactacgatgacgacatcaatggtctgagcgaacgtgtggatgcagtcgaaaaaacattagctgacttgaataccaagttcggagcattggcttatgtgaaatcggtatcctttgctaatggtgtattgacagtaacagatcaatcggggactcctactacttatacgatccctgataacgatacgaatactacgtacactttggatgtatctcaggatggtaataaagctactattactttgaccgatgacaaaggtaataaacagactaagactattacttttacagatactgacactgataccaagtttgatgctaccaaattgactgttggtgaagatggcgttgtaaaatatgacggtgttgctaccggggttacaatacctaagcaaggtacgctgactatcacagaaatgactacagatggcgtaacttatggctgggctattaaatatggtaatgcagaacctgttaatttgatgatctgtgatgtgttgcctattacaagctttggcttcgaaccggatgcttatctgggaggcgttccttcaatgaaggctttgaaagtcgtttacaaagcttggggtgaaaccactagctgtaatccggctactgctactggtgaagtatgggaaaaagctactacaaattcttatgttcgtccggttattgcgggtacttattatctgaatccgtcaagtgcaactaaagaacagattaagaagatcactgtactttctgcagataaagagtatattaataaaactagagcagctgcttctaatccggaagttgaaagctatgaagtaaaagacggtgttttgactgtttacttcaaggctactactgagttgattgaagctatctcaagttctaagattactgttttggctatccgtgtagaaacagaagctggtaatacaattactgatgagtatagagctatctacgcaacagattatgaaaacgtgattttgggtgacaaggctaaaaaagctgcagctgctgcacaacatcacttgtatggaacaacctctggtaaggcagatgatgctatcaaggctgacgcagactatgaagttgcttataactcaactaccggtatcgatcttgctgacaaagttatcacttgttatgatgacgtggctgctaataaaacagatttgactatgtctgctgcggaactggcaaaattaggcttgaagtatgatttccatttgtgtgcttatattgatggtactaatcagactaaccaaagtgatttcgctagattgacaggttcggttttgtatccgaaattgtttaatgaaacagctactccgtatgctgccgtaggtcgtcagccattggtacgtgttcagctgttggatacgaaagctaataataaagtggtcagcacaggttggattaaagtgatgatcactaaagataaggctcctgctattgacgctccgttcacatttgatccattcactaaccaatgtgatgataaagtattcgcattgacagttgaacaaatgaatgtgaaggtttataacaagttgggtatggactataagatgttcaagactatctatgaagctgccaatccgttgtataccggcgatggtgtggttactgaggttgccgatgctggagaagttacacaaactgacttgttgaagtggactatttctcaggccgatatgaagttagctttggcgaagacttctgatgttggctcattgaaggctgttgtaacttacaaaccgaaagctggttatgaagattcttacagcgatgtaactatcacattgtctactaaggttaatgcaattgccgctgttacaattcctgcttctaacaagatcgctgaatactgggatgctaataagacttacgttcgtctgaatgtagttgttccgggtactctgactgatgactgtgcatttgcagttgacttggataacacatttgaaggaaacaaacctattatcacaggtgctactgcttacaagtatatttttgcatctaagaacgtaaatcgtaaagagaaaggtttgagcggtactgaatatacattatcagttagtgatgatggcttgacattgaaagctactgccggtgctgcgactcaaaatgtagcagtgattgatgctgatggtgtagtcacttatcaaaatacagactttgcaaaagacctgttgaatattgcaagtcacaactcagttccatctgccggattctatgcttggattaacattaaagcaactaccggtgaatgtgcattagagttgcctatcactaacggtgaatatatggcttacttcttgcgtccgattgatgtaattgccggtgaaggtaagttccaagatgctgttgataatggttctacagttaatatgctcgacctgttgagcttctctgattggagaaaccaagcattcagcacaacagtaaaagctaactacttcggttattatggaatcgagctaattacagttgatatacctaatattactactgacttgaatggtaacgatatcaattctaagaagttgtctgaggttacttcacaactggtaattactcaaactggtactacggttaatcctattcctgcagctcctgctaaggatacttatggtaccgttacatatacaaacaatggtaacgctgtcggtgcattcaacttgagattacctgttactgtcacttacaagtggggtacagttaagtcttatgtgattatcccggttgaaaagacattaggtaactaattctttttgaacttaaatataatgaagcgcttctctctaatgagaggcgctttatgtttaatgtaaattaatcaattatgagcattagaagaaaactgttgataggtataatggctatcagtgtattgccaatttccgcccaggaacagcgtatcaaggaacctgaaaagatttctttcaaacctcattggttcattcaagcacaaataggagcagcccataccgtaggtgaagcaaaattcactgatcttatttctccggcagcagctcttaatgtcggttataagtttgctcccgcattcggtgcacgtgttggtgtaagtggctggcaggcaaaggggggatgggtgaatccgcaacagacctaccaatataaatatctgcaaggaaatgtagacatcatggcggatctcagtactttgttctgtggtttcaatccgaagcgtgtgttcaatggctatctttttgccggagcagggctgaaccgtggttttgacaatgacgaagcaaatgcgctcgatactcgtacttatgagatggaatatctctggcaggaaggtaagtttctcgttgccggacgtttcggtcttggttgcgaccttcgtttgaatgaccgcttgtctattaacatcgaagcgaatgccaacgccttgtctgataagttcaactccaagaaggccggtaactgtgactggcaactgaatgcccttgtcggtgtaagtatcagactgggtaaaagctacactaaaaccgccccggtctattacgaaccggaaccggtagtgacggaacaacccaaaccggctcctgtagtagaacaaccgcaacccaaaaaggaagtggtgattgaactgttgaagcagaatattttctttgccataaactctgcaaagattcaggacgatcagcaagccaagattgcttctctggtagaatatttagagaagaatgctactgctaaagtgagcgtgacaggatatgcagacaaaggaactggtaatgccagaatcaacagcaaattatcggaaaaacgtgcgaataatgtagtggaagctttgaaagcaaaaggtattgctgccgatagaattacagttgcttataaaggtgatactgttcagccatataatactcctgaagaaaatcgggtaagtatctgtattgctgagtaaatatggcacacaaaggctattaagaatttaaaatttccctatttctcatgagagagttttccccacttctttatatatatcatttatataaggtgttctctctgagaatcttaagag

SEQ ID NO: 4800 - DNA, 772 bp, Unknown
  gut microbiota DNA sequence
acattggggaatagttggaaaggtggtgcttgcgaaagtactcctttctcttacctatttcctgttggaggatgtctccctttttcccacggacatcctcttttatacaaaaaggcgactcatactgaatgggccgccttttctgttatttaatctcgatttcctccttcatatcgatttcctctccatgtgtatcgtagaacacatattgcaggaaagcgagtttctgacttggaatgatcttgataccgaatccgtatttcatctgccacttccgtctgagggaaacgagtccctgattgatgaaggcggcgacatacggatggacgtgtaacgagaatttctttaccttcagtttgttgaccagataatcaattttactctctaaagtgtccgtaaagagaatggacgatttgatagtaccttttccgaagcaggtagggcagatttcggtcgtgttgacgtccattgccggacgcacgcgttggcgtgtaatctgcatcagcccgaatttgctgagcggcagaatattatgccgtgccctgtctttctgcatgttggcacacattcgttcataaagcttctgacggttttcggcttcattcatatcgatgaagtccacgacgatgataccacccatatctcttaatcgcagttggcgagccagttcgtcggcggctcccagatttacttcgagtgcgttaccttcctgcccgttggcattcttggtgcggttaccgctgttcacgtctactacgtgaagcgcctcagt

SEQ ID NO: 4801 - DNA, 422 bp, Unknown
  gut microbiota DNA sequence
cgggcgaaccatttgcccgcattcaagcctttcttctgttggttctgataaattttgtaacgaatcataaaataataattttaaagagttaaacatactttcgtgaggatttctccctttcgatgacacaaagatagtatgctgtgactcgggaaaatcggttgtgtacagtgacagtcggtaatgtgcaattgttgtcggttatagtctgttattccctgataaaatgtaggtaatgtgaatatattttgttacttttgtgactgtaaaacagaaacttatttgtcatgatagaattcaaaatacgtgcttatggtcgtatggaactggcacagctttattctcccgaacttaccggcattgctgcttaccgcaaaatgaataaatggattgtccgctgtcccggtcttcaggaacgcctg

SEQ ID NO: 4802 - DNA, 150 bp, Unknown
  gut microbiota DNA sequence
ctcccaatcaatcacgcttgccaacgcccaacccctaaaagtcacaatgggtgaagacacgcaaaccttggacgaagtagtagttactgcgttgggtatcaaacgtgaacaaaaagcgttgagttataatgtacagcaagtaaagggaga

SEQ ID NO: 4803 - DNA, 757 bp, Unknown
  gut microbiota DNA sequence
ctgaaaagcatctattaatgataaaatcagattcggagaaaatagagaatctgattatctttgcaggacacgattgggagaatgaaacggaaaccattctctttaccggactcgatagccggggacgttctgtctggggaaaaagaattaaataatcatatataattttatattgaaaaccatgagaaaatacacgaatttattggccgtattggccttatctacaggtatggcacttcatgcacaaaccaacgagctggtgattcagacgaagaagttgggagcagaaatccaacctaccatgtacggactcttttttgaggacatcaattatgctgccgatggcggattatacgcggaactggtaaagaaccgctcattcgagttcccccagcacctgatgggatggaatacctatggcaaagtgacactgatggacgacggaccttttgaacgtaatccgcattatgtacgtctttccgatccgggacacggacacaaacataccggcctggacaacgaaggctttttcggtattggcgtcaagaaaggagaggagtatcgcttttctgtctgggcacgtttgccacaaggaagcgtgaaagaaacactacgcatcgaattggtagataccaagtccatgggcgagcatcaggcatttgcctcggagaatcttacgattgactccaaagaatggaaaaagtatcaggtcatcctgaagcccggcattacccaaccaaaatccgtacttcgtatt

SEQ ID NO: 4804 - DNA, 1350 bp, Unknown
  gut microbiota DNA sequence
attctcctccttgatggggtaacggctgaaaacagctagctgcaacaaatgttttccctcgggagaaataggaataaaataatacggccaatcagaaagaaccgcagctatactgtctacaccaaactcatcattaatgccaaactcctgaaaacagagaatatctgcttgcagatttctcatgtaagaggctatctctttgcatgaataaccggtatcctcatgattaaaagcgtcaacgttgtaagtagcaacagttagaatgccaggagtatacgcgttcattttgaccattggagccgaagccgggctgaaaaaaggagaatgaatcacacaactaatatagctccagttgctaaatatagcaatcagagggatgaaaacccaacaccgccaacgaatcgtccagtagatgacagaagcaagattagccaacaaaagtatcggtaaaatcaaaccgatgaaaggcataaatttgaaactatccggtgcggcattacctacgaaggcgcccgcaatggtaactcctgccaaaatactggtcagcacgatggatatgtaataaaacagtctgtaaaaggctttcatctaatctaaattattgggtgattatatcactattaaatcgttttctatataatatatactctacaatatgtgcccttttatggaggcgacagccatttatgaatcatagctttcagcttatcatccgctatcggtttagctataaaatcgttgcatccggcctccttcgccgctttttgatcctgctcataggcaaaggcactttgagcaatgataggaacagtggcagacagctcccgaatgatcttcgtagcctccaatccatccaaattcggcattttaatatccatcaggataagatcaggtttcacctcatcgaacatcgtgacaacctccattccgtcatgtgcacgtataatccggtgctccttacctaagatagcctccaataaatcaaagttactgtccgtatcttcggcaaccaaaatacaggcatgccgtgtatttacagcactgctcatacctccgctcgtctcatcaccattctttttctccgaatctacactcacagattctgcaatcgtatacggcaaagtaaatgtaaacgtcgttcccttaccaaattcggagctgacggaaatcttgcccccgagacgctcaacgatagatttacagatagataatcccaacccagtgccctgtgcatgattattcagcttggcaaaacgttcgaacacacgacccactttctccggctcaattcccgtccctgtatccgttacgtggaaaacaatctggttgtccaccagcttgtaaccgtaa

SEQ ID NO: 4805 - DNA, 3621 bp, Unknown
  gut microbiota DNA sequence
atcgtattgctgtgtatcttcatcctcggtggtgattcaatccgcagcttcgcattcgcaatgatcctcggtgttgttatcggtactttatcttcgttgttcattgcatctccgattgcatacaacatgatgaagaacaaaaaagtagtggtagcagctacggaagaataataaattccagaaatagaaaaagcctcttccgaacattcggaagaggctttttctattgattattaaaacaaatagaagctataagacgttaatcttaaaagaagccattgtaatacttaaaactcaatacagtatgaagcaaaacaacaccgcctcccgcagatttctcttagtagccccgaggggaatcgaacccctatctaaagtttaggaaacttctattctatccgttgaactacaaggccgcttttattttggttgcaaagataacggtttctgttgatttaacaagaataaaaatgcaggttcctttcagtaaatccaattatttggcgtcaataggacaataaagttcgatttattttgataattcgattaactttccgacctttgcgctcacaaattgaaagtaaaatcagtttttaaattaaatatagtaattaaagttatggcagacgaaatgatggttaaagaattggaggaagtcgtagtacgtttctccggcgactccggcgatggtatgcagctggcaggcaacatcttctcgaacgtgtcggctacggtaggaaatgacatctgtacattccccgactatccggcagacatccgtgccccgcaaggttcactgaccggtgtttccggttttcagatccacgtaggcgcaggacaggtgtacactccaggagaccgttgccacgtattagtagcgatgaacccctccgcactgaaaacacaaatcaaattctgtaaaccgcaaggacttatcattaccgactccgactcgttcgaagccagagacctggaaaaagcacaatttaagaccaacaatccttttgaagaattaggcgttaaacaagaagtgctggaagtgcccatctcttctatgtgcaaagaaagtctgaaagattccggactggacaataaaacgattctccgttgcaagaatatgtttgcgctcggactggtttgctggctgttcaaccgcaatctggcagcagcggaaaagatgctgcgcgagaagttcgccaagaaaccggaaatcgcagaagcaaatattaaggtattgaacgatggctacaactacggtgccaacacacacgcttctacctctacttataagattgaaagcaaagctccgaaatcaaaagggctttatacagatattaatggtaacaaggcaacatcttacggattgattgccgcagccgaaaaagccggtctggaactgtatctgggttcatacccgatcactccggctaccgatattctgcatgaattggccaagcataaatcactgggagtaaaaaccgtacagtgcgaagacgaaatcgccggttgtgcttctgccgttggtgcagcttttgcaggtgcgctggcagtaacgacaacttccggtccgggcatctgcctgaaaagtgaggcgatgaacttggccgttatcggcgaacttccgttggtgattgtcaacgtacagcgtggtggtccgtctacgggtctgcctaccaaatcggaacagaccgacttgctgcaagcactctacggtcgtaacggcgaaagcccgatgccggttatcgccgccacttcaccgaccaactgtttcgatgccgcctacatggcagccaaaattgctttggaacacatgactccggtcgtattgctgacagatgctttcgttgccaacggctctgccgcatggaaacttcccgatctgaatgactaccctgccatcaaccctccgtatgtaactccggacatggcgggcaactggaccccgtaccaacgtaacgaagaaacaggcgcacgctactgggcgactccgggaacagaaggcttcatgcaccgtatcggtgggcttgaaaagagtaacgaaaccggcgctatctctaccgaacccgaaaaccacaacaagatggttcacctgcgtcaggcaaaagtggacaagattgcagactacatccccgaacttgaagtgctgggcgacgaagacgcagacttgctgattgtaggctggggcggtacctacggacatctccgtctggctatggacttcatgcgcgaacatggaaagaaggttgcattcgcacacttccagtacatcaacccgctgccgaagaatacagccgacgtattacgtaaatataagaagatcgtagtggccgaacagaatctgggacaatttgccggttacctgcgtatgaaagtacccggactgaatatcagccagttcaaccaagtgaaaggacagcctttcgttacgagagaattgatagatgcatttactaaattattggaggaataagagatgagcgataaagtatataccgtacaagattataaatcaggtcagcctcgctggtgtccgggatgcggtgaccacgctttcctgaactcactgcacaaggcaatggccgaactgggagtagctccgcacaatatcgccgtaatttccggtatcggttgctcttcccgtctgccttattatgtaaatacgtatggcttccataccatccacggacgtgccgctgccgttgcaacaggtgccaaagtggctaatccggatttgactatctggcagatttccggtgacggtgacggtctggctatcggtggtaaccacttcatccacgctgttcgtcgtaacatcgacctaaacatgattctgttgaacaaccgtatctacggactgaccaaaggacagtattcaccgacttccgaacgcggattcgtcagcaaatcgtctccttacggaacggtagaagaccctttccatccggcagaactggccttcggcgcacgcggacgtttctttgcacgttgtatcgctgtagacggcgccgcttctgtagaggttctgaaagcagcagccaaccacaagggtgcatccgttgtggaagttctgcagaactgcgtaatcttcaatgacggaactcacgcttctgttgcaacaaaggaaggacgcgcaaagaatgcaatctatctggaacacggcaaaccgatgttgtttggtgaaaacaaagagttcggattgatgcaggaaggtttcggactgaaagtggtgaaacttggcgagaatggcatcacagaaaaagatattctgattcacgatgctcattgccaggacaatactcttcagttgaagctggctttgatggaaggtcccgatttcccgattgcactcggtgtgattcgtgaagtagaggcgcctacctacaacgatgccgtagcagaacagattgaagaagtcaaaggcaagaaaaaatatcacaatttccaagagttgctgatgacaaacgatacttgggaagtgaagtaattcacttgactgagaaaaaaagaaaagcgcaggcaaaggagttcgtctcctgcctgcgcttttttgtttatatagtttctgcccaaatacataaaatactttagttccactttagcaaactcccctacaaaattcct

SEQ ID NO: 4806 - DNA, 47498 bp, Unknown
  gut microbiota DNA sequence
ttcttcttcagccaattacagaagtcgcttgcttaaatagcgcactggataccatacagacaggaatcccactgctaaaacagtaataaaaataagtactacatcccatacgtgaacacttaccggataagcgtccaccacaaaagttccaccacctccaccaagggtaatgatgccaaacttctgctgaatgaaacacaatatcaaccctagtataataccggagatagcaccaaagagagagatgagccgtccctcaaataaaaagatacgggatatcagtttatcactggctcccagactgcgcaaggttatgacatcgtctttcttatccagaatcaacatggaaagagaaccgatcacattaaaacaggcaatcatcagaataaaagtaagaaacagataagagatcagcttctctatttccatgatacggaaaacatctgcttgctgctgataacggttctgtaccacaaagtcatcacccagcattttttctattttagactgtacggatgatatattggcgttcggtttcagtttcaactcaatgccggaaacctctgtcgtatagtccaataagttacgaaggaaatcaagggaagtgagaatatagctttcatcatacttctgttggttgaccacgaacacaacacccggtgaataaagatagtcgcgattgaaagaagccccgggattcgccatattcactttggcattacgcttgggaagatacacctgcaaaggatccacgaaggccagtccggtacccaaagttgaaaccagttccacgcccatcactccataattcactatcgaatcatgaagaataaactcgccggctccgtaaagaatgctatctatttcggttaaatcctcaaagttatcttccacgcctttcaacacaaccatagcctgacggtctttatattgcaccatcgcattctcttccagcgtctctgtagataccgagacctccggaagcgcacagaccgcacgaatcttttcatcctgtccatcgaagacttttccctcgcggatggtaatcttcaactgaggatcaaaagctgtgaaaaagctggctaccatatcctgaaatccgttgaatacggaaagcgtgcagaccagtgccaacgtagcaagtgccaccccgcatactgatatgccggaaataatattgatagcattatgcttctttttcgagaaaagataacgccgggctatgtagaagggaaaattcacttcagcaaagagtcaatcttctcaatataatccagtgagtcgtccacgaagaacttcaattcgggaataatccgtaattgatgacgcacacgagttccgagttcaaagcggatggacttcatgttctcattgatattcttcaccatttcttctgctttctctgacgggaaaacgctcaggtacacgcgtgcaatactcatgtcaggactgatacgaacggcgctgaccgatattaatatacccggcattgcctttgtctgaagcaggaatatctcactcagctccttctgcagcaggcgggatatcttattctgtctggttgtttccataaatttactccttatcttacttttttcttattatagttaacccgtcacgcaaaggcaggattactttctccacccggtcgtccgtcacaagggcgtcattgaatgctttgatgccaatggtctgcgtatccgtactacgaggttgctccaacacatgaccatcccacaatgtattatcggcaatgatatacccacctgtggaaagatgctttaaaaccatctcgtaataatcgatatatttacgtttatcaccgtcaatgaaggccagatcgaacgtaacgcccaaatgaggaacaagctccaaggcatctcctatataaaagcgaatcttgtccgcaaaaggagaattttccagccagggacgggtaaagtcctcttgttcatcattaatttcaaacgtatgcaacattccgccctccgacaagccttccgccagacaaagggcagaataaccgctatacgttcctatctccagtatatgccgggggcgaatcatctctacaaacattttcagcatccgtccctgtagatgcccagaagccatacggggacgaagcagtttcacgtgcgtatcccggtagagtgccttcagatagtcactttccgcatcgatatgctgcaaaatatattcatcaatagattcagtctcctgcataaaaccttattttataagtaacagttagagataacgattgttgttaggcaatacagtttctcccgcgtgtttcaacgcatcttccacgacattgatttcgaggaatgaagtttgtgtacctgccttaccgctactcaaatatcctaccatatctgtcggctgcaaacgtccttccttcaacaggcggcgcaaagcggcaaaataatattcctgtccgttggccagctccggcatatagattgcttccactccataagaaagtgccagatgacgcatggtcttttctttatagcagatagccaataccgggaatttgccacggaaagctgccagattacgggcggtccgtccgctatagctgtctgtgatgatggcacgtatcttcagtttcgatgtagctttcaccgcctgtttagcaaggaaggccgttacatcgttgctgttttcgttcaacgggatacggatatcattctcttccagtttatctttttcagcctgggccgcgatcttggtcattgtcttgactgcatctaccggatatttgccataagcagtctcaccgctcaacatcagagcatccgtacgatagtagattgcattcgcaatatcggtcacctccgcgcgggtcggacgaggattgttgatcatggtatgaagcatctgagtcgcaacgattaccggtttctttgccaggatacatttgcggatcagcacacgctggatacccggaatacgttcctgcggcacttcgatacccaggtcaccacgggctaccatcacgccgtccgccacttcaagaatctcgtcgatgttgtccaccccttcctgattctcaatcttggcaataatccggatatcactgttgtgagcatccaggatttcacggatatcgagtacgtcctggcggttacgcacaaaagagtgagcgatgaaatcgatatctttttcaatcgcgtaaagtatattgttacggtctttctctgtcaaggaaggaagattgatacgaacacccgggacgttcacgctcttgcggcttcccagcgttgcatcgtttttcacttcgcaaagcagataatcggctgtcttatcgattacttccagttcaagatcaccatcatcaatcagaaccagacctccgatattcaaatcgttcacaaagttaggatacgaaacagcgatacattcacgggttgtctcctgatcaggattgccgacaatctttactttatcacctatctgatatggaatcggttccgcattggcggttgtacgtacttccggtcctttggtatccatgaggattgcaatccggttggatacggaacgtacattggcaatcaacgcttcaaaaccttcacggctagcgtgagccgtattcatacgtaccacattcatcccagcttcaaacagctgttttataaagtccacatcgcaacgtctgtccgaaatggatgcgacgatttttgtctgtttcagtaacatagcctttttacctatttaatatattaataccttatttattatctaacaaagcctccagagccaaccgatacgagttcagcccgaagccacagatcactcctttgcacgcgcaggcgatcatagatacatgccggaaagactcacggctgtgtacattagaaatatgtacctcgatcaccggagaagtcacagaacgaatggcatcctgcagagcgatggaggtatgtgtataagcgccggcattcagaatgatgccgtctacctcaaaacctacctgctgaatgcagtcaatcatttctccctcaatgttcgattgaaaatagtcgatctccaaatcagcatatcttttacgaagctcagccagatagtcttcaaatgtaacacttccgtatatggaaggttcacgtttgcccaacagattgatgttcgggccattaataatttgtattctcatcgccgtagtcctgcttttttaatacctttgtatccaaagaacaatatttcaggctacaaaggtagaaaaaagaaatggaaatcaacgaaaaaaacaagaagaaggagcaacaagcactgataatcagaaagtaccagcagtacctcaagctggaaaagtctttatcccccaatacattggacgcttatctgaccgatctggataaactgatgagttttctgactctggaagggatagatgttcttgaagtatgcctgtccgatctccagcgtttcgctgcgggattgcatgacatcggcattcatccccgttcgcaggcacgcattttatccggcatcaagtccttcttccgtttcctgattatggcagattatctggaagccgaccccagcgaactgctggaaggccccaagataggactaaagctccccgaagtgctgaccgtagaagagatcgacaccatcatctccgccgtagaccgcagtaaagccgaaggacagcgcaacagagctattctggaaacattatacagctgcggactccgtgtatccgaacttgtcagcctcaaattatccgatctctacttcgatgaaggcttcatcaaagtagaaggcaagggaagcaagcaacgtcttgttcccatttctccccgtgccattaacgagatcaaactttatttcccggaccgcaaccggatagaagttaaaaaagactatgaagattttgtgtttgtcagccagcgaagaggcaaatcactttcccggattatgatctttcatatgataaaagaattagcacaaaatgcgggtatcaccaaaaacatcagtccgcacactttccgacactcctttgccactcatttactggaaggtggcgccaatttacgggccatccagtgcatgctcggacacgaatcgattgcgacgaccgaaatttatacccatatcgaccgaaacatgcttcgcagcgagattatcgagcatcatccccgaaatatcaagtatcggcgagaaaaagagtcaggttttcattaaattatgataaaaacctcctgctaactacataattatattaagaattaatatctttgcgatgtttttcctttattaggattgaaaaggggttataaatatgacgatatttcaattacaaacatttaatttatacctaaaatgacaaagaagttgtacttgcctttactcatggcaattgttgttgcacttttctcttcgtgcaagaaaatgggtcccctgtcagcggactacttcactgttactccacaagtgttggaagcagtaggtggtaaagttcctgctaccattaatggtaaattccctgaaaagtatttcaagaaaaaagctgtagtagaagttactccggttttgaagtggaatggcggtgaagctaaaggacaaagtgctgtgttccaaggagaaaaagtagaaggaaacgatcagactatctcttacaaagtaggtggtagctatacgatgaaaacatctttcgactatgttcctgaaatggcaaaatctgaactgtggcttgaattcaaagctaaagttggtaaaaaagaagtcgttatccccgctgtgaaagtagctgacggtgtaatctctacttctgaattggtaaacaacacattgggcagcgctaacccggctttgggcgaagatgctttccaacgtatcatcaaggaaaaacacgatgctaacatcatgttcttgatccaacaggctaacatccgttcaagcgagttgaaaactgctaaagaattcaacaaggaagttgctaacataaacgaagctgccaacaagaagatcagcaacatcgaagtttctgcttatgcttctcctgatggtggtgtaagcctgaatacaactctggcagaaaaccgcgaaagcaacactaccaagatgctgaacaaagacttgaagaaagctaagatcgacgctccggttgacgctaaatatactgcacaggactgggaaggtttccaggaactggtttctaaatctaacatccaagataaagaactgatccttcgcgtattgtctatgtatcaggatcctgcacagagagaacaagaaatcaagaacatctcttctgtatacaagaacttggctgacgatatccttcctcaactgcgtcgttctcgtttgactttgaactacgagatcatcggtaagtctgacgaagaaatcactaagcttgcttcttctaatccttctgaactgaacatcgaagaattgctgtatgctgctacactgactaacgatcctgctaaacaggaagctatctatactcaggctacaaaacagttccctaacgattaccgcgcatacaacaaccttggtaagcttgcttatcaggctggtaacgttgacaaagctgaatcttacctgaagaaagctgccagcgtaaacgctgctcctgaagtaaacatgaacttaggtttgatctctttgatcaagggtgacaaagctgctgctgaagcttacttcggtaaagctgcaggtacaaaagaacttggcgaatctatgggtaacctgtacatcgctcaaggccagtacgaaagagcagttaactcattcggtgacgctaagactaacagtgctgctttggctcagatccttgctaaggactacaacaaagctaaaaacacactggcaggcgtagaaaaaccagatgcttacacagactacctgatggcagttctgggtgctagaactaacaattcttctatggtaaccagcagcttgaagagcgctgttgctaaagaacctgcgttggctaagaaagctgcaacagacttggaattctctaagttcttcacaaatgcagacttcatgagcatcatcaaataagagaattaccactctattttagatattgagaattgctcgtcattacaaatgacgggcaattcttttttttatctgtaaaaaaccgtactttcgcagaaaagaaatcaaagcaatgaaaaagagtagtattttaatcctcatcattatctgtctggtcggatgcaagaagggctccaatgagacaaccatcaccggagagatcaaaggactcggaacagatacactttatttgtacggcatggacgagctgtacgaccggatagacaccatttatgcagaaaacgataagttctcctacactaccagcgtagatacgatcacttctgcctatctgttactcaagaaccggattgaatatcctgtctttcttgataagggtaacaagatcaagatcaaaggagatacgatcaatctgaatttcctgactatcagtggaaatatatacaatgaggagttcacagacttccagaaagcactggaagatccggctgacccttcagaaaaagccggtgaagaaactgtggataaaagaacaaccgtagaaaaagcaaacactgccgaagaaatggcggaagagttcatactgcaacatcactcctcctatgtaagcctttacttattagacaaatacttcgttcaaaaagaaacaccggacttcagcaaaatcaaaaagctggttgaagtaatgacaggtgtattacaggacaaaccgtatatcgaacgtttgaatgaaacaatcactcaggcagagaaatcggagattggcaaatatgcacctttcttcagcctgaccaatgcaaaaggagaaaagattacccgttcatcagacgccttcaagcaaaaaagcctgctgatcaacttctgggcttcctggaacgacagcatctctcagaagcagagcaacagcgagctaagagaaatctacaaaaagtataagaagaacaaatatataggaatgctcggcatctcgctggatgtagacaaacagcaatggaaagacgccatcaaacgcgatacgctggactgggagcaggtatgcgatttcggcggactcaattctgaagtagccaagcaatattctatctataaaatacctgccaacatacttctctcgtcggacggaaagattttagctaagaaccttcggggagaagagctgaaaaagaaaatagaaaacatcgttgaggaagcgacagaaaaagaaaagaaaaacaaacagaagaaataaacggtaaccaaacgtgttaatcaaagttttcggagcggctgttcaagggattgatgcaacactcatcacaatcgaagtcaacagctcgcgtggctgtatgttctatctcgtcggccttccggattccgcagtgaaggaaagtcaccaacgtattatctccgcactgcaagtcaatggctataaaatgccgaccagcaacctggttgtaaatatggcgccggccgatatccgcaaggaaggctcagcttatgatttacctcttgccatcggcttgctgggtgccagcgaaaccatatcttccgaaaagttgtcccgctatctgatgatgggagaacttagtcttgacgggagcattcagcctatcaaaggagcactgcctatcgctatcaaagcccgtgaagaaggctttgagggactcattattcctcaacaaaatgcgcgggaagcagcagtcgtcaatcaactgaaggtatatggcgtcagtaatatcaaagaagttatccagttcttcaatggtgagcgggagctggaacagaccgttgtcaacacgcgggaagagttttatcaacagcaaacagcctttgacctggactttgcagacgtaaaaggacaggagaatgtgaaaagggcgttggaagttgctgccgccggaggacataatctcatcatgatcggcgctcccggcagtggtaaatcaatgatggctaaacggttaccttccatccttcctcccctctccctgggtgaaagcctggaaacgaccaaaatacattccgttgcaggaaaactaaaccggggctcttcactgatttcccaacggccattccgtgatccccatcatacgatatcgcaagttgcaatggtgggaggcggaagttttccccaaccgggagaaataagcctggcgcataacggagttttatttttggacgaattacccgaattcaacagaggggtattagaagtcctgcgccagccactggaagaccggcagattaccatctcccgcataaagagcacaatcagttatcccgccaatctgatgctcattgcatccatgaatccatgcccttgcggatactataatcatccgaccaaggcatgtgtatgcagtcctggtcaggtacaaaagtatctgaacaagatatccggtccgttgctggaccgtattgatattcagatagagattgttcctgttccgttcgacaagatatccgatcagcgacagggagaagcaagcagtgttattcggaacagagtcattcaggcacgccgtatacaggaacagcgctatgccgatcatcccggtatctactgcaatgcacagatgagcagcaagttattatccatttacgctcggccggatgacaaaggactttccctgctgcgaaatgcaatggaacgcctcaatctttccgcacgcgcatacgaccgtatattaaaggtggcacgtaccattgccgaccttgagggtgcggaactgatacagccctcccatttggctgaagccatcagttatcgcaatctagacagagaaaactgggcgggataaaagcgcttgacagtaaatcaataaaataccataaagaaaaagtctttgtctcatataaaatactattttcgcaagatagaatctagtatatgaataaacacgacaacccatattaccccctatttctactcatcggatggcttatcatgctgagtagttgtcaacctgccccatctcatcttctggaaaaagcgatgcagatggagaatgtatcaaccgacagtatctttttctacctgcaacaaatagaagaacccgacaaattacctctcaatgatcagggagattattacctgttgctctacaaggcaactctgtggaaaacaggaacacctgatgattcattattgcagatcgccatccggcaatataaacaaaacgagcagcaaacccagtatgtacgggcacgcattgagcaaagcgcctcctatttatatcgtaatctgcccgattccacattactgatgagtgaacaaatcctgaaaagataccagctaaatgatacgctaaaaacaaggctgtacgggctacgaagggcagcatacagcagaaagcaggattatccgcaggcattggtgatggcagacagcagcagacaactggctcttaagatgaaagatacacttttctatttttctaccagccagctatatctgcaaattataaacaaaatgcaagatcatgacagatacacccaaagctatctgcagctaatgaaagaacttatggattcgcccaaataccagtctttgaattattatgcgctggaaagtctgttgaacaccagtctgcaaagaaaggatttccggcaagcagtcatatatcttcaacaattatcgagccaacgccgcggaagaaatgaagtaccacattatctgctactatgcggaagaacccatgccgccttgaatcagattgactccgcccaatattactatcggcaagccgcaatctcatcttccagctttattgccatggaagccaatgcacgcttattcaatctgatcaatgaaaaagaatatccggaacaagtcttttataccaagcagaaggaaagcacgataagggacaatatactaaacaatatcagtacagggatacgggaaagagaattcaaccaactcaaattacagaatgaattataccagctgcatctgcaacagcagcaaagggaactatggatgctgggaatcgttacagctctgctgagtatcggattcatcgcatttttcttttatcagagagagaaaaagaagcgactgctgcgggaaaaccagttactgtacaaagaagccgaagtaagtggactacgggagaaagaaatccggctaaggaataaagagactgaactccgtgaagcgcttttccggagaatgccattcttccataagttgccctcactccatgccaacaacaatcaggacgaaccgggcaccagtcacaagatagtagtgacagatgcagaatgggcagaagtcacttcagtagtgaatgatgcgttcgacaattttgtcgttcggttacgacaggcttatccgcagttgggagataaagaaatcggcttctgctgcctcgtcaaaatcaatgtcaacatacaggatttatctgatatctattgtgtgagcaaagctgccattaccaaacggaaatatcggataaagactgataagctgggaattactgatgagaatataagtttagacagttttctcaaagttttttagctgtcgccccagggtagttgaagtctttgtccgcctgaaaacaaacgcatatatacattatattattaataatcaataacatacatctagtcacatcgtacctttttgtccgcctgtttttttgtttttctactcacttcggtctacttttgcctcagtgataatcagaaaaacagtactaaccaaatacagaaccgtatgaagaacagaattattattttaagtttatgtgctagttgtctacttgcaattgttgcttttgtatacaacagtgaaacaaagaccgacccactggcactctcccctattgtagcaaaacgagtcacgacacctaccggcacactagtctcatgtaatttaaaggctttgaaagacacagtagacattccactcagctatttgacagaagaacttcaagttgtcaaactagacaaccgggacgaagcactagtaggaggctggatacgcaccacagtgggagaaaaatacatcctggtgagcaataacaaacagactccctacaaactttttacccgcgacggcaaattcatcaccactatcggtgcctacggacaagggcccaacgaatatggaaacacatacgccgaccagttggacgaagcccacaaccgtatctacatactgccctggcagagtgacaagctgctcgtattcgatttacaaggcaatcctcagcctcccattcctttatgtatgcgcgtgcccaaaggcaaattcagagtagatacggaaaagtcggaagtcactctgacaactctgcctttcgaaggctggccggctgtcgtgtggacacaagatttcaaaggtaaacgcaagaactttatcgcaccgggacatctgaccgttccgcgcgactttagcaacgaagtatttatggataataatactaatgattacggcgttatgttaatggtgatcatgcctgccccacgaacggacagtctgtaccactataacgcagcccaaaatcgactcgaagccagattcaccgtggaatatccgaacaaggagaaaatcccctggcatggctattccgaatacccgcgtcactttatcggagacgtttccgtgccgatacaagtatcagaaaacacttggagcggcagcaagcctgccaagtatatcatagataagaaaacactgcatggcagctacttccgcctgtacaatgatttcctgggaacgaaaaagatgcagatatggccttcattcggcaatggttattatgttgccaacatggaacctgcccagctaaaagaaacactggaaaaagaaataacccggaaagatattccggcagaggcaaagaaacgtgcacaaacattgataaattcactggatgaagaaggcaacaacgtcattctactcgctaaaatgaagaaataactatcagaaagccagagcgtgtttcaaaagtcaatagtaactaaaatggggttgtctataatttactatgaatgaaagaattgcgtattcacctaccacctccccctgcgggtactcctccttcccgaaggaggagatttaagatactaccgatttttaacacaccttccggcattccgttgagagagcacatccccatttcctttcgatagaaaaacacagacacaattcttataattgtccatctttaaactgattttctctattttctgattctttgattttgctttcctttgcaaagcaaaagattcatataaaataagcagatcatgcagtttacaattacacattggggatgtactccatcgggagattccatctatctgttccggttgaccaacgctaccggagcctccatcgagcttacaaacctgggagccacctgggtttcggccaatatgccgaaccgatacgacgtctttgaaaacattctgctgggatatgaccatgcagaaggatatctcaaagacacctattatatgggagccactgtcggccggtttgccaaccgcattcatcaggcatccttttctatcgaaggcactacctatctgctggagaaaaacgacggagagaacaccaatcacggcggactatccggctttcacaagaagatatggcaatggaaacggacagattccggcatccgtttccttctccactctccggacatggaaggaggatatccgggaaatgtacaggcggaagtggaatatcaattcacggaaaccaacgaactgacaatcagctatcacggaaccacagaccgccctacttatctgaatctcaccaatcatgcttacttcaacctgtccggcgacaaacgaaaaataacggagcatgagctcatgatacctgctgcacgaatattagagacaacctcacaatttattcctaccggacaggcacaggatgtcaaagacagtccgtttgatttcagcaccagtcgcagcatcggagcacatctttacgacgataacgagcagttgcactggaacaagggatacaatcattgctatatcctgaaagaagagtcgtccgacacgttattgacagccgccgtattatccgaccctttctccggcagaaggctgactgtcaggactgacttacccggtgtcttattatataccgccggctatctcgctcccacaccggatatcggtgtatgtctggagacacaatactttccggataccccttcgcatccgcattttccgtcctgcctgctcatgccgggggaagagtatcgccacagaactatttatacattcgacaaatgattttttaagtattctacatattgttcccgcttagcttcgtataaacagcgatattttttttactggctatatcttttttattcatatatttgttttacatttgtagtaaataataaaagcaatagtatgaaaacgtccattgtaactcttttaatcacattttgtttttatctgtcagtttatgcacaagcacctcaggataaagccacagaactaaaagaacaggctttaagcagcctgaagcagaaagattacatcaaagcccgttatctgtttaagaaagcgtatgaagcatttgccgtgcgagagaactatccacaagctatagaatgtggtattcaagccaatgctctatatgtcagagaaaacttctacaaagaaggtttcgaattatgccgtaatatggaacaactcatttggacaggcgaacagaagcaaaacaaagtcttttatgacttacgctttcccatcagcaaggaacggttgcagatgtacatttcactgaagaatcctgcacaggcaaaaaaccagctggacaaattggaagagattgccagtctcgccaaaaatgattctttaatggaagtgctgctctatacgaaagccaactattactatactttcaatcagaatacacaaggaaacgcctgtttccgcaaactcatcagccaatacaaggaaaagaaggactacgataaagtgagcgactgctacaagactcttatcggcatcgcccgcaaagccaacaatgccccgttgatggaacgtacgtacgaaagctatattgtatggaccgactctgtaaaagccctgactgcccaggatgagctgaatgtcctgaaacgaaaatatgacgaaagcctccagaccatacaggacaaagacagcacactatccgccaagcaatacatcatcataggactttgtacgcttgtagctatccttgtagccacaatcattgtacttgccatcttactgctgaaatttatcaccggcaaccgcaaactcaaaaagagcgtggtcatagccaatgagcacaacgagctgaaaacaaagttcatccggaatatatcctcacaaatggagccgactctgaacactttagggacttccgccaaagagctttccgcccaagcaccaaggtatgcagagcagatgcaggcacaagtagcagccttaaagcaattcagcgacaatattcaagagctttcctctttggagaactcactgaccgaaccttatgaaatgggagaagtcaatgcgggtactttctgcgaaagcgtcatggagaaggctaaagaatttatgaagccggacgtcaccccttctgtaaacgcccccaaactccaagtaaaaacgaataaagaacagctggaacgtatcctgctctacttgctgaaaaatgccgctttctatacggagcaaggacgtatcagcctcgacttcaagaaacgtggcgcgcacacccatcagttcatcataaccgatacgggaacaggtatcccggcagaacaacaggaaaatctcttcaaacctttcacccaggtcaaagacctgactacaggtgatggcttgggattacctatctgctcactcatcgccaccaaaatgaatggcagtctgacattggacacaagctacaccaagggatgccggtttatactggaacttcacgcataaataacataaggtattcaagagctttgtatagttagattacccgcaatcattgtcaactataattatcgtaattagctataatcggagaacgcacattctaactatacaaaaatagtaacagagtactgcataaacggcaaccgggtttataataaatactgtgatcgtttattataaacgtccccctcgtttattataaactttaaaatagaaatttgtagaatctggattgaatttataatacaaaaaaggctgcaaacctcataaagtttgcagccttttcctatatcggagtatcctatcctctgttatacgtcagagagataagtactatttgttactatattataccaccgtagaggatgatcacacactaattttctcattttattatatcgttcttatattattcagttcaggtttggaactacaaatatacaacaataaaaagcgtttgtcaagtacctgctgcattttcaagtattcaagcgattatttcatgactctcggttcaatgacctctccgctaatagaaaccactccctgatctgagatagcgaaatccttgaaataggaagtacgcggatgtattttctctttgctccagtgggcatggaaaatgtatttccagctgccatctttgcattgaaaaggcgcgccatgccccgtaccgaccaatcccatgccctcaactccttgcagaagcggattcttgctatacttaatccatggtcccattggtgacttggaagtggcatagcccactccatagcccttattctgataatggttggcagaatagatcagataatatgttccattcttcttgaggactgaaggtccttctgctactttagcctgcaaaagttcccacggtgcttccgctttcacacattgagataatgtctccgttttaatcttcatcaaatcatcggtcatccgagctacccaaataacatttccatcggtaaaacgcacaaaataaagatagggagtaccatcgtcatctataaagagggaagtatcaatgcttttctcctcccaaacaggttgtttcacttcctgccggaacgggcctacaggggagtcggaagtagccacacagatatgctcttctaccgaatagaacatataaaatttctttttcgattcgatatagtaaacctctggtgcccaaaagccccacttcccgtatgaatcggctgccgacaacgcttgtccctcccgtttccagttcttcaaatcgtccgaagaaaaacaggcgaaaccttcacctttcgttgtgccaccggtaccataggcataatacttgttattataaagcatcacatacggatcagcaataggcagacgatctgactcaacactcacttttttctccggagcattgtttccttctttctccattgcaccactttttccgttgcaaaccaacaggatgcaaagaagcaaaagagcgttcatccctttctttatcatagacagactttttaagtttataattgcagacaaagttacttattttttcgggcaaaacagttatgttctgcaccttaaccatcaataatgacacagggcgggctaaaaagattttttttagtccaccccataccaacaatcagataaatatcatgagtaaatggaacctgttatttcagagcatcacagatctccttattcatcttcctcaatgttttctcatccagcttgataaccttacggtcataagtcaataatccgtttacttctacttccacatctgtagtctgagtatagacagcagccgagaatccacggggaatcagttctttcaatacattggcatattccatatatttatcggttgcctccttagaagtattaaactgaacatatccccagttacgatccggttcccatagatgctctttcaataccagaccgataccaccatattctccgagcactgtagcacgctgggcgtcatacagaaacatttccggccccggataatggtgcaagtcaagcatatcaccacaagtataatgattaccaccactggcaggattcaccaggcgtgaagggtcatattgtttggtccattctgcaatttcaggagtcttgaactgtccccaggcttcattaaacggtacccatgtaccaatacaaggataagaataaagacaatcgatgatttctttccattcttttcgataggttgcttctgattctgtggaacgtttcttctccgttcctgtaaaatactcgcgcatctgccattccggattcttatctccgctcggcatatcttgccatacaataatccccagacggtcgcaatgcgtataccaacgagccggttccaccttgatatgtttacggatcatgttataaccaaagtcttttgtcttttgaatatcatataccaatgcctcatcacaaggagccgtatacagcccatcgggccaccagccttgatctaaaggaccgaactggaactggtccttattattcaactgcaagcgcacaatgccgttcttgtctctcttggtagagaatttacgcatggcagcataactcttgaccttatccaccagcttattgccttcgaacaggctgatctccagatcatacaaagaaggggactccggtgaccataacttcacatcagccggcatggctatttcaacaggaataccattaatggaaactcctttagccaccagttcctttccatcgaacaccttcacttctattttgtccgatagcttcttctcatcagtagcaacttctactgtcagtttattcagatcgatatcaggagttattttgatgttcgtgatagactgtgcaggcacaggttccagccatactgtctgccatattccactaaccggcgtataccagataccggagggcttattcacttgttttcctctaggctgagtaccattatccgtcgggtcccaaacctttactaccagttcattctctccattcttcaaggcaggagtgatatcgaatgagaaaggagtaaagccaccagtatgctgtcctattttaatttgatttacccaaatatctgttttccagtcaacagctccaaaatgcagcaatacacgttcgcctttccattttgacggcacagagaatttgcgttggtaccacaagtcattctcctttccgagtctttttcctacaccggacaagctggattctatcgcaaaaggaaccaggatctgtccctcatatttttgaggagccgcctgccctaccggagttatggcgtaattccacaacccattcaggttcacccagttcggacgttccataatcggacggggatactcgggcaacacattctcaacgtctattttggtagcccattctgttttaatccgttctcctgccagtttccactgagcagacagatacgaacaattaaaaaacacgactaataagataataaattgtttcatcatgatataatttaaaaggtttctgcaggacacaacctgtactgttttatttcttcaggaaagtctccgcacgtccgggagtataaagttcccataaggaagcaaccgtccagccgggagcaaaaatatcgttgtaatatccttttccattctttccataatcccagttggtgtgctgaaccacttcaggataataaccgaccttagcaatgccgcacatatggccctcatgaggtagcaactgacgcatggaagtcgagatcacctctgcaaaatcagacaagcggttctctttgtattctttggacaaccaacgaagcacgtcagcaaattcaaaaacaaatacatcgatatgattattttccactgacacatttccccaaccgcgggttttcatgccaatgtctcccaacatctgtcccggagcaaacggaacatcccacagataataccatgacagggcaaagtaggcggccttctttgtcaggtcagcataatgcttatgttcttcgcctttcgtaatcagtgaaagatagtatgtagcagtggctgcatacagcgatgcttctttgtcctcgcagttcgcatcaagtgtagaagagaaatagtctgctttggagatcagttctttctcaagatattcagctgtctttctggcgctggcaagatagcgtttgtccttgaagtatttatatcccagcactagtggcaatgttgctgaaggagtactacctccgctcttatccacaatcgtaaagtcatcacggaattttctggggaaactgccgtcagcgttctgaagtttcaggaacatttcaaacatctgtttgacccgctgttcccactccgggtacttgcgtccctgtttcttttcgtatgccagaaaatgaagtatcgcataaattccttcagattgacgtcgaatactatgtaccggttcttcaaacccacggtttaaattaacaaattccttaaagaaacccgccggtgtaaatccattcttcagataactgtcaaagatcttaagactattttccttcagttcttcacgattggtttcccagccatattcccaagcattgaacgagttcaagagcacacgtcccacgaaaccaatttccgcttcaccgttactcttacagtcatctgttcgcagaccgacgcccgaattataggtcaactccggcttgcttaccaagctattcacaaagtaattgctgagcgtctgcttcatatcagaaatggagtaaggagtgtcaaccggtttcggagcataagtatcataagaatattcccaggcatgacgtacaaaatcggagaagtcatccgcactgttttccgaaatttcccaagttaacatgatgttttcccctttcttcagcagttggaaagcttttactttaggagccaatgtcagtttacggatatagcttctgggagcttcttcataggggaaaccgaaagaaagcgcagccactccattctgattttcaaaacctgtaaaacccaaggatgtttttccggaaagaatcacttcaccttccttatgtgtagtcaaagcgtcggtcgtaaacttatccagtcggtttactgtcatatatcgcttgtccttctcattatagattcccgtcaatggagcactcaatctatcctcacggactacccaactatcagatgtatggaatgaaggagcttctttgggcgagcgcagattacggcgataccaaaatccgggcatgtaaaacaagcaatcgtcgtgacggaaaccggtagacacattctgtccatagttaaagtacacatcctccagagctgtaatacacatgtcaatatgtagacgcccattagcttccttgaccttttgagaaatcgtcagcggaatattttcagaggctactaactgataggcagaattatcattctgcgttctctttaaaattaaagggtactgcttagccttatttccgggcactttcaaagaaatatgtgcattgacctgttccggtgtataattaacggcccaggcagacccggtcaatagcccgatagctattccacaaagcaagaattttaagttcatacagctcatcataattatatgaatcagcactaatcctgattctgttaatactttatttagatatatttcccaagccattaccggctcttatcaacgaggacaaaattagcgaagatcaccttatctcagtaaaacaaattgagcaattagtaaaagaattcgttctaaatgaatgtagaatgagtaaaatagtaccaaaacagaacatattacgtcctttttgcctgttcatcgagtgccgatatctgaagatccagtctcatgcaaccgtatccgttatgataaaagcatccgcagcttccctctctcaaaagggaaactacggactatgattctccttgatttatgcggcaataaaacaagaataaggaaatactctgttatttttccagaagagcgacagtacaccaaagaacgggaccttgtccatgataatcaccagtacgacgaggacgatcataatagtactgcagatcattctttttattggttccgacacaaacttctcttacctggttcttttcattaacgtatggaaccaaagccaaccaagctttccgggcagcaggtgcatactcttccgcatccagccagccattcttcacgcccataatgaatgcgaaagtaaacattgccgatccggatgactctgtccagcaatcagacttgtcaatcaactgattccacaagccatctgcattctgatactccttcaggcttttcatcattttctgatagccttccaagatacgggcacggtctttgtgcttctttggcaaacaacggagcagctccgacatacctgccgccatccatccgttcccacgtccccaatagaaaggaacatccggtgcatgatagaaaagaccattcgggcgttgcagttcatccaggtacatcaccatttctttcgccgcccgatcaatatatttacggtccttcgtcactttatacgcatgagtctgcacaatcgtaatcatgtacatgtcatcaatccacaaacgtgtctgccaggaataccctttttcagcccattccttttctttaggctttgcatttgcgggaacttcccactgagagtcggcataaggcagtccaagatacaggtatttcttatcctttgtcactcggtacatatccagtggaaggctaccgaacatattcaaatccacatgattcataatcggctgcagcgccttctctgatgtaaacaaaggggcaaacttatcttccagaagctttatcaactctttatcttttgttaccgcagcatatttcagcgcgccattccagtagaatgtttccggatatccaatccatttaccggcatgaagtgcgtgcttctcgcctacaaagcggtatgccaaacgcttaccgacctcttcgggagtgtatccttccgggaagtccgtcagcaatttagtctgagctgataatagttgaaaaggcaacaagagcaataataaaagtagttttttacacataacgacttatttttatttattatacaattatagaatatctacgggagttatttaaccttcaggttctttacattgtcgcacacggccactgctattcttgagtccgcacaaccataatagagatataacttcttcttgtaatatgccagtccctcgataaatactgttccatctttgtattgcccgctcttctcaaaaggtgcttcaggcacaaagaaaggtttgtccaaccggtccagtactttataaggatcattattatcaaataaaaattgtccggcgcaataagcacctgccggatatgaggtatccctgtcctttcctgcattttttccattatacagaagcacaataccctttttggttcgtatagccggaggtccgcattctgtcatctgacagtcaaaatgccctttacgcggtctcgccaacttctttaattcattcttttcgtccagtaccggataccagtctacaaggttgtcagaagtagccgcgtgaacagcatactctccccagtacatgaaatacttgccgtctactttatcaataaccagcttttctttctttactttggtcagtatggaagcagatttactggctatcttagtgaagcgtccgtcgtaggccttttcaaaagcaagtccatgctttgtccagttctttagatcccgggaggtggctacagcgatacgcggtgtcttccggttccatgccgtataaagcatcacatacaggccgtcttccgtcattgctacacgtgggtcctcacagccaccgggccattctatacctttaaagttatcttccgctggaaataataccggagtgtccagtcttgtcattgtgactccatccgtgctctcagcatatccgatacgtgaagtccttttaccgatgccccgtgctgaattatcttccgcccggtaaagtacgactattttcccgtctttcacggtagccgccggattgaatgtatcactctcttcccacttcacctgttgcttctgcatcggacaataaaaagaagtaggttgaggtgaaattacgggattagcaccttcaggacgtacgaagggaccgagtacccaacttctgttatcctccttacctgtagtcgtatccgtagaaggtttcatggtaaatccatataacatcaatataccggtcagactaattacgagttttagtttcatcttattttcctgctttattcataataaatcatttacctttacagcaaatattgtccctcctccttcaatcttttacgcagataatcagtatcgattttgtggacatcattctttgcctgttttatagcatgcactgcagccattccggcagcttcgccagtcaccagacaaggaggcattacccgtaaactcccgaatgcttcttcatcagtagatatacagcgtcctgcagtcaatacatttttcagtcctttaggtgtcaggcagcgataagggattccatgagattctccttttttataacgtgtctctttatggccgggcttatgaacatctatataataacagttacgtccgatttcatcctcaaaagttctacgttctttccagtcctctaccgtaaaagtataatcaccttcaatccgacggctgtctctgactccaagcaaagaagcagtcttcaccaaaaaagcactaccaaaagttttgggctgaacatccttcattgcttccaaatattgtcctgcaatttgccgacctgccatcattgcctgcgtagttgcccagggatccgttgaatcgacattatcaagatgcccggcattgaactgcaccacatccggaccaataaaattactattaaaatgcttatctatcaatggatatttcccagactcaatcgctttataaacagggctgttcttattactagtatgtaatgagggccccgtcagattgtagttatagctatcgacattagcaaacgagaagcataaagatgagctctgtaccaccccactatcatctcctctcttgaatgatgcgcctgcccatgccgccaaatccccgtcacctgtcgcatcaataaaaacttttgccttgaaagcaacaagcccggatttatttgcgacaatgatagcgtctaccgtttcatcggctgctttttctacagcagcaactcttgagaagaagagtactcgggctcccgattcagtaaccatctgatcataaactgtcatcagatattcgggatttatactcacccaattcattttctgttttctctcatgcggtactcctttcctcgaagcttcaaaaattttctctgccagacctctataaataatcttctcaccatcagaaaacggacaccatgccggaaccataccggctgtgcccatcccgccaagttgccccattgcttcaatcaatagagtcttggccccttcgcgtgctgccgagatagcggcagcacaaccgccaggccctccgccaactacaataacatcccaccgatcatctacggcaatctttgtattcttcagactcagcctggattgcgttgtttctccctgcgtattgagagtaggtacagtgaaagctgcggtcaacagccctgctttttttaagaattctcttctagaagtcatagtattctatttatcatttggtgaacattagttcctttgtccgattcactaacactcaattaaacaatccgcctatcaatgcagccataaatttaagtttcatcttacttaagtttatacttttggctatcgatattccatccttttaataccaatattgctccttcacccagtttctcctttgccgtctcgatcgttaccgtcttcttttcacccggagtcagggagaagaagttatccgtatagaatgacggccgtatcggactcatctttgcattaaggaattgcagttgattgaagaaagctatctgattggatgtattcctcatagtgatatcaacaaaatagttatcaccttcttccctcaccttataagccagtttcactttagaagtccgaagtttactcaaatcctcaaagccagaggctaccggaccggtcaaggtcgtctttccttcgtacttatcgttggaacgccagtagaaattagaagaaacttctttccctttctcatctttcagtattaatttgataaagtgaacctgagagatgtcttcgggaaaacgaatagtcaacgcatcattcgctactccatcagccggtagattaacagcagccgattcttcaaacaccttccggctatttatatcatacacctgtgctgtaaccttgtagttatcgaaagaacgatagaaatcattcactacggaaaccgtatttttaagataatcgaactgagcatgcaaaggctccaaagaattggccgtgtgataaagcgaagctgtcggctccagagaccagtcccacatacgggaagctacctgcctcatagaacagttatgataccaaaacaaaaggcccgaacaaaaacggtcgccataatccagcttattatagttccatacttcccagatgctcttagagtttattgcacccagcagttgtcctttctgagcaaattcatcaatcgaagatgactttccataatgattcaccaagtctgtatacatggtagtcatcagatggaaaccgtttccatccaagtaatcccacacttctttgttgataggccacaggtctttctcatccatcatttcccggagtatttctactgtaggaagagtcggtgcaccatattcaggattaaagccatctacacgactacctcgtggagaagctgtattttcataatgctgcatcggattcacctgtttgtaagggctgccatcatgtactccggcacactccgactgcatctgatatccacgtgtaccatccagctgattcagcagttcgggagttccggtcatttctgtgctttcattggaagcaacataataagccaaagacggatgattacgaatacgcttcactgtagactccacgttactcatatagagagccttgtcatgaggatgacgagtatcccctgtcatccagaattcctgccataccagcaagcccaattcatcacaaagctggaagaaatagtcagattcggcaatgccacctccccacatacgcagaaggttgacgcccgactggcgagtatagcgcaattcagcatacgtacgctcatcagagtgtctcaacatagcttccggtatccagttcgtaccacggataaacaatcgtttgccatttacataaaagacacgtgatttgtccggtgttttagtatcggaagtgatttcacgaatgccaaatctcgtctttacggaatcacaaaccactccgtcaaccgatacggtcaacttcaaatcatataagttttgcggtcctttgttgaccggccaccacaagcgaggagaattcatcacaagttgcggaaactcttccggagaaaaagtaaccagtttttgttctccccgaatcacccggaatgatttctcaaaggatatattctcaccaacaatctcaccttttactttgcaattaataccactattgctagttgacggattgatcacttctacagatacggtctcacgcgcctggtcgtaatccggtttgcgcaattcagacttaataaacggatgacgtagagctacctttccggtagcatagatagaaatatttttccagatacctgtattacgatcacggataccatccataaaggtaaagtcccagcctacagtcatcaacatcgtagtattcaatccgatattaccgttaccaccattatggaattctccggcagccccccaagacttcggcttagtacttccgggaacatcaaccggatacactttgacagccagtgcattattctttcctatctttacaaaatcggtcacattgatatagtcctgtatgaacataccattgatggtactcagcaaattcccattcacccatacttctgcccgataattgataccgtccagctgcaaccaaacattcttccccttaaaagactgaggtactgcaaactctgtacggaaccaataagtataaaagtcacgtccgacctgagagagatcaggaatcaactttgattcaagtttattattgactccataataaggttcgggatatttctgattatacaccaaagaatttaagactgtaccgggaacaatggctggcaaccatttttctgtcggataatctgatgaagatattttctcacccggatctgtggtatcgcctgcttttatcattttccactgataatctccatgatgggtgacttccgaatcaagccaaatacgattagggtctctggtttcattcgtcctattttgtgcagtcaatactgaacagaaaagtagtagcaaaacagaaaaaagggtcttaacaaagttgtgcatatttatgttatagttttaaatgttttttggcatggaacaaaagtagaggtttccttttattcaacataccaaaaacaggtcaataaataagattttagtcccaaaatactttaataaaagacagaattgcccgtattcatcgttatttttccagaagagcaaccgtacaccaaagatagggtgcatgtccatgataatctcccgtattacgcggacgatcataataatactgcatgtcgttctttttgttggtaccgacacacacttctcttactttatcattcgagtttatataagtaagcatagccaaccatgctcttcgagtagcctcaccatactcctttaccggcaaccatccatatttcactcccataataaatgcgtaagtaaacatagccgagcccgatgtttctacccagcagtccggtttatctatcaactgtctccacatcccctcttctgtttgataatttttcagacttgccatcatacgctggaaacctctgacaataggcaaatgatatgggctcgattccggcagatagcgaagcacttctgccatccctgccgccacccatccgtttcctcttccccaaaaatagggtacatccggtgcatgatagaaaagtccattcgtacgttgcaactcatccagatacatcgccatttctttagcagcgcgctcaacgtatttcaattcaccggtcactttataagcatgcgtttggatgacaggaatcatatacatgtcgtcaatccacaagcgagtttgccaactatatcccttcgctgcccatgacttcgcacttgcacttgcattttccggtacttcccattgagtatctgcataaggcatacccatttcccgatatcgttcgtctttagtgatcagatacaacgtcagaggaagactaccgaacatattccggtcaacatgatccatcctaggcaaaaagctcttgtcagtagtaaagaaagactcaaacccatctttcaaaggctggatcagttcattgtcttttgctacctccgcatatttcaatgctccgttccaagtaaaagtttccggataactgagagtttttccattatgctttccttttgcaaaaagccttcccagccgtttgcctatctccttaggagtactcccttccgggaaatcagtcagtaagggagtagcaatggtccgcttggtctgcaacatccattcttgaatttcgattccttttcctccttgattccgatgaatggtcagtttataatactgatacgtctccttatgccttaactctagaaactttttctcttttttttcaaactcctgccgaattctattgtctagttcggtccacttcacattgtcattcgatccgtaaagagaccacgcactgggtgcatttccttctttatctccggttgcaataaccgaataataacgtattacaaccggctcttttcccttccagatgatagagacagaattattaggagtatagaaagaagttgtccagtctccatcaaccaaattgctaatatcttttccctcaggagagtcatcatattcaggggagatagtaccctctgtcggcatattataattctccgcctttaactgatatacataggtatatttttcctttgtgtcatttcctgtaccttcctgagctggtggtacaggttcttcatcttcactggagcagctataaagcatacctcctgctattgatatcaggaatgtacaaaataatgtcctcgctatatcacgtatccagctattatttttcatggtattcttagtttaaataattactttattctcaccggttcaattgtttctcctgtaatactaattactcctttatcggagatattgaagttactgatgtaggaagtgcgaggacctacactagtctcacttgcatgagcatgaaagatatatttataacttccatcggcacagacaaacggtgctccatgtcctgtaccgactagtcctacagacttagcagcctctttgtctcttcggagaattggatttccactatacttggtccaaggtcctttaggagaactagctgttgcatatcctacagcatagtctttactttcataatggtttgccgaatatatcagataataagtattcccttttttcaatagcgaaggaccttcggcaatcgtaccttgtttcttctcccaaggttcagtagcacttatacatttagtcaatgtttctttttttatactggtcaagtcatcattcatttctgctacccaaatcacgtttcccccggtaaatcgcacataatagagataaggagtaccatcatcatctataaaaaatgaggtatcaattcctttttcatctgctacaataggtttcttttctctctgtacgaatggaccttccgggctagtagaagtagctacacagatatgttcatccactgaataaaacatataaaatagattcttcgacttcacatagtatacttccggcgcccaataccatctcgttccccaagaattttccggtgacaaagccttgatatcatttcgtttccattgtttcaggtcttcagagatatacacttcaaaaccattaacacgagtgccatatgcatagtatttaccttcataatatagtacaaaagggtcagcaataggcaatttattttctactacaatatccggatcaattgtatcttctttagctggagtagccgatatagttactttctcagaacgcttcccataattgtcaatagccacggcactaacctgataaattccatattctactaatttaagggtataagaactgtttctctcaccatatacccgtacatttatagtttcagaaagttcctcttttcctttcagagaatagagtatttcaacaactgcaatatcagaaggatttttccattctaataataattcatttgctctattagtttcttttgctataaaacctgaaataggttctataattacagttttctgtccatcctctttttctatatttgtatcagccaatgaatcattaccaccgctacatgacattaaacatatagcacctaaaacaaaccacattttcaaacatattccgtatcgcatatagttcataatattataaggaggacccttccttccaacgagtcctccttcattattcaacaaagtttaaaattccatgtttttaccattggatttgctgatcttcatcagggatcaaagtattaagctgacgtaacatcgacaacgatccttctacctgataattaatagacgatcccggaatttgagtaatatccttaaaagagtagttcaagttaagagtgatgaatattttcttcaaataaaccttcagtggatccatctcctcagttattgagtaactctgtatcccactagtagtcagttctatttcatcattatccgaccacacttccagttttttagtctgcaaatcgacaatctcgtccgtaaatcgaataaaaaccttatattgtttacgatccaaataatcaatatctctcgttccggcataaataaaaatcgtattatcatctactacatatgcccgtgttgactcaacagtcaaaggaaccgttttatctccttctagataacacttgtactgacttgcatcatacaaacccgaatagtcattgaatggaagaaggtgcaacattgctcttcgataatactttctaggattggcctgataatcataagacggatctgtcaatatctgcaatggcaacacccacttatccgactgatctaatgactcatccaatgtgaactcaacaggaagtaccgccaatgattctccagctaacatttccacagtttccggcatattataatattgattgggcaactgccgaaaataaagttcttcacgatgaccatactgttcttcattcagtactgccaatgtatcaggatccaaaccaatatgaatagttcgattttgtgtatttacagttgaaccactcatcaaaatcggaaggttatatttgactactccaccagaattgaaacgtacataagttgtcgtcacaccttggtcagtgacattcgctttgaaagatgcctgtagtaaatactgctcatcttcccattcattattgcaggctgcgaaccccataatggtcatcaaccctaaaaatagataatatatatttttcatctttctgattttaaaaagattattcaggatttgtccaacccggattctgaattaagtttatattatgttttagctcttcatgattaatcggccatagccacatcttggtagcaaaaatagttggcaatgtcgtacacattgtcggagtatgaaactgatctttcatcgcttccgtagctaacatattgcaaccatacacaggagtagcctcttctactggagcatccatccagcgacgcaaatcccagtaacgatgcccttcagcaaaaaattcaatctgccattcacgtttcagtttagtacggaatttgtcttgactactatatacttccatactataatcaggcaatcctgcacgacaacgaaccggacgaataccttttttcatttcattaatatcgcgactaacagaatgaactttatttccatcccatgaaggaatgtcataagatcccgttaattcgtttagggcctccgcataaatcattagaatttccgcataacgaatagccggatctgttttcttctctagacgagtttgatcataagcggttttctccgtataactaatatcatccggatgcacatacttctttactccaatacctgtctgaagagtataaccacttgtatatccattgttataccctttatagcctccccgataataaaatataggaatattcttttcctcgtttttactatcctccgcattcagaaagtgccatgtacttccattataagcaactgaagcataaaatcgtggttcgcgcctcacatattgtttggatacaccctcacctaacggtcctaattccggatactgtgcaagttcacttgcttccacataacctgccggtctaggatctgtgttgtaacgtccttcatatcctgcatagcctctatacatatcattcatacccggacaatcttcaccatcgttcatataatatgcatcacactgtttttgtgtcataccatgcgaaccatatcccccaccaccacttcgtggtaactgatgaactaccataatacctattccttcattaccctgatttataccacgagtaaaaatcagttcttcgttctgactggctatgatagagccgtcaaacaattcacgatacgattgaaaaggatctatgtttctccaaccatttggccaatcctgttcggaaaaatccccatcagccggcggagctattgttttgggataagcaatatttccttcactagcattataattagccacatgtaatccatagatattcaaatccatcacatctttagcagcagccgctgcttttgcccatttagattcatcataggattccggaagcaaacgttttccatttttatttatcaaagccgatgatacaacatctggagccttaccattaaataatggactagctgcatacagaagaactttagcacgtaaagctaatgcagctccacgagttggacgagtaatctcttgaactcctcgctgaagaggtaaaacacttgcagctttcgttagttcgccagtaatatattccacacattcgtcataagaattacgaggataggctagctcatcatattcctgagtataatctattccctcatccggaataatcggcacaggtccaaacgcccgaagtgtcaaccaataaaaataagctctgagaaaatgagcttgccctttaaagtctgaaatttcttccggagtaaacaattcatttttatcaatattattcagaaagatagatacttgacgaattcccttataagcgttctgccaaatacccgaactcgaaccatataccccattttcattatatcgtccacttttccactttctgtaaccactagcatcagaatcctcccaataatacatatcatctgcaaaattaaaaggaacatttttcttactaccaacatcttgcaaataaccattagcaagaaaagcataacctcttgctaaccaattattagtataatctttattatgaaagacatcgtctatagacatacgctcatcaaagatgtaatctgagtccaaataatcagagcatcctgccaaagaaatcaatcctactgtaaaggataaaattactatcagttttttcatatacatgttcatttttataaattaacagatactcctaaagagaaagttttattaagcggatatttctttccatccgaacttcccatttcaggatcccaaagcttaaaacttgaaaaagtaagcagatttgtagcggtaaaaaagaaacgtaccttattcaaatgagccttacgtactagtgccgttggaagtgaataacctacatccaaggttttcagacgaagataagacccatttctaagccagaaggtagaagcacggttattattagaattattcccgtaagttaaacgaggataatcggcattcggatcttcatttactcccaaaacccatcggttactattggccatttccttcaatacatttccccaaccatcaccaccagaaaacatatagacagtggaaccgtttataaagtaagaagatttgcctacaccttgaaaatgcacactcgcatccaaccctttccattgagcagatgcaccaaaaccataagtaaaattaggctttgtagtagatccaatagccactttatcattatcatcaattacaccatctccattaatatctttatacttaatatcacccggcataacctcaccaaattgttttggccaattacgaatttcttcatagtccttgaacagacccagtgaaaccagtcccattgcctgattcacacgatgtccttcctgcatcttgtaccaatagatactattttcttcatcgcgttccacgatctcattcttaccataagtcatgtttccgcgtattgtcagattcaccttatcaaccttttgtttaaaagtgaaacgaccatcaaatccttctgcttttactactccaacattagcagatggcttactttccaaaccaacgatccaaggtaaataggcacgctccatataaataccttctcttttctctttataataatcgatctcacctgtcaacttatcattaaaaagtgaaaaatcaatacccaaatcctgtttagtagaaatttcccatgagacattagtcgaggctaatgatgaataacgcatacctccataatatctgtcataaccgacatccgcaaactgatatcctcctgtaggtttaggttcattctcatccgtcatcatagtttcgattgtatacaagtaaggaaaacgaagatcttttttcaagatatcattacctgttttaccccaagaataacggactttaaacatattaagccatgttaatcccttcataaaagtttcttccgcaatattccatgcgccagaaacagcagggaaaaagccaaaacggtgatctttatgaaaattctcagaacctgtatatccaaaattaaaatcaataaaataacgatagttccaattataattaacacgccctgcaagtccttgattacgacgggcaatagcattctttaactcagtaccgatattttgattagagactttggaggattgcgtatatttcactacggctccagtatgatggttgttaaatccacgttcataatgcaattcccattcgaagaattcattccgtataccgtccgacccggatgtttgagtcattttctgttcaggtaaaacacgatcaaactccaatgttccatcagaattccggtatgaatgggccttccataactccggccatttcactcgtgttatccaattcgaattttccgtatcatatccaaaccttccaacaaacctaagtcccttagtaataaagtctaatttctgttctaatgtcacattcgtttgaatattatttttccaactctcattaaaacctgtttgtgtagcctgagtatatggatttatattatctgctttctcactccaagaagggattttgccattcgaatacgtcactggcatcataatagaattatagcccattaatgttgtccatatagcatctgtccctactcccgggtcattctgttgacgtaatgatccagaaacaccaactttcaaaagagtcgtttttgttatatcaatatcgacattcatacgataggtccatttcctgaagtttgcattggtattatagtctttcaatgatttatcagtcttgtatataccctgttgattttgataactacctcctacataataccgagcagttttacctccaccagtcatattcagtgacacacgggaactataagatacatcacgtaacattaaatccatccagtccacatctggatataaatccggatcaagccctaaacggaaaacttctagctcttccggctgatagagaggttcttcattacgtgctagttttgcctcatttgccattgatgcataagtatatccatccacaaattcaggaagtttagtaggcatggatgcaaacccctccacttttgcattaatattaattttaccttctttaccacgacgagtattgattaaaactaccccattagcacctttactaccataaattgcggtggcagaagcatctttcaatacactaaatgattctacatcctccacattaacttcgttcaaatctcgttcaaagccatcaactaaaaccaacgctgaactattagcaccaaatgtagaaatactacgtatccagaactctgaaacagtacctgggcgtccattagcctgcatagcctgaatacccggtacaactcctgctaaggcatctgccatagatgtacttggagttgttttcagctcttctacatcaacatttgtaatagcccccgtgaccgtaagttttttttgtataccggttccagtaataacaacttcgtcaatagatgtagcactagactcctgcattacaacattaactacacgctgttcttttaccaatacttccaacttctcataaccgatatatgaaaacacgattttatgatacggaggtgtctttaacgaatattttccatttatatctgtaatggctcccaaaccaggcatatctgcaacagatacatttacaccaatcataggttctttgttcgtatcagtcacgatacctgttactacaatattctcttgtgcaaaaacaaagccagagaatcctagcaacaacaaacatgttaataaaaaatgtttcattatattatatgtgtttatcattattattcctctaaagcaatcttacgtatacgatgattattagagtctcccactaagagacatcccctcacttcatcgtatacaatgctcgctggataattaaaacgagcctgtgtacgcaaatctccatcattaaatcctttagttccatccccattcggacgtccggcatacaaagttacttttccagccggtgtcataactcgaacacaatgattctgtttatctacgaaataaaaatcgtactcatccgcctgcccctcataatcaggatttttcacaaaacatccttgttgaggttggttcaatcgaaccatactacctactccatcgtcacaacccgatgtattatcttttccacaagcaagataaggagttccaaatgcttttgtttcccagttataatccgccttataaatgacatgtctatttctcaccatgatatacatatagttccctgtcggatgtattacaacatataaatcaagactagcacgatacatttgtaagaaacttggattatattcccccgtttctggatcatatctaccaatccatcctttatcatacctagatgtatatatttcgccattcactggatgaggaattgccgctctacatcctcgagcataaagagccttagtttgtgttgtgaaatttgattcaggagaataaaagaataaaccatttttattatctgttgttatatttcgaacaacgattaactctccactattactgaaactcaaaatattacattctccagcagcttcacctgtaaacgcaatggttcccaatgttttctttgaaaaatcaacaacacgatgtgttttttttccaccacaaacatacaatttatccttattattagggtcaaaaaccatccattccattttttccaaacctccgcaatcgtcccacggaccatctttaacatcaaaattattatcctcatccgctatctccggatctgtttctcctataagcgtagttaccaacatctttttcttatagacaaaaacttcttctgcctcagcataggcaatctcttcacccctatcatccaaaatacttacttcaatatctccatcataagcctttgctggaacgaaacaatacaaattatgatttttgattccaatcacgcttgctgtttgtccaccaatcgtcacttttacttttgagacatcatttccaaaattatctccatataataccaaacggcttcctaagcccccttcttttggagtaaaatcagaaataactacaggcttgcttgggtcaaagggctgttctcctccttcgtcatcatctttacaactgacgaaacagaaactaaccaatgccaacaatccccacaaaaaatgccaaacatgattctttgttttcattttcataatacattgattttaaatgttaataaatatatctcgatttcaattattagaattaaataccggtatcaatcctgaattagaaggaacacaattcttgatgtatggccaaccgtcattagtccacaatactcggtctagcattcccaagcgtccaccgacgccaccatttgcatctttcatataactatgataaatcatccagtctgtaccttcatcatcttgtataataatagaattatgccccggtccgatccatttctgtccatccccttctaacacaagttcccaactattatcaagcatgccttttcctttcttatctacataaggacctaataaatctttagaacgaccaactaccactttataactgctattaataccattacaacagttaccaatggaagcaaataaataataataaccattcttcttataaatatttgtcccctcaaatgcattaccacaaacttgtttcttcaaaacaggcataccatccacatcacgtttaacagaaagaccatcatctgtaagttccgttacataaattcccttgaaacttccaaaaaacatgtatttctttccattttcctcataataaaactggtcaattacattagaaccaaactcttcattagtaattaacgccttactgttcgggaaaggacctaaaggagaatcagaaacagctacagccgtatagctaacatccgctccattcatcttagcccatgaaaagtaaagaacatatttcccattaatatatgtcatttctggagcccaaaaagcacctccacctgataaagatggcttagtatcctgtgtaaaggctgtcttttgatattcccaatttactagatctttcgaacgataaatcggcatccaataagtgctagtttgagtagcatataaataaaaatacccgtcattagcgcgaattaccgtagggtccggtacacttttatctgatataattggattagtatatgtacgccctaccttaagatagcatatctcttcctggcaaataactccattgttagagcactcgccaagttgcaatggtaataaataatccacaacagccattccttcacgcttaattgtaatttctccattagcttgagtttcaccagccttaaaagacacaccctcacctaaatcataattacttgcgggcagaagttgatatgaagttttatagactttattatattctgcaaccaattcttcagcattagatggcagaacgaaaccacagacaaaatcccaaggattagctgttggtatcccatctattgtataatcaagtgatgcagcaatagatacaggaatcacatctttattgacactaacctctacaaaagaggtagcaaaagaagctgttggataatcataagaaatgccaagtaatatttcgctctgactatctcgtacctgaattttatcactactaagttttaaagcaatgacatattcagcgcctttttccctaaattcagcaaatactttagacggattaaagctaacctctacatccataactgaaactccttctttgaaaacctgttctgtagaagtcagagaatacaacgatgagggcaaaagtacataagaagttttctccttattattatatgctttcagttcatcctcactccatgggtttatttgagctttaaaccctttattagttccattccctataaccttgatttggaaaggaaacacaaagttttcttctgtacaagaaaccctaattgcattcagaccattcggttgtaattgtaggtagtaattcgtagtatttcccggatcctcagtcggattattgttatccgatccgcacgatagaagcaaaagtatccctgtcagcatatatataaaacgatgtgtacgacgagtgatacttgttttttcaattgacttgttattcatttcataagatttaagttggaactcaatacaagctccttgtacgacatatgattaaaaaataaatgtgttatccttcaaacattctttttaactatacttcaaaaaacaatcgttatattctttatcttctttattttattttatcaagtactcacataaaacgaccataatagtttttatgaacgacacaaaagtagaaattctgttgcatttagagtgatacaaacaggtcaataaatggaaaattagtcccaaagcgtttttaacaactaataagaaagacttcactaaattataatgaccaattatttgcattatggacaatttatactttttattgaacagtttctatctttctaaaaaatcaaaagtcttacctttgttacaacgaaccattttaaactctaatatgaaaactaagcaatctttaatgatgttactaatgattatgttttggataacatctgcattgggacaatcaacgatccctccatcatgttttaccgatagtcacgacatcacctcactgcaagcttgggggccttactctaagcgatacgcaggaatctcacatatacccgatatgaaagccgggatgcgtttcgatttctctgtaatgccaggctattaccgtaatcgtcaactgattcctcatgtgcttttcgaatcatcttattacccatgggatatcaattcatccatgagccgcatcacataccgctatgaaatggagtggaaagaccgagtatttactgatgtcacctattatatattagatgaacaccgaacactggtaggcatgaattgtgtcaataataccgctgttaatcaaaatctcgttctcaacttgatggcctatatcgattatgaagaagaacaacctcaattcaaaatccctgaagattcaaatatacagtggcataacgcaactgattatacatcaaatgaaccggtacgcaaatctccacagtataatttagtatacgacggatggaataggaacgaaatgcgaacttctcaatcactcagtggttttgttctaggaaaaggatttggaagagataagggagacaaagtgaactatgaaataaatattctacctggaaaagaaaaaggaatgataggattcagatacaatactcctaaaggaaaaacaagcacttttcaagtaaaaggaataaccgaaagccgcctagagttacaaggcaccggagaatataacatagtctcaatcccctatacttgtaaagaaccaggaaaatatacgctagaattaatttcagaaggtactcacagtactgatttagatggtttctttatcggtagcgaagaagatattaaacaaatcaagatactgcctaggaagctttcttttattcccgaaattaaatcgggaaaaacgaaacaagattttatcttaaaatatccggaatatgataactattatggaatagcatggaattaccaagaatctcagattcgggaagttctggataacaatctggaatctttcttccgcaaaaagactcacgaccatgtatcatcgagactaataggaaacagagagtggcattattctaatgcttttctacgtccgattgtcttggcacctcactccgaacagacaatatacgccttagtctgcaccggaacatcccaacaagtcaatgaacagattcagaagtttcattccacaccggaaactctgacttcattaatacaaaaggattcgaataactctgaagacagaatattagcagatggcaagaagtatgaattcggacgtcgcttgctgcaatcagcattattatccaacattgtttatcccgtccatacccaagggcaatatatccggcattttacgcccggcaaaaattggaatagcctttatacatgggattccggtttcatagctctgggattaatagatgtggatattactaaggcttttgagtgtatcagagcttatacaactcctgtaggcagtgaatctgcatttattcatcatggcactccattgcccatacagatgtatgcctattacgatttatggaataatacacagtcaaaagaagcattgcaatttctatacccgcgactgaagcagttctttgattttatgacaggtaagaatccctactccacaacccgaatgaaaggttctggtctgctacgaacatgggattacttctataattcaggaggatgggatgattatccgcctcaacatgctttacgtgacaaggcttctgttactccagtagtatcttcggcttattatatcagagctgctaaaattttacgtttagcagcaaaagaactaggtcttaaaaaagatgtaaaagagtatgagcaaaccatcaaacaactgtcaaatgcattacaaacctattcatgggatgaggaaaccggttatttcggatatgtaatgcatgacaaagatggcaaacctaaaggcatctatcgatataaagatggttctaactttaataagggactggacggagtaagcccacttattgcaaacatctcctccaaaaagcaaacaagcaggatgataaaccatgtattttctcctgacgagatgtggacagaagtaggaatttctacagtagaccagtctgcaccttattatcgaacagacggttattggaatggagccgtttggtttcctcatcaatggatggtgtggaaagccttgctggaccttggagaaggagaaaaagcctatcaagtagcaactaccgcattaaatacatgggagaaagaatgtaaggagagttattataccttcgaacacttcattatatcctcacaacgtggagccggatggcatcaattctccggtttatcatctcccatactcaactggtttgctgcatactatcggatagggaaagtctcaaccggcttcgaagtgtggatttccaacagccatttcaatgatgattatacacagtatcaggcagaaatagcttttgatgattcaacagttcctcatcagcgaacaattcttgtttgcatgaatccggagaaagattaccaagtaactttcaatgggaaagtagtagaaagcaaaacatatcatcaaggattattagaaattacattgcctagtacaaacaaatcgggaaaactcacagttacatcagtctgacattataaaccttatacagggtaaccacatcaacagttttattcgttattatacaggtaaaaccgttggtgcagttgctctaataaaaggtttcatttcttacatatcataaatgctcagacatacttttattcataaccaaaagcatattctgatatataaatatctacatttttatctccagcagagtaatccctataggtcgtatcataggtcacatcaccagtcaacttattagttctttttgcaattacttcaatttgaccaccacttttccctatatttgtaccgatagccattccctcgttattactgttcgtagttcctccaagggattgctcataacccgaattatgattatacataatacacgagtaactatatttatctgtattcattggcaaataaactctcacaataaaacttgtttcgtccactgcaacctcaccattaataatgtcatctacgcttggttgtggtctattatacccccagtaattacaataaggatctccaatcacttctggataactccacatagaaaataagctacgatcatatttatattgagtttctacttctggtactggcgtagcccctataaaactttcatgaatagtacgcattctcatgtaaatatatcgtcttgttgtactataaggaaaagcatatgccggtattttttcaagagcaccatcaccaagtattttgacaaggccatatttactaccgcgcatatttatataagcccactcattcatataaccagtatagctccactgaatttgcaaaaaatattgatcagaaacatcctgtcctgtgctttcctcaataaatcccgcattccaacaaaaatcagcataataactataaccatcttcagtatcagaatctaagtctggaacaaatttaaattcacacaacccacatggggaataagggcacttaccttccctatcctctgcccactctaaagcagactcttcttcttcctcccatagatcacttctcgttaaagcactgtcttgatccaatctcaaatcaacagcctcttcaacagcgctttctaaattgctatccatttcatggctgcatgaataaaacgcaaacaacatcgcaaaagggatactccatcctaaaaacagttcctgtctcatagcaattatatttaaaagttaaacaatttataaatatagagacaaataaacatttatacaaattataaggaatgttcgtaaacacaaaaaagttccaaatttacaaagcaaaggaataaagataaaaaaatatgttataatcgcactcttatttaaattttctcctttataaattggaaaatttgaaaaatagaatttcggatatgacaaaagcaatataagtcacggcttattgtgatttatgggcaaaacactcatatttgtagaataaaaacttgtaaagtaacatctaattgtggttttctatgatggaaaaaattatagaccactatagaaaatacataattctttaaagaatctctacaacccacttctctatattgcgagttttagcactgaagttcactcctattttgaatagtttccgttcatccatttcgaaggggagcgcacaatgcttctcgttgatctgctgtaaagcctcttcgacagtaccttccaacttaaattctatgatatagataaatttgtccgtcttcagaacgagatcaatgcgttcgtcattcgtgtgatactccacttgggtataaaagccgagcaatttgaatacgataaaaagtacgttttcatagtgcagctcctgatcacaaatcacctcgtaggtagtatctgcaaaaaaactttgtaaacgacggaagaaagaatcataatcaccggagcgtatctcacggacaaatttctgaatctcaaacggagattccactttattcacgctggcataataaggaagcaagaagcgaataaatccctcttccacttcccggttgggaaaacccaaacgatatataccaaattcctcgtcatatcccttgatcgtaagatatccgctttgatgaatcaccggaatggggttagtggactcggagtcaatgctattcaacacttgcgcatcagtctcttcgtgcgccattcgttccagatcgtaatgatgctttttcagtaattccaccaaataggtagacgttccggtttcaaaccaatagctaccgaattccttatacttaaaggcattgagcagactgaacggattgtagataccaatagaattatgtgtaaagtgatagccatcgtaacgctctctcaactctgaacaaagtttatcataggtcactccccgtatatcggcaaaatcatgaagttcggcttccaaattatcatgaatctcctgttcgctaacaccacaaatgtcaatgtactgattccgcatagaaatatcatccaaattgttcagatcgctgaatacactgaccttaccaaacttcgtcacccctgtcagtagggcgaacttgatgcaaccgtccattgtcttgagcgctctatagaagggttttaaggtatccctgaatttcttttgaagttcctcattacgatggattgcagcatgggcttgtcgtattcatccaccaggatggcaacgcgttgcccggctttctcgtatgcacgctgtataatacctgcaaaacgcagggaaaaggaacgttcagacggttcggcaccatatagtttttcccatgctgtcagagacttttcaagtatgttgtcaaggctctccaaagtatcatatttctcgatattgaggtccagatgcaaaataggatgtttattccaatccttttccaacttttccatagccaatcccacaaatagttcctttttgccttgaaagtatgcttccagagtggatatgagaagactctttccgaagcgacgaggacggcttcagaagtaataactacccgtctttaccatttgataaatcaatgctgttttatcaatatagaaataatcgccattccgaatcttttcaaaattctgtatgccaatgggataaatcttattgctcatattcttctgtttttatacaccaacacacaaaaatacaaatttccctcttatctccaacactattatttgagaaacttcttgttt

SEQ ID NO: 4807 - DNA, 1019 bp, Unknown
  gut microbiota DNA sequence
acgcagttggacgaggaatatctcgacattgcgaaccgccctgtccatacaagctctgtgaagaattatatcaaggcacaacaacattttggaatgaagtccatgttctataatctttgtttcggggcattgaaggatgcggcttccgacggggtgaaagaagaatggtatctgtttaaggacgcttcgcataccacgaaagacagtcacgacctgccaagcggatggaagagcaatatctatctggtagatccttccgacaaggaatggcagcaatatatggcggaacggaatgacgacgtgtatgcgaacttcgccttcgacggctatcagatcgaccagttgggcaagcggggaacgctttacaactacaacggtacaccggtcaacctccgcgaaggatatgcttcttttatcgaagccatgaagcaggcgcatcccgacaagagtctggtgatgaatgccgtaagccgctacggtgcccgtcagatcggagaaaccggtaaagtagatttcttctataatgagatgtgggcggatgaggcggactttacccatctgaaagccgtcctgtatgaaaacggagtgtatggcaataatcagctgaatacggttttcgctgcctatatgaactataataaggcggatcatcggggagagttcaatacagcgggcatcctgctgacggatgcggtgatgttcgctttgggtggctcgcatctcgaactgggtggtgaccatatgctgtgcaaagaatatttcccgaacgacaacctgacgatgagcgaggaactgaaaacggcaatggttcactactacgacttcctcacgtcttatcagaacctgctccgcgatggcggaacggagaacagcatcgctatgaactgtaccaacggagaaatgaaactcaacgtatggcctccaaagttggggtcggtcactacttacgccaagcaggtagacggcaagcaagtagtgcatctgcttaacttctcgcaggcgaacagccttagctggcg

SEQ ID NO: 4808 - DNA, 1808 bp, Unknown
  gut microbiota DNA sequence
ccaaagccagcaacggaatgtggtgctgcaccccgaattcgtagacggcaaatatgcattgtacacccgtccgcaggacggattcatcgatgcaggcagcggaggcggtatttcatgggcattgatagacgatatcactcatgcagtggtcaagaaggaaatcgttatagaacagcgccattatcacacgatcaaagaagtgaaaaacggtgaagggcctcatcccatcaagactcccgaaggatggctacatctggcacacggagtccgtgcctgtgctgccgggctcagatatgtcctatatctgtatatgacgtctttagatgaccccagtaaagtgatagcccagccgggaggttacttcatggcacccgtgggagaagaaagaaccggagatgtatccaacgtgttattctccaacggatggatcgcagatgaagacggaacggtatacatctactatgcttcctccgacacacggatgcacgtagcgacttctacgatcgaacggctaatcgattactgccggcatacaccggaagacagactccgttccacgacttccgtgaaaaacatatacgatatcatagaagccaataagctcgtgatgtcggaaaatgccgttatattatagttccggaagcagtattatcatctgtctctcaggatgttccattctgcatgatggatattaacaactgagttgcagggtattaacagctgacacgtcaagtattaacacctgacgtgtcaggtattaaagcctgagaagtcagataaatagtatcagatagtatcagtatgagttaaaataatatttgtttcttccccacattcgacctacttttgtacctgatagattattaatgtacaaaacctaatcaaaatagcaacatgaaattacacacatccgatcttctgatcatctgcgcctacctcattgccatgattgtcatcggactcatactgaaaaaacgggccgcacaaaatatggactcctatttcctgggaggcaaatcactgcccttctatatgcttggcctgtccaatgcatccgggatgttcgacatcactggtacgatgctaatggtttactgggcatttgcctacggattcaaaagtctctggattccctggctgtggccggtattcaatcagatattcctcatggtttatctgtcggtgtggttgcggcgttccaatgtgctcaccggagccgaatggatcaaaacccgcttcggtaaaggcaagggagcgacactctctcataccatcgttgtcgtatttgcgttattaagcgtactcggatttctaagttacggattcataggaataggcaagttcatggaaatctttattccctgggaagtcatctcaccctacattcctttcactgtttcaccggagtatgttccgcatgtatacggtatcttcttcacagctatcgctaccttctacgtcatgttgggaggaatgctgagcatcgtatggacggatgtcgtgcagttccttatcatgacggtggcaggcatcgttatcgtagtgatcggtatgcagatggtggcgccggatatgatacactcctttgtacctgccggatgggattcccctttcttcggatggacgctcgatattgactggagcagccggatgagtttgctgaccgaacgaatggcgaacgaaccttacagtctgataggcatctttgtcatgatggcgttgctcaaaggcatcttcatgagtatggcagggcctgcgcccaactatgatatgcagaaaattctgtcctgcaagtctcccaaagaagc

SEQ ID NO: 4809 - DNA, 480 bp, Unknown
  gut microbiota DNA sequence
agtgacccgcacagactttgagacgattcttcctcatctgatcacacgatatgttccggcaggacttgcaggattattattggcaggactactggcagctttcatgtcgacctttgcttctaccgtcaatgcagcccctgcatatatcgtaaatgatatttatctgaaatacatcaatccgaaagcaagcgtgaaaactcagatacgcagcagttatgtcatctctgtggcagtagtggtggtgagcactgtcatcggattcttcctgaaagatatcaatgaaatcttccagtggattgtaggtgcactgttcggaggatacatcgcagccaacgtgctgaaatggcattggtggcgtttcaacggtgaaggttatttctggggaatgactgccggagtagtggccgctattgtgatgaaatttaccgttccggatgcatgggtactttatttcttccccgtactgttcggcgtctctct

SEQ ID NO: 4810 - DNA, 1918 bp, Unknown
  gut microbiota DNA sequence
tctgtcagcaatccgcctttatcaagcatttcaacggctgtcttacgatgaagagaagggtaaatacggtccagtccgtgagctaacacgccgactgtaggcaagtcattgtccaatgcactccggtgggcattgatatcaatgccgtaagcaagaccactgacaactaatacgtcaggacacaaagtttttaagtcacggaggaaagtagtacagagttgcgtaccgtaatcagtagcgtggcgggtgcccaccatattaatgatatggagagcgttcaaatcggcatttcccttatagaacagtacaacaggagcgtcttcacactcccgcaagcgggaaggatacgcctcatcatgaaaagtcaggcactggatatgattcttttgcaggaatacaagttcctgttcagcacggacaataattgacggacagtccagtgcacccgacacccgttcatgtactccggataatcgctgcgccagttctttccggaagcggaacacatcggtggcactcttcatgccctctaccagacgtttcgctccaatgtgcccgataccgggcaccattgtcagagcgatgctatatatttgttcttgttcgttatcggtcatttcaggtatggagcaaagacattgtcgaacaattcgctgttacttaaacgtccgtttaccacacataccgtctcaacagtggatttcactactactttctgatcgcttttgcggaagatatcctgatagaatacgtatttgatgccttctttcttcatatacagtttggagacaaactcatccccactcttcaacggagtcttgaaagccatattgatacgtgccactaccggatcgactccctgttcatgcaacgccgcaaaactaacacctaccgaggtcagaaactcgtggcgggtatgctccagataatgctgataattggcattgttgacaatcccctgaaggtcacattcgtaatcacgcaccttcatctccaattcgtagatatactggctcatcgtttatcctcttttctgttctacatcaagtcccttgaatttcttcaattcttcggtagataccaatttatataatttgtcgctgggacgtatcttctctgatttcattgagaaacgctgacctttctttaccgtctctaccggcttcagatcgacacgcgcttcgtccagtgtcataaagactgcgccggtggtaggtcccgttatcagcagcttgtcacctacactgacttcggcagcttctaccaagaactcagagacaccgatattggagaagtatttgatacctttgcccacatagattttacgttccgtagcggccgaaccataattccgtgtccattcgcccaagcgttgtcccagatagtagccatcccaaaagccacggttaaagactgccttcagacgttcatcccaagcggcaatcttttcgtctgtaaacgtatcatccagataggcctttatcgcttctttataacattccaccaccgtacgcacatactcaggaccgcgggcacgtccctcaatcttgaatacacgcacacccgcatccatcatcttattcataaaatgaatggtcttcaagtctttcggtgacatgatatattcattgtcgatatccagttccacatccgtctccttatcgcgaaccgtataagaacgacggcatacctgcatacaggcaccccgattggccgagtgattcatttcgtgcagagacaaatagcacttaccggagactgccatgcacaaggcaccgtgacagaacatttcaatacgaatctgctctccgctcggaccgcagatattctcttcccgaatctgacgataaatctcggccacctgttccagattcaactcacgggccagcactacgacatcggcaaactgggcgtagaa

SEQ ID NO: 4811 - DNA, 2583 bp, Unknown
  gut microbiota DNA sequence
acacgtctgagctatctcacgcaagtcatcaacggtaaacgtattggcagaacgggcacgcatgttaaggttttctataccaaaatagatagaatcggctccagcctgaatggctgccgcaagggattcacgcgaaccgacaggcgccattatttcaaaatcttttatattcattttactatctgataatcatttaaatgtgataggagaatgcaaaggtacgaattaatccgtatccgtgaaacttacctcaacaaatagttctttcagtttttatccgtacctttgcaccgcaaaaagaagtatcgattatgaaaataagccatatagacctgggagaacaccctatactactcgccccgatggaggacgtgacagatcctgctttccgcctgatgtgcaaaaagttcggagctgacatggtatatactgaatttgtatcgagcgatgcactgatacgcgctgtcagcaagactgcacagaaactgagtatcagcgatgaagaacgccctgtagccattcagatttatggtaaagatacggaaacgatggtcgaagctgcgaagatcgtagagcaggcgcagcccgatattctcgacataaacttcggctgccccgtgaagagagtagcaggaaaaggagcaggagcaggaatgctgcagaatattccgaagatgctggaaattacccgtgccgtagtggacgcagtcaaaatacctgtcacagtaaaaacccgtttgggatgggacgccaacaataaaatcattgtagatctggcagaacaactacaggattgcggcattgccgcactgaccattcacggtagaacccgtgcgcagatgtacaccggagaagcagactggacactgatcggagaagtaaagaacaatcaaaggatgcacattcctatcattggcaacggagatgtgacaacgccccaacgctgcaaggagtgttttgaccgctacggagtagatgccgtcatgatcggtcgtgccagcttcggacgtccctggatattcaaggaagtaaagcattatctggaaacaggggaggaattgccgccactcagctttgaatggtgtatggaggtacttcgccaggaagtgattgacagtgtgaatctgcttgatgaacgcaggggcatcttgcacgtgcgccgccacttggctgccagtccgttgttcaaagggattcctaattttaaagagactcgtattgccatgttgcgggcagaaacgaaagaagaattgttccggatattcgaaacaattcctgaaaaagtaaattctcttttagattagttttacttaaacatcggctgcgcaaaccacttcttgaacatccacgtcgccacaacatacaacaagaatgcagagaagaaacctacgatcgcatcgataacgtagtgtgcctgaatatacacggtagccccgcaaagcagcatatagaaagggatcagacaggcaaacaacttcttacttccacgccatgccataatcataagaatggtagaaataccgacatgcgaactggggaaagctgccgtaggacgctctcccacttgctgcgaaccttctaccaaactgtaaaagaagccatgttgatagcccggaccgggaagtaactcctgattgttattgaaataatcgccgatagccgggaaaattcctttagatacattatcaaaacctatagccgggaagtagaactgcggccctgctaccggaacaaagatataaatcaaataatagataaagaaagaagttaccagtacaaacgacatcttctcaaaccattcaaacttatagataaaataaaacaccgtcacaatgagcatcatcggataataaaagaaatatcccatattgaatgcttcactgaccaaaagatgcgggaatgtatgacagaaccagatagcaggttgcccattgaagataaactgctcggttatagcaaacacatggtcgagattcggaaagaaccggttaaactcaaacgtatccggataccagtaggaaagcaggctcatctgaatagcaacacgtacaaacgccgaaaacttgcaaggagccagccgataaagatacatcagcagaaaagtcattgcagcgatcatcgccctatccagcaacatgtgccatggatgatccattcgctgaaacaggaacagaatcaaaatggaggtcaacagattataaatcaatgttatcttctccacagcaaacaaccccttccgggtttccactcgcttaaataagtctaaagccatccttcgtttttataccagtcaatggtttcacggactcccttctccaagtcatattcgggagcataccctaactcattaatggcaggggttatatcacattgccagttacgttgtttcattattttatatttatcagaattcagcgtactgctcttgccggaacgtgttgcaatgaattcagcgagcaaagatataacttttagcacaattaatggacatttcacatgaataacaaacggattacccagttctttttgtattaagtccgaaaatacacgactattatacaccttcccgtcagtcagaaaata

SEQ ID NO: 4812 - DNA, 298 bp, Unknown
  gut microbiota DNA sequence
agagaaataagctgccaaagctttagttttgcctctatatcgaccatcaatcggagatatggccgttaatacattaagttccatacgttttcttagataattatcagactgcaaaattaactctttttcctgagttatagagcaaaaggatagagaaagtttgtataaaagcggtaagaaataaaaaaagtctcacgaattgcttcgtaagacttcctttttggtgtgggcgctgagggattcgaacccccgaccctctgggtgtaaaccagatgctctgaaccagctgagctaagcg

SEQ ID NO: 4813 - DNA, 617 bp, Unknown
  gut microbiota DNA sequence
ccaaaccgtgcgggtacggccacgggactgtcaggcaggcgagaaataaaaataccggctcccggagccggacgtgtttaactgataaaaatacaaaagttatgaaaatcctgaatgaagaacatttcgagaacgtaaagcgctatgccgaatccatcggtgacacctcacttcaaaagtgcttggaacggttgaagagttgggaagggaatcctgattatccctgcgaaatctcactctactatgaccatgccccgtactcgttcggcttcacacagcactatcccgacggaaggacaggtatcgtgggaggtctgctctatcatggaatacctgacaggtcgtttgccgtaacattgcagccgttccacggatggcagatacatacctgaaaaacatgaaacttgacaatgaccgaaaagcagacttcagaacagagaatccgaggtctgctttttcatttcttgctgtaaagatagccgttttccgggctgattgtgcaaggcggcccctttcaggggctgggttggctgaaagaaaatcatcctcgcttcgctgcggtattttctttcgccaagccttgccgcaatccccggaaaacagacaggaaagacatc

SEQ ID NO: 4814 - DNA, 548 bp, Unknown
  gut microbiota DNA sequence
ggcaaccacctgctgaagcaaacctttgggtgcatcctctaatctcacactttttcacttcagattcctttttaatcagctccacttcatgacacttatgtatccagtttattttctcctcctgttccttacgaagttcgatatagaggccatctgttttttcatcccgctgagtcaagcgatcttccagccagtccaccttcttacgtcggttttcttcttccagattacagaccgaagcttcctcttttctgacatccgtcttacgacagaagatatatcgtactatccattcaccgcttccagaccgcccatagcagtaataaaagcaaggattgttgttatttgcatactcttatttacttgtaaataagtcgaaactttaattagctttcgaaaagcttataagaaagaatgaggccgaagccccatccttataatcactctgttgtaatgagctaccttactttcccattatactgtcgagtccgatgcttcatcatcgtcacccgatccaccacctggattcggggtttcacctttacttt

SEQ ID NO: 4815 - DNA, 1917 bp, Unknown
  gut microbiota DNA sequence
gtatctgataatgcatggaagcagctagttcaattaaatgtatttctttcaaaccttaatattgaaggggttgatattcaaatcttgcaaaacttactgcaatcgtccatcgcctatgccaaaagaaaagtggccggacaatttgcgactcctcctcaactagccgatttattaacaaggctaacaatagataagaaaggtggaattaccttcgacccttgctgtggaacgggaactattattaagcaggcttattctcttaaagaagaatatgaaattggtcaagagcaaattattgagagtatctgggcttcggacaaacattcgtttcccatccagctatcaacactgactttatccaatcccggcaatattggaaaaattctgcatatcttcaggtcggatgtaattgagttgcacgcaggacaaactattgtatttaaagatcccaataatggaaatcaagtagaaaagcaactgcctaaggtagattatgtcatatctaatcttccttttataagagagaaagagatcaaaaagctcaatccgaatataaaggaaatcaataaattaatcaaggaacagactaaagcgaaaaagacactaagtaaaaagagtgatatatttgcatatattcctttctacttgtacgacattatctcagacaatggaaaaattggactaatactttctaatgcatggcttggaacagactatggagaaatattcttagagttgattcaaaaatatttcaatattgactgtgttgttatttccggaaaaggacgatggttcaataatgcaaaggttgtcaccacattattaatagcaaccaagagggagatttctgatccggtaaatttagacaggagaatttctttctgtacattaaaagagaaacttgaaaacatagcagatattaagaaattaagtagtgaaatcattcttaataaagagtctgattgggtcaatattcaatcctattcaataaatgaaatcaaacaattggaaaatatcggaattccatggtccggatattttgctaatttgaattggttgcctacgatagccgagaagcttattgactctaaaaagtttttcgattttatacgtggagaaagaagaggttgtaatcgtatgttttatcctgcaaaaggacacggaatagaagatgaatatattgagcctgttctaaaaaacttaaagaaagcaccttcattcattgcaactagtcagacgcaggctttctgttgttcaaaaagtatcgaagaactcgaaactttaaatcataccgggactctgaattggataagatcttttgaaaaccaaatggataaaacaaataagaagctattacctatagctttacgtaaaccaaatatgttttggtatgaaatgagcacaaaaaacatggcagattttgtcgttaatattaatttcgacaaaagtttatttatagccatgcttgataaacgttctttcttcgatcaacggatgattggcttttcaataaaggaacagtacaaagatgaaaacaaaattttcctacttgcattactgaataatattttgagtatgtttttcattgagagtttcggatttggcaggggactgggagcacttgaccttagagaaactaagttcaagaaggctttcaaagttctcaatccggagttactgtctgatgcgcaaaagaaagaaatcatagaagcatttcaacctattttcaatagagacagattacctcttgaaaaggaattagaacaaaaggatagaatcgactttgaactgacattattaagaatctatggattggaaaagtattatgatacaataaagcagactttattgtatctgtataaaataagatttgcagtcaaagagaaaaagcgtaaaaaggtatagaaaaagagggtg

SEQ ID NO: 4816 - DNA, 1402 bp, Unknown
  gut microbiota DNA sequence
tgaatttctttccaaagtatttagcatcacaatagcccagtatacctgcaatatccgaaatgctgtactgctgggaggccagcaatttaagtgctttgtccattttgaatgaattgatatagttttcgggagggttgccggtaatctctcttatcttattataaaaagcagtacggctcatgcctatatcaatgcttaatttatctattgtatatttatcagtagagagatttttttccaggattttattgactttatccataaatttccggtcggcattttctgtttctatttcagcttttgtggggatcatcggagaaatggcatctgacagaaacagtctgatccgttcgcgtaagaccatgcggttttcgacaagcatacgtatgtctgccctaagtttacaaatgctttccgtacgtaatcccagacggtctgccccactccccaaatgtgacaaatagctttcgttatcaaaggctcttaatagaagaatgattggtatgtatcctatcgttttatcttccttaatttgagtgctaagtgtatctccgcttattccattcacattgtcgtcaataatgatagcatcaggattttgactgatagccgtatccatcagcagctccggattatcaagaacagagatctgaaaatagcgtgataaggttttctttaaataatcactaaataacttatctgccattactaataggatatgggaagtttctctcgttttagtattttgtttattgctcttaggattctcgcaggagtcatttgttggcgtcttcgtttttgtagaagaatgtctcaacaccgggcatgactgattcaggcaatggcagtctgtcggaatgacgatttggaaagtagctgctttaccatgtctgcatccggttatttttccgccatgcagacggatgatttttcttaccgtccataaatcactatatccatacacaggaaatataataggaataaaggggaacattttctctgttctttgcccggctatttcattattgctaatctgcaactgccaggaattcattgtgtgggttacgttgatcgatatgcaacagcctgactcggaaatcaaaatcatcttgttgataaggtgctgaagtgctgcagtcattatgttttcgtttatcctgcaactgacgcaatccgaacattcaccaacagtcagctgtatctggcgggaattggcataagcccggcattgattgacaatggaagtaacataagtggaaagttccaaatttaccgttgacgttttaggaggaattctcttagttactttattgagagttgcaatattctggttacaatatatgatacattcggcatatcccagtgcttcttccacttgttgggaaagaggttcagggaggtt

SEQ ID NO: 4817 - DNA, 595 bp, Unknown
  gut microbiota DNA sequence
tttcatgtgctactgttatcgaccgtctggtgcgatatgattcgacccgttatgtgatctgcagaggggtgaaattagtggttcatctcttgcattgtctgaaggaatgggcgacagaactaccacaggacgccccacaactcatgaaagaatctgctgctatgattgataatattctccatggaagtgaattggaggaagtattggagcagacctctgatgaggaaaaacgactatctaactttgtcatagacaaattcgattatctattccggtgtactcggttgttatctttgaaggaacttctgtctgttatatatctacttgatgtttgccgtacagctcaccgggtggcaaaagagaagaacttctgttgtatgccggtaatggtaccgacaatggacttctcggtggagggagtcgttcatccttttgtgaaagatgcgcagccaaacagttggcagatgtcccggggaaatatatgcatttttacaggctctaatatggcgggaaagtcaacaactttaaaggcattgaccttggctgtctggttggcacattgcggtttgcctgttcctgtgaaatcaatgatttg

SEQ ID NO: 4818 - DNA, 12678 bp, Unknown
  gut microbiota DNA sequence
gaatgaagtgatttgatagaactaaacacatatccttgattttccttttctaatttcttcatttttgagagtgaagctatccatgcagcagataagcattgtattccaactttactacaagcggtaatatcagaaaattcatctccaacatataccatttctgctggttggatattatattttgacattagtttcaccattgattccgcttttgtgtttctatctggcgatccgattgaaatactgtcaaaaagagcttccatttcaaaatggcgaagcgtaatatcacaactcctttgacctttacctgttattaaagatacaataattgagttctccttcaactctgttatcaattcccttatcccaacaaatggttgaatgtagactgtgtgcatttctttgtatatcacataaaaatcaatcagagctttttcccaatcttctgaaacgacctctttaatcattccctcttcattaagtccgaatgttttcacaatatcatcttctgacaacatttttgatgcatagggagatactgcctgcttaaaggcttcgatacacattgggattgtatcggcaattgtaccatctaaatcaaaagcgatcaattttatcatagtttctttgtttgattgatttgacgtatcactttacatggatttccaacagctaaactatttgccggaatatcttttgtaacaacactacctgctccaattacactaccgtacccaattgttattccgggaaggattattacacctccaccaatccagcatccatcctcaattgtaataggcaaagcgtaagtgcggcgaactcgttttattccatcttctgtttcaacaggcgctagccgttcatctaaatcaatagggtgagttgctgtataaagctgaacattaggggcaataagaacattactttcgatagtgattttattacaatccacaaaggtacaaccggtatttacagtaacattatcccctatatgtatattgcagccataatcacaaataaatggactggcaaccgaaactttcattccgatactacctagcatcttttttagcaagctgtgtttttcttctttatcctcataaggtaatgaattatatttcatcaataacttatgtgttcgggtctttaaatccaagaaaacttggttatgacaatcataccattcaccagccagacatttttccatttctgttttcataattgttacgtttataagattgaaactatttcggttatatcttttttgtttcttgctgaataacgttgttttgatggttctaaaaagttcataagtaatctaattttgatttgtggcaaagttatacctattttatttcaaatataggtatatgttttcgttatattggtataattctgctttatgtgttatatttggagtatgaaaaaagaaaatttgcatcaaccatttgagatcagctttaacgagcataatgaatcgttattgactgagcatgagcatactttctttgaactggtctatattttaacaggaacaggtattcaatggattaacaataatatgtttccataccatgatggacacttgttcttgataactccaaatgattctcattcctttgagattcatacaactacaaaattcattaacatcaagtttaatgacatctatatacattcagccatatttggttcagagaatatccagagattagaatttattttgcaacatgcaaatcatcaaccgggttgcatccttagaaataaggtggataagttattagtgaaaccaatgattgaagcaattattcgggaatatgtaaataggaatctgtatagtaaagagattatcacgcagttgataaatactataattattgttgtggcaagaaatatagctatgtttttacctcaacaagtcgatgaatgttcagatgataagtctctcgatattcttcaatatatccaagcaaatatctatcaaacaggtaaaattagagcaaaagaaatcagtcagcattttggtatatctgaaagttacttgggacgttatataaaaaagcacaccaacgaaacaatgcagcaatacatattaagctataaactaaaattggtcgaaagcagattgttacatagtcaaatgagaataagtgagattgccgaagaactaggatttaccgatgaaagccatttgagtaaattctttaagaaatacaagggatgtagtccttcaagtttcagaaaaagtaataatatgcttgaaacagatgtttcttgctatctgccaaaaaaagaaatccctgataatgtttgattatcagggattttcttaaattactcttttgattttcagtgatccagctggggctcgaacccaggaccccaacattaaaagtgttgtgctctacctgctgagctactgaatcaatccttatttgcgaatcagttatttcctgattgcgggtgcaaaggtagttacttttatttaatctgcaagtgtttcgtagaaaaaagttccaattatttttcctctttgtcgcttgtttcttgattatcagtagtttctgcttcatcatattttattctttctttgttgataataaagcgttgatagtaggaaagcatcaaagtggtcagaggcaaggcaatgatcatgcccagcattcccattaatgaaccccagatagaaagggataaaaggatgatggcgggattcagtcccgtaatctttcccatgattttggggacgaggaaagtatcctgtataatttggacgatggcgaagactgccagtgcgcatgctataataatccagaaattctctcccgtatcggcagctttaaggatcgccaataagaccgtagggaggaaaccgatgatttgcaggtaaggaaccatattaagcgctccaatgaaaagccctagagcgatagccatcggaaaatcgataataaggaagcctatactgaacagaatccccacacaaaaggcaaccagtgcctgaccacggaaataccgattcatgccgtcctgcacatcatgtacgaggttggatgcgaaggtacgatacttgttgggcagcagatgcagccatccttcggctatgacttcataatccagcaatataaagattacatataataatatgataaaggaggcgagaatgctgaacaggatattgagcgactccgcaagcagggcccacactctgggcaccgtatctttgatggctgcaagaatattctcttcgcttaatatacggttgagcgcctgaagatcaatattctcatgaatgaattcggaaagattcttgggtacattattcccggctccattggtgaggtaggttaccagtaagtcattcatcctgcctatttccgaaaccatgggaggcaccaacagatagaataaggatactccgacaagagtaatcagaaacagggcacagaagatagaaacaatacggctctttaaccgtagcttatactggaaaaacttgactaacggataaaccatgtaggcgatcagccaggctataaagaaaggtaataacactccgctgagccgttccacaagcattagtatccctaccaccagtacacatccgatggaaccacgtataaaactgtcgaatgttatcttttttctttccatatctattttaatatagagtttatatcttctgtccgtcctctccccgtgcacggaggtagcattccctgcaaagcggctcgtattcggctgtctctcctaaaagtacctgcttgtcattcttgacggtacgatgagagaaagatgccagatcaccgcacttcacgcagatagcatgaaccttggagacctcgtcggcaatggcacataattgaggcatcggtccgaagggattccctttgaagtccatatccaatccggcgatgatgacacggatgccgttattggcaagctgtctgcatacgtcaatcagtccgtcatcaaagaactgtgcttcgtcgatgcctactacatctatttcagaagtgaacaacaggatactagccgatgaatcgataggggtggacgcgatggaatgactgtcgtgtgataccacgtcttcttccgaataacgggtgtcgatggccggtttgaatatctctacacgctggcgtgcgaacttggctctcttcatcctacgaatcaattcctccgtctttccggagaacattgaaccgcagattacctctattctacctcttcttctggtctcttgtatgtggtcttctgaaaataataccatgtgatttttgtgctttcttgattaaataaataagtggacaaaggtaaacaattcgatgtacaagaactgttaaattatccattattttaagttattgcataaattattcctacattcgcaccataataacaatggatggaaatgaaacagaagctattaacagatattgagctggatgttcatgagctgaagctactcatgaatacgttttctaaagagccgactcagactttgtctgaactgttgaagcggagcatcctacgtatgcaggagcgtttggaacagttgtcggaagagataagtgctgtgccggtggaagcctcgtcttctcctgtagcggaagcggaaatagaagcccccattgttgaagaacaagcccctgtaatagagaaaatcgaatatccggtgatagaagaaccggttgtggaagagaatgaagcgacgacgccgggagaagatgaacctgtgatagtacaggaactgcagactgctgtggaagaaacagtaatggaggaacctgttgtcgaagacgaaatggaagagaaagaagcggaagatgagtcggaagacgacgaatcgcttctgatagaggagccgaaagctgccgtattgggcgaaagcataaagatggctgccggattacgtcattccatcagcctgaatgattctttccgtttctcacgtgagatattcggcggagaccccgaactgatgaatcgtgttatcgagcagatatcagtcatgagttcttataagactgccgtggcatttcttgcctcgaaagtcagcgtaaacgaagagaatgaggcgatggccgactttctggagttgctaaaaaagtattttaatcaatcagcataaaagtttatgggaaagttatatgtagtacctacgccggtaggaaatctggaggacatgacctttcgggcaatcaaggtgctgaaagaggtcgatctgattttggcagaggacacacgtacttccggtattttgctgaagcactttgaaataaaaaatgcaatgcaatctcaccacaaatttaatgaacataaaacggtggaaagtgttgttaatagaataaaggcaggtgaaactgtggcattgatttcggatgccggaacacccgggatttccgatccgggatttttggtagtccgcgaatgtgtgcgcaacggtatcgaagtgcaatgtttgccgggagcgacagcttttgttccggcattggtagcatcgggactgccgaatgaaaagttctgtttcgaagggttcctccctcagaagaaaggacgacagacacgactgaaggcattggcagaagaacatcgtactatggtgttttatgaatcgcctcaccgcttgttgaaaacgttgacacagtttgccgaatatttcggcactgaacgtcaggcaaccgtgtctcgcgaaatatccaaactccacgaagaaactgttcggggaagtttggcggaattgatagaacactttaccgctaccgagccccggggcgagattgtgatagtattagcaggaatagacgattaaaataacttcatttaaaaacgtaaaacgtaaacgtatgaaaaagttagcagttttatttatgtgcgcagccatgttggcttcgtgtgactttaaaggtggaagcaaagaccttaaggctgaaaatgactctcttttaatggaattgacacagcgtaacgctgaattggatgatatgatgggaactttcaatgaagtgcaggaaggattccgtaagatcaatgctgccgaaagccgtgtggacttgcaacgtggtactattaccgaaaattcagccagtgccaagcaacagattgcttctgacattgaattcatctccaagcaaatggaagaaaacaaagctcagattgcaaaactggaagctcagctgaaaaacagcaagtacaactctactcagatgaagaaagctgtagaagctctgactgctgaattgaaagctaaacaacaacgtatcgaagaacttcagactgaactggcatctaagaacattcgtatccaggaactggatgcagctgtcagcgacctgtctgctgccaaagaatctttggctgccgagaacgaagcgaaagctaaaaccgttgccgaacaggataagagtctgaatgccgcatggttcgtattcggaacaaaatcagagttgaaagcccagaagattcttcagagcggtgacgtgctgaagagcgctgatttcaacaaggattattttactcagatcgatatccgtacaacaaaagaaatcaagttgtactccaaacgtgctgagttgttgactactcatccgacaggttcttatgaactggtgaaagatgacaaaggtcagctgactttgaaaattactaatcctgccgaattctggagcgtatccagatacttggttattcaggtaaaataaggtagacatacctggttagaattgccaatgtgctgattcctgaattcaagaaattagcacattggcttttttatttctcatattatatatatcacggagccaatgaaatataaaaatctcttttttgacctggatgacaccatctgggctttctcacgaaatgcacgcgacacctttgaagaagtatatcagaaatattcatttgaccgctattttgactcgttcgatcattattacacactgtatcaacgacgcaataccgaactctggcttgaatatggagagggaaaggtgacgaaggaggaactgaaccgccagcgtttcttttatcccttacaggcagtaggagtggaggatgaggctttggctgagcgtttctcggaagatttctttgccattattcctaccaaaagcggtctgatgccccatgccaaagaagtgttggagtatcttgcgccgcaatataatttgtatatcctttccaatggtttccgggagctgcagtcgcgtaagatgcgttcggcaggagtagatcgttattttaagaagatcattctttcggaggaccttggcgtattaaagccttggcccgaaatctttcattttgctttatctgccacccagtccgagttacgcgaatcgttaatgatcggtgacagttgggaagccgatattaccggagcgcatggggtagggatgcatcaggctttctatgatgtgacggaacgaaccgcttttccttttcagcctacctatcatatccattcactgaaagaattaatgaatttattgtaggttttatggattaagtcgtatttttgttgcatctaataaatgtataaaatacgataacatcatggatagtacgcttctgccatttgccttactttgttttacttcgttctttacgctgaccaatcctttggggacaatgccggtctttctgaccatgacacacggaatgacagataaggagcgacagactattgtgcgccgtgccaccatcgtgtcgtttataacgttgatggtgtttgtctttgccgggcagttccttttcaaattcttcggtatctctaccaatggtttccgtattgccggtggagtaattatctttaagattggttttgatatgcttcaggcacggtatactccgatgaaacttaaagacgaagagattaaaacctatgccgatgacatctccattactcctcttggaattccgatgttgtgtggtcccggggctatcgctaacgccatcgttttgatgcaggactctcatacttacgccatgaaaggtatattgatcggaacaatcgctttgatttatctgttgacgttcttcattctccgtgcttccacccgactggtgaaagtactgggagagaccggaaataatgtgatgatgcgtttgatgggattgattctgatggtgattgcagtggaatgctttgtgagtggagcgaagccgatattggcggatattgtgagagaagggctgagcggtatctgcaagtagaagtctgtattgtggggaggaacggataagattacactcatgtgtaaattcggaaatggaaaataaaaagcgagcccgtttaactgcttaaagttaaacgggctcgttattaaaatggtttcagtgtattagtagccttcgttttgtttcagcttaccgttagatacattgatctcggaaaccggaataggcattacggtacgatagtcgtcatagttgatcggaccggccggaacctgggcattcgttactgcctttttgtttctccatgtatcccaggcgttatgaccttcaccataaagttccagtctgcgttctgtcagaatatcatcgatagtaacagaagcaacgtcttcatagccggctattctttgcttacgcaagtcattgatatagctggcaggatcagcaccacctgcttttaatgcagcttctgcggcgatcagatatacttcggacaggcggattactttcggattatttacatatatttctccgtcgcgtcccggatacttctggatataccagccttcgttatctccaccgtcgctttcttcagcaatcagagtactgcgaacatcttccggacgttcttgaaggaaagttttgaatccctcggtgataccggcttcagcataaccttcggcatgtgtgtagaatccgagagagttacgttgtgcattgtagagtgaggtaatcaggaactcgaaaatgctttcactgcttccaactttggtccatactgtttcgtattcatctctggtgtacagcttgtatggagatttttcgattacatatttggcgtcctcaagtgctttactgttctcattcatgtagagatatgcacgggctctcagtgcacgggctccccaatagtcgatatgaccggcagttactaccttgctggtttctgggagattatccaatgcagtcttcaagtcatccagtatggtttcgtaagttttcgcaatagtagctctttctgctgtatatccggattcgaaaacttctgtagacaatacgatacccggatcgctggcctgtgcattacaaggaagtttagcgaacaagcgggccaagtcaaagtggaaaagtgcccgcaaagcatacaattcgcctacctgaacatcaacttcagctccttccagaccggatttcttaactccctccaaaactttgtttattcttgccagagaaagataaaagcgtttgtagaaatagtatgaatcagaactgttcttagtagcctggtaggcatatacatcaactgtttgcttattgctaccgatggctttgaagtcgctgcctctttggtcggcgtacaagaagaaatcacctgcgtagctgccacgtggattagttcccgcgtctatagaagaagtctgagactcataaacaccgttaactgcaaactgtaaatcttcaagagtcttaatagcaccttctgaaggccattcactggaaggcactttgtcgaaagtatcgcatgaggatactgccaacgtcagtaatagaatgggtaaatatatttttttcattattcagtctgtttatagattataatttgatattaatgccgaatacacagcttctcaatgccggtgtatctgcctgacgataaccattgatcgctacatccgggtcaatgtttttagtcttcgaccacaacatagctagattgtttgctctgaagtagatgcggaagttggaaatgtgcttcttcaataccggcagagtatatcctactgtcatttctctcagacgaatattgtcagtcgatttgattgtgcggcttgagaatctgtcccaacgataagggttagcgtagataggcatcgggttgtctactttatcacccggatttttccagtagtttccggctacatcttctgacaggttcatggaaccgattcttacgccatcatgatgagagaaatatcccggataatcgaacatgtcaccaccaaactgataagtgatcaggaatgacaggtcaaagtctttgtatgtgaaagtgttgctgaatccaccgataacatcaggcaatgcttttcctacaattcccttacctgcttcggagtagtcatttaccactccctttgagtgatcttcaggatctaaccagaattctcccaaacctgtttcaggatttacacctttccattcgggcagatagaatgtatacattgactctccctcacggtgcagatacatttctccgtctccatactggatatcttttccttcaggaagtttgtctaccaatgcacgttggtaagtcaggttgaagtttgaagtccatgtaaagttcttgttgctgatatttttagaattgagttccaattcgaaaccgtcgttcttcaatgcacccagattttcccaacgggagtcaaagccggtgattaatgaagtaggtacttcgaacagcaaatccgtagtcttcttattgtaatattccagagacagatttacgcggtcgtacatattccattcaattcccatattgaagttcttggatttttcccagcttaatttgtcgtttgccattcttgaccagtaaatagcaggagcacttccgtatccggaacctgtatacaggtccatgtaaccatagtaatctgagggcaagttaccgtttgtaccataagatgctttgatcttgaagtcggtaaataacggcatatcttgcataaatccttctttactcattctccatgcaccggatacagaccagaaactagcccaacgattgtcttcactcaaacgtgacgaaccatcacgacggaaactggcagaaagataatacttgttatcatagttataattgccacttgcgaaatatgacatcatgccggctcccaaggttgaacttgcagcctggtccggttgtccgttggccaattcgggatagtggcttgaataacgtttggcaacagttacaatctgcagcaggtctctgttttcaacttcgaaaccggccatcaagttcagattgtgcatatctttaaaagtatccgtgtagtttaatgtagaagagctggtagctacgcggctttcgaaggtataacgagaacccattccgctgacggaaccaccgttaacactgttgcgatcccaatattcaaagtgcttgttgtctacatagtcataaccaaagatagagttaagtgataacttatcacagaatttgattgttacatctgcattggtcatgctacggaacattttggtctgaatccactccagagctgtatcgctgtctttaccacctagcatcagatgcgggttggtaactttaccccatgctgcatttttattatatgaaccatcttcattctttaccggagcagtcgggtccattgcgaataaaatacctatcggagaagaagtacccattccttgagcctggtctccctgatcgcggaaaccatcttgcgatgtagcggctatcatttgcttgagagctacgttcagccagttatttactttgtgattaacgttcagacgaccggagatacgttcgaagtcactaccaagaacgataccctcgctcttattgtagccaactccggcatagaactgagtctttgacgaaccgccgttgatagatacctggtgatcttgagtgaaagcagtacgatagatttctttcttccagttcgtatttactttaccggatgggtcatggataaagtcagcaacagtagccggtgagtcgagcagaggaatgaacatatcacctccgttatctatgttgttcaatgctgcttgtttgctatctgttattccgtaagtaaccagacagttggctaatgattcgcgagtgtagtcaatcaagtcggctgatcccatcatattgaaagcatttacagccatcttgttccagcctacttcacctgaatagctgacattcgtttttccttctttacctttctttgtggtaatgatgataacaccgtttgcggcacgtgaaccgtacaatgaagcagcagcggcatctttcagaacagtcatgctctcaatgtcttcaggattcagtgtactcaatacgctttgagtcttaccgtagtagttcatgtcgtcatcagcttttgttacaacaccgtcaataacatacaacgggcttttagaagcactgatagaaccgacaccgcgaatgttgatttcggccatagatcctgggtcaccagttgctgaggctgtgcgcacacctgccattttaccggacaatgccttgtcaaaagattctttggaaccggaaacgattttatctgccttaatgacagcagctgatcctgtgaatgaagacttcttcgcagtaccataagccacaacaataacctcatcaagattttgtgcatctgatttcagtgtaactttcaccattggcttgattgccacttcttgtgtttgcataccaatatacgaaatctgcaaagtctttgcagaactaat

SEQ ID NO: 4819 - DNA, 19964 bp, Unknown
  gut microbiota DNA sequence
attattataataatgagaaatataaacctaatcgtcatatatgttattgtatccatatataaacgtgataatcaattatttatcagcattataactacccttttctttaacgaatgataccctgtttctatccatttcaatcatttagttcattcattataagaaagttatgtctttattttatttatatgaggtattattattggatactatttttatatttcccgaatatttctcaccaccaatcataatgaatgattacttttggggcgtgatagtagaaaaagatcaaatctgaagaaaagcatatttagttatggtataattcaaaatatgcagaacctgcttgggaaaatgacaaaaatcggcaggattttaaaacagcagatctacggatgaaatacatctgtccgttttttgtttccttgtgctatatgattacttatatcagcttgcacctttgaatataaaagaaatatttagtttcgatatgatatatttccctgtgacaggaaagtctatcagttagaacagaattagaaattaaaactacttttggcttttccttttaaagcaattagatgttcctcggtgagtaacgatctgttccttttaaaggaacggatcgttcctttaaaaggaaagagtcctgacattgcactttttatgtatattacagtcatttatatgcgacaaatcatttgtaaattgcatattcttacattgatttatgcattatttctgccatattgttagattttgaatcaactctgttgaaaccaatcttaaaaacaggacatttccagacaatcactgcctagctttttggtctattagctaattttgaataggctgctttctcaaggtcatgcacaatagtcatgtccatgatatttgcatatacctgagttgtcttcacacttttgtgtcccagcagcttttgtacagtcgttatatttgcaccactatatatcaataaggtggcgtttgtatgtcgggctgtatggaatgatatccgtttgtctatttctgccagcttggctaatgcattcaagtctttattcacattagagttatctttcagcttgaagaatccgtttaaatcgtctttgtagttctccaacacccgcagtcctttaccttcaaataataaatataaaggaaggcgcacatcaatacctgttttaacagatttgtaaatcagccacgtctcctgatggagttcgacaatattcgcggcagtcagatttataaaatcagagtaccgcaaaccggcgtaacaacaaaataaaaaggcatcttttgacttttgtaacttcgtaaacttcccttccagattcacctcctccattttattcagctcttccggcgacaagtgcgtatgacttccttctatgcttttgattttatattttctgaaagcatacttctgaatatccatatactctttatttatagctacattcacatatcgttttaaatgcttcatatgcttggcaatggtattgagatgataccccttggactgcagataattatcaaatgaagacacaaattcgaatgtcaaatcagtgaatacaatgtcctttttatactcttgcagcaattctaaagtggaaagatgattctgcctggtgctctcttttaaagaagagttgctgacttcctctttaaaaaaggtcagaaatgaattcccattattttccggtttttcaatagagtctttcaacgaatccaaggatatcgatcttctctgttgccataatcccagttctttctgctcaatgtcagctataaaatcatatagcattcgatttaatgcatctgaattaggatggttctttaccattctacgttttacgtcccactggtctggtttgaggtacaccctggttgagaagtacatttttctcctgtttaagtaagcttctacttgtaccaatgccattccttttttgttcagcttcttttttctgttaaacacaaggctgtaactaatcttcttcattctattgtcttttagttaatactaagaacaaaataaactaagttctgtgctataattaaggttgaacctgcattaatttctgcaaaaattaaaattcaataattaagtatttacataactttaatttaaatgctatttttttatcgtcatttcttcataataaatcaaaaagaaacgtttgcagggtagttttatatccaaaaacaagcaaatagaatgttaattactacactttgcattcacaaagtgacatttcatgcttgataaatcacaatatttatagtaaataaagatgtttatcagcatattttcgatgttataaataacaatatgttatatatacaacctttttttatcaaattaattgttagtttcatatttattaataattttgcaacttgttagagtatagagacaattaatgtaaagttgaactttaagagagaatttatgaaaagaaaattaatgctgttattggcatgcctttttgtgggcataagcctagtaactgctcagactcagaaagtcacaggcgttgtgatttctgaagaagatgggcaaccagttgttggagcctctgtgttggtaaaaggtactactcaaggtacaatcacagacatcgatggtaattttaatttggcgaacgtaccaagttctgcaaagactttgcaaatttcgtacatcggtatgcaaactcaagaagtagcgattaagcctaatttaaaggtagtacttaggtcggatgctcaacagatcgatgaagttgttgttacagcaatgggtattaaaagatctgaaaaagcattaggttatgctgcgacttcagtgggtggagaaaaaattgcggaaagccgtacatctgatgtgatgtcaagcttggcaggtaaaattgcaggtgtacagatttccagcacttcatctgaccccggagcctctaattcggtcattatccgtggagttagctcactctccggtaccaaccaaccactatatgtcgtggatggagtacctttgaataactctaccgtatactctacagatggcttgaatagcggatatgattttggaaacggtgccaacgctatcaatccggatgatgtggcaaacatgactattttgaaaggtgctgcggccactgctttgtatggtagccgtgctgccaacggtgtagtcatgattactaccaaaagcggccggaaagaaaaaggagttggaatcgagtataacggtggagttcagtggtcaactgttctgcgtctgccggaatttcaaaatgaatttggtatgggatggaacggcaaccatacagaattggagaacggttcctggggacctcgtttcgatggttccatgcagttgtggggtaatgtgtacaacaactctcagaaactgaaaccttatgtggcaatgcctgataacatcaaagacttttttgatgcgggattcagatatagcaacagcctttcattcaatggagctacagataaaagtgattattatgtatcattctctcagatcagcgatgatggtatgatcccgacagatgctgacagctacgataaatatactttttctgcacgcggcagccataaggcaggagcgttgacattctcttcttcactgaattacgcttatcaaaagaataactttgctactacgggacaaggtttgtctatgctaaactctttatatcagacaccaagagatatcagcataataggactggaagaccagaatgatccgttcaacactccgggatattattataccccctacggagttatgaacccttattatattttgaataactatttgaatgaatatgaatctgaaagattctacggaaaatttcaattggattatgaattcctgaaatacttcaagtttacgtaccgtatgggcttggatactacaacaggacaaagtgacaaaggaaaaccgaatctgtacgctctttattatgaaggtactcctaatggagaaggtcagggctccagcagtcctttctctggtgaaaccggacaatattccgagcagataacccgtcgtcgcgagataaaccaggatattatggttaatttcaatatgccggttaacgattttaatatcaatgcactggtcggtttcaatggcaatgaacgtaaagtctcttatcaatattcagaagttaatgatttaacgattcctacatggtttaatctgaagaactccggcaaaactcctatagtagaacagcacatggaactcagacgtctgatgggtgttttcggacagtttgaaggttcatggaagaatatgctctatttaacggttactgcccgtaatgactggtcttctactcttccgaaagaaaatcgcagtttcttctatcctggtattaccggtagttttattttcagcgaattattgaatgacaatctgcaagatgtgataacttttggtaagatacgcgccagctggggtaaaacaggtaacgatgctgatgtgtatatggttaatcctgtgtatgcccaatcttccaatagaatacctttcggttctctgactttccctctaggaggtgtcaacgcttactctgcaggaaatgtactcggaagtaatacattaagtccggaaatgaccacagaatctgaagtcggtttaaatatggctttcttcaaaaaccgcctctcttttgacgtatcttattataataggaataccgataagcagattttctctttggctatggaccctgcttcaggctatacagcacagaatatgaacctgggtaagattcgtaaccgtggtatagaactcctgatcagcggcactccgataagaacaaaagatttcagttgggaactgacatggaacttcacaaagaactggagtaaggtgatcagtttaccggaagaattgggtggcattacaacgatttatggtctcaatggaggtaccagtatgtacgctataacaggcatgcctgttggtgttttcaaggctcaggtagccgaacgtgatccgcaaggacgtattgtagtaaattcatcaacaggtcttccggttgaagccagcgaattcggaatctgcggagatatgaataacaaatatcaaatgggtgtttctactaacttgaaatataaaggtataagcttaggcattgattttgatatccgtcagggcggagtgatgtattcacgtactaaagatataaactattttaccggtaacgcgatacagactgcctacaatgaccgtaatcctttgattgttcctaactcagtaaataaaatagtgaatggagaaaacgttacttatgtagaaaatacaactcctattacaagctctaacatttataaatactggggcgacggtggctctgatatgggaagctgcttcctggtagacaaatcatacgtcaagcttcgttctgttgtattaggttgggacctgcccaaaagatggttggcaaaaactcctttccaggcagtaaaagtgtctgcatatggcaataacttatttgtctggactccatccagcaatacatttattgatcccgaaatgacttcatttggtaacgaccttgaaggtaactatggagaatacacggctaatcccagctcacgtcgtttcggtttcaacttaatggttaaattttaaacaggaataaaaatgaaaaaaatattattatatgcatcattagcaacaacagcattgtttgcaggttgcgacctgaacatcaatgacgacccgaactacccgatgaatgatcaggtgacggcggatttgatattcccctctatcagtgcttccattgcttcggcggtaggcggagaaatttataattacgctggctttttcgctcagtactatgaacagaaaccggagtcgaatcagtataacactctatgtgaatatacatttaccgaatcttcccaacaaatggattattcttatagaatcctgtttgcaggagctttggaagatgcaaagcaggtgctggaaaagaccacaaaccctgccgaccgattcgccactaccatactgagagcatatgcctttcagataatggtagataataccagtgactcaccttattcggaagctctgcaaggtaatgccaatgccacacctaagtgggatacgggtgaaacagtatataaaggtatattaggtgagatagatgcggcagaagctgctttggatggaagtggtatggatgtgccggatttgatattcaacaaaaatatcgctcaatggaaaggttttgccaatgctcttcgcctccgtatgtatctgcgtttcattgatgccaacatagatgcggcttcgtatacagagaaagtgaagaccttagtacaaaacaacgaattctttaccggtgacgtgaaattggattgtttcttggatgaaacagacaaacggaatccatggtataatacgaatgcggtcggcttgaccggtaatcattgtgctgcctatccgttagtatcttatttaagcagcacgggagaccctcgaatcgcttatggtattagtaaaacagatgcggatggaaagtatgtcggtcaacttcccggaggaaaaacacatatgcaaagcattctgggtactgacaactggaaaaacaaaaacgtaagtgcgattgattactctatcggagccacaaaacctgtctatttctttactcaggctgaattacaattcctgatagctgaggtatatgctcgttttcacaatgatgatgcgaatgcaaagagtgcttatgaagcaggtgtaactgcagactttgccgttcgtggatttgcaggtcaagagaataccattttggaaggagcgtgtgcatggtctgctgcttctacacaggcagacaagttaaacttgatttatatgcagaaatgggtatctcttttctatatgaatcatatggaagcatggagtgagattcgtcgtacggattgtccgaaactgtcttcttattcagcagcacagatacaggctaatgagtcagtatacactccgggagagttagttgccccatggactaatggtctggaagcgggtggactgatgaaacgtatgacttatccattaagcgcacgtcagcaaaatgtgaatactcctgcaggggtaccgggaagtactccggtttggtgggatatcaaatagtaaccaataacttagtaagttttacgtatgaaaaatataatatacagcatattagtatgtttgccgtttgtctttggagcttgcgacaaatcaacagatgacacttctaaagtcacctattttgttacgttggaaagagagggtgatgaaaagatcgttttagaaaaagggcaaccctttgtggagccgggatattatgcggaaatgaacggagaagatattactgaatctgttcagataaaaggtagtgttgatgtcaacactccgggaatctacaatttagtatatgcggcatacaacgaggacggttttgccaaaacatttacacgaacagtatatgtggcagataatactgcttctcctttgaaatccggaatttataccgtagccgaaggaagcaaacgtaccgccccttctgtggtagctttcagtggatatgagattgtgattttccagatggaaccggggattttttatatcagcgatttcttaggaggctggtatgaccagcgtgctggctatggaccggactatgcaatggttggcaaattcgaattgaatgatgataataccattactcctctggaaagttatgttgcaggttggggagattccatggatcaaatgactaatacattattggaccctgcgactgggactctgaaatggactgttgcttatgccggtcagctatcttttgacattatagtaaaacaataaaaatacgattatgaagaaatatatgatattacttttagcttcactggcttttacattcgtggcatgcgacaacgatacagaaccaggtggtactgctgttgaaaaaatggcaggagactggtgggtgacagtgaatgcatttattgacgggaaagaagtagaagatcctttcggagcaggacatctgcaaatgagtacttacaatacagccagcaacagtgaaactgaaatgtggttggatgatttaggaaacttctgggaatataaactgaaagtaaacgtgaattatgcagcgaggactttctcgacaacaggctttgtggataatgtaacatatgaatccaaagtgaaaataactgatggcaaggtactggaaaaagctgccacaactcctagtggtatgcctgctgacagtatcgtatatatggtacaattcgacgacgatgaagatggattaacttataaagtttcaggcttccgtcgaacaggtttccctgctgacgatttttaacagaagagtttaaatatagagagggctgttccaatgatcggagcagcctttttttgcaatctaacctcaactaagacagatcaatatataagcagtctccaatatttacaatatttccttgcctttaaaagaaaaatgaatgggacaatgtttttaattagcaacatccattacctgattaattgtatacaaataaaagcgcctcttatagcatgatactattttttgtttataatagctccttgttttatagatataatattgattataagataaatagttttcatttcggtagagaagtggtattacataaaagagagtaaaacattagctgaattagggtaattaactgtcaaatagatatataagctatttctgcttgataaaatatcgactggtgttactgatttatcccctatatacctaactgattatcagttatatataaatccattagttctgcaaagactttgcagatttcgtatattggtatgcaaacacaagaagtcgtaatcaaacctactttgaaagttttgttaaagtctgattctcagaatcttgaagaggtagtggtaacagctatgggtattaagcgatctgaaaaatctttaggttatgcagtatccagtgtaaaaggagatgagataactaaagcgcgtgaaagtaatgtgcttaattcattgtccggtaagattgcaggtttgcaaattgcacagtcgtctggaacggtaggtggtagttcaagtatacagattcgtggtgcttcctctattggcacagtttcttcccctttatttattattgacggacttcctattgacaatggttcttacaatcctgacagaaccaatggtatagtcgatgtaggtaaccgtgcaggagatatcaactctgacgatattgaatctattaacgtattgaagggtgcagctgcaactgcattgtatggagcacgtgcaaaagacggtgcaattgttattactactaagaaagggaagaagaattcaccggtatttgttacggtaaactcttcaacacgatttgagaatgtacttaaattgcctgatttccagaatgagtatgcacaaggtagctacggagtatataatgtaaaaatgctgaatggatggggaccgaagatttcatcggtacaagatcagcaatttacagattataaaggagataaagtgaccttgaaagcaaatcctgataatgtgaaggatttctatgaaaccggaatgagctatattaataatgtgtcagtagccggaggtggtgaaaaggctgatttccgtttgagctttacttctactaatcagaccggtgttgtgccaggttctgactataacaaatatgcattctctgtgaatgcaggtatgaactttactagcaacttcacaggacgcatctctgcccaatatatacgttcagattctgaaggtcgtccggcacagggggcaaatgatagcaacttgctgattcctttaatcaatggattgccaagaacgattgatattcatgatattaagcagaactggattgatgaaaatggcaaacaggttacgttggatccggaaggcaaaagtaataatccgtactggattattaataagaataaatttaccaataatctggatcgtatgatcggtaatatcacattgacttataagccgattgaaggattgactatcactaacaatgccggaactgacttctatacagaaggaagacgtaaactttacgcaaagggtactgtaggagccttaaatggtaagtttcagacttggaatttgtataaaagaattataaataatgacttaatggtttcctatgagaagacttttgccaatgattatcattttaaggcgatggtaggtcataatctctatcaggaagaatggaagaatgaaaatgtacaagctcagaacctggtagttgacggattgtatacatatactaatgcgaaatctactactccggtgaattattatgaaaagaaacgtcttgtcggtttatacggagatattagcttgggatacaaagatatgctttttattaatgtaacaggacgtaatgactggtcgtctactctgcctattaataaccgttcttatttctatccatctatcagcggtagctttattttcacagaattgatggagaataaagacatcctgaattacggtaagattcgtttaagttatgcgaatgtgggtagtgacgaagatccgtacaatttggcatttaaatatactccagctagtacttactttttgcaatatctgggtaatgtcaatactttcccacacatgggactggttggttttaccgggcctcgtgttctgccgaatgaaaacttgaaacctcagaaccaaagttcattcgaagtcggagctgatttacgtttttttggtggaaagattcgtttggatatgacttattatagcaatatcacaaagaatcagattgtaagtattgatgtcccgttatcaacaggttactttgctaataatatcaatgccggaaagattgccaataagggtgtcgaagtaactttgggcttgactcctgtagaaacacgtaactttaaatgggacttggatgcaacgtttgcttctaataagcagactgtagaagagttggctgaaggacttgatgaatatacattgactagcggattgagtggtttgcagattaaggctgccaaaggtgattcgttcggtttgtacggtactgcctggaagcgtgatgatcaaggtaattatgtaatcaactctaagacaggtttgagagaaacagtcaataacgtacgtttgggagacgtttatcctgactttacaatgggtatcaacaatacacttacttataaagggctgacttttagtttcttgattgatatccgtcatggaggttccttatattcggaaacagtagctaatttgagaagcagtggtttggctgcagaaacagtggctcaccgtgaagatgcctcttttattgaaccgggtgttattcttcaggatgacggaacttacagacctaatgatgttccggtgaagagtatgcaggactactggcagcatgtggcgaactccagtaataatgaaggaaatatctataatgcatcatttgtgaaacttagagaagtgcaattgtcctatagttttccgcgtaaatggtttaagagtttctttgttaaatcattggatttaggcttcgaggcacgtaacttatggatcatcaaagatcatgtgccgcatattgatccggaagctaacttcttcggtccttctcagatcggaggcggtgtagagtttaacagtatcccttctaccagaagtttcggatttaatctcagactaacattgtaagaattaaacgaacatgattatgaaaaagaaaatattagcatatgcattgagcgctttgacatgtgggttatttacttcatgcagcgactggcttgatatcaaccatgaccccaatactgccgagaaagttgatcccggatatttgtttaactatgtagccgtaaactgggccggaacacgtaccggtggtgacttctatattccgttatcaatgagttcacagtgtcaggttgatggtggacttgattatggtggctgggatgaatcggtatataccatttccccttatagtacaggaaatacgtggaaacattactactctgtcggtggtaataacttgatgctggctattaaaaatgcggaagaagcagatccggtgaatcacaatgctattgcacagtgtaagattctgttggctgaacatatgtatgaagcgacgatgctatggggggatatccctttcactgaatcttggaacggaacaattaagtatccgaaatttgattctcaggaaagtgtattgaatggggtgttgtcattgcttgatgaagcactgcagatcatggatttgaatgatgccaatgcgattgatgaatacgatatctattataaaggtgatatgaataaatggatgactttggccaaatctttaaagttcagaacactgatggttatggtggacaaagatccttctaaagctactgccattggtacgttgttacaggctggaggcatggtatcatcagcatcagataatttggtgttcccttattctgcagaaccgggtaaccagaatcctaagtatgaacttatagaattggttggcggtacacagatattgttttttgccagcaactatatgctgaagccgatgcaggaacgtaatgacccccgtattccttgttattttgaaccgggtgccgacggtgtatatagaggcttaggtaaccgtgaacctgctgttactgatgacaaagataatatgttatcatctgttgtgagcagttatcttttcagaaaagatgcaccggagttaatatactcttgccaggagcagttgcttctggaagcggaagcttatgcgcgcggtttgggagttgctcagaatttgtcgaaggctaatgaattgtataagaaaggcattcgggaagcatgtgcattttatggagtagcggaagcggatattgatacatatgttacaggtttgccggaattgacagcgctgactcaggagaaagcactgtatgagattcatatgcagcagtggattgatttaatggatcgtccgtttgaggagtttgtacagtggagacgttctggtactgctggaaatgaagtcccgaccttacaagtgccggaagatgcaacttcaaaagaactgatcagaagatgggagtatagcccggaagagatgactgctaatatcaatgcaccgaaagaatctccgaaaatttgggaaaagttatggtttgatttataattgaattattataaatggttacgaaaaagaggacaatacaacattgtcctctttttttttgttatatttgcgaccatatttagatttatatagtagaagttaaagaatgaaagaatttataatatccgaagccaaagtagaaaccgcagtacttgtcggactcattacccagatgcaggatgagcggaaaacgaacgagtatctggatgaattggctttccttgctgagacggctggggcggaggtagtgaaacgatttacacagaaattgccgacagccaattcggttacttatgtcggaaaaggaaaactggaagagatcagacaatatatacggacagaagaggaagaagaacgtgaagtgggaatggtcatctttgacgatgaactttccgcgaaacaaatacgtaacattgaagccgaactgaaagtaaagatactagaccgtacttcattgatcctcgatatatttgcgatgcgtgcacagactgccaatgcgaaaacgcaggtagaactggctcagtacaaatacatgttaccacgtttgcaacgactctggactcacctggaacgtcagggtggtggctccggtagcggaagcggtaaaggaggttctgtgggacttcgcggaccgggtgaaacgcagctcgaaatggaccgccgtatcatcctcaaccgtatgtcactgttgaaagaacgtctggcggaaatagacaaacagaaagccacacagcgcaagaaccgcggacgcatgatccgtgttgcattggtcggctatacaaatgttggaaaatcgaccatcatgaacttgctggcaaagagcgaagtgtttgccgaaaacaagctgttcgctacgcttgatacaacggtacgcaaagtgatcatcgataacctgccgtttcttctgtcggacacagtcggatttatccgtaagttgcccactgacctggtagactcattcaaatcgactttggatgaggtacgtgaagccgatttactggtgcatgtagtagacatctctcaccccggattcgaagaacagatcgaagtggtgaacaggacacttgccgacattggcggcggtggcaaacccatgatacttatattcaataaaatagacgcctacacctacgtggagaaggcgccggacgaccttaccccccgaacaaaggaaaacttaacactcgaagaactgatgaagacgtggatggcaaagatggaggacaactgcctctttatttccgcccgcgaacgaatcaatatagacgaactgaaagatgtagtttatcagcgagtgaaagaattgcatgttcaaaagtacccctataacgattttctttatcagacttacgaagaggaagaataataatcaatgtaccgcttactgattgggggaggcggtacatatctatttttatctatatgaaagactatcgtaaattgactgaggacgaagtgcttcagttgaagagccagtcgtgtctggctgatgattggggaaatgttttggttgccgaggggtttaactgtgagtatgttcaccatacccgcttttcgggtgaagtgaaattaggcgtatttgatgccgaatttacactgcccggagggatcagaaaacattcgggactccgtcatgtaactctgcacaatgtggtagtaggggataactgctgcattgaaaacattcaaaactacattgctaattatgaaatcggaaatgataccttcattgaaaatgtggatatcattttggtagacgggctaagcacctttggtaatggggtggaagcgacagtgctcaatgaaacgggcggacgtgaagtgctgatcaatgataaattgtcggcacaccaggcatacatacttgcattgtatcgtcaccgtccggaactgattaatcgcatgaaggcgattgccgattattattccaacaagcatgcttctgcggtaggtagtataggtgatcatgtgatgattctgaacacagggtctatcaagaatgtacggatcggtgattattgccatatctgcggtacttgccgtttgacaaacggtagcgtcaacagtaatgtgacagcgcctgtacatatcggacatggagtgatatgtgatgatttcataatctcttccggctccgaagtagatgacggaacgatgctgacccgttgttttgtcggtcagtcttgcaaactgggacataactattcagcctccgattccttgtttttcagtaactgccagggagagaacggggaggcatgcgccatctttgcgggacctttcacggtgactcaccacaaatcgactttattgattgccggtatgttctcgtttatgaatgcgggatcgggatcgaatcagagcaaccatatgtataaattgggacctatccatcagggaaccatggaaagaggggccaaaacgacctccgactcctatatcttatggccggcacgtgtcggagccttttctctggtaatgggacgtcacgttaatcatgccgatacctccaatcttcctttctcttatctgatcgagcaacggaacacgacttatctggttccgggagtgaatctgagaagtgtgggtaccattcgcgatgctcagaagtggccgaaacgtgacaagcggaaagacccgaaccgattggattatatcaattataatcttctgagtccatacaccattcagaaaatgttcaagggacgttctattctgaaagagcttaagcgggtatccggcgaaacatctgaaatctattcctatcagagcgcaaagatcaagaactcctctttaaataatggtatccgtttttatgagatcgctattcataagtttttgggtaactccatcataaaacgcctggaaggcattaatttccagagtaacgaagaaatacgccagcgtctgaaaccggacacggaaatcggaaccggcgaatgggtggatatgtccggactgatcgctcctaagagtgaaatagaccgtctgctcgatggcatcgaaaatggttctgtcaaccggttaaagtccatcaacgccagctttgcggaaatgcatgagaattattatacgtatgaatggacctgggcttacaacaagattcaggagttttacggcttgaatccggacgaaataacggcacaggacataatccgtatcgtaaaagcgtggaaagaggcggtagtcggtcttgataaaatggtatatgatgatgcccgcaaagagttctcgctgtcttcgatgacaggattcggagccgatggttctcacgatgaaatgaagcaggacttcgaacaagtacgtggtgattttgaaagtaacacgtttgtgacggctgtcttgaagcatattgaggacaaaactgcgcttggcaatgaattgatcaaaagaatcgggtccattcaagagtaaaatctaaagtcggcttgttggttagtcgcctcattaacagtagttattgtgatctaaagttctcagaccattctcatctcgatgagaaaaaattctcaccacaatgagaaaattttctcatcgcagtgagaaaaaatactcataggcatgagaaaaagttctcactgcaatgagaataaattcttgttgcggtgggcatagttcctttctgcgttattcattcttaattcttcattcttccgttatcattctttatttttaattactacctttgcctcactaactaacattacgtaataaaataagaaattatggcaacacctccgtttaagtatcagcccatgtttgaaaagggaaaagataccactgagtattatctgcttacaaaagactatgtatcggtaagcgagtttgaaggaaatcctatcctgaaaattgagaaagaaggcttgactgcgatggcaaatgcagcttttcgtgatgtgtcattcatgcttcgccgttcgcacaatgaacaggttgctaagattctgagtgatccggaagccagcgagaacgataagtacgtagcactgactttcctgcgtaatgcggaagtggctgccaaaggtgtacttccattctgtcaggataccggtactgctattatccacggtgaaaagggacagcaagtgtggaccggctataccgacgaggaagctctgtcactgggtgtttacaaaacatataccgaagaaaacctgcgttactctcagaatgcgcctctgaatatgtatgatgaggtaaatacaaaatgtaacctgcctgcacagattgacatcgaagctaccgaaggcatggaatacgaattcctctgcgtaacgaaaggtggtggttctgccaacaaaacatatctgtatcaggaaacaaaagcaattttgaaccctggtacactggttccgttcctggtggaaaaaatgaagactctgggaactgccgcttgtcctccttatcatatcgcttttgtgatcggcggtacttctgctgagaagaacctgctgacagtgaaactggcttctactcacttctacgataatctgccgactacgggaaatgaatttggccgtgctttccgtgatatcgaactggaaaaacaagtactggaagaagctcacaagatcggtctgggtgcacaatttggcggtaaatatctggcacatgatgttcgtatcattcgtctgcctcgtcacggtgcttcttgtccggtaggtctgggcgtatcttgttctgccgaccgtaatatcaaatgtaaaatcaataaagatggtatctggattgagaaactggattcaaatccaggtagtctgattccggcagaattgcgtcaggctggtgaaggtgatgtcgtgaagattgatctgaaccgtccgatggctgagattctgaaagaactgaccaaatatcctgtatctactcgtctgtcactgaacggtactatcatcgttggccgtgacatcgctcacgctaaactgaaagaacgtctggatcgtggagaagatttgcctcagtatatcaaggatcatcctatttactatgctggtccggccaagactccggctggcatggcttgcggttcaatgggaccgacaactgccggacgtatggactcgtatgttgagttgttccagagccacggtggtagcatggttatgttggcgaaaggtaaccgtagccagcaggttacagatgcttgtcagaaatatggcggcttctatctgggttctatcggcggaccggctgcaatcctagctcagaacaacatcaagagcattgaatgtgtggaatatccggaactgggtatggaagctatctggaaaatagtagtagaagatttcccggcatttattttggtagatgacaaaggaaatgacttcttcaaacagataaaaccacgttgtgccaaataacaaataacaagtaataagtaataagtaacaagtaataagtaatggcaagttattcttgcggttgattacataaacattcatttgggatacctgtcagttttcgtatgggtatccctttttttataaacttgcttatctaataattaaaacaccatgaaaccactagtgatgaatttatccaatcaaaagaaccagcatattgtttggctggatgtcgttcgttttattgcgatgtttacagttgtctgctgtcattgcaccgatccgtttaatttttatcccggcacggctccgaatatcggagaaataaaactttggggggctatctacggatctgtactgcgtccgtgcgtgcctctgtttgtgatgattaccggtgcattgcttctgcctgtaagaagtgatgcttctactttttacaagaaacgtattccccgcgtcttttatccgttcctgatatggtcggtgctctataatctgttcccttggattacaggcctgttggggctgaatcctcagattattcttgatttcttcccgtatgcgggagaggaagtgatgcagcaatcattctctgtatctttggaatatattttgatgattccgttcaacttctccattttagccgtgcatatgtggtatatttatctgcttatcgggttgtatctgtatttgccggttttctcagcttgggtagagaaggcttcggaacgtgccaaactgatgtttctgctggcttggggggtaactttgctgcttccttattattatcagtttgtttctaattatttatggggaacctgttcatggaactcttttggaatgctgtatgcttttgccggtttcaatggctatctgttgttggggcattatctgaaaaatctggaatggagcttgaagaaaacgttggcgattggcattccgatgtttgcagtcggttatgcggtgacattcttaggtttcaggcatataaccgcattgccggaatatacggatgagatgctggaactcttctttacctattgttctcttaatgttgtaatgatgacgatacctgtgtttatgttggcaaagaaagtaaaagtgaactcggaaaggatgaaaaaggcattggcgaatctcactgtttgcggattcggtatttatatgatacattatttctttacagggccgtcggtcgtgctgatgagagctattaatatgccgattggtttgcagatacctgtagccgctattcttgctttcgctgtttcatggggattggtatggctgatctatcgtgcaggaaaggttgctaaatatatagtaggatagtcatagaaaatagaaatagatgagaggttatcaaaagtcaatagtaact

SEQ ID NO: 4820 - DNA, 10283 bp, Unknown
  gut microbiota DNA sequence
ttctcatattttgccagtactttgctgccgtctttattgtaccagctatatccgttccggcgttcatgtccgatttctgagatatcgtattttttaattccgtcgcggtcggagaagaaaggacgattggtatccagttcataaaaacgtgcccataatacggggcaatcttcgcaagggaccatccggtaatctctttttccgtcactgttggtgaagtattctttttgtactccttttatttcggacttcttgaaccatttgacggctgattctatcgattcaattactttttccgatggatgggggagagacatcagtagaagcacgatattgtcagattcttgtccgctcaatgaaggtaactcgtatgcacgtgccttgcagggctccagtgtaatgcggtcatgctgcgcgcaccatactgtcagttccccgttttggcgaacctgtgtccggaggatacattctattcctttgtcaaaggctttacgtgcttgctggcaggtttcatcggggatgaaagtataaggggactgcttttcgtagatttcccgtaactgctgcatgactctgaccattgcgttatcattgtaggtgatttggatatagtatcctgtaggacgcggataaaactgaggccatccgccattgtcatattgtgctttgagcagatattggatacctttcagtactccttctttgtatttctctttttgtgtagcttgataaagacgggccagatattgaatttcggttgtcgtggcgttgttgtcaatggtactttggttgacgtcttctttcgcattccttgctttggcatattcctgctcagtcagttctgccggcatatagatgtttttgggccaccctccggtgacttgctggtatagcaatacattgtctccgatacgttgtgcttcttctgtccggaaaaaggcatcatcgaacttgggagcgaggtgtacccattctttgtaattctgttgtttcctgtaatctgttgcttgggctgaaactccggtctgaatgaaaagtaacagaaagaaaaaggctgtttgtctcatgacttctattattaagtgaatgttagggtgtgtgcaaatgtagaagaaaaggttgggaatgaagggtaatatctgttcttaatggcataaaaattgggctaatcgcttttatcagatgattagcccaatgaaaacaggagaatcaatgttttattgctccagatatttggtgatttttccgctgatttgcagtagtgaaatttcgcaaagtttggtgttgtattctgccgagagaatacgttcttcggcatccagcagactcttttgtgcctcgcgtacttcaaaaccggaaaggtctccctgtatataacggtccatggcgatatcatgattgtctttggcagtcacaagattctgccgttccagattcagcagctgaagattattacggtatgcttgccacaagttgctgagatcggaacgaagggctaactccagttcctgtcgttccaaacgacgattcttgaaggcaagggttgcgttgcgcttttcacggcggcggttgccgtcgaagatattaaaaccgacagtaactccggcattaaagcctaagttgcctcttctgctatttgcattgatatcatacttattaaaggtatatccatagccggtattcagtttgaggtatggatagttgcgggagttgatctttttgtaatccagctgtgccagtacggtgttctggtcggctttcagcaaagaagcattggtggataaggtagcattccataaatcgtcgaacagtaagtcactgtgtacgtcaatggtagaatctttgatgacgataatctgatttacattattgttggccatcaattcattaagttggatgcgtgaggagtgcagcaattcctgttgcttgatgtattgggcactgtccgcattgaagtccactttggcttgctgataatccaaacctgagaatttaccgacaagatggctcgcttctgctatacgcaagcgttctttggaaagtgacatcgcataatgaaagttcttcaaacggatcttttgctggatgaagttgtagtattccgaggcaagatcggcgatgaagtcttcaatggcaatgcgggtattgatttcgccctgccgttccagttcctttagttgcttgtacgtagtgctgatattgaatccgtcgaagatggtccagttgaggttgaggccgacgttaactgtctggtcgtagactccattatttttggtgacctctccggtggcacgggctttcgtctcgatgttgtccaggtttccggtatatccggcagaaaagtccaaagtaggcagataacctgcatttccgagtgtcgcgttattcttgctgatctgttcttcgttatggacgatgcgcagagaataattgttttgcagcccttcttccaggcagtcttttaaggaatagattcgctgtgccttcactggagaaactaatacgaagacacatgcggtaactatgtatatgatttgtttcatgcaaatacttttctgtttcattcttttgttattttgattcggttagtcgaaatataactgtagatggccggcacgatatacatagtaagcagtgtggaaacaaccataccacctactacagccgtacccatggcgatacgctgattggcgccttctccgctggcaaatgccaatggaataagtcccagtacagtagaagcacttgtcattagaatcgggcgcagacgctgtaatgcggcatctttgatggcgctcattttatcctcgcctgcttcttgtttctgattggcgaattccacgatcaggataccgtttttagccacgagaccaatcagcatgataataccgatctggctgaaaatattcattgtgatatctccgaaatacatgaataccaaggctccggcgatagccaaaggcactgttaacatgattattaacgggtccttgaaactttcaaactgtgctgccaggatcagataaatcagaaggatagccaaaataaaggcaaacatcaggctcgaagaactttcacggtattccttggagtctccggataatgcggtacggaaagtatcatccaatgtttctttggcaatcttgtccatttcatccagtccttgtccgatggtctttccgtcagccagtccggcggaaattgtggctgatacaaatcggttgtagcggtacagtttgggtggagcgataccgttttccagctcaatcagattatccagctgtatcatatctccattgctgctgcggatgtagatagctttcaggtcggcaggcttgtttcgttgctggcggttgatttcacccaaaatttcatactgctttccgttcatatagaaatatcccatacgctggccgctcaatccgtattgcagcgtttgggcgatgtttttggtactgactcccattacacttgctttgtcacggttgatcttgatgcgggcttccggtttgctgaacttcaagtctacgtctgccatctggaaaaccggattctcatatactttggccatgaactgcggtaatacctcctgcagtttttcaagattggtagcctgaagtacgtattgaacaggcatacttccccggcgtccgccgaaagaagactgctgttgtacgaacgagcgtgccatggtctttttctgaactgcctttgatatcttttccgcaacttccatctgcgtgtagtcacggtctttcatgtctttcagtgtaatgcgtacgtttccgctaccactggatacacgtgctgtcaccgcttccgcatccggcagaatagaatctacaagctggttgatatcttcggtatagtcccggatatattcataagtgacaccctccgcacctcgggtgttgatcgagatttgcgaccggtcttcaagcggtgccatttctgccggaatagcattccataagaagccgatcaggcagatggttataaaagtgaacggaagtgccagccagcgcttgcgcaaaaaagcagcgagcgaacggctgtaccatcggttcatcccttcaaaaaacggttctgttttagtgtagaaccagttttgtttctcacgtttgatgagtaacttcgtggccagcatcggtgtgaaagtcagtgccgcaaatgaagagataatgacagaaccggaaattacaatactgaattcccggaacaaacgtcctgtcataccttgcataaagacaatcgggaagaatactgcaactagtgtgatggtcgttgaaataacggcaaagaagatctctttggctccttctattcccgcttctttcggactcattcctttttcgatacggatatagatgttctccgtcattacgatggcgtcatccaccaccagtcccacggccagcacaatggcaagcatggaaagtacgttaatggagaatccggcaagatacatgacgaagaatgctccaatcagcgatacgggaattacgatgcacggaaccagcgtcacccgccagtcgcgtaagaaaaggaagatgatgatgataaccagaataaaggctacatatacagtctcttttacctcattgatagatgcccggataaatttggtattatcaaaaccatagctatacgtcacatcttccggcaggtccttcttcatctgttccatgcgtttgtacacagcatcggcaatttcgatgtgattggctcccggctgtggaataacaacaacacctaccatgggtacaccgttcattttcatgtaactcttgatgtcggcaggaccaagttctgcacgtccgatgtcactgaaacggacgatacggttgttatcttcttttacaataagattattgaactcatcggcagtatgcattaatcccaatgtacggattgtcagttcggtagtgtttccttcaatactacccgaaggaagttcgacattctcattgtctaccgcattctttacatcaatcggagtgatgccatatcctgccatcttgaccggatcgagccaaaggcgcatggaataacgcttttcaccccaaatagatacactacttacatcagagatggtctgtaactgctctttgacagtcaagtctgcaatctcacttaattcaagcagtgagcgtttgtcgctttggagggcaaccattaaaataggcatcgcatcggcatcggcttttgatacagtcggcgggtcacagtcccggggcagataacgttgggcacgggaaactttgtcacgtacgtcatttgctgcagtttccagatcgactgaaagttcaaattctaccgtaatacggctttgtccctgctggctgacgctggatagagaccggatgcccgggataccattgatattttgttccagtggctcggttatctggttctcaatgacgtcggcattggctcccggataagaacaactgacagaaatgatcgggttgtccaccgatggatattcacggacacccagataactgtatccgataaatccaaaaaggagaataatgattgtcagtaccgtagctaataccggacggcgtatacttaattcagatatattcataaggcatggcaggtattagtcaatattatccaatgtaacaggaagtcccaggcgaagttgcagtgttcctgatgtaagaatggtatctcctacttgaagtcctcttacaatttgtacttcagcatctgtacgaatgcctgttgtcacttctacaggttcggcttttcctgatttatacaagaaaactttatcctttcccatctccggtacgatagcttccgtcggaatggcaatcgcattcgggatttcttctttctttaattggatacttgtatatcggccgggaagtaaggcgcgattggtatttggataaagtgcgcgtgctgtaaattgatgcaggttgggatcaatcgttgattctacagcatatacttttgcgctgaaggcatctagttttccttcaattctaaaattcaggttcgtacctttcttaatctggcttgcatagcgttccggtactgaaaattctactttcagcggagtaatctttgtcagtttggcaacgatagttgtcggcgaagcgtatgaaccgacactgatttgccgaagtccgatgattccgtcaaatggagcacggagctcggttagggcaatgttcgcttttactatttctatatcagcatttagagttgccaggtcagtctttacttgttcataagcttctttactgactgcatctcgtttaagcagagcatcttgtcggaatacacggtcctcagctaactttagttgtgaaaccaaccgttgaagttgtgcctgtagctggcggtcgttgactttggcaagaagttgtcctttttttacgggagttccttcttcgaagttgatctctattactttcccggaagtctcaaaagacaaatcaacttcttcatccggcagaagtacgccggtagtagtgtattcgtctgttaacagttgaggctttattactttggcgttgacgttcagaatcttttttccattcttttgggtattttttaccttgtcagcagcagccagttcgtcgttagtttttggtaactgtgagtaaattcccccaccgataattccggcaccgataagaataatgatgccccatttagtttttttattcatggtttagtatagtatatagcatgttatataatatcttctgatgattagacgacacttgaaagaaaaggtttaatgctggataaagtaaaagaaagttaatgttgtgtctggctttaataacagacaaaaggagaatttcgacttttcatctaatttacttatttaaattagtgagattttgcttgaagtttaaattaaaatcaaagttgtgtttgttgtttgaattttggaatcagaatgttcgattgttgtcgtttttttaatagaaattagatttattttttatgtgtaatttcttgctgattagttaagagattagtatgccgcccgatactttccctcctccttatcctccagcatattcagataagaagtataacgagactcactgataagatgcttttccactgcctcacgtaccgcacatcccggctcatgccgatgtgtacagttaccatatttgcaatcagcggaaaccttgaatatttcagggaaataatgcccgatttcttcttcctccatatcgaacgttccgaatcctttgattcccggagtatcgataatatatccatccccgtctacagagaacatttcagagaaggtagtcgtatgcatacctttgttgtgataggtcgatatctcaccggtttttactttggttcccggtaaaatggcgttgatgagcgtcgattttccaactcccgaatgaccggagaaaagtgtgatcttgccttccaggtcttttttgatggcatccactccggttccttccttggcagaaaccttgaaacaaggataaccgatatgcgtatacagattaataagagcgtccagataacggagctcatcctcgttataagcatctaccttattaaataccagtttgacaggtacacgatatgcttcggcagaagcgagaaaacggtcgataaaaatggtggatgtttcgggatagttgacagtaaccactaacatacattgatcgaggttagcggcaagaatgtgagattgtttggaaagattggaagaacggcggatgatgtagttctttctgtcttctatttcattgataaaggcagtaccttcctgattgagtataatctgaacgcggtcgcccacggctaccggattggtgctgcgaataccttttaaccggaaattacctttgattttacattcaataaattgtccgtcgtcggtcttcacctgataccaactgcccgtgttcttgattactaatcccttcatttatttaatggataatggataatggagaatggataatggagaatgggcaatgggactgcatagtaattatccattgtccattctccattttccattaaaccgtcatgatttctttatccttgtcagcaagcatatcttcaatctgtttgatatacttatcatggattttttgtaacttggcttccgcattcttctgctcgtcttctgccagtccgtcttttactgcttttttcagtgcgtcgatgccatcgcgacgagcgttgcgtacacttactttggcagtttcgccttccgctttacactgtttagcgagctgtctacgacgttcttccgtcagaggaggaataccaatacggattacttcaccattattttcgggcataatgccaaggtcagagtcgataatggctttttcgatggcacggaacatacttttgtcccacggtttgatggtgatactgcgagcatccggagtggataaagcagctacattgctgataggaaccatacttccgtaagagtctacgcggataccatccaacagtcgggtactcgcttttccagcgcggatatgtgccaatgcttcttcgagatacattacagccatatccattttttcttgtgcattgtcaaggcaagtctttacgtctaccatattttttgataattaaagttgctatttggttgattgattagcaaaagtatactattttttgcttatctgcaacagcacactcatcttttttataagcgacttgccgatgataatcaatgtaacggcagtgataatcattaaaataccgaccattaatcggggagtcagtttttcgtgaaacaggaggaccccgaaaaataacgctgtcacaggctccagagcaccgagtatagcagtaggagtggagcctatagattgaatggctaatgcggtgcaaatcaatgacacggcagtggggagaatggccaaggccagaacatctgcccacaataagggagagggtatgatttgcaattccgtgcagaaattcaagcggactatgtaaaccgataatccgaataatatagcataaaaagtcagtttggtagtcggtaatgtttttaatgaagaccggttgactcctacgatataaatggcataggagagagacgacagtaaaacaaagataattcctacggtggagagtggtttgttgccatctccctgatagagcagggcaatgcccgaaagtgccaacaggatcgaaaaaacggtgattgcggaaatcttctctttgaaaaaggcgcccatgatcacagctaccatcaccggataaacgaacagaatggtagaagcaataccggcatccatatagttgtaactcatgaatagaagcagagatgaaaacgaaaacagcaatcccatgattaccaaggggagaatgtctgccttgcgaagagtaaaagactacccttgcagcttcatcaagacacccaatacaattacggcaaatgcgtaacggtagaataaaacagtatcgacactcatgccggcagcatagagcgggagtgtgaagagaggattcataccgtagcttgcagcggcaatggctccataaataaaacctttggtcttgttattcattattttagcctcttaaaaatggcgtgcaaaagtacgtagtttgccgatgataaacaatagtttagggcgttgatagtataatttaatttttcgtatgcgacggattacttggagaatagcatgagattactcttctgctagccgtaaactaacattgtttatgcttgaatttattcgtctgacagctgttttcttttcgtctgacagctgttagacgaaaaattaacagttgtcagacgaaagttcaacaactgtcagacgaatagttttatgcaatgcgagacttagattttagcactatagccattaagaaatagtattgaaagctgtaaatcttagtctttttattatctttgcatcaatgacatgccttgcatcttaatacattagataaatacagaatataaaatatgaaagaaaataaactggattacacccccgaaccgatggacctttcatcggttgaccttcccgaatctttaatccaattatcagagcgcatcgctgaaaatgtacatgaagtgtgggcaaaagcccggatggacgaaggctggacttatggcgaaaaacgcgatgatatccataaaaagcacccttgtctggtgccttatgatgagttgccggaagaagaaaaagagtacgatcggaatacggctatgaatacgatcaagatggtgaagaaattaggtttcagaatagaaagggaggagtaagttatgaatgctc

SEQ ID NO: 4821 - DNA, 348 bp, Unknown
  gut microbiota DNA sequence
tattttatgattcgttacaaaatttatcagaaccaacagaagaaaggcttgaatgcgggcaaatggttcgcccgggcggtaagcgacgagacattcgaccttgccaaacttgccgaacacatgtcgaaacacaattcaccgtattccagtggggtgatcaaaggcgtgctcactgatatggtggactgcatcaaggaactgctgctcgacggcaaaagtgtgaaaattgatgatctagccatcttcggtgtaggaatccgaagcaaggctgccgaaacgctggaagagttctcgctggagaagaacatcacaggtatgcggctcaaagcacgtgccactggaaactta

SEQ ID NO: 4822 - DNA, 808 bp, Unknown
  gut microbiota DNA sequence
aggttccggttcaggcaacactcccgatccgaaacctaatccggacgaaggagacgaagaagcaccggacccgactgtttaagtcataacctgaacactggcaaagtctttagcttatcacggctaaagactcattaaaaatcaatatttttttcatttaaaatcaaaaactatgagtaattcatcatcccgttccgtttggagtttcattatcaaagtaatcatcactgtcgctactgctgtaggtggtttgataggagtacaaagctgtatgtaaacttatgcggaccatcacactgattatcattcattgcagtgccacgccggagggaaaatccctctcggcggaggcttgccgacaggatcatatccgacatcggggattccgtgatattggttaccatttctacatcacacgtgatggggaaatacatccgggacgatcactagagaaggtcggagcacattgccggaatcataacacacattccataggaatctgttacgaaggaggactggatgcggaaggacaagcgaaagatacacgtacgctggcgcaacgaggggcgctgttagctctgctccgtgagctaaagaaaaaatttccagaagcgttgattataggacatcatgatttaaatccgataaagaaatgtccgtgttacccttgcgtagaagaatacagggaattgtaggttagtatctataagcactcattgcatagcgatgagtgtttttgatttttacaaatacattgcaattttccctgctagaatttcttgccaaaacaaatatttataaatgtctt

SEQ ID NO: 4823 - DNA, 1376 bp, Unknown
  gut microbiota DNA sequence
gcacaggagaataacgtaaagcacattactgcactacaaagatatcatttttttcgaaaaaagcaaataatcaaagcattagctgctattattagttacattctaatcatttatgccgatctctgctaaaaaatagcacaaataaagaaacagttcaattctttttcataagtttgcagacgagaactaaactaatatcgcacatttaaaactttaattagcatgactaccaaaaaactaacaggaatactttcgttattcctttgtattatttgcctcgtgagctgtaatgacaatgatgacaacttttctccaatcactctggaatatgaagatcctcaaattaagttcgacaacgagagccgttcttacacactgactccgttcagcaaagaaacgacaccactcttcatcaagggtggagacggaacttacaaagtgaccaatgagaatgagaaagtggtacaagtaaactaccacaacggaagtttaacattgaaggcaaaggaaataggacgcgcatccatcaagatagaagacagttcgaataatatgtatatactgtctgtcgttgtaaaatatcgtactcttactcataaggcgtttacagcaaaagtcattgtgaagggagacgagcttacatctgaagaacacactgagttaatgaacaaagtgggcaattcatatccgattaataaatatgtatttacttttatgaatgcggaagacagcaaaggaacagtagatttgtattattcagataataacatgaaaacaggcaactttgaaaaagaacatatagtgctggatgaagaaaatgccattcccatcaaaggtgaatacaaattgagtgagtattatcgtataacaatcaaagaagataatggcaaagttattgatactttctatattaccaagaactttctaccactcctcaatacaagaatgaatgctcatccgttaattcagtactgttttgtcagagatttaaccgcacagtacaaacaagattaccttgcactggaaaatgcatatctgattcaaatagcagaatgagaactacactgattttcttctttagcagagtgaatagagtatttattatatgagcaaactccccattagatttagcaaaaaacaataagctattagctaatcaagaatatgcccatagcatatttatcacaatcacctcttccacccttttcctgaacctttgataaataaggcgattgcgggtgaaagaggtgaaccagaggaatatacagtagtagaaacacgcatgggaaggttaacaaacagccatgaatgttctccggagagagtaaaagtaaatgagataacaatcattaatatctgacttctcaactattaat

SEQ ID NO: 4824 - DNA, 40582 bp, Unknown
  gut microbiota DNA sequence
caaggagacagtctctttatgcatggagatacgttgcagcttatttcctataatctgaatacggactctgttttccgcctgatgaaagcttatcataaggtacgtatgtaccggacggatgtacagggagtttgtgactcactggtttataattcaaaagactcttgtctgaccatgtataccgatccgattctttggaatgaaggtcagcaactgcttggtgaggagatcaagatttatatgaatgacagtaccattaactgggcccacattatcaatcaggcactgacggtggagatgaaagattctgttcattataaccaagtgtccggtaaagagatgaaagcctatttcgaaaatggtgatatgcgtcatattgaagtgataggtaatgtgatgaccgctttctacccggaagaaaaagacagtacgatgaccggatttaataatatggaggggagtgtgctccatctttatatgaaagagaagaagatggaaaaagggatgttcgtaggtaagtccaacggaacattatatccgatggatcagatccctcccgacaagttgcggctatctacatttgcctggtttgactatgtccgccctttaaataaagaagatatattcaactggagaggcaagaaggaaggagagacactgaaaccaaccaccgaccggaagccaaagacagataagcgaagtttaattaatatgaagtaatatgggaatgtttttcaattcgatgagaaaacctcgaggctttaatcatcaatacatttacgtaaacgagcggaaagaaaagcttgagaagatggaggagaaggcgaaacgcgagttgggaatgcttccggataaagaattcagtcccgaagatatccgtggtaagtttgtcgaaggtacgacgcacctgaagcgcagaaaggcaagtggccgtaagcctgtatcttttggaaccatattgattatcatagctttccttttatatttgtggcattatttagcgacgggaagctggtcattttaactactaaataaactatgagcgatataattcatttgttgcctgattcggtagctaatcagattgctgccggtgaagtgatacaacgtccggcatctgttattaaagagctagtggagaatgcgatcgatgcagatgctcaaaatatacatgtgttagttacggatgccggtaagacctgcatccagattatagacgatggaaagggaatgtccgaaacggacgcgcgactttcctttgaacgccatgcgacttctaagattcgggaagcagcggatttgtttgctttgcgtacgatggggtttcgtggagaagcactggcttccattgcagctgtggcgcaggttgaactgaaaacacggttggaatcggaagaactgggaacaaaactggtgattgcaggctccaaagtcgaaagtcaggaagctgtttcctgttccaagggaagtaacttctctgtgaagaatctgttcttcaacgtgcccgcccgtcgcaagttcctgaaagctaattcaacagaactaagtaatattctggcagagtttgaacgtattgctttggttcatcccgaagtagccttttcgctttacagcaatgattccgaactgtttaatctgcctgtatctcctttgcggcaacgtattcttgctatcttcggcaagaagctgaatcaacagttgctgaatatagaggtgaatactacgatggtgaaaatctcaggctacatagcgaagccggaaactgcccgtaagaaaggtgctcaccaatatttctttgtcaacgggcgttatatgcgccatccttattttcataaggcagtgatggaggcttatgaacagttgattcccgttggcgagcaagtttcttactttatttattttgaagtggatccggctaatatcgatgtgaatattcatcccactaagacagaaatcaagtttgagaatgaacaggctatctggcaaatactttcggcatcagtaaaggagtcgttgggcaagttcagcgccattccttccattgatttcgatacggaagatatgccggatattcctgcatttgagcagaatctgcctcctgcacctccgaagattcattataattcggatttcaatccgttcaaagtatcttccggtggaagtggcggcggatcatatagccgtccgaaggtggaatgggaaggactgtatggtggattgaccaaggcaagtaagatgaatgagcctcagcaggaaccggaaatggattgggaaaattctcctttcgaggaagaaccgatggttgctgaagagaaaactatttcggcggtatctgccgcttcctccactttctcatcggcctcctctactttatatgccaatgaatcggtgattgagaaagggaatctgcatttgcagttcaaaggtcgttttattctgacttcggtgaaatccggattgatgttgatcgaccagcatcgtgcgcatatccgcgtactttttgatcggtatatggtgcagataaaacaaaaacaaggtgtttcgcagggagtgcttttccccgagatattacagctgcctgcttcagaagcggctgtcctgcaaggaatcatggatgatttgtcggcggtaggtttcgatctgagtgatttgggtggcggtagttatgctatcaatggcattccttcggggatagaaggattgaatccggttgagttggtacggaatatgctacatacagctatggaaaaagggaatgatgtgaaggaggaaatccagaatatcttagctttaacactcgcacgtgcggcggctattgtatatggtcaggtattgagtaatgaggaaatggtaagtcttgtagacagtctttttgcctgtccttcaccaaattacactccggatggcaaaacagtcttgacaacaatcaaggaagaggacatcgagaaattattcaaataaaacaaataaaatcatcatttcttaaaaccttttagttcagttcgtgttatttaaatagttcaacaaagaaaagattataataaccacttaactattaggtatatgaaaaagattctaatgttgctggcttttgccggcgttgcgtctgtcgcttctgcgcagcaaaccgtgactgtaactgaatacgaggttattcaggtacaagataaacatcaagtaataactaacccattctggagcaactggttcttctctgtaggaggcggtgcacaggtattatttggtaataacgaccatatcggaaaattcagagatcgtattgctccgacattgaatgtgtcagttggtaaatgggtaacacccggtttcgggttacgtatgcaatatagcggactgcaatccaaaggattcaccaccaatgaatctgcaaattatgtagtcggtggcccgagagaagatggctcctacaaacagagatgggactatatgaatcttcatggcgacttgctgattaatctgaatgcacttttcggtggttacaatccggatcgcgtatatgagattattccgtatatcggtgccggttgggctcattcttattctaagcctcatacaaacgctgctaccttcaatgcaggtattatcaaccgtttccgtttgtcaaacgctgtagatttgaaccttgaactgagtgcaacagggctggaaggtaaatttgatggtgaacacggtggcaaacccgattatgatggtatcttaggtgctactctcggtgtgacttattacttcccgacccgtggattccaacgtcctgttccacagattatctccgaactggaattgagacagatgcgtgatcagatgaatgctatggcagccgcaaatatgcagttgcagcaactgttagccaatgcacagcagcctgtagtggaagaagctgaagaagtcgttgtaacagatgccaacattgcaccgcgtactgtattcttcaagatcggttcagacaaattgtctccacaagaagaaatgaacttgtcatatcttgccagcaagatgaaagaattcccgaacatgacctatacaatcaacggatatgcagactctgcaaccggtactccttctatcaaccagaagttaagtctggaacgtgcacaagctgtaaaggacctgttggttaagaaatatggcatctctgcagacagactgtctgttgcagcaggtggtggtgtcgacaagttcggtcaaccgattctgaatcgtgtggtattggtagaatcagctcaataatacatttgatattgtaatatagatacggctgttaagtgggccgtatttatgaaaggaaagacttgctcaggtaaagatatccctcggatactttacttgggcgagtctttttgtttccaatgatttgcatatcctataattttttgcgaatattgcaatcaaatgcattggtcttagacataagtttcttacttttgaacaaggattccggtttttatgattgttactatgaaatgtagataccttctatctttagtctttttattgcatatatgggtatgcaagagtaatgttatagataatagtgtctatgattatggtcttacgtttctggctcattctaccaatcaggatcagcggaccaatttggatcttactcctgcggcttctttgtcttttcccgaggacggtttctcggtgggattcgatataaagttgagaaatgaactgtatacttatggttatgttgtacgggtcatagcagatgattcttcctgctttgattttatctcctacctgctttattcccgatttaatattgtattgactgacaaagaccgagtgatcaagaatacggagattgcagattcggtaaagattgtagcagacagatggatacacgtcgatctgcaatttaccaaagaccggattcatattgctgcagacggtatccaggcggaaatcaatcattccctgagcaactttaaggatatcaagatctatttcggaggcagcaagcatccccgttttttctctacagatgtacctcctatgaccattcgtaatatagaacttgctgatattcaaggtaaactgctttataaatgggaattggctgctcatgataaagatgtgacttacgatagtgtcagaaataaacaggcttttgtacgtaatggcgtctgggagatagataaacatactaaatgggcggcattagcttcgttgaatgtgcaccatattaatccgcaggtggcttatgacgatgtgtcgggacgttttttcatagcaggaggcggtcagttatttgtttacgatgtgaaggcgaatcgtgttgattcgattgcttataaaggacatccttatataggagcttccagccagattatttttgatgccaaacgaaacaggctcttgtcttatacaccggatttcaacgatttgaatgtctatgagtttgaccggaaatgctggacattagaaactccggtaatgattgatacccgccagcatcataatcgtattatcaatcagaaaagagatgaactgattgtttttggtggctatggtaatcaccgctataattcacagttgagcagaataaacctgtctgatccgcaggggtggtcgatcagttcccttgattcctgtctgtttccccgctatttaagtgcgatgggggcggagaatgaggactacttattgatcatgggtggttatggcaatcagtcgggtaagcaggaagaatctccaggaaacttttatgatctttaccggttgaatttgaaaacaggtaaatgcgctaagttatgggagtttgtgaatgacaggcagcactttactttcggtaattcaatgattgtcgatacaccgtcgaatagtgtatatgctttgacatataataatgaccggtataatacttttgtttatttgagccggtttgatatacagaccagacaaccggttcaggaagtgatgagtgattccattgtttataacttcctcgatattcattcttattgtgatatgtttttgcatagagagacatcttctatttatgctgtggtgttgcaggaaaaggagcccggaatatctaaagtcgaattttataaactggcatttccacctttgtccaaggaaggtattttgcctcatcagactggcggaatgaagccggtgatattgatatccggtattttggcaggactactgtgcctgataggaggaagtatatggttattgcatagtaagagaaagagaaaagtgaatgtgtcagtcggtccggttgctacggaagaagtaaaagacagattggtcgaagaagaaccgactgaacaaaaagtatcttcggttttattactgggcggattccagatatttgataagcaaggcggtaacatcacgggagattttacgcctactcttaagcaattattcttgtttttactgctgaataccattaagaacggaaagggaacgacttctcaatgcctggatgaaactttctggttcgatatgagtaagtccagtgcatcgaataacagaaacgtgaatatcagaaagctaaggctgatcattgagaaaatcggagatatcaatattgccaataagaacggctattggtatctgaatctggggaaagacgtgacctgcgattatcaggaagtgatgagattgctggatcagataaaagataaagataccattacggataaaaagataatcaataaaatcatatccctggcgagtgccggcgcattgctccctaacgtcagtgccgaatggattgacgaatataagtcagcctactacgttctgttgacggaaatactgctttctgtggtcaaccgtcccgatataaaagaagattccaggcttttgctgaaaatatcagatgtaattctgcttgttgataatatagacgaagacgctatccgcactaaatgcagagtcttgtatcagatggggcagaaaggtttgtccaagcaaagtttcgataagttctgtattgaatatgaacgtttgctgaatgccaagcctgatttctcttacgatgatattataaattcactctaaattaatcctctattaataattttccggtgcttcctgttggtcggtggagagatagttcctcatcggtggcggagcctgtcctcatcggtgccggaaataggtctcatcggtacccgaaataaatccttgcggagtaaggcactcattataccatcaaataataattgtttttttttatcatgaaaacattattgataactagatacttatgcgaaaagaatgaaattctttatcgctattaatctaaaattaatatggcattaaggactggaattctatatttgcttcagaaacggacgggatatcctccactatgtttctgatgacttgagcggatcgaactataaccttataaaatgatggaaatatgaaaaacgacacttcttaactactgcttggacttacttgtcagagaaagttttcttgagatgaaaacggtttgaatcaattaatgttaatctataaattatgaaaacaggaaagagcaaagatcatttgcaaagagtttttttaaggttcctttatttgataatggggagcatcctttctttggattctgttatggcgcaggaaaacctgaaagtttccgggcaggtgacagacaataaaggagaagccattatcggagcctcagtgaaagttctgaaaacgggtacggggactatttcggatatggatggtaagtttactattcaggttcctgtgggagctgaactggagataggatatgtcggctataatccgaagagagtgaaagtggtgaataaaaacttcgtaacggtagtccttgaggagaatgtggtagcattgggcgatgtagttgttgtcggatatggcattcagaaaaaggaaagtctgacaggagctatcggaaacctgaaagtagatgatatcgtaaagaccaaggcacctagtttggcacaggctattcaaggaaaggtagccggtctgcggatcagacaggagaatggagagccgggtaagttcagttccaatatcaatgtccgtggcttcggaactcctttgtttgtgattgacggagtggtgagagacggttccagcgaatttcaacggttgaatccggaagatattgaaagcatatcttttctgaaagatgctactgcctctatctatggtatgaattcggcgaatggtgccgtgattgttaccaccaagaaaggggctacaggcaaaccgcgtattacgttgaacgccaatgtcggcattacttctcctaccaatgtgccggagatggccaacgccggacaatatatgaccatgcgaaatgaggcggaaatcaatgcaggcagaccggcttatatcacaaaggacgaattgaccaaatggcagcaaggtgctcccggttatgagagtgtagacttgtatgatgccgttttcaataagcacgccacacagttccagacgactctgtccctggaaggtggtaccgacaaagtaagttattacggtagtttcggttatgccaccgataacagcttgttgaagaataacgcattgacttatgataaatatacattccgttccaatgtcagtctgaagattaccaaagacctgacagccagtatcaatcttggcggacgttatgataccaccaaccgtccctggtttcctttctatgatatatttaagagtacgcgtgtaaatccgcctactacttctatctatgccaatgacaatccggattattataataacttctcttatgtccctaatccggcggctatgatcgatgccgattataccggaagcgctaaagagcggaataagaacttgcagacacagtttgcattagagtataatattccttatgtaaaggggctgaaggtgaaaggtacttttatctacgattacaataactacggatataaggcaacgcggaaaggttttaagacatatacctatggcgaatatacgggcgagtatacggcggcagatgccaactatccggctttactccaggataatcgcagagaatcggaacgggtggatatgcagttccagacaaactataacagaacgttcggcaaccataccatcggagctacttatgtcttcgaaagacgcgaagagaaagcaaactggatgaatggtgagcgcaagtttgactttttcacaatcggtgaactggacaatgcacgcgaatctgaccagaaagtatccggttcctcggaacaccaggcttatctttctcatatcgggcgtctgacctatgattataaaggcaaatatctggcagagcttgcttgcagatacgacggttcttatcgatatgctccgggcagcagatgggcattctttccgtccgcttccgtaggatggaggatttcggaagagagctttatcaaagacaacttcaagtttgtcgataatctgaaacttcgtttctctgccggtcgttcggggcaagatgccggtgatccgttccaatacttctccggttacacgttgaacagtggcggatatgtattcagccagggaaattataccaatggagtagcttctcctgtgatgatcaataagaatctgacctggattaaagtgaatatgtataatattggtattgacttttcaatctttaaccggctgatcgcagtagagtttgatatttatcagcgtgaccgcagcggcctgttggccgaccgttacggttctcttcccaatacgttcggttccaagttgccacaggaaaacctgaacggcgaccgtacgaggggtattgaatttacattgactcataccaacaaaatcggtgatttccactacagtgtatccggtaactttaacttggcgcgtacccaacgccgttatatagagagcggtccttacaagagcagtatggaaagatggagaaaccagtcatccaaccgctggggagattttatctgggggtatcagacggacggacgtttccagaactttgacgagattaatacatatccgattcagaatggggataacggaaattccaaggaacttcccggtgactacatcctgaaagacgtaaacggtgacggagtggtgaatgatctggacaagacccctttattctggtccggcagcccgttgattcactatggtttcaatgtggaagcatcctggaagaacttcgacttctatgctctttttcaaggttctgccctgtacacggtgcagtttgacgaggtatacgcaaagatgctctgtttcaagggtggcaatacccccgaatacttctacgaccgttggcatctgtccgacccgtatgatgcgaacagtgaatggataccgggagaatggccggccatccgtctggagcaggacatgggatcgttctatacgagggattcgcagatatggcgtaagaacgcttcttatctgagactgaaaacaattgagatcggctacaccttcagtccccgactgatgcataaactgggtatcggtagtttaagaatctatgcgaacggaaataacctgtttactgtctgtgccccgtttgtaaaggcattcgatccggaaaagattgaaggagactatagtgccggcttgaattatcctctgaataagagctttaactttggattgaccttgaacttttaaagaagatgattatgaaaatatatagttatttattattgggagctatgttcctgctgggcggatgtagcgatttgcttgatatcgatccgaagaataaaattccggcggatgaattgttctctactccggaaggagtacaggcacatatggccaatctgtacggtcgtttgcctatcgaagattttacctattcaccgaatcgcggcttcaatgtgggagtcggtacggatgtgaataatgccggttttatggctgctcatttctgtgatgaggctatccatccggagtacaatgactttggagaagagtggttcgattattgggaagacggttataaactcattcgtgatttaaacagtctgttggttactattcctacattgaccagtattaccgaacagcaaaagaatgagatcaatgcggaaactcatttcctgagagcttatacctattttgccttagccaaaagatacggtggggtacctatcattaaagaaccgcaggagtataacggtaatatcgaagaactgcgtgtccccagaaatacggagaaagatacttgggactttgtcttggaagaatgtgaccaggcagtatcgctttttggagatgcgaatgaaaatgatgtgctgagagcgaacaaatgggtagcattggcactgaagtcaagagcagctctgtatgcagcttccgttgccaagtttactcatcagccttatgtctctttctctggtccggctgttgaccagaagctggtaggtatagaagttatatcggctgatcattattatgatgaatgtatatcagcttcacaggaaatcatgaatagtggtaagttcggtctttacaaaccttcccccgctactccggaagaagcgacaaccaactatcaaaagttatttgaacaacctttccaatgtctggacggattgaaagagcctatcttcatgaaggcctatgctgcaaataccattctggcacataactatgatgtctggttcagcccccgtcagatgatcctcgacccgaatctctatcccggtcgtatgaatccgacactggattttgtcgactctttcgaagattatacggatgacggaaccggaacacccaagccgatcagcactcgtgtggatggaaatgaaagtgattataatggatttaacttatccacccgatacctgtctttcccgatagataaaccttaccaggcatttgccggtcgtgatgcccgtttgagtgccatggtgttattcccgggacagaacttcggaagtacgaagatcattatccagggtggtctggtgaaagctgacggttccggttatcattataggactcaggcttcggagaagggacaggatggtctgatctattatacttacggagcggagaaaagcacggaatattcaggattcgatccgactttgggacattatacccgcagcggattcctgtttaagaagttcttgcagatagaaagtccggttgagcaggcatggagtaaaggtacacagccttggatcgatttccgttatggggaaattcttctcaactatgcagaagctgttatcgaaaagacaacctctacttctgctgaaaaacaggctgcacaagacgctttgaatgcggtccgcaaaagagcggctcacaaagatgacattgcattgactcaggcgaatgttcgcaaagaacgttttgtcgagctggcatttgaaaacaaacgcagatgggatttgtcgcgctggagaactttccataaagaatttgaaaaccgggtgagaaagggacttgtacctttccttgacctgcggacaaatcctgcgcattatgtatttgtacgtgtcaatccgttgggcattgaatcaaagacctttgattatagctggtattataagagtattccgggtacgggggctaatggtctggtacagaatccttaattagtatattctaaaatatagattagatatgaaaaagcttctatttttattatgcgttgtagtagcaggcagtatgttttactcttgtgaaaaagataatctcgaagggccggatgcaatctttgccggcgaactgagagaccggaagaccggagaactcattcaacaggagatatcggacggttcccgcgtttatttcatcgaacaggggtggggagataatcctcctgttcagaatatggtcgttaaaaaagacggaacgttttataacggtatgattttctccggtgactataaaatcatcctgaatcgtgggaactacgttcctttggatactctggatatgaaaataaagccgggaaagaattatcaggtcttcgaagtgaatccttatctgcggatcattgaaccggaaatatctgtgatcggaagaaaggtagtggcgaaattcaaactggagcaggtgaccagtaacgaggtctatcgtatttcgttgtttgcacactctcacatcgatgtatccaacaaactgaatattgtcaaccggacagaagaactaaaccgttccattactgatggtgaggctttcgaattgtctatcaatctggaagactacacttccacgctggttccgggcaagagttattatttccggatcggtgcacagtctcacggaagtgagacaaagtacaattattcggcatctgtacagttggatatttagcataaaaacggaaaagccatgagaaagtatttacagttggtattccttgcggtctctgtcttttgttcagagatattgttggcagaatctcgtgatccggtccggatactggatttgagaacgctcaatgaacttgatctgaaagaacaggagaaggcggagcaactatgggacattatgcatacgacagctaccttgcaaggcattgtgaatcggaatagtccgagattgtacattcgctatgtcaagaacgggcagggagagaatgtcgatgattattggtggaataaataccgtcaggcaggacagtggctggcgggacgtgatacgatagcttacacggaactgtcggatgtcgtgaccgttttcagaaaagaaatacgcggagtggttgtttatgactcaaaagtagcatctaccagtaatattgcttcatctgtggcaggaatcgagaatctgatagctgtgcgctatgacatatctcccaatagtctctatacccgtttggtactgcaaggaccgaagctggctgtgaaatgctggctggtgaacaaagatggttcttctcttttcacgggcaaaggaaggattgccggaaccggtcaaccttcgacaggatctctgaaaatcgatccctatgtatggtttatagagaaatacctgaagaaagggttatgcaatacggagtacgccgcttattacatcgaccagttctggcgtaccgatcctacccggacggtaacgaaccatcaccaattgaccaatcatgacttttttgtcagcaagaaagcttttttctttgacctttctccttggggagacgagccggcaacggatgatccgacacaagaagaaggactggacttgcagatactgaaaacttttctgcaagaagcctataagcaaaataaaggagagaaattctgctatatcggaggtttcccgagctggatttataaatatacgcagcatgctggaggaaagcatgaagatgtagctaccgagtgggaattttcccgtattatcagtgcttataatgcctttaaggatgccgatgccatcggactgggagcattggctaactcctccttctggcaacattttcctcttcaggaaaagtatccccaaaagtgggtgacacatcaggaactgatggacagaggctatctgaaccgtgacggaacaatcaactttcagggacggaactttatcctcttctatgtaggcgattatgattcctcctcctggattgctcagactacccctttcctgtgggacgaacctagccggggagaagtgcctttgatgtggtctgtcagtcctgtacttgcagaacgcgttccgatggtgatgcataattatcgggtgacggctactccgaatgattattttgccgctgctgacaatggtgccggatatttaatgccgggtatgttgcaagagcctcgctcggtgtccggattgaaaagcggattgagtgcatgggcaaagcattgcagcaaatattatcagaagtggggattgaccattacaggatttgtgattgacggcgaagcccccggactggattcagacggattggactgttacgcatcgttcagtccgaatggaatagttccgcagaagatgcctttgacattgctgcacaatgatatgccggtgatccgggcagattatgatattgtagatcatgattaccgcagggcaacggatgtgattgtggaaagagtggagaaacgtccggttcctttccattggttcagagccatattgaagtcaccttcctggtataaagggatttgtgatgagttgaaacagcggcatacgaatattgaattgctggatgcaccgacattttttgaactctatcgtatctatctgaagcagcatccggatgctgctgccggaaagataacgatgaactaacctgattaatgaacagacatattcatatagaatgatgatgaacagattgaatataaaaagaacagtcggctcctgtttgatggcgatggcgtttttttcgtgtacccatacggatcagacgcccacgaaagactttgtcgattatgtaaatccatatatcggcaatatcagccatctgctggtgcctacttacccaaccgtacatctgccgaactcgatgctcagggtctatccggaaaggggagactatacatcggacagggtaaacggccttccggtcgtggtgaccagtcatagaggcagctcggcttttaacctgagtccggtgcagggagaggtatcccgaccgattgtatcttactcctatgatttggagaatattaccccctatagttattccgtatacctggatgaggctgatatacaggttgagtatgccccttcacatcaggctggtatttatcatatcagttttgggacggaaggtgataatgctctggtggtgaatacgaagaacggaaagctggtcgctgaagaaaaaggagtcagtggctatcaggttattgacaacactcctaccaaaatctatctgtatctcgaaaccagtcaactacctttacgcaaaggggtactggcagatggaaaagttgatatggaaagtaaggaaggcagtgccatcgctttgtattatggaagcgagaagaacctgaatctacgttacggaatttcctttatcagtgccgagcaggcaaagaagaatctgcaacgtgacatcaccacctatgatgtaaaggcggtggcggatgccggacgcaggatatggaacaagacattgggcaagattgtgatagaaggcggttcggaagacgaaaaagaaatcttctacacttccctttatcgtacctacgaacgcatgatcaatctttcggaggacgggaaatattacagtgctttcgatggcaagattcatgaagatggcggagtacctttttatacagatgactggatatgggatacttaccgggctacacatccgttgcgtatcttgatagaaccgcagaaggaactcgatatgattcgttcatatatacggatggcagaacagtcggacagaagatggatgcctaccttccccgaggtgaccggagacagtcaccggatgaatggcaatcatgcagtggcagttatctgggatgcttattgcaaaggattgaaagactttgatctggaggctgcttatgaagcctgcaaaggagcgattacagaaaaaacgttgttgccctggctgagatgtccgttgacggagctcgataagttctatcaggaaaaaggatttttccctgcactgaaccctggcgaagaagaaacttgcaaggctgttcattcgttcgagagacgacaagcggttgcggttatgttgggtaactgttacgataattggtgtctggcacagatagccagaacattaaacaagaccgatgactataagaagtttatgaggatgtcttatacgtaccggaatgtttataatgcggaaacgggtttctttcatcccaagaacaaggacggaaagtttatcgaaccgtttgactatcgatattcgggaggacagggggcacgtggctattatggtgaaaacaacggttggatctatcgttgggatgtgcagcacaatccggcggatttgattgccttgatgggtggacaggcttcatttatcgagagattgaatcagacattcaatgaaccgttggggcggagcaagtttgatttctatcatcagttgccggaccataccggtaatgtcggccagttctctatggcaaatgaaccttgtctgcatattccttatttgtataactatgccggtcagccgtggatgacacaaaaaaggattcgcgttttgctgaaccagtggttccgtaatgacttgatgggcgttcccggtgatgaagacggaggtggaatgactgcatttgtggtattctccatgatgggcttttatccggtaactcccggttctccaacttataatatcggcagtccggtattccaatccgcaaagatggaggtaggtgacggacattattttgagatcatagcggagaattatgcgccggaccataagtacatccagtcggctaccttgaatggaacgccgtggaataagccgtggttcagccatgcggatattcaaaacggcggacgtctggttttgcagatgggagataagcccaataagaagtgggggatagcttcggatgccgtgccgccctcttcagagagtttgccggaataaagtcagaataataatattaaaatctaaaatataacacaatgaaaaagatgattgtactcaccagtctatggtcgtttttatttatcttttccttttcaatgttcggttgcagcgaggatgacgatgaatttggaacaacggccgaaagaggaaatgaagtccgtactccccgtgtggaggagatcaatggaaaagcagtggtcacctggattgatccttatattacggatatcaaggaggtgcaggtaaaggatttgcagactaatgagcaacagacggttgccaaaggagtgcagagcgcggaatttgcgattacggacaatagcctgttgtcttaccgatatgaaatgaaagttgtcagaacgaccggagaggtgtctgccggagtgactgcccgtctggtgaagaactgggcgcaaaagctgcatcctttgatggattatcatagtgatgcgactcctcaaagtggtatgttctttaagaatcagccggtggcgaaagtgaatgtattcgatattcgtgatgacgaaaatatatcgaagctgaccactgctgtcatgcagggagtgattaaccaggaacaggcactgacttatctgatctggttacagcaggatttgacacagctggatgatgccgaagtgcagtatgaaatgcagcctttggcgaatacttcccgcaacagaggctttgcggcattatataatatgtacaaggaccgcttcaactgcctgatagtctgggatgagaatcagccttggtcatggagcatggcacagatgatttcgtcacaggagaaaggcattccggttacggaatccatgagaaagtttatagaggacgagctgggaacaggaaatctggaagttagggatatacgtaaccaatggtcgtcaaaggcagaagcttatggctgggcgatagcgcactatgccggcaaataccatccgaagctaaccttctccggtggattgcggagtgactataaagataatccgtggagaatgtacgattacgtagctgcttctaaaggttttgttttctggttggacgactctaatggagatgacaaacagatcatggataatatcttcaatagcggatcttatccggtgggttcttcggtatttggttatggaatgaatgccaatggcgacgaactgaacaagattaccaacatccataatgcgggatttgtggtgagtgactattatgcgaatggcagctactggtgcagtttcccgagcaaagccttccagcagcgtaaagggatagccggagaagtgaagccgggtaagatatatgtcgctatcagtctgagtgacggagacaatattcagtttgatgcaaattctctttatcagatattcaaggaaggaaagcgcagaggcgaagttcccgtaggagtgactttggcggcaggcttacaggaattgaatccgaagctacttgaattttactataagaatatgactccgaacgatgaattgacggcagggccttccggtttccagtttatctatggtgattattatgcgcagagcggtaaatatgcggaatggctggaaatgaacaagaagtggttatccactgccggtttccacacggcgcatctctggaatacagacgagcagatgtatttcgaacaatacatgaagagcaaggctgtcgatgcgattatggacggatctaaccggacacataccacaggctcatcttacaaattggtagatggcgtggtgcgtattgatcaggggactatgtgccgcaataatggagacgtataccgtgatctgatgtctgtatctcccagcccgcggcgtcctttattccggcatgtctatctgttgaccaactattacggatttgaaggaaataaagtggtagtgtacgagagactgatcaaggaactcgaacgggttgaacaggattgtccggatacgtatgaatttatgctcccgatggatttggccgcttctatcaggaagtacatagaagaaggcggtatttattaaaggaattataaacgaatctaaaacaaatgagatatgaaaaatagatatagtatccggttactggttatagtctttctttcggctttcgctatgggtatctgctactcatgttcggatgatgacggagaaggagtgaaggtatatgagtatcgtgaacagataggcaagaagataaaagtgttgaccgacctgcaggctgaatcccagttcgggcttcgggaaggaatgtatcctgaaacaagccgggcgattctggaagatgcgatagccaagctgaaagatttccttcagacgataaaagaagcgggagtggcggaagctcggattcccgaagagacagccagactgctgaaagaatcggacgaaaagatagccgagtttaaggcgactgtccggacggaagacttactggttccggcagagctggaagtaagcggaaagaatggcggatatattgactttggcgctcatccggagtattccacattcggtgaagttggcaagcaggcatttactgttgagttttgggtaaagctgaaggatgtagaaggcttcttctatctgatctctacctttacggatgatgatacgaacaatcacgaacgcaaaggctggtgcgtgaatagctacaactatggtggcaacaacatgcgtatgacatacggaatgggctttaatgacctgatggaacctgccttcggatttgccaccgttaatgagtgggtacacttggctgtggtgacggatgaaaccggagtagacggcgagatgaatggaggcagacttgtcatgaccaaaatgtatatgaacggtgaactgaaactttcgaccacctctcatcaggatgcttccaaaccgtatgcttctaacgacagcaatgtcccgatggtggcatttggcggcatgagtgctacaggcaaccgtatcggtgataaaggtgctaacggaagtatgaaacatctgcatatctggcgtaccgccaagactcaggatgaaatccgccggttgatggagcatccggagaatgtgacgggcgaagaggacgatttggtttgcggatggactttcgcgaagatggcgcttgacgaccaggaaattaaagacttgaccggaaagtatacggcaaagctggtcggagactataggtggattgaattagaatgatacgaaacagaaaatacaggatagatatgaaaaataactatttatataattgggtagtgatagtgtttatgatgcttcagatgctggcatttacttcttgttctgatgatgatgacaatagcggctggccgacggaaacggacaagaccgaaatcttcatagagcgcttcagtacattggtgactaacctgactgcgctgcgggatggagctacatatggcgaactgaaagataactatccggtatccagtaaagccatgctggatgatgaaattgtttatctggaggaaacgatcgctaaactgaaagaaggaaacaaaaagttggctgacagtgaagccgaccgcattatccgtgaagctaaccagatagagaagaacttcagagcgaccagacgtaccgaagactttttaccggttgccgctgaactgttggtcaacggaaagaatggcggatacattgattttggtgttcatccggagtattcagctttcggcgagcagggacaacaggcattcacagtcgagttctgggtgaagctgacagatgtggacgaatatctcaatagctttgtattcttgctttccaccttcacggatgatgatacgaaagatcacgagcgtaaaggatgggcggtaaacagtcacttcggcagattacgtatgacgtatggtataggctatagtgacttgtttgaaccgggcttctcattcagcacactaaatcagtgggttcatgtggcagttgtcactaacgagaacggagtggacggagaagtcagagacggaattccggtgatgaccaagatttacgtcaacggccagttgatgttgtcggaaagaggccgggatgaccgtttgccatatactccgaatgataaggaagtggctatggttgcctttaccgggcttagcgcaactgccaaccgtatcggagaaaagagcaccaatggatgtatgcgtcatctgcatatctggaaatcggcgaagacacaggccgaaatacaacatctgatggatactccggaatccgtgacaggaagcgaatcggatctggtatgcggatggacattgaataagactgtttcggataacaataacatcaaagatctgacgggcaaattctcagccaggctgatcggagattttcaatgggtagagaatagataattgttttacgaaccgggtagttcccaagcccgtcggatagctggctttgggactactttcttaaacaaacgaacatgaggaaagaacttgtttttgttttattggcattatttctgtgtgccggctgtaacggtaacaaaaagaaaatgaacggtgaacacgatttggatgcggcaaacattacgttggatgaccatacgatcagtttttattataattggtatggaaatccgtcagtggatggagaaatgaagcactggatgcacccgatagcccctgctccgggacattcgggagatgtcggtgccatatccggacttaatgatgacatcgcctgtaatttttatccggagctcggaacgtacagcagcaatgatcctgaaatcatccggaaacatatccggatgcatataaaagcgaatgtcggtgtactgtctgtcacttggtggggagaaagcgattatggcaaccaaagtgtgtctctcctgctggatgaggctgcaaaagtaggggcaaaggtgtgctttcatatagagccttttaatggacgcagcccgcaaacggtaagggagaatattcaatatatagtggatacttatggtgatcatccggctttttaccgtacgcacggcaaacctcttttctttatctatgattcttatctgatcaaacctgccgagtgggcgaagttgtttgctgccgggggagagataagtgtgcgtaataccaagtatgatggtctttttataggtctgacattgaaggaaagcgagttgcccgacattgagacagcgtgcatggatggcttttacacttactttgccgcaacaggtttcacaaatgcttctactccggccaactggaaatccatgcagcaatgggcaaaggcacataataaattgtttattccgagtgtcggtccgggatatattgatacccggattcgtccttggaacggaagtaccacccgagaccgtgagaatggaaaatattacgatgatatgtataaagctgccatagaaagcggtgcttcttatatttcgattacgtctttcaatgaatggcatgaaggaactcagatagagccggctgtctcaaagaagtgcgatgcttttgaatatttggattataaaccattggctgatgattactatttgataagaactgcctattgggtagatgaattccggaaagcaaaatctgcttcggaagatgttcaataatatgctatatcttgtcggttttgcccatttgtaattaaaatgttctatatttgtgatacataactcaaatatagaacattatgggtgaactttatggcacatgtgcattgcttgctgcagtgttgttttttgttctgctgcaaaagtttgaaagccggttcggcaaggtagacaaagagcttggcgagataaagaaacgaatggacgacctgctcaaagctcaggagaaaatggcttccggccctgtaagggccaaagaggatgtaacggcagagactttggacaatacggatatactgccttatgtaacagaagaattgcccgattcgacagtgacagccttgaaggaagagaaagctgtcgaagaaaaagctgttgaaggcatacagcccattatggcggaaactacgccgcagaaattaaacgcttcccttgaaaaagaatctgctgaggccactttgcaggaaacttctccggaggctcctctcgaaataccgtctgtttccaaacggaagcaggttaattatgaaaagtttatcggtgaaaatcttttcggtaagattggtattcttgtattcgtcatcggagtcggcttctttgtaaaatatgccattgataaagactggattaacgaaacattgcgtaccgtacttggtttcctgaccggctccgcattgctggtggttgccgaacgcctgcaaaagaagtaccgcacattcagttccttgcttgcgggtggcgcctttgccgttttctatctcacagtcgccattgcttttcatttttatcacctttttcctcaaacggttgcttttactattctgatagctataacgctgttcatgtctatcctgtccattctgtatgacaggcgcgaactggctatcatctcacttgtcgggggatttctggcacctttccttgttagcaccgggaatggtaactacctggtactgttcacttatatgagtatcttgaatcttggaatgttcggactgtccatctataagaaatggggagaacttccggtgatcgcatttgtttttacttatgtggtaatgggaatcttcctgttgacaggctttactacaggatcgacacatatttccgtccatctcttcatctttgcgacgctgttttatttcatcttcctcctgccgatattatcgatactccgggtagaagccgtgaaaaagaacaggggattgctgctggtcatcataaccaacaatttcatttatctgttattaggaatcctgttcctgcgtaatatgggactgccgtttaaatcggaaggattactgagtttattgatcgctatcatcaatttagttttagtcatctggctacggatgagcaagaaagattataagttcctcatttatgcgatgttgggactggtactgacatttgtctccatcactatacctattcagctggatggaaattatatcacgctgttctgggcagcggaaatggtgctgctgttatggctttacgtaaaatcgaagattggagtatacgaacgtgcaacacaggtattgatgggactgacccttgtttcatatctgatggatatatataatgtactgatgacctcttcctcctccgaaaccattttcctgaacagttcttttgctacttccctgtttgtcggtttggccaccagagcattcgctttactgatggggcgttaccgttctctctttaccgaagcccgttatctgagatacactccctggaattcgatcatgcttcttgctgctgccgccatcctctattatacatttatggcagagtttgccttgcacttggcaggagctacaagaagcggaatgatgctggcgtttacttctgctgccatctttattctcagctatgctttcaaaaagcgcttcccgataaaacaatacacaatcccttatctgacagctatgggaatgaacgtgctgatctatgcgatcaatatatggggagaccagtgggtatacacgagcctgactcctgctttgctccgatggtttgcggcagcgtttgttatagctaatctgtactacgttgcccgtcaatactatacattaataggattgaaaactcctttcaccgtttatctgaatgtcctggcgctcttcctttggctgacgatggcacgttctttcctcctgcaagcaggagtagaagatttcgatgccggcttctccgtttcactgagtatcgcaggatttattcaaatggcactgggtatgcgtctgcatcagaaagtactgcgaatcatcagtctttcaacttttggaatcgtcctgttgaagctgattctgaaagacttatgggcaatgccaacaatcggtaagatcattgtatttatcattttaggattgatcctgctgatcctctcattcctttatcagaaactaaaagacgtactctttaaaaatgatgaagatgaaactgattgagcagactatataataaagtaaaggctgccatccactttcgaacaggcagcctttactttattatattcgtctttattatctttattcctgtgaagccgcgaagcgtttcacctgctcttcaatcagttctttgtcatcgaaatagttgatcttcatagccttcttcacatccgccaatgtttcggcagcggcagctctggctacttcgcatcctttttgtagcatctcgtaaacggcaggaatatccttgctgaactctttacgacgattgcggatcggttccagtgtttcctgcatgatagcgttcaggaagcgttttaccttcacatcacccagtccaccgcgttgataatgcgctttcagttcatccagattcggataatccggcagatagcgttcgaagtgttccggacggcagaaagcatccaggtatgtaaatacggtattaccttcaatcttgcccggatcctgtacgcggaggtgtcccggatcggtatacatactcatgattttcttctgaatttcttccggttcttccgacaggtagatacagttgccgagtgatttactcatcttggctttgccgtccgttcccggcagacgcaggcaggcagcgttgtccggtaacaggatttccggttctaccagcgtttcgccatagatatagttgaaacggcggacgatttcacgagcctgttcgagcatcggttcctggtcttcaccgacggggacggtggttgcccggaaggcagtaatgtccgcagcctgactgataggataagtgaagaatcctacagggatgcttgtctcaaagttacgcatctgtatttctgatttcacagtcgggttacgttgtaaacgggatacgcttacgaggtccatatagtagaaactgagttcgcaaagttccggaatctgtgactggatgaagatggtagccttggacgggtctattccacatgccagatagtcaagagcaacctcaattacattttgacgtaccttctccggattatctatattgtccgtcaacgcttgtgaatcggcaataaagataaacatcttactataatcacctgcatcctgcaggtcaactctgcgcttcaatgaacctacatagtgtccgatatgaagtctcccggtagggcggtcaccggtaagtatgattttttcttttcccattgttgttaccttattataatagatttagcgacaaagataaggataaaaaatgaaagatgcgtcaaaatggagctacttcgttactaatgcttactattgctggcttttggtatcagatggcagggggacggcgcctgttttcacagtaacaaagcaaataaaagagaatattcttcttcaaattctttgtagttttagaaatatgtcgttactttgcacaaattttgaaatcgacaatgaatcaacaagaaataagaagtaagtattatctacattcggatgttttccacccggaatcaacaaccttcttcttttttctccaaaaacgatattttagttctttggtaatgcgttaatccttttacgagggtaacgcattttttttattggcaaaacttagaaataacaacttactataacaacaaaagaaatggaaaaggaaatcaagaaagttctcgttttgggttctggagcactcaaaatcggacaagccggagaatttgactactcaggctcacaagcactgaaagctttgaaagaagaaggtatcagctcagtattggtaaacccgaacatcgcaaccattcagacttctgaaggaattgccgataaagtgtatttccttcccgtaactacttatttcgtagaagagattatcaagaaagaacgtcccgacggcatcctgctggcatttggcggacagactgcattgaactgcggcgccgaactgtacacacaaggtattcttgataaatatggagtgaaagtactcggtacatcggtagaagctatcatgtacacggaagaccgtgacctgttcgtgaagaaactggatgaaatcaatatgaagactccggtaagtcaggcggtagaaagcatggaggatgccattgctgctgcccgcaagatcggttatccggtgatggtacgttcggcttacgcgttgggaggtctgggtagcggtatctgcgctaacgaagaagaattcctgaaactggccgaaagctctttcgccttctccaagcagattctggtagaagaatctctgaaaggctggaaagaaatcgagttcgaagtgatccgcgacgcaaacgaccactgcttcactgtagccagcatggaaaacttcgacccgctgggtatccacaccggtgaatctatcgtagtagctccgacttgctcattggacgacaaagaactgaaactgttgcaggaactgtctacgaaatgtatccgtcacctcggcatcgtaggtgaatgtaacatccagtatgcgttcaactcagatacggacgactaccgtgtgatcgaagtaaatgctcgtctgagccgttcttccgcgctggcatccaaggctaccggttatccgctggcattcgttgccgccaagatcgcattgggttactcactcgaccagatcggtgaaatgggcactccgaactctgcatatcttgctccgcaactggactactatatctgtaaaatccctcgttgggacttgacgaaattcgccggtgtatcccgcgaaatcggttcaagcatgaagtcggtaggtgaaatcatgtctatcggccgctctttcgaagaaatcatccagaaaggtcttcgtatgatcggacaaggcatgcacggttttgtcggtaatgacgatgtacacttcgacgaccttgacaaggaactttcacgtccgacagacttgcgtatcttctccatcgcacaagctatggaagagggatattccatcgaccgcatccacgaactgactaagatcgatccttggttcctcggcaagctgaagaacattgttgactacaaggcaaaactgtctacatataataaggtggaagatattccggctgacgtgatgcgcgaagctaaaatccttggtttctctgacttccagattgcccgcttcgtactgaacccgaccggcaacatggaaaaggaaaatctggcagtacgcgctcaccgtaaagccctgggcatccttccggcagtaaaacgtatcaatactgttgcttccgaacatccggaactgactaactacctgtatatgacttatgcagtagaaggttacgatgtaaactattataagaatgagaaatcagtagtcgtactgggttcgggcgcttaccgtatcggtagctcggttgaatttgactggtgctcggtgaacgcagttcagactgcccgcaaactgggttacaagtctatcatgatcaactacaaccccgaaacggtttctactgactacgatatgtgcgaccgtctgtacttcgacgaactctctttcgaacgtgtactcgacgtgatcgaccttgaacaaccgcgcggtgtgatcgtatccgtaggcggacagattccgaacaatctggctatgaagttgtatcgccagtcagttcctgtactgggtacttctccggtttccatcgaccgtgccgaaaaccgtaacaagttctcggcaatgctcgaccagcttggcatcgaccagccggcttggatggaactgaccagccttgaagaagtgaagggatttgtagaaaaagtaggttatccggtattggttcgtccttcttacgtactctcgggtgcggctatgaacgtttgctacgatgacgaagaactggaaaacttcttgaagatggctgccgaagtatctaaagaatatccggtagttgtttctcagtttctcgaaaatacaaaggaaattgagttcgacgcggtagctcagaacggtgaagtggttgaatacgctatttccgagcacgtagaatttgccggtgtacactccggtgacgctacactggtattcccagcacagaagatttactttgcaactgcccgccgcatcaagaagatcagccgtcagattgctaaagaactgaatatctccggtccgttcaacatccagttccttgcccgcaacaacgaggtgaaggtaattgaatgtaacctgcgtgcttcccgtagcttcccgttcgtatctaaggtgctgaaacgcaactttatcgaaacagctacccgcatcatgctggatgctccgtacagccagccggacaagactgcgttcgacatcgactggatcggcgtaaaagcttctcagttctctttctcccgtcttcacaaggctgaccctgttttgggcgtggatatgtcttctaccggtgaagtaggttgtatcggcgacgatttctctgaagcattgctgaacgcaatgatcgctacaggattcaagattccggaaaaggcggtgatgttctcttccggtgctatgaagtctaaagtagatttgctggatgcgagccgtatgttgtttgccaagggatatcagatttatgctactgccggaacggctgcattcctgaacgctcacggtgtagaaacgactccggtttactggccggatgaaaaaccgggtgctgaaaacaacgtgatgaagatgatcgctgaccataagttcgacttgatcgtcaacattccgaagaaccacagcaaacgtgagttgacgaatggttaccgtatccgtcgtggtgctatcgaccataacattccgttgatcaccaatgcccgtttggcaagtgctttcatcgaagcattctgtgaactgaaactgagtgatattcagattaagagctggcaggaatataaataaactgctttagctgtatatatatattgaggagactctctctttggcataccaaagagggagtctcttcttttgtagatatgactcttctttttgtttgttgtctgcggtgtaatgagtcgtaagatagtgctaatgttctcttcagctccttatatacttgctttttcctataaggaaagtaggaatagagtgccgttctctttagctcttcacggccgtgaacaggtctgctcatggctgtgatcaactcttgtcacgaccgtgaacaatgcttgccacggccgtgaacaactaaagagatcggtgtcttaatggaacaataaagacactataagagaaagataccggtagtatacggtatttgttgcgtaggatcaggactcggatgaagtaggcttgatggggagatagcagtaggtgagatgaacagtgagattgggagggaagtgacaataaaatgtatggatgtagctattgtcaccgtattatcaccgcttattatcaccgatgatatgtttataatcagttagttaacttcgaaaagtgataagtgacaataaaaaagcgttttattgcttagggaagaaacgtttgtgtagcttttggttatacaggtttgaattgattcgtaacggttcaaaaatgaatgaaacagtagtatctccattgggggcacccccattttaagatactattactatcattttgctcaaatccgtacgtaaatgaaatgaatgattgtgcttcttccagaagcggattacacagattgatacggtttttggtagattgtaccgctaaaaaaatgtgaaatctgtgtaatccgtatctaaatcttatggtttgcttacgcaataattgtatactttcagattctgtaccttactattaaagtttcctgctttctccagcgggaaaactagtgtacgtacatagttcattgaatcttttcccgcattaaagtaaagtttctgcgtattcatttcatcaaccactttaccgttgactctcagcgttgtactgcaattgtctccttctatctgaattgttgctttttctcccggattcactttgtaggggaaggtattcagatagccgtcgcgtgcaaatcccatcatcccccgaatagggtctgacagatagaatacggcgttaggcgaacggaacaattcggttccttcactttcttttgctccggtaatgtcgaaactgacagtgtaattatagccaatttccggataatcggaagtgctgccgggagcgactgtggaacgttcgtataccaattccggctttttgccgattcttgccagttggttgactccgggcgcttcgctgaggagggcacgtttttcattgaatgtttcataaggaatgcctgtttgagcgcctgtccacatctttacagagagtgtttgcaggggcgagaatatacggtgatggatgtctttcaccgagataccgttgccgacatggtcgttccagatggcaaacataccgccaagaatggaaggatgtttttcgtcgaatacagctttgccgatatgggcgggtgtccactccttatataagtatggttcgttgaggtaatcataatagtagccggctttcggaacgatatataccagtccgtccggaatactgatcagttgatatccgtctttgatcatagttgccggatcggcgtatccgttgtaccaagcattcatgacgacattttctgatttgacgggcgtatcgcctttggcatggctgagcgcgccccatacgactgcttgcttgccgaaaccttccacaaaacggatgtaatggtcggtgaaagcacggaatttttctaccacgtctttcttcgcgttcgagtattcgtctgtaccgatatgtacacgcttgcctacgaataccggattgtcgccttccagatattctttgaacagagcatctacgaattcgtaagtttccggcttgaacaagtcgagatgatccatgccgtactccttgcttccgatttccggtttgtaatgggtgagagccagtgagtgggcgggaacgtcaatttccggaatgatttccacgaagttggataccgcctgtttctggaagtcgataaattctttcttggagtacgagccgtcacgggctgtcaatcccggataagtctctgattccagccggaaggcagcgtaagtcttgtcccagttgtgttcgaagtattgcttgaatccattatcgttcagatggacttgcagggtgttcattttgtagtaagccatgattttcaccaagtcctgcagataagccatcggaatgaacttacggccacagtctatcatgaaaccgcgaagcggataatcgggataatcacgaatcgttccttgcgggagtgagcgttcctgattttgttccgccagttgcaggagtgtgcgtgtgctccagtaaagaccggtcggggtgggagcggagatggctacacggtcggttatcttgatggcgtaaccttcctcaccgagcttcttgtctgccgacaaggataggacgaaatcgccgggcgtggctttgccttgtgctacgcttaatgtctgcccgaacatctgttgataatcgtcggcaaacatccgggctattctcagtaattcgggattttgggaagtgcagacgattcgggcgtcttttcccggggtgaagttaccgtcttttcccgtccattgtttgagttcggggacaacaaacggtttcgggttgacagcggcacgggttaagctacccgtcagacaaaagatgaccaataaggccagaactttcaaagatacaaacttgtttctcataagggggatttttgtgtttttgttaattaataaatgattatagttaattattggctgaaagtaggcataatttggatatctgtcaacaagtgaagctatttattttttatttttgtgtttttcaaaatgattaaacccgattcagaatgttagtacttctatcttgtgccaagacgatgagtgcggtgtcgaaggtgaaagtccctttgactacgatcccccgttttcagaaggaagcggcggaaatagcgttgcagatgtcccagttttctgtagacgaattagaacgtctgctgcgtgtaaacgcaaagattgctgtggagaattataaacgttatcaggcttttcatgcggaaaccactccggaattgcctgctttgctggcgtataccggcattgtattcaaacggctgaatccgaaggacttctctgcagaagatttcgggtatgcgcaggaacatttgcggctgacttctttctgttacggtctgttgcgtcctttggacgtgattcgtgcttatcggctggagggggatgtcgtattgccggaattggggaatcagactttgttttcttattggcggtcgcgtctgacggatacgttcatagaggacatccgatcggcaggaggaatcttgtgtaatcttgccagtgacgagatgaaaagcctgtttgactggaagcgggtggagagcgaagtccgtgtggtcactcccgaatttcatgtctggaagaatggaaagctggctacgatagtggtgtataccaagatgtcccgtggcgagatgacacgtttcatattgaaaaataagatcggaaatccggaggaactgaaaggattctcgtgggaagggttcgagtttgacgaatcgctttcggatgaaaggaaattggtatttattaatgggatgggagaataaggaatatgacagaagtagagaagatgcgtagcagccagttggctgatatgtccgcgccggagttgcaggtgcgttttgagcatgccaagaagttgctggcgatcatgcgcgggttgagcacgtacgatgacgggtacagagaattgttggaagaactggtgccgggtattcctgaaacttcggtgatctgtcctcctttccattgcgatcacggagacgggataaagttgggcgaacacgtgtttgtcaatgccaactgtacttttctggacggagggtatatcacaatcggtgcccatacgctagtcggtccttgcgtacagatttatacaccgcatcatccgatgaattatctggagcgtcgcggttcgaaagagtatgcttatccggttacgatcggcgaggattgctggattggcggcggtgctgtcatttgtcccggtgtgacgattggcaaccgttgtgtgataggagcgggaagcgtcgtgacgaaagatattcccgacgacagtgttgcagtcgggaatccggcgcgccttatccgtaagcaggcttgaccgggaatcttatttcccggatttgagtgttcccacattgttggctttatcttgttctgtttagtggacaggcttggagaagggaaagttgcatgaaaaaaaacttttttcattatttgctgataatcagttggtttttatttttgataaaaagtttcttgaaaaataatatgcaaaatgtttggaggtttcaaaaaaagccgtacctttgcatcgcttttgaaacggaagtgtacgggcgcttagctcagctggttcagagcatctggtttacacccagagggtcgggggttcgaatccctcagcgcccacgaaatagaagtcttacgaagaaattcgtgagactttttttatttcttaccgcttttatacaaactttctttatccttttgccttataactcaggaaaaagagttaattttgcagtctgataattatctaagaaaacgtatggaacttgatgtattaacggccatatctccgattgatggtcgatatagaggcaaaactaaagctttggcagcttatttctctgaatttgcactgattaaataccgtgtacaggtagaggtggaatactttatcaccttgtgcgaacttcctttgccgcagttgaaaggaatcgatagcagcgtgtttgaaactttacggaatatctaccgtaacttctcggaagcagatgcgcaacgcattaaagatatcgaaagtgtaaccaaccatgatgtaaaagccgtagaatatttcctgaaagaagaattcgataagctgggtggaatggatgactataaagaattcattcacttcggattgacttctcaagacattaataatacgtctgtgcctctttctatcaaggaagctttggataaagtctattatccgctgatcgaagaactgattgcacaactgaaaacgtatgcaacagaatgggctgaaatcccgatgcttgccaaaactcatgggcaaccggcttctccgactcgtttgggtaaggaagtgatggtattcgtttaccgcctggaacgtcagctggctatgctgaaagcatgtccgatcactgcaaaattcggtggcgctaccggaaattacaatgctcatcatgtagcatatcctcaatatgactggaaacaattcggtaatcggtttgttgcagagaaactgggactggagcgcgaagaatataccactcagatttcgaactacgataacttgtctgctgtctttgacgcgatgaaacgtatcaacaccatcatggtggatatgaaccgtgacttctggcagtatatttctatggaatacttcaagcagaagatcaaagccggtgaggtaggatcaagcgcgatgccgcataaagtgaatccgatcgactttgaaaatgcggaaggtaatttgggtatcgcaacttctattctggaacacctggctgtgaaactgcctgtttcccgtttgcagcgtgacctgacagactctacggtgctccgtaatgtaggcgtgcctttcggtcatatcgtgattgctattcagagttcactgaaaggacttcgcaaactgttgctgaacgaaccggctatttaccgtgatttggacaactgctggagcgtagtggctgaggcaatccagacgattttacgccgcgaggcttacccgcatccgtatgaagcattgaaagctttgacccggaccaaccaggctattacagaaagttctattaaagagtttatcgaaggcttgaacgtaagcgaagatattaaaaaagagttaagagcaattactccgcatacatatacgggactttaattgtttacttatacaataaacgtgtttttttaataggccgtgaggccaaagtctaattttattcgaataaaaaaatgagcacagaaaacgaagaatggcgcgaaaattcttacaatgaggagaatacaggtgccggccgtgatggtaacaagtcttacaacagagaaggtggagaacgtccgtatcgtccttcttacaaccgtgaaggtggggatcgtccgtatcgcccgcgatttaatccgaatagtgaaggtggagagcgcccacagcgttcttatggtgaacgttcttatgatcgcccccaacgtccttcttacaatcgtgaaggtggagaccgtccgtatcgtcctcgcttcaatagcaacaatgaaggaggcgaacgtccgcaacgtccttacaaccgcgaaggtggtgaacaacgttcttatgatcgtcctcaacgcccttcttacaaccgtgaaggtggagaccgtccgtatcgtccgagatttaatccgaacggcgaaggtggcgatcgtccgcagcgtccttacaatcgtgaaggtggcgagcaacgctcttatggcgaccgtccgtaccgtccccgttttaacagtggcgaaggtggcgaccgtcctcagcgtccttataaccgcgaaggtggtgatcgtccatatcgtccccgcttcaacagtggtgaaggtggtggctaccgtaataacaacggtggtggctatcgtccgagatttaacaatgaccgttcgcagggtggctatcgtccgcgtccgcgtaccagtgattacgatccgaatgctaagtatagcatcaagaagcagattgagtacaaggaacagtttgttgatccgaacgaaccgattcgtctgaataagttcttggctaatgccggtgtttgctcacgtcgcgaagctgatgagtttatcacagcaggtgtggtttctgtaaacggtgaagtagtaactgaattgggtacaaagatcaaacgctcggatgtggtgaagttccacgatgaaccggtaagcatcgaacgtaaggtatacgtactgttgaataagccgaaagatacggttactacatcggatgatccgcaggaacgccgcacggtaatggatctggtaaaaggcgcttgcaacgaacgcatttatccggtagggcgtcttgaccgcaacacgactggtgtacttctgttgacaaatgacggtgacctggcttccaagctgacacacccgaaattcttgaaaaagaaaatatatcatgttcatctggacaagaacctgacaaaagcagatatggatcagattgcagccggcgtacagttggaagacggtgaaatccatgcagatgctatcagctacacagatgatttcaagaaagaccaggtaggtatcgagattcactccggcaagaaccgtatcgttcgccgtattttcgaatcactgggatataaagtagtaaaactcgaccgtgtattctttgccggactgaccaaaaaaggtctgcgccgcggagactggcgttacctgtcggaagcagaagtaaactacctccgcatggggtcgtttgagtaatatataatattgtattaaaaaagttttatggaaaagattggtagaacaaaaattgttgatctgttgaagcgcgaagatattggcgctatggtcaatgtgaaaggatgggttcgcacccgcagaggtagcaaacaagttaactttatcgcactgaatgacggttctacaataaataatgtgcagatcgtagtagatctggctaatttcgatgaagagatgctgaaactgattactaccggggcttgtattagtgtgaacggagtaatggtggaatctgtgggttccggtcagaaggtggaagtgcaggctaaagaaatcgaagtgctgggtacttgcgacaatacatatccattgcagaaaaaaggtcactccatggaattcttgcgcgagatcgctcacttgcgtccgcgtaccaatacctttggtgcagtgttccgcattcgtcacaacatggcgattgctattcacaagtttttccatgaaaagggatttttctatttccatacaccgattatcacaggttccgactgtgaaggtgccggacagatgtttcaggtaactaccatgaatctgtatgacttgaagaaagacgaaagaggttctatctcttatgatgacgacttcttcggcaagcaggcaagtttgacagtatccggtcagttggaaggtgaattggctgccactgctttgggcgctatctacacattcggtcctactttccgtgccgaaaactccaatactccccgccatttggcagagttctggatgattgagccggaagttgcgttcaacgacattgctgataatatggacctggcagaagagtttatcaaatattgtgtgaaatgggcgttggataactgtgcggatgatgtgaagttcctgaacgatatgttcgataagggcttgattgaacgtctgcaaggtgtattgaaggatgatttcgttcgtttgccttatacggatggtatcaagattctggaagatgccgttgcgaaaggtcacaagttcgaattccctgtttactggggagtagacttggcttccgagcacgaacgctatctggtggaagatcacttcaaacgtccggtgattctgactgattatccgaaggaaatcaaagccttctatatgaagcagaacgaggatggaaagacagtacgtgcgatggacgttcttttcccgaagatcggtgagatcattggtggttctgaacgtgaagcggattataacaagctgatgactcgtattgaagaaatgcatatcccgatgaaggatatgtggtggtatctggatacccgtaagttcggtacttgtcctcactccggtttcggactcggttttgaacgtctgttgctgtttgtaacaggtatgtcaaatatccgtgacgtgataccgttcccgcgtacaccgagaaatgctgatttctaatatttcggtatatttatgtaaaactcgcataatcttttgattgtgcgagtttttttatgcatttgattgttactttctcaaaataaatctttatatttggacatacgcctttaaaagtgttaactaaaatcatattgtcatgaaaaagctctatttctttaccatgctttcaattatgttgttagcggtaacaggtgcgacggcccaaaagaaaaccaaattcaaaccggccgatttgaaagggatctggcagttgtgccattatgtatcagaatctcccgatgttccgggatcgttgaaacccagtaatacatttaaggtattgagtgatgacggcagaatcgtgaattttaccattattcccggttcggatgcgattatcacaggatatggtacgtataaacagttgactgatgattcttataaagagagtatcgagaagaatatccaccttccgatgctcgataatcaggataatattctggagtttgaaataaaggataatgattatctgcatttgaaatacttcatcaagaacgatctgaacggaaatgaactgaacgcttggtattatgagacctggaaacgggtggagatgccggctaagtttccggaagatattgtgcgataaattagattgcaatatagattctttgttgttttttgacctccccggtgtcaatccggaggaggcctttttattttctgcaccttatctacaaatatagtaagtttcccttgtcattcaacccgataaatccaaaaaaagctagaaatagtttgccaattcaaagaaaagccgtacttttgcaagccgattattatcacaaaatgataagagattaattcatagcaagttagttgtcctttgtccggggagactaatatgtggtgaagaaaatttttagtagtaacatttaaaaaacaaaattagagtggatactttaagttacaagaccatttctgcaaacaaagcgactgtaaccaaagaatgggttattgttgacgctacagaccagactttaggtcgtctgggagcaaaagttgcaaaattgctgagaggaaagtacaaaccaaactttactcctcacgt

SEQ ID NO: 4825 - DNA, 23725 bp, Unknown
  gut microbiota DNA sequence
cgtaaccaaagaatgggttatcgttgacgctacagaccaaactttaggtcgtctgggagcaaaagttgcaaaattgctgagaggaaagtacaaaccaaactttactcctcacgtagactgcggtgataacgttattatcatcaatgcagacaaagtaaaactgactggtaacaaatggaatgacagagtatatttgtcatatacaggctaccctggtggtcagagagaaatgactcctgcccgtttgatcactaaaccgaacggcgaagagagattactgaaaaaagtagtgaaaggtatgcttcctaagaatatcttgggagctaaattgctgggtaacctgtatgtatacgctggtagcgaacacaaacatgaagctcagagcccgaaaatgattgatattaattcatataaataagatataatggaagtagtaaatgcattaggcagacgtaaacgtgcaattgcacgtgtattcgtaagcgaaggtacaggaaagattactattaacaagagagaccttgcagagtactttccatcaactatacttcagtatgttgtaaaacaaccattgaacaagctgggtgctgctgagaagtatgacatcaaagtaaacttgtgtggtggtggtttcactggccagtctcaggcattgcgtttggcaatcgctcgcgcattggttaagatgaacgctgaagataaggctgcacttcgtgctgaaggcttcatgactcgtgacccacgttctgtagagcgtaagaaaccgggacagccgaaagctcgtagaagattccagttcagcaagcgttaatgtgctgcctgaccgaggaatatgtttagtatctaaactactgggactctgctcatagactacccagcggttggtttagaaaaaacaaaaaagaaagtaaacgatttaaagaaaaaacaagatgtcaagaacaaattttgatactttattggaagccggttgccacttcggacaccttaagagaaagtggaaccctgcaatggctccttatattttcatggaacgcaatggtattcacatcattgatctccacaaaacagttgcaaaagtagacgaagctgctgaagctttgaaacagattgccaaatcaggcaagaaagttctttttgttgctactaaaaaacaagcaaagcaggttgttgctgagaaagctcaatctgttaatatgccttatgtaatcgagcgctggccgggtggtatgttgaccaacttcccgactatccgtaaggctgtgaagaagatggctactatcgataaattgactaacgatggtacatattctaacctttctaagagagaagttcttcagatctctcgtcaacgtgcaaaattggacaagactttgggctctatcgctgacctgactcgtctgccgtctgcattgttcgttatcgacgtaatgaaagaaaatatcgcagttcgtgaagctaaccgtctgggtatccctgtattcggtatcgttgatactaactctgatcctacaaacgttgacttcgtaattcctgctaacgatgacgctactaaatcggtagaagttatcctggatgcttgctgtgctgcaatgatcgaaggtttggaagaaagaaaagctgaaaagatcgatatggaagctgctggtgaagctcctgcaaacaaaggcaagaagaaatcagtaaaagcaagactcgacaagtctgatgaagaagctatcaacgcagcgaaagctgctgccttcatcaaggaagacgaagaggcttaaatatataaatgtgccaatttgctagcgtgcaggcgtgtggtagttacctcatcctgcattgtattggcagattggcacattttttgttttgaaaattattattcatttaaataaaggaaattattatggctgtaactatggctgatattaccaagctgcgcaaaatgaccggagctggtatgatggattgcaagaacgcattaacagaagctgaaggcgattacgacaaggcaatggaaattatccgtaagaaaggacaagctgttgctgctaagcgttcagaacgtgatgcttctgaaggttgcgttttggctaagactaccggtgactatgccgttgtcattgctctgaagtgtgaaactgactttgtggctcagaatgctgattttgtgaaactgactcaggatattcttgatcttgctgtggctaacaaatgcaagacattggacgaagtaaaagctttgccgatgggtaacggtactgtacaggatgcagtggttgaccgtagcggtatcacaggtgagaaaatggagcttgatggttacatgactgtagagggtgcaagcactgctgtttacaaccacatgaacagaaacggtctttgtaccattgttgcttttaacaagaacgttgacgaacagttggctaagcaagtagctatgcagattgctgccatgaatccgattgctattgatgaagacggtgtttctgaagaagtgaaggaaaaggaaattgctgttgctatcgagaaaacaaaagctgaacaggtacagaaagctgtagaagctgctttgaagaaagctaatatcaaccctgctcatgtagatagcgaagagcacatggaaagtaatatggctaagggctggattacagctgaagatatagctaaggcaaaggaaattattgctaccgtttctgctgaaaaggctgcacatctgccggaacaaatgattcagaacatcgctaagggtcgtctgggtaagttcttgaaggaagtttgtctgctgaaccaggaagatattatggacgctaagaagactgtaagagaagtattggcagctgctgatcctgaactgaaggttcttgactttaagcgcttcactctgaaagctgaataatctatctcaaaaagataatagagaagggcggaactttgatggtttccgccctttctcattatcctccgactcctttggtctttgtatatccttcttttatcaacaggtctatcactttctgtttgaaatctccctgtacgatgatttccccgtctttggccgaacctccgactccgcatttactttttagcattttcccgagttctttttggtcattctctgttccaacgaatccggtgatgagtgtaactactttgccgccacggttttttctgtcgagagaaacccgaaggttctgtttattcttgtccagcgtcacttgttcctgatcgtcatccatgtcatagttgaaatcaggatttgtagagtagaccacgttcaatctatctttccaatcattatttttcatatacttcagcttttattgtgtcaaaagtaatattttgtggggaactttgcaatcttttgtttactttggcgtctaataataaaacgaaataagactaataaacagaaaatgatgaaacgatccatagcgtttgctctcatatgttcttttactatttctctttgggcacaaacatttaaaggcagagtcgttgatcttgcaggaaatccgatcccctatgcggcactctatctgaaagaacttaaaacaggcttcactaccgatgataacggctgttttcagacctcgctcccggcgggacaatatacctgtgaggtttcttctttaggtttcgccggacaaacattctccttttccatatctgccggagatgtggaaaagaatattgtgctctccgaacaaatatatagtctgcgggaagtgaatgtggtgaaaggtgcggaagatccggcctattccgtaatgcgtaaggcgattgcgaatgctccttattaccggacacaggtgaagggatttagggccggaacctatctgaaaggcacaggaaaaatgaagactattcccgcaattctaaagttgtcgaaggaagttaggaaagagtcgaaagagtttctgggcaagttgtttgtgatggaggaacagagagtggtgacttttaaggcaccctctacttgggagaatcaggtaaaggcctattccaattcatttcccgaggagatggaggtcagaatcggtctgaccactattaacttttacgagcctactatcttcgataaagtatcaccgctaagtgccggagcattctcttattaccgttttaaactggaaggctgctatagtgaaggcaaccatctgatcaataaaataaaagtcatccccaagcaagacagtccgcgtctggtgtccggagatttgtatattgtggaagatctttggtgcgtctctgcggctgaattttctatccgtatgagtggcctgaaagctacggtcaaggcaacttgtaaagaagttcagccttctgttttcctggctacctccacaagtatgtcctgtgaaatcaaaatgatgggattttctgcagaggcttcctatctggcagcagtacattatacgaatgtggaaatagcagaccgtcagcaagtgatgaatggggcttctgatgcctcaccgaaacaaaacaggaagcagcagaagcttgtaaagcagatagaagaactgtcgacgaaggaggacttgactttgagtgaagcctataagctatctaagctgatggaaaagaacattgccgaatccgatactgcacgttctccgcataaatatgaacgtaaagtgagaaagagagaagtgaatataaagaccgattcgctggcggacaaaaaggattcgctttattgggcagctgtcagaagtgttcctttgcgtccggaagaaatacagagttatatccataaagaagagttatccctctccaaagactcccttcaggagaatgattcggctaaaacaacagttgggaaaaagatcattcaaacattcctgatgggtaaaacctatcgtacttcagacaagaaagcatggattggctggaaaggcttgccttcctatgtgcctgagtataattttgtagatggcttctggctgggagctaagtttgaaacagggttgaaattatcggaggcctctactttgcaattcactccttctgcttattataccactgcccgtaaagcggtagcagggcaaagtgaactctccttgagttatgctccgaggcgacggggatatctggaactgtccggcggagttctttctgccgattataatggagaaagtggagaatcccgtctgataaataccgttgcctcttctttcttcgggcggaatgatgtgaaactctatgagaagcgtttcctgtctttccaaaataagatcgaactggcgaatagtttgttgctttctacctcgctttcctggcagcgacgacagatgctggagaatcatatacaccggagctggttcaagaaagaagcggagtcgaatattccggacagccgggcattctatccgatgccggaaaatgaattgttgaaagcttcctttgccttggaatatacaccggctcattattaccggatgtacagaggaaagaaagtatatgaagaatccaaatgccctacctttacattgcgttatgaccgtgctttcccgttgaaaggggctttgccttctccgtcctatcacttggcggagttttcggtcaggcagagcatagagttcggaatgtttaatacactagactgggctgttaatgccggaacattctggaataagagcggtatgcaattccccgatttcaagcattttgcgaccacaggtttgccggtgacggaacgctcgtttgatacaggattctctttgctggataattatgcatactctaccaatacccgttgggtacaagctaatatttcctggtacacaccctgtctgttgctgaaatttcttctttttctgaaaaagaagaacctcgatgaagcgctgcatctccgtacacttgtggaatacgaccgccgtccctattcggaaatcggttactccatcggattcatgaaactggcacggttaggcgtcttccttggcttcgacagtttgaaataccgctcggcgggagtttccgtcagcattccgttgtcaacgtttgcgggagaatagcacctgtgtagaaatagtatgaatcattcttgcaattccgaaaaaaaacgtatttttgtcaatcttataacctgaataaataaaagaaatggccgagaaccaaaagatacagcagatagattgtacgaaagtgccggagcctactttgcgcagactgccttggtacttgtcgaatgtcaagttgctgaagcaaagaggcgaacgttttgtctcttctacgcagatatctaaggaaataaatattgacgcttcacagatagcaaaagacttgtcgtatgtgaatatctccgggcgtacacgtgtcgggtacgaggtcgatgcgctcattgaggttttagagcacttcctggggtttacggagatacataaggcttttctttttggagtcggcagtttgggaggcgcacttttgcaggactccggtctgaagcatttcgggcttgagattgtggctgcttttgatgtagacccgactttggtcggcactaacctcaacgggattcctatctaccattcggacgactttctgaagaagatggaagaatatgacgtgcagattggcgtgctgaccgttcctatcgagattgcccagtgcatcacagatatgatggtggacgggggaatcaaggcagtctggaactttaccccgttccgtatccgtgtacctgaggacatcgtggtacagaatacatccctttacgctcatctggcggtgatgttcaaccgccttaattttaatgaaatcaaataatgaagattattgccgtaggaatgaactatgccctgcacaatcaggagctgggacatacatccgtaaataaagaaccggttattttcatgaagcccgattcggctattctgaaagatggcaaaccgttctttatccccgatttttcgaatgaagtacattatgagacggagcttgtagtacgcatcaaccgtttgggaaagaatatttctccccgttttgccagtcgttattatgatgcattgacggtaggcattgactttaccgcccgtgacctgcaacggaaattccgcgaagcgggcaatccgtgggaactttgcaaaggttttgactcttctgccgctatcggcacctttgttccggtagaccgctacaaagatatccagtctctgaatttcaatctgatgattgacggcaaggaagtgcagcgcggctgtacagccgatatgcttttcaaagttgatgacatcattgcctacgtcagtaagtttgtgactttgaagattggcgatttactatttacgggcacgcctgccggagtagggccggtcagtatcggtcagcacttgcagggatatcttgaaggtgaaaagctgcttgacttctacatacgttgacccgtatattctttatttgactcatttattaaatagtttatgaaaataagagtaggttttggcttcgacgtacatcagttggtcgaaggtcgtgagttgtggctgggcggtatccgtctggaacattccaaagggttgttgggacattcggatgctgacgtattgctgcatacggtttgcgatgccttgttgggagcggccaatatgcgcgatatcggttatcattttccggatactgccggagagtacaagaatatcgacagcaagattcttttgaaaaagacggtagagctaattgcgaccaaaggataccgtgtcgggaatatcgatgcgactatttgcgcggagcgtcccaaactgaaagcccatatccctttgatgcaggaaacgatggcagccgtcatgggaatcgatgcggaagatatctcgatcaaggcgactacgacggagaaactcggttttaccggacgggaagaaggcatttccgcttatgctactgtgttgatagagaaggactgacaaagcagattactaacccccttaaacaataaatagtatgaatcgaactttaaaattattcttagcactggtctctttgtgtatgaccgtcttctgcttcgcccaaaagagcgaattacgcttcaataaagacggtaaatttaaaatcgtacagttcaccgacgtccatttcaagtataagaatcccgcttccgacatagcattggaacgtattaatcaggtactcgacgaagaacaacctgattttgtaatcttcaccggagatgtcgtttattctgctccggcagataaaggtatgttgcaggtgctggaacaggtatcgaagcgtaagctgccgtttgttgtcactttcggcaatcatgataatgaacagggaatgacgcgggaacagctatatgacatcatctgtcaggtacccggcaatctgatgccggatcgtggctcggtcctttctccggattatgtattgaccgtgaaagcctcttccgatgcgaagaaggatgcagccatcctgtattgcatggactctcattcttactccccgctgaaggatgtgaaaggttacgcatggctcacgttcgatcaggtcaactggtatcgtcagcagagcgcagcctatacagcacagaacggtgggaagccattgccggcacttgctttcttccacattcctgtgccggaatacaatgaagctgcttccgacgaaaatgccatcctgcgcggaacccgtatggaagaagcctgtgcgccgaaactgaatacgggtatgtttgctgccatgaaagagtccggcgatgtgatgggaatattcgtggggcatgatcatgacaatgattatgcagtgatgtggaaaggaatcctgttggcttacggtcgtttcacaggcggaaatacagaatacaatcatctgccgaacggtgcccgtatcatcgtgcttgatgaaggcgcccgcacgtttacttcctggattcgtcagaaagacggtatcgtcgacaaagtgacctatccggcaagtttcgtcaaagacgactggaccaagcgttaactattgccagcttcacgttgctgaggcgggtatatttggaaccgtagctttcgaacaggcgtgacacccgcgccgatgctacatatataatttctcccgggcgatattcatgctctattccggatagagtgcatgataccgcactgggagtttttgatgggatgctcatcgtcaccaggttgccgctggcgtcgttcagagtcagtatctgcttgacgaaaaattgcggagtcgttccgtatactcttgttttatacggatcgtcttccaggcgtacccgcatgactttcaactttaagtccgtcagcttctcgttcacttctcccagatagcggctttttcggcgtacctctttgctcttccgcagcatcacgtccagatgtaccgaatgatatgcctgcgctattttgacgaaacgctcctgtttgggaatcttcggagtaaacttataggcgatccagcttagataggcaggatcgactttgaggatttcgtgcaggaagtgtcccctgtatttgccgaaaaagatgaggtcgtcaccgttgctctgcattctcttctcgttgtaatccatcaggatgaggcaccgtcgcgaataataaaacatggtgcttgctatccgcagggactcgttgatatccggagataaatcgtgtatatagagaatcgattgcttttcgggcaggggagagtagagccaaagggaatagttgggctttcccggtcggggcaacaccaccagataaacccctgcctctttaaaggaggctctgcctcggttgtattcattcagtttggcatacaataaggcttgctcgctttcggaaattcccggtaattttggattagccataattgttctcgcttttggtataattcaaatatactgattttctttcagaaaagcaagccttggcgggagtttcttcgaataaagcctgttggtgaagttaactcgtttccgattcagatttgaatcaaccgctgattcgcattaatagctaataaagcgaaaataaaaattgagtccgaagattattcttctcataacatcataaggtgttcagatcaatgacacaaaaagagaaaggtagtattgtagcaataattcatcgatttacctagaaaataaagaatctttcaaaatcagcacccacatctatacgaaagactttgactaattatgcggtaaccgccaatcatttattaataaattctttcatcgtttattataaacgtcctccaagtttattataaactctaatttcgttattcctgcaataaacatccattttaagcaacaaaaagggctgcaattcccataaggaatcgcagcccttagcttgtatcagactatccaacaagcattacccggagtgggaatgcctgcaatctgttattatataatacttattattgctcatttttcgtctatattatcaatgttattgaatttgcttccggtttacacttacaaatatacaacattaaaagcggtttgtcaagtcctccatgcttctttcatacatctgattacaaatcatacggatttgcgccgaatgatagtcagtagtatcttgaatcatttttaaaccgttttgaataattaaagagacagtaggaaatgattgtctgatgatggcaatggggctgttgcctgttcattcattaggggacacaaacttttcatttccttttttatggctgtctgactataatcttgtacttttgtattcttctaatgattggaaattcggatgaaagaacgaaataaaagagtattggttggcatgagtggcggtatagacagtaccgctacctgtctgatgctacaagagcagggatatgaaatagtaggagtcacgatgcgtgtttggggagacgagcctcaggatgcccgcgaactggctgcacgaatgggaattgaacattatgtggctgacgagcgtataccttttaaggagaccatcgtgaagaattttatcgatgagtacaagcaaggacgtaccccgaatccgtgcgtgatgtgcaaccccttgtttaaattccgtgtattggcggaatgggccgacaagctggactgcgcctacattgcgaccggacattactcccggctggaagagcggagcgggcacatctatattgtagcgggagatgatgataaaaaagatcagtcctacttcctatggcggctggggcaggatatactgaagcggtgtatcttcccgttgggcgactatacgaaaataaaggtgcgtgagtacttggcggagaaaggatatgaagctaagtctaaggaaggcgaaagtatggaagtctgtttcattcagggagattaccgtgattttctgcgcgagcaatgtccggaactggatacggagatcggtccgggatggtttgtcaactccgaaggagtgaagttgggacagcataagggagcaccttattataccatcggtcagcggaaaggactggagatagccttgggaaagcccgcttatgtgctgaaaatcaatccgcagaagaatacagtgatgctgggagatgccgaacaactgcagacggaatatatgctggcggaacaagaccggatagtagatgagcaagaattgttctcttgtgagaatcttgcggtgagaatccgttaccgcagccgaccgataccttgtcgggtgaaacgcctcgaagacggacgcttgttggtgcgtttccttgagacggcttcggctgttgcccccggtcagtctgccgtgttctacgatggacggcgggtacttggcggtgcgtttatcgcttcgcagcgggggatcggactggtgatcatagagaataaagacaaattgtagaataaaataaatagagagatttagatgaaaagattagtattagcggcattgatcctgactacagcggtgggagcatctgctcaatttacctctaccgataccttgaaatatcggatcagcctcacagataaggctgcaaccacttattccatccagcaaccggaggagttcctttccagaaaatccatcgaccgcaggttgagacagaagctggctatcgactctaccgacttgccggtatgcaagaagtatgtagatgccatacgaaagaaaggcgtccatgtgcttgtcactggaaaatgggataatttcgttacagtctcctgcaatgacagtatgctgatcgatgaaatagccaaactgccttttgtccgttccaccgagaaagtgtggcagggaaaagtgtcggcagttaccaaaagagattcgctgatcaatgatccgcagcgttcggacagcctgtatgggcccgctatcactcagattgaaatgagccgagccaaccttctccacgatgccggattcaaggggcagggcatgacgattgccgttatcgacgccggatttcataatgcggacagaatcgaagcgatgaagaatatccgcatactcggaacacgcgactttgtgaaccccgaagcggacatctatgccgaaagcaaccacggtatgtcagtgctgtcttgtatggcaatgaatcagccgaatgtcatggtcggcaccgcaccggaagcctcctactggttgcttcgcagtgaggatgaggcttccgagcatttggtagagcaggattattgggcggcagccatcgaatttgccgatagtgtgggcgtggatgttgtgaatacctcactgggttattatacctttgacgacccgaccaagaactatcgttaccgtgacctgaacggacactatgcactgatgtcaagggaggcttcgaaggcggcagataagggtatggtcctcgtttgcagtgccggtaactctggcagcggctcatggaagaaaatcactcctccgggcgatgccgagaatgtactgactgtgggtgctattgataagaagaagttactggccccgttctcttctgtcggcaatactgccgacggacgtgtgaaaccggatgtcgtagcagtcggcctcaaggcggatatagtgggcacagacggtaatcttcgtctggccaacggaacctctttctcttctcctatcatgtgcggaatggtagcttgcctgtggcaggcctgcccgaggttgaccgccaaagaagtgatcgaactggtgcgcagcgtaggcgacagatccgattttccggacaacatctacggttatggcattccggatctctggaaagcataccaaatgagcaaagaataacgaacggtccgctattcttcgttgttaggctatatcaaattcgcatctcattatagaaatgtgtcattcatttatcgttaattatgcctatggattctctttccctactagagctaaacgcgcttgtccggcgaagtctggagcaatgcctgcccgatgaatattggatacaggcagaactgagcgatgtccgttccaacactaccggacactgctatctggagtttgtgcagaaagacccgcgcagcaacaatctcgtagccaaggcacggggtatgatctggagtaatatctaccgcttgctgaaaccttactttgaggaaactaccggacagttatttgcttccggcatcaaagtcctggtgaaagtaacagtccagtttcacgaactctacggttacagtctgactgttctcgatatcgaccctgcctatacgctgggcgatatggcccgccgccgtcgtgagatactcatgcaactcgaagaagaaggagtactgactttgaataaagaattggaaatgccggttcttcctcaacgtatagcggtcatttcctctgccaccgcagccggatatggagatttctgtcatcagttgcagcacaattctggcggattctttttctataccgaactgtttccggcgttgatgcagggcaatcaggtggaagagtccgtattggctgcattggatcgcatcaatgaccgggtgaacgagtttgatgtagtggttatcatacgaggcggaggggcgacttcggatttatccggttttgatacgtacctcttggcggccgcttgtgcccagttcccgttgcccgtcatcaccggtatcggtcacgagcgggacgatacggtgctcgactctgtggcacatacccgggtgaagactccgacggctgctgccgaacttctgattcaccggatcaccgaatcggcagatcatctggaagagttatccgcccgtctgcaacaaggggcgtatgccctgctcgaacaggaaggacggaggctggaaatgattcagacccgcatcccgaaccttgttcaccgaaaacttacagatgcccgctttgccttgctggcagccggaaaagacttggcgcaagccactcagaccctgttgtcccgtcatcgtcaccggctggaacttttgcggcaacgtgtggcggatgcttctcccgacaaactgctgagtcgtggatatagcatcacgctgaaagacggaaaagcggtcacggatgccgcttcgctgaaccccggagaccagttagtgacccgtctggctaagggaagtttcacttccgaagtccggctcgatgagcattattattcatcttaaatacaataaatatggcagctaaaaaagaaacatactctcaggcaatggagcgtcttgagaagatagtccgtcagatagacaacaacgaactggatatcgacactttgagcgaaaaaataaaagaagccaatgaaattattgccttttgcaccgagaaactgacaaaagcggatcgggaagtcgaaaaattgttgcaagaaaggcggcagtctgaataataaaagttatttttgcgaatcaaagcgtaaaataaactaatacataacgatatgaaagaaatagactgggcgaatctgtcgttcggatacatgaagacagattacaatgtgagaatcaatttccgtaacggcgtatggggcgaactggaagtcagcagtgatgaacatctcaatctgcacatggcagctacttgtctgcactatggtcaggaagcttttgaaggtttgaaggctttccgcgggaaagacggtaaagtacgtatcttccgtctggaagaaaatgcggcacgtctgcaatctacttgtcagggcattctgatggccgaactgccgaccgaacgtttcaaggaagcgattctgaaagttgtaaagctgaacgaacgtttcattccgccttatgaaaccggtgcttctctatacattcgtccgttactgatcggaacaagtgcccaggtaggcgtacatcctgccgaagaatatatgttcgtggtatttgtaactccggtaggcccttacttcaaaggtggtttctctaccaatccgtatgtgattatccgcgagttcgaccgtgccgctcctcatggaacgggtatctacaaggtaggcggtaactatgcggccagtctgcgtgccaacaagaaagcgcacgatctgggctattcctgcgagttttatctggatgcaaaagaaaagaaatatatcgacgagtgtggcgcagccaacttcttcggaattaaagataatacgtacattactccgaaatcatcttctatcctgccttcgatcaccaacaagagtctgatgcagttggcagaagatatgggcatcaaggtagaacgccgtccgataccggaagaagaactggaaacgtttgaagaagcgggcgcttgcggtacggctgcggtaatcagcccgattcagcgtattgatgacctggagaacggaaagtcatatgttatctctaaggacggcaagccgggaccggtctgcacgaaactgtataataagttgcgtggcattcagtacggtgacgaaccggatacacatggttgggtgacgattgtggaataattgatctttaagtataatctcttttaattgcgtaattactatgttgaaacaaaattcagagttgcgtgctcaagcacgtgaagcccttcgtggaaagtggcctatggcagccgttgctgctcttatttattcggctatcgccggtggtttgtcttccattccttttattggatggatcgggtctttgttggtcggactgcctgttgcatacggctttgctattttgatgctggctgtattcagaggagcggaagaggttgatctgggagtgttgtttgcaggatttcaggaatatagtcgtatcttgactactaaactgctgcaggctgtttatactttcctgtggtcattgctgttgttgattccgggtatcattaagcattattcttatgcgatgacggactatattctgaaagacgaatctgaattgtgtaacaatgctgccattgaaagaagtatggcaatgatggaaggcaacaagatgaaattgttcctgcttgatttgagcttcatcggttgggctatcctttgcctctttactttcggtatcggattcttcgttttgcaaccctacatgcaagtatctcacgctgctttctatgaagatttgaaagctcagcagggtggtattaatatcaatgtagaagtaactgtagaaaactgataagcgaataaatatcattctatagaatggagtacggagcaatctgtactccatttatttttgtagtttacgccaaaagtaagtacctttgcgtcctaatcagtaatgagatgggaaagaataaattagagaagtttgccgatatggcgagttacccgcatgtgttcgaatatccttattcggcggtggataatgtgccttttgacatgaagggaaaatggcatcaggagtttttcggaaatgatcatccgatcgtgctcgaactgggttgcggacggggtgaatataccgtcggactgggccggatgtttcccgataagaactttatagcagttgatatcaagggttccagaatgtggacaggcgccacggagtccttgcaggcaggaatgaagaatgtcgctttcctgcgtacaaatatcgagattatcgaacgcttttttgcagcaggtgaagtcagtgaaatctggctgaccttctccgatccgcagatgaaaaaggctaccaagcgtctgacctccacttacttcatggagcgctaccgtaaattcctgaaaccggatggaatcatccatctgaaaaccgacagtaactttatgttcacctatacaaagtacatgatagaagccaatcagtttcctgtcgagtttatcaccgaagatttgtatcattcggatttggtagacgatatcctgagtattaagacttactatgaacaacaatggcttgatcgtggtttaaatatcaaatatatcaagttccgccttccgcaagagggagttttgcaggaaccggatgtggaaatagaacttgatccgtaccgtagctataaccgtagcaagcggagcggactgcaaacgagcaaatgataagtaataagtgacaagtaataagtaataaatagtaattgagtggagttcttaactttccactctcaattctgaactaattatggctctttatccgaaattaatattggatgcgctggcaacggtgcgttatcccggtacgggaaagaatctggtggaagcggagatggtcgccgacaatctccgcattgatggcatggcagtcagcttttcgttgatatttgaaaagccgaccgatccgttcatgaaatcaatgttgaaggctgctgaaacagctatccatacatatgtgtcaccagatgtacaggtaactataacaacggaaagcaagcaggcagcccgtccggaagtgggcaaactgcttccgcaagtaaagaatataattggtatctcttccggtaagggaggggtaggcaaatctaccgtatctgcaaatttggcggtggctttggctaaattgggctacaaggtcggcttgcttgatgctgacattttcggtccttccatgccgaagatgtttcaggtggaagatgcccgtccgtatgcggaaaagatcaatggacgtgacttgattattccggtagagaaatacggtgtaaaactgctttctatcggtttcttcgttgatccggatcaggctacactctggcgtggtggtatggcgagcaacgcattgaagcagctgattggcgatgccgactggggggatcttgattatttcctgattgaccttcctcccggcacaagtgacattcatctgactgttgtccagacgttggcaatgacgggggcaattgttgttagtactccgcaggcggtagcgttggcggatgcccgcaagggaatcaatatgtttacgaatgataaagtgaatgtgcctattttaggactggttgagaatatggcttggtttacgcctgccgaactgccggagaataagtactatatctttggtaaggaaggggccaagaaactggcggaagaaatgaatgtgcctctgctcggtcagattcctattgtacaaagtatctgcgaaggtggggacaatggtactccggtggcgctggatgaagatacggtaaccggtcgcgctttcttgtcattggctgccagcgtagttcgtcaggtagatcgccggaatgtggagatggctccgactaagattgtagagatgcacaaataagtgctcttatttactttaaatatgaaacctcccgatgatgtacttttgtctgtcatcgggaggttgttttatcttatggtatatattggtatagcttgttgctaccttgcgattggtgattctacttttccaatgctttcatcaattgttctttcatggtatccactccggggaatccggtttgtttataagtgatgtttccttctttgtcaatgacaaagtaagtaggaacgccccggatactgaacttctcgcgcagatagctccactgttcatccgtcacacggaaatgttctccgtgaatgtcaggaatcatgtttttccaggttcccagcggagacgtttcacctgtgatgtaaaggtagatgatgtctttgtctttcagttcttttttcatcggaagaatctgtttgttggcagaccggcatggaccacaccacgttgcccaaaagtcaactaacagcgtatgtccccggaatttggagataatggaagggaataaatcttcattcgatacttctcctgtctcattaacggtgaagcctgttttcttcttgttgatttctatttgtttcagcaggtcgttgttcatagccagagccatgtcgttgtatgctgcgggcatcgttgccagttctgccttttgcttatcgttaagtggattgagatctctcatggagactccaatcatctgtgccttcagattttgcgttaagtaactggcagctgtatgattgctcaggctcttaagaatcttatcatctatgcctatacggcgtatgatgtcaaatagtatcgggtatctgctgttgtaacaggctttaggtgaaaggatatacgtgaagtcctgaagactttcataatatccttgcggaatatcaatcttagtctcggcatagtatttatttgctttttctccttccagcccattcgtcatgatatgagctaatttcaagttcctttctgtttcgataatctttagtgcggcagacaattcgaggtctgtattaataatctccttatatgcagggcttcctttcgactgtgtgatttgttttctgaactcagggagtcgggcaagtatttgagctttatattcttcagctgttttaccattcagctttttaatctgttgttggtattcttcataactattgccttcagtgaaactgaaactcataggatgatctgccagctcttgctgtactccggctaaatatcctccgtaatagatttcttttccgtatggcttttctgcttgacggagatgtgactgcttgcgggcattttcgcgaagattgataacgaccgaagtggtttcccccggtgctaataagtagctgacagctccaaaaggaaacctgatcatgcatggggtgaccatgaagacattcatctcatgataaaacgttccgtcatcctggatgcggatttttccttcctgagcttcgtctcttattacgtcttgaaaataaagactgcctttgttgggcatccctttttggtagtcaaggattcttcctttgagaattgctttggcgtatttaacgactggttcgggcagcgtcgttttatggtctgctttggtgactgtaacgtcttttggcagtttgaacttgctgaatgttttcttgtccagctgtatgccccatatcttatatgcaccctcaaagtctccttcagagaaatccaggcaagtcacgttttgaggaatgggggggaaagttaattggaattcggcttcgccggactcgggcatccagaactctttgtccagcgtaatgccgattcccttccggacagggtataggttgccattgttgtctttcagtacactgccggttgcgatctttatccagtatttgggccgatagaaagctttgatatacacagtggtgactgtgtcactcatgacaattttgtctatctctatacttgaggaactctgagctaaaaagggaggacgttctacgattctgtctttagcttgtgtcatacaaagtatgcttagcagcaaacttatcattaatgcgaatcttttcatacgattaggcttttatctccaacaaatgtaatcatattattgtaattatctatgcgaaaacagaaaaaggagcagaatcgtttacgattgctccttttttctgttatttatttgttaggggaataatgatattttcggttttgcttattgaagtcggaatgtaatagggaatgtatattctacggcaacggcttgtccgttctgttttcccggttcccacttaggcataccccgcactacacgaatcgcttcagcgtccaaccatgccgacgcaccttctaatatttttatattcgacacgttaccgtcttttcctataataatttgtaccagcacttttccttgttccttattctgctgggccataaccggatactttatatttttggctaaatagcgcattaatccttcctgtcctcctgggaatttaggcatctcgtctacgactttgaaagttggttcattattgggcgtatcttctttaggaccatagccggttactatgacttcttcaaacttttctatcgctattgcttcgggagtttccgctggttttgcaggttccggaccggacagacggaaagttacgggaaccgtaaatcttacgttcacagcttgtcctctttgcttgccgggtttccaattaggcatggcggtaatcacacgttcagcttccttgtcaagataggggtctacgcctcgaactactttagtatcgctgatacttccgtcttttttaacgacaaaactgacaatcacacgtccttgctttccattttcatgagctgttgccggatatttgatattcttggcgagatattccatcagtgctgattgtccaccggggaagtcgggcatttcttctacaacttcaaatacgacagaatcgtttacagtagcacttttaacggctgccggagggggaggaggagctacctcttttgttttctgcgttccttttttatcctgtaatgttgctactcccgtcattccatcgggaagttccggaccattggcgagttcggtttgcgaaacaccttgttcttccggtgctgccatcatttctttggcaaattctttcgttgtacgagctactacttcgatgttgctgataatcatcaacagggcagccaagggaaggaacatcagatatttagtccttcctatttctttggttcttcgtttattcatcattttgatacgatttttaagtggtaaaacattgaaactattagataaatttgctgcagccttgtgatgtgccagtcccagcaagtggtactggtatgatttactatcatgtcccgtctctaatacccggtgatctgccatgtattccagattacctctgacttcccgtttcatcagccagacgaagggattgaaccagcagaaagtacatatgatctcgctgacgagtacatctgctgagtgatattggcgggcatgagtctcttcatgcgtgattatttcgctgatctcggattctgtatgcgattccggatgtatgaatatccagtggaagaaggaaaagggtcctgtacctttcttcaatatgtgtacacgtgatccttgtatcgtgcttttcgggcataggaaatgcaatcgtatgatactgcccagctggatcaggaagcgtagggtaagaagtaatacaccggtccagtagataaatcccagaatttgtgggattagctcctgccaattggccgttgtttcctgtggtgcctcgatgatttgctccggaagtatgatcgtagcataaagatctgccattgccaccatcggctcctgctcctttatccactcttgaatattcagtaagggatagagcagagagatgccaaagaagcataacagagcggtccgtcgccagtggaagaaggtgtctttatgaaaaaacaaccgatagaaagcgtagaacaatgcgatggctacgtttatctttaagaaataggcaagttccggagtcatatcgataaagtttcagtttatttttcttttcctttctctatcaggtcgataatgtccttaaggtcatccgtagatatcttctggtcctttgcaaagaaagaaaccatttccttataggagttctcgaaatagttgcggacaactccactcatgaagtggcgtttgtattcattttcacgaatagagggagtatactggtaggtgtttcctatatgtttcgatttaacgtatcctttccgttcgagatttttcacgatggacgcaacggtggtataaggtggtgccggttgcggatacttggatacgatgtcctttacgaaacagtcttgtaactcccaaatgtagatcattacttcttcttcttgtatagttaacttttccatggagatgatgtttaattacgattctttcgcaaagctacgaatatttcgtaataaagcaatagctagtcggttaaatattgtaaatgcctgtttgggatggggtgatttgtgggtaaaagcccctgattctcgtaagcatgaaaataatgtggataaacgttatattcatccaaataaacaatctttaggacatttaggtgaacaaaaagcctatcgtggcttttttatataaaataaatgaaatacttttgtagagtataaaacgtatgttaataaaaggagagtgcgtttcagcacaaggcaaagcttgaaagattccccgtactcgataatgaagctattaactatgcagcccggagggaagagggaggcgaactaaaaaatgactgatatgaaaaaaggtttgatttttgtgctgtttgcacttgtttctatcgtttcttattctcagatttcctggaatgctaaagtaggtatgaacatgagtaatttcacaggagacgctgatacggacatgagagtaggttttaatgttggagtgggaatggagtatcagtttactgatatgtggtctattcagccttcgttgatgtttactcagaaaggtgcaaaactgggtgatatcaaggctaatccgatgtacctggaactgccggtaatggctgctgcaagatttgctgtggtagacggacaaaatgtagttgtaaaagccggtccgtatctggcatgtggtattgccggtaaatacaagatagctggcgttaaaagtgatttctttggtgatgatgcagcgaaaagatttgattttggtct

SEQ ID NO: 4826 - DNA, 302 bp, Unknown
  gut microbiota DNA sequence
atgcacgaatatgtacgcaaagaagcgtggggatacgccaaagatgaaagtctgtcaatgcccgatctgttggtcgagaaatatcaagggattcgccctgccgtaggctacccgtccctgcccgatcaatccatcaatttcctgttggacgaactgctggatatgaaacagataggcatcacactgaccgagaatggtgccatgtaccctcatgcttcggtctgcggtctgatgtttgcccatccggctgccgaatacttctctgtcggaaagataggagaagaccagctcgaagactatgc

SEQ ID NO: 4827 - DNA, 389 bp, Unknown
  gut microbiota DNA sequence
ccacgggccaaaggggcactgttcatgcttatcgattcttctgaataatcaagcatgaaacggaaacgggccatctgctcgtcagggattacggcaggactactctcgccgcgcatcaccatgtaacggctcacagtagaaaaactcaggacttccatgcgttccctagggtcaacgtgtacgaagaccatcataggaagcaagacggaggtgaccagcttgcgacggtcgctccattggtggaattcctgttgaacgggaacgaaattctcgatacccatcttgtccagatgctccgaaaccttcttttcatggtgcatccgaaccaaagcaacataccagcgttttgagtgtgctacgccttcccctgtcccattaataggcccagc

SEQ ID NO: 4828 - DNA, 2447 bp, Unknown
  gut microbiota DNA sequence
ttcatagctttgatttgtacctgggtgtcatttatcggcattcattatataacggagacttctaaagaaatcacttctctcttccatattttggcgatttctgtgatctccagtgtcttaggttcctttttattccatacctaccgtaatacgatccgtttttcccagttgaaggaattatggagaattgccggaagtgcactgataaaagctgtctgtattgcaatggctatctggcttttcctgcctcagacgggactgcataatagtcagaaaatagtctttgtactgtttgatggaatgctgacttttattgccatggtaggctttcgcattcagttgattctggtgtatgaactcctgttgaatatgctgaataagaagaatatgcatattctgatctatggcattgatgataagagtgtggcattgaaagtccggttaatgaacagctctcactataaggtagtaggcttctgtatctacggaacaggcgactccatccgacgtgtggctgatcttcccgtttattcatttaaagatgaagaatgctttaataaacttattcataagaagtgtatcggcggcatcctgtttgcccgttacgagaatacccgtgaagaggaagaccgcctgcttcagtattgtaaaaggagtggattgaaaacgttgattgctccgagtatcagtgaggctgacgaaaacggaagtttccaccaatgggtacgccctatcaagattgaagacttgctgggtcgttcagaaattcatatcaatatggaggaggtgatgactgagttttgtggcaaggttgtgttggtgaccggagctgccggtagtattggtagcgaactttgccggcaactggctcagatgagcatcaagaagctgatcatgtttgattccgctgagtcacctttgcataatgtccgtctggaatttgagaagaattatcccgatcttgattttgttcctgtcattggagatgtccgcgtgaaagaacgtctccgtatggtattcgaaacttatcagcctcagataatctttcatgccgctgcctataagcatgttccattaatggaagagaatccctgtgaagctgtgctggtcaacgttgtcggctctcgtcaggttgctgatatggcagttgaatatggagctgagaagatgatcatggtttctaccgataaggcggtgaatcctaccaatgtcatgggatgctcgaaacgcttggccgaaatctatgtacagagtctgggatgtgctatccgtgagggaaaagtaaaaggccataccaaatttatcactacccgctttggtaacgtcttgggtagtaacggttctgtaattccccgttttaaggaacagattgagaatggcggtcctgtcacagtgactcaccccgatatcattcgtttctttatgactatccccgaagcttgtcgtctggtaatggaggctgccactatgggtgaaggcaatgagatttttgtctttgagatgggaaaggctgtgaagattgttgatctggctacccgtatgatcgaattggccggttatcgtccgggtgaggatattgagatagagtttacgggacttcgtccgggtgagaagctttatgaagaagtcctgagtgataaagagaacacaatccctactgagaataagaagataatgatagcgaaggtacgtcattatgaatacactgatatccttgatacctatggagagttcgagaagttatcccgtacagtaaagatcatggatacagtgaagctgatgaagaaagtggtacctgagtttaaatccaagaactcaccgagatttgaagttttggatagataactagaatgattctgaacactaacataaatcaacaatggatacaaaagaattgaagattgctgttgcaggtaccggctatgttggtcttagcatagcaacgcttttgtcgcaacatcatcaggtgacggcagtcgatgtgattcctgagaaagtagatatgcttaatcgtaaacaatcgcctattcaggatgagtatatagagaaatatttgtctgaaaagtcattgaatctaacggctacgcttgacggcgccaaggcctacagtgatgctgattttgtggttatagcagctcctactaactatgatccggtgaagaactatttcgatactcatcatatagaggatgtcatagacctggttttaagtgtcaatcctgatgctgtgatggtaatcaagtctactattccagtaggatattgtcgtggactttatttgaagtatgcccgtaagggagtcaggaagcttaacttgcttttttctcctgagtttcttcgtgagagcatggccctttatgataacctttatccaagtcgtatcattgtcggttatccaaagttgattgatagcgagcagtttgacgaggaaaacgaagcgattaagt

SEQ ID NO: 4829 - DNA, 389 bp, Unknown
  gut microbiota DNA sequence
ctgtttgctaatacctatcttgcattgcgtgtcagttattttaatgaacttgatacttatgcagagatgaaaggtctggattctcagtcgataatacagggtgttggtcttgatcctcgtattggtacacattataataatccatcctttggttatggcggttattgtttgcctaaagacacgaaacaactcttggctaattatcaggatgttcctcagaacatgatgactgctattgtcgaaagtaaccgtacaagaaaagacttcatagcagatcaagtcttgcgtaaagctggttattatactgcctcctgctcatgggatgcccagaaagagcaaaaaataaccattggtgtatatcgtttgaccatgaagtccaattctgacaa

SEQ ID NO: 4830 - DNA, 708 bp, Unknown
  gut microbiota DNA sequence
actaccgaccctacttccgacatccgtctgactttgggtaatatccgtactatccagatcaatgtgatgggagaagtcgtgcagccgggtacctacgccctttcttccttctctaccgtcttccacgcgctttaccgtgcaggcggtgtgagtgatatcggcagcctccgaaacgttcagttggtacgcaacggaaagaatatcgccaccatcgatgtttatgaatttatcatgaaaggcaacacacaggatgacatccgccttcaggaaggtgacgtggttattgtccccgcctacgatgtcttggtaaagatcagcggcaaggtaaaacgccctatgcgtttcgaaatgaagaaggacgagaaccttgccactttaatcaaatatgccggcggctttgaagccgatgcctacacccgttcattgcgtgttgtccgtcagaatggtgaggaatatgaggtcaacacggtcaaggatatggactacagcatctacacaatgcgtaacggtgacgttgtaacagccgaagccatccttaaccgcttcacaaacaaactggaaatccgtggcgctgtctatcgtcccggtatctaccagctcagcggtaaactgaatacgatccgcgaacttgtccatgaagcccagggcctgaccggtgacgctttcctgaatcgtgccgtcctttatcgccagcgtgaggatttgacc

SEQ ID NO: 4831 - DNA, 6970 bp, Unknown
  gut microbiota DNA sequence
tatcaagtctatcatgaacggtacttccccgaaccttgccctgatgaagaatgacattctctacatcccgagcattcacgatctggaagatcgtggcaatgtcacagttcacggtgaagtcgcgcaccccgattcctatccctatgctgataacatgacacttgaggatctgatcatccaggccggtggcttgaaagaagccgcctctactgtccgcattgatgtgtcgagacgaatcaagaatccccgtagtactgcggataatgatactatcggtcagatgtataccttctctttaaaggatggttttgtcatcgacggtcagcccggttttatccttcagccttatgacgaagtttatgtccgtcgcagtcccggttatcaggcgcaacagaatgtagtcattgatggtgaaatattgtttggaggaaattatgccatgaccaaccgtgaggaacgtctttccgatctggtgaataaagcgggtggtcctaccagtcttgcctatctccgtggtgcgaaattgacccgtgtggcaagtgccggtgagaagaaacgtatgggtgatgtgattcgcctgatgagcaggcaattgggtgaagccatgattgactctttgggtattggtgttgaggatacctttacggtaggcattgatctggagaaggctttgactaatcctaagggtagtgccgaccttgtcctacgtgaaggtgatgtggtctttatacctaagaatactaatactgtaactatcaatggtgctgttatggtccccaatacggtttcttatatgaagggaaaggatgtggattattacctgaatcaggccggtggctattctgataatgcaaggaagagtaagaagttcattgtttacatgaatggtcaggtgacgaaggttaagggtagtggtaagaaacagattgagccggggtgtgagattattgtgcctggtaaggctaagaagaaagggaacatagctaatattttaggttatgctacttccttcagttctttgggaatgatgattgcttctattgctaatttgataaagaaataaatgacctattatgattgaaaagcaatcttatcaagaaccgttttctgaagtggataaaaggaaagatgatgaaatggaaatagacttgatggctattttttataagattattactgttcgtggagtactatgcaaagctgctggagtgggagtaataattgctatagtggtggcattgagcattcccaagcaatatacagtaaaggttaccctttctcctgaaatgggtaatgcgaagggaagtaatggtttagccggacttgctgcctcgtttttgggagatggggctctaataggggaaagcacagatgccttgaacgcttctctttcagcagatattgtttcttcaactccttttttattggaacttttagaaatggaagtctccgtttctaaaaaggatgataaaatgactttggggtcttatctcgatgaagagtcatctccttggtgggattatcttataggttttccgggcatagtaataggaggagttaaatcattattcggagaagatacggttcctgccagtggagggcggcaaggaactatcgaattgacgaaagaagtaaatgagaagattaattttcttaaaaagaagattagtgcatccattgataagaaaaccgccataacgagcattacggtcaccttacaaaatccgcagatcactgcggttatagcagattctgtcgttcataaattacaggaatatattattgggtatcgaacttcaaaagtaaaagaagactgtgcgtatttggaacggttgtttaaagaacgtcagcaggaatattatgctgctcaaagaaaatatgcggattatgtagacgcccatgataatgtggttcttcaaagtgtacgtgctgagcaggagcgtttacagaacgacatgagtttggcttatcagatatatagtcaggttgctaatcagttgcaggtatccagagccaaagtacaggaggaaaagccagtctttgcagtagttgagcctgccgttgtacctttgaaaccttcaggtatgggactcaaaatttatattttattatttgtgttcctgtccgtatctggtactctcgtgtgggtgctttttggcaaaagtctgctggctagcttgagaaaagaactgaaaaataaggagatagaacaggataaatgatgctaaaacgtcgtttacaacattcttatatcaattaaattcacttactatattattaaacgaatgatacgtacagctatgataatggctgcgggcatgggaacccgttttggccaatatacagaattgatacctaaagggttcgtcaaagtgggaggtattccaatgatagttcgttctattgatactttgttatcatgtggcattgagcgaattgtaatcggtacaggatataaacaagaagtgtatgaagaattgaagacagactatcctatgcttgaaacctgttttagtcctcgttatgctgaaacaaatagtatgtatactttatataatacgcgggagattctgggcaatgatgattttttattgttagagtcagatttgatttttgagaaacaagcaataatgagcttattggagtgtcctgcggcagatgcaatgctaatagctccagtgacaaagtttcaagatcagtattatgtggaacatgatgataattttcgcctttcttcatgttctgtcaataagaataaactaaacgctaaaggcgaattggtcggcatccataaactatccggttccttttacaaaataatgtgtgctgattatgcgagtattgttgatgaacaacccaatttgggatatgagtatgaattactacgaatatcttgttctcaatctcctgtttatgtgcataaagtagaagggctgaaatggtatgaaatcgatgacatatcagatttggaatatgcagagaaatatattgttccgtattgttaattaaaataatatatcaaattatgagtaagacagtttatattgggatgactgcggatattatgcatccaggacttatccgcattattaatgaggctactaaatacggtgatgttataattggtcttcttacagataaagctattgcggagcataaacgccttccttatctgacctatgaacaacgaaaagaggtagttcagaatattaaaggcgtatgtaaagttgttcctcaagaagaatggagctatgttgagaatctcaaacgcattaaacctgactatataattcatggtgacgactggaaaaccgggcctttacgtgaagaacgtgtgcgcgtatttgaagtgatgaatgaacagggaggaaaggttatcgaaattccatatactttgggaattaattcatcttctttggataaagatattaaggctataggtacaacccccgatgtacgtttaaaatcacttcgtcgtttgataaatgccaaacccgtagttcgtattttggaagctcatgatggactatgtggcttgataattgaaaatcaggaaatattaaaaggggataagagggaagtatttgacggaatgtggtctagtagccttacggattcaaccagtaaaggtaaacctgatattgaggcggttgatttaactacccgattgcaagatttgaataatattctggagtgtactactaaacctattatttttgatggagatacaggtggtaaaattgaacatttcgtatttacagtacgcactttagaacgtcatggaatctcagctataataattgaagataaagttggattaaaaaagaattcattgtttggtacggatgttattcaaactcaagatacaatcgaaggtttctgtaataagatcaaagcaggaaaggcatctcagattactgatgattttatgattatcgctcgtattgagagccttatagcgggaaagccggtaagtgatgctttagagagagcttttgcatatgtccaagcgggagcggacggtattatgatacatagcaaaaataagtcgggtgaagatataaaagaattttgtttggcgtttcgaaaacagtatgctcatgtacctatcgtggttgtgcctactacatatgatcatatttatgagtctgaattgtgtgattggggtgtgaatataattatttatgctaatcatatgcttcgtgccgcttatcctgctatgatgaatgtcgcaaagacaatattagagaatgaacgtgctttagaggtgcgcgaactgtgtatgcccataaaggaaatattggaactgattccgggtactaaataaaaagaggaatatcattatgttaagcgtagaaaaagtttatgaaacgtttctgagtcatgacgttgatttttttacaggagttccagactcattactaaaaaatatttgtgcctatatcacagaccatacttcacgtgagaaacatatcatagctgctaatgaaggtgcggctgtaggaattgcttcaggttattatatggcatcaggtaaggttcctgtggtttatatgcaaaattccggcttgggtaatactgttaatcctctgctgtctcttgcagatgaacaagtatacagttttccaatgcttttgatgattggctggcgtggtgaaccgggaacaaaagatgaacctcagcataaaaaacagggtgaggtaactttagatttgttgaaagcaatgcggattccttatataattcttgattcaaatgagaatgatgcatttattcagctccatgatatcatacaatcagcaaaaactaagaatattcctcatgcaataattattcggaaagatgtttttggcaaatataaacttcaaaaagagttcggatgtaattatcctttatctcgtgaggatgctttgcaaatagttgtggattatctgcctgaaaattcagtggtcgtttctactactggcaagctttctcgtgagttatttgaatatcgagaaatgaaagagcaaggtcatgaacatgattttctcacggtaggctctatgggacatagttcatcaatctctttgggtattgctatagcaaagcaagatagacctgtttattgcttggatggtgatggagcatttattatgcatttaggggcaattagtaacattggcgatttatctcctaaaaactattatcatattttgtttaacaatggtgctcacgagtctgtaggaggacagcctactttaggatttagtttagatattccggctattgtccgggggagcggatataagcatacttatactgtttgtacaaaagttgaaattgaagaagcaatgaagcagcttccaaagttatgtggtcctgttttgttggaaataaaggttaaaatagattctcgggagaatttgggacgtcccacgactactcctatagagaataaggagcattttatggattttttaaaataaatatattcgatgaaaatagaaagaaaaatattattaaatcctgggcctgccactactactgacagtgtaaaaatggcacaagttgttccggatatttgtcctcgcgagaaagaattcgcaggtatgatgaaacaacttcgggacgatttggtcagagttgctcatgggaatttggaaaaacataccgctgtattattttgtggctcaggaaccatcaatattgatatatgtctaaattctcttcttcctgaagacaaaagggtgcttatagtgaataatggggcatatagtacccgtgctgtagaagtgtgtcaatattatggtttgcctcatattaatttggaattttccgtttacgaacgtcctgatttatcggtggtggaaaatgtgttgcaagaaaaccctgatatagctatggtttatactactcatcacgagacgggtacaggaattctgaaccctattcgcgagatgggcgctatagctcataaatatcaggctaaatttgtcgtcgatactacttcttctttgggcatgattccttttgatatagagaaagataatgtggatttttgtatggcatctgctcaaaaaggacttcaagcgatgacaggtctttcttttattataggcaatgaggaacagattaagttttcaaaaaaatatcccaagcgttcttactattgtaatctttatttgcagtatgagaattttgagagaacaggtgaaatgcattttactccaccggtacaaactatttacgccactcgtcaggcattaaatgaatattttgaagtgggcgaagaagctaagtttgcccgtcacaaaagagtttttgaggctattcattcaggtataaatgaaattggtcttaaaagtgtaataaagcgtgaatggcagtcaggactggttgtctcagttcaatacccagaagatcccaactgggattttgagaaaatacatgattattgttatgagcgtggatttacgatttatccaggtaagatatcaactgaggatacttttagaatctgtgctttaggagagatagaagtagatgatattgagaacttctttaaagtactaaaagctgcattaaatcattataacgtcacattaccgatgtcatgattgcagaaatattattgaagattcgtcatttttatttttcccttcgtggtatacacttccatccggaaagtgttatttctggagtgcctattcgtagctttcgcttagtaggcaaatatagcaatatctacttaggtaaaaatgctgaaatacgttcaggctgttatctgattgctcgtgataaaatcattattggagaaaactcaacactcgcctatggaacgactatattgacaactgctgatcctaatggaccgtataatgcattagcagttctttatccttataaaaaggcaccggtagttataggagataatgtttggattggggctaatgttaccatccttcctggagtaactattggtgattac

SEQ ID NO: 4832 - DNA, 203 bp, Unknown
  gut microbiota DNA sequence
ttctccgactttatctttgcgattgtcatcgaagaaatgggattgataggaggtatatttgtcgtattcctctacctctgtctgctgatgcgggcgggacgcatcgcgcaaaagtgcgaacggacctttcccgccttccttgtcatgggtatcgctttgctgctggtatcgcaggcgatactgaatatgatggttgccgtggg

SEQ ID NO: 4833 - DNA, 2340 bp, Unknown
  gut microbiota DNA sequence
gtatataaatcatctttcaaaggtgagggaggaagagtttcaagaagttccagagaacgggaaagaatatgttcccttttcaagtcatcctccagactggcatacagactcacactatagcccaacagaagagcaagacacaaggaagcgtcctgttccggagtactgccatgcagaggatataactcattcatttcattatgaatatccttattcagctgagccaggtcgtcagcatacaaataactgccggagcattcgatatgaagaaggcgatgggcctgattatgaagatgaaagattttatcctgtaactccattatacagatctaattatcttgtcaaactacggcttttattgattccacatacccggcaggcatatccacacaggcgcatcccagcatattcagacggacagcaatcttactcttaccgtcaacactgacgagttcgccgacaagccccgacaaaggtccctttatcacacggacctgctcgccacgggctaaaggagaactgctcatgcatacggcttccttggaatagtcgagcatgaaacggaaacgggccatctgctcatcaggaataacggcaggattgctttcaccacgcatcaccatataacggctcactgtagaaaggctcagaacttccacccgttctttcgggtcggcatgtacaaagaccatcattggaagaaggacggattcgatcagtttacgacggtcactccattgatgcatctcctgttgaagagggatgaaattttcaatgcccatcttgtctaaatactccgaaactttcttctcgtgatgcatacgaaccaaggcgacataccagcgttttgagtgtgctacgccttcccctgtcccatagctaggcccagcattaatagatttcttgtttgttagaatcatctttttttaccccatttttgtccgttacttcttaggtaacggaaacctatacattcaaagacaaacagaatgggaacagtgaaaaacatcgacaaatacgtgatagaaggagtttgcagcctgcgagaaggggtatattcctgtggaaatatggtataacggcagtgggacatgaagataatgttttttcatgttcaaagacttttttgccttatttgcggataaaacgaaaaaaaatggaattttatttgtttcctatttgtgtttttgtctatctttgcgtcatatttaaatccgttacctaagaagtaatgcacatagtttaatactgactattaatattttatatatttacaacgcctccattgagtagttcttcacgtaagataaattcatcttatttacttccgtacgttccttcagtccgaatcccttcaaatagatctgggttgtcttgatggacttatgtcccagcgactcgctgatcatttcaatagggacgccacgatatttggcggtagtcgcccatgaatggcggagcgtataggaagtcaccggagaagtcagacgcaaagcttttgccaatcccttcaaatggttattgaaccggcgaagggcggactggtattcacggtaagcacgttcatccttacgcttcttgtcacccgaaaggatatcgaacagatagtcgggacaatccggacgtgaaggctgatgattcaggagctggctgatcatctcctgcgccgtatcaaggatttccacactcatcggagtcttcgtcttgatacggctgtaacggagaatattctgatccagggcagacttctcaagatgtgccagatcggcaaaggacatcccgcagaactggaacatcaatccggcaatggcctgtgtacgtcgcaaacggtccgtcttgggatcctcatacagaagcttatgcaattccggaaccggcaacgcgcgtttctgccgaatgtccactccggtatatacatcatgaaacagtcgggggacatacggagctctccccgactccactccacgattataaacactacgcaacatacgcatataggtagaaaccgtattcggtttcaaaccacaatcactcagatgctgaccgtaacggcgcagacactcacgggtaacctgacggaacgacacgttctgcgtaccacaaaagttactgaaagaaaaaagggcattcttatagacatgcgctgtagaaaagcgcccctctttttgtaaacgaccgatgtatagttccccacaccggctaaatccattcttacttttcatcttatatcactagttattttatatacaagtatagggcgaaaatatgaaaattccatcttcgtccggcagagattcttaattttatttaattcaggaagagtggtaacggccggacaga

SEQ ID NO: 4834 - DNA, 126694 bp, Unknown
  gut microbiota DNA sequence
aaacgctcaaccgcaaaaaccgtactatttatcaacatcaatccccgcgtatatacgcgcaattttaattggtagcggataattctcatatcattacacagtaatatcaaccggcattttccttattttgaaaaatacgaatattcgtcctagctttgcacttcggttttaaccaatacctccgtttctcaccgagaaacaccctcttggttttaaagaaacggggcgttggttttaaaggaacggccctttggttttaaaccaaaaagaggtatttgtaactatttgattttcaatttcttataaaagcataattccgtccccgtaacccatgggatttttctcaacaaacaaaacggaattcatgacccgaagcggtctgatgcatacaatatttatttacaattaagaattaaaatcccatggttacagttacgattaccatcaagccgtatctggcaaggtatatgtacgtacgttacgcacaaagtttagaacccgaatccgaaagtcgcccctcaccttcttcgtcagcctctctccgaaaaccgattcctatccatctctctcacatcactcccatctatcattttctctatcagttatccgtcccgcatccatccaaagtatcctggaaagaaacaggaaatatcacgtttgttctgcctaatccagcctacggaaagaatccggaagtatataattatatcgggcaggaaagcgcattaaccatagaaaaggaaatcgaagtggaaatgagggcggaactctatgaatttctgctggagaataaattcaaaaacggaatcatgttcaaacgctcgatggagctttttgtggaacattataatatggaaggtacagtggaggaagatagccttatgagggcttttaagaggtggaggaaggcgatgaaagataatagaaaatactaatacatctaaaaaaggggctgtccgattttggacagccccacacaaaaataagtcttatatttaggctgcactaataaagctacctaaatctttatatatttcctctattttaacaaactactatcagggaactatctgtccgattcatcatctctccaatgttcaggtttgttcaactcatccgaacacctgatctttcctttatccacatcaaatcccttcggactgattgcctgaaccatccaataatccgagaactgttccagtatcgggtaaggagcaggataacccagcctggctgcatccggtataaaaccatattttggataatattctttatgccccaatacaaacacaaggcacgaacctttttcctgcaacctctctatacctgcccgtatcagcattccgcctataccctgccgttgatattccggcttgacagctaaaggtgcaagaatgtgcatcatctgttgtgctccctgaccatcaaaataggctctggtgaagagaatgtgtccgacagcctcacctttgtagaaagcgagcaacgaaaccattggttttgcagttttgtcagccagcagatcggctaccaactgtgcttctttgtcatagccaaacgcttgtttttcaacagtcattatgctgtcgaaatcatctgtattggtctctctgatttgtatattaattgaatttatcatttcattgtttttttgagcatgtatatcttgcagatagttattatccgctttatagacatgcgattatacttattatatagaatatgaaaataactctggcaagaatatgccagagtatgaattaagggataaccttgacagactgccaaaggttatttacttcacggactccttctttgctttacacatagaccgcaaaggtaatgctttctattgcattatgctatagtttgcagcgaaaactatccatcaattttacttttttattgatagaaactacttttatttcattctctcccggctgcaactccacatttttccattccaaaatagcatactgatccggcattgccttaccatagctttttccattgacaaacagttccgccccgggctgattagtgaatgcagtaattgtttgcagacatcgggaacgtacggtgttacgttttccggccagataaagcacaggttcttccttgttccagttagccttataaaagtagaacgcgtccttacgtactttccggtcaaaggtaaccagccccttatcattaattcccggacgatcaccttccgtacggtgagccgcaccgaaatcaaacatattccatacaaagctaccccatatataaggacgggaagaaatcgctttccagttctctatatgataataagtctgccaattctccggatgccaccaactgtttggcacggattttaccaacgaatcctgctgatgataaatgctggcaccagcaccatactcactgatggcaatacggatttccggatgatctctatgcataccgtccagccagcgtcctaaatcggccggggtgcctccataccatccgtcgtatcgattccatgcgatggcatctgttataaaattcaagtcacccatttgattacttgccgaagtggtagggcgggtagtatcttcctgatgcgccagctcatttaattccttgatatattccaccggattatcgccggattcaagcagttcattgaacagcccccatacacagatggaaggatgattgaaatgctggcggatcagctccttcagctgttctttcccattggcacggaaagaaggcagattgacaaatcctttatcatcatatcctccgggaccgataaaaggtatttctgcccagacaatgatgccattcttatccatcagatcatagaaataggtagcttgcggataatgtgccagacgaaccgcattcactcccatttccagcatcagggctgcatcttcttcatgatgctgaggacgtaaagcattacccacctcactcctgtcctgatgacggcaaacaccgtgaagaggcagatgcttgccattcaaaaagaatcccttatccggatcaatccgataataacgaagtcctaaaggctgtgtcacacaatctaccaactgccctcctctcgacaaggatacctccgcctgataaaggaacgggtcctgacggccattccacagatgaggattatttatttcgaatgtaagttcctgctgcaaagctgcattcccggcaagagaaagtgtctgtttctgctccgccaccactttttgaccatccagcaaacggacacccagttctacttcctgaccggcattattgccatttgccaaatcaacgaccgcccttactttcgcatattgatgactgacactatcctgtatcagacgaactcccggagaagcataattcaaaggagaaatacaagcctcatcagtgatcaacagatgtacgtccctgtaaataccgccataaaaattaaagtcacccaccaaaggcatcacgtccagttgttctccattattcacccgcactaatatagagttctcttttccataattcacctctccggttatttcaaagacaaaagctccgtatcctccacgatgttcaccgatatgacggcgattgataaatacatctgctatactgttcgccccttcgaaacgaagaaaaagacgcttgccttgccattcgggacgaatgaacagtttcttttcataattaccgattccccgtttatagtcgatctttccggacaaagcatcctgcgcattccaggtatggggcagatctactcttatttccgaccctttctgcacctgatgcgagaatcggaacttccagttgtcgtttaataaaatatcctgccgctgagcaaagagcggcatactgcaaaacaggaataaagcaactgccatcaagcggcagcatgacataattggtgttctcatattatttttttaatgatgatttcttcactttgataaaagaagagagtgattcaactttacttttatattttttctcattgactctatttttgttttcttctttatctatccgatgatcgaacagcatacttgctttcttcacgtcccctttcatccattcggcataactaaaacgttggtcaaccgcattgtctcccccttcccactgaatatagacttcatccttcgtcttaaccttcaggttgctgaatactttcgcaaagctctgtccatccaactgttctccaggttgtggaatctgacataactcgcacaaagtaggatacaaatccacaaactcaaccatcgaccgggtctttccttttttcattccgggcacacggataatcaacggcacatgagtagaacggtccatcagattatgtttacccacaaaatcatgttcgcccagattccagccgtgatctcccaacagtaccacaatcgtattctccgccaggcctaactcatccagagcgtccagcacttttccgatttgtgcatccacatagctcaggcaagcataatatccatgcttcacttcccgctgaaaatcagcatcacttgtatcagtcacccgtgcataagcatatatttcactcgaattacggacttgttccggcaagccttccggtctgaaacggttgggagccaaaggtatctcttcccgcttatacaaatcccaatatttcttcggggcattaaacggcaaatgaggtttccaaaatccgcaagccaggaaaaacggcttgttcatctctttcatacgccgcaggtcacgaatggcacgttccgccagttttccgtcatcgtatgccgtatccggaacatccgctgactcgcaaaacggtccgcgcatagtcttgggattgatcgtcttgcccgattccgagttcatccaaagttcccatttattatattccgcccaatagacatcgtatccatccggatgattccggtagggaggttcgctccacgatgcggcatgatcgctcatgtggtgaaaaactttgccatccgaaactgtatgataaccattctttgtaaaccatccggaaagaggtatagcctccggacaatccttgctggcataagccgagaaattcacaaaacgatcgggatagtgaggatatacgcctgtcagaaggctggcacgggaagcgccactcaccggaacattgcaataagcgttctgaaacaagactccgctcgatgccagacgatccatattcggagtcttgaccgcctccactccgtaacaacccagttcgggacgcatatcgtcagccatcagaaaaagaacattcattctggaaacatcggagacagtgcgctgcgcctgcacagcagaggccatacagcaagctgtcccgcaaagaagggtatattttaccgaaatagcgttcttcattttatagtttaaattttcaagacctgcaatatacaaaatattacaggtcttgcctctgtttttactcaaaaaattatttagtccataccggattctgttccagattcgtattcagtgccagctgcttcagaggcagcggatacaggtaataatgttcctgccatccgagcggagcgtcaaagaagtaaacatacccttcgtcattgttcggtccgccggtcactttcagatttttagccgaagctcccgtcacgtatgctcccaacgggcgtttattgacatagtctcctttcttccatctacggaggtcgtccaagcggaatccttcccccatcagttccacacgtctctccctgcgtacctcccacagaagagcaggaacggaaggatcacgggccgtatcaaaatcatccgtaatgtcttcgaccgtcattttcgctacatgaccgcgtgcacgaagtttattaatggatttatcggcagccgtctgatcaaacttacctaattcgcacatggcttcggcataattcaccattacctctcctacacggaacaaaggcgcatctgtcgtattcactccattggcattggtagctacggtatgcgtattatagtacttccatacccagaatcccatttgagaagcattccagccctgtccccaattctgattcttgaagtgcggctgcccctgcaccgtgaatcctttgaagttggaagacggcaaacgatgataagtctcaccggagattgtagcaagaagatctataaactctctgtcctgcgcatcatccgtatatttccagtcggccgtgctcggaccattttctttctttaccatatagggaggacatatcgtcagatacaaccggtaatcacggtcgcggaactgtccgtaaatctccttatcaccgccataccgactggtggtagtacttaccggacgaccatccgtacacagataactgtctaccgcatcctttgtcgcctcaatataagattcaccggtacgcaccatacgtgtcagaccatgcatcaactgaccggtttcataggctttatacaagataatgcccgttaccccatccaaagattccgaattgaaaagctcgtcataccgtggatgcacattcggataaaccttcaaaacttcttccgacgcacgtacacattctttcaagtaagtctcggcatcagacaatccatgatatttccgccaagtaccctcgaacaaagcaaaacgggaaataagtgcctgcaccacagatataccaatggtgtttttgccatcgtccgcaccgatatgtgtctccgcatatttcaggttggacaggatattcgaagccaccagatcgcgactatcccgtttgccgtacagttccggactgtcttctttcaacgcattctccacccaagggatatctccaaagcgggaaagcatctgaaagtatttatatgaacggaagaaatagccgacactgcgccagtgctccttctccgtatcattcatctgcgaaccatcgatattgtccagcatcagatttacccggcggatatagtcgtaatcccattccttgacttcatctgttgccttcgccttctggtatgcccactgcccttcatatccggacaaacctttgatcatattgtccgactcaaaatctccgcggaatatttcgtccgtctgccccgtatcatacgtatatccgaagaatacattatataatccccatgcatacgttttgaagttatcataggtagtaaagactgtcgcttccgtctgttgtcctttcggataaacttccagaaaagagtcattcaaacaagacgacatcagcaaacagagactaatgcccgtacccagtatatatttcttcataacaattactcttttaaatagtgaaacaatcagaatgaaaggttgataccaaacgaatactgccgcatatacggataggtaaaaccgcgttgtcccaagtcatccgttaccgaacgttccggatcgagtcctttcggcaaatgatcgaatgtataaagattctcaccgctaaagaagacagccagattattgacaccgatcttagtcatccacttggacgggaaattataagataaggtgatgttccggatactcaggtaggaaccatcctgcagataacgggtctgaatacgtgtattggcagctgtatttccggcagctttctcatacagacgggggaaatagctgtctgtgcgttccggcgtccagtaattcagttgtgtgtcatataccgtcgtccatgcgtcataatgcggatagaacaagtcattcataatccacaaatcacgtttgcctactccctgcaacaggaaagataaagagaaccccttccagcttgcaccaccgtggatgccatactgataacgacgggtactattaccgatgatcttacggtcgcccggatcttttgtcgtacttgtgcctccgttgataatatcgttgtcatccagatctttatacaggatatcacccgaattcggattgtagccttccacttttggaatgcctgctttcagcttgccatcggcatcgaaatcatcaacagtatacaggcggtcggtaacatacccccagatctcacccagttccatacctacacggtaagtatctttatcgttcttatccttgccgaagagacctgtctcgttattatacttggtaatcttggttttagcatcataaaggttgaagcccagattgtatttcacttttccgatctgatcattccagtctacagtgatctcccatcctttggaacgaagatcggcagtattctgcaaaggagcacttgcacccagcacagccggtaattccgctcccggagcgagcatacctttcgtatcacgacgataccagtcgaatacaagattcagcctgttgttcaataaacccagatcaaaaccgacatcgacagtcgtcactttctcccaggtaaaactgttactgaccaatgcggcaggtttaagggtggttaccttgatacccgaaacggtccagtaagcctgctcggcatccatacccggaatataagcgtatggagtgatactctgattgccgatattaccccacgaagcacgcaattttaagttagacaatacggatgtcaacggtttcataaacgcttcttcgctcacacgccatccggcagagacagaaggaaagaaaccgaagcgactgtctttcggaaatttggaagagccgtcatagcgtccgttcgtttcaatcagatatttgccggcaaaggagtagttgatacgatagaataatcctcttactgtatagcgttcgaatttatctttagcgaaataatctcctgtagcctgcgatatagaaggaaggtcttcgttaatcatgttcatacgcgacatttccgcatagcgatagtcactgctctcctgattgaaacctcccatcacggtgacttcatgcttgccccatgtgttattgtagtttccgtagaagttcagggcattataatcggtaatgccgttggagttttcatacttagagtttgccgtcgaagtctctttcacaaagttacctccgtgggcataatagaacttcttttcaaacttggtcttttcattactcagatggttgtatgtatattcacccaccagtttgacgttcttcaaaggagtaatcgtcacctttccgaagatacggatattgtttttctggatagtcgtcggataagcaagattaatcagattccggggagtattaatcggtagttcttctccgtcgatattcattgttccggtagggaaataagacgggaaggcaacggctgctccccagattccatatcctcccgaagtctccggcaattctgatttcgagttcgtgtatttgatatccagttccggagtaatccatgagaatacgtccgaacggatataagaagacacattgtaacgtttatacgcatccttgtccgaggccagcactccattctcatcgaccataccgaaagagaaacgataagatatatctttcgtgccgccacctacagaaagattgtgcgtctgctggaaaccggtctccatcatatcatcaaacagattggtttctgccagactatagcgcaatccgtccaccattgcatacccatcgggataagccgaaggattggcattgtattctttcaataaatccagccacgtatccacattctgtccactctgatagttgatggttcccatgtctttataagcctgcaccgtctgaagcggtgttgccttacgaggcatattggcaggtctgctaaatgagaaattgttagaataattaatagaaagcctggttgaatccgatcctttctttgtcgtaatcagaatgacgccaaatgcggcacgtgccccgtagatagccgaagaagcagcatctttcaagaccgttactgattcaatatcattcggatcgagcatattgatatccatttctacgttatccaccagaaccaacggtttgccattcttatccagactgttgacaccacggatattgaaactcatttcctctccaggtctaccggagttacccgtaatctgcaaaccgggcatcgcgcctttcaaggcatcgctgaccgacactaccggacggtctcccaatacttcatccatcttcacgctgcttaccgcaccggtcagattcgctttcttctgtacaccgtagcctactaccaccacttcgtcaatcagacggctgtcttctttcagagcaatgtgcaaaggagtctgatttttgacaacgacttcctgcgtagcatatccgatataagacacggataatcgtgcattcggagtcaccgacagagaaaagtttccatccatatccgtaatcgtaccttccgtagaattcagcactttcacattggcaccaatcactccttcacccgaaggatcggtcactttgcctttcaggacaaacgcttttccctgttccttttcaggcactgcggcatggaatatgaccacccggtttccgttcacttcataactgatccccgtaccagtcagcagttgggccatcacgtcattaattgtacccttgtccacgttcacagagactttcttattcaggtcaatgtcgttattgcgaatcagaaaagaataatttccctgcttcctgactacttcaatggcttctttcaaagtaacgttatctgctttgacactgaacttcttgttttgttcctgcgctgaaagttgaaaacctgtcaagacattacttagggacaaaagcagaaacatcaataatgtttttcttattatcaatctcatttttttcactattaaaggttaacatatagttatttatcgtagctgcggactgccggtatatctatcggctgtgtccatgttttttcttctttcttttatcttaccccctttcttttatcggtaataaagatggtgtcaccactgactttccacgtgtattgtttctcaacgttgatttcgcgtaatatatcatgaatattctgattgctgtcgaaggaaccggagaagtgttcggccttcagacgctcgctttctatgctgatcttcacctggaatttacgttccagacgatgggcaatatcagcgaacgaagcgttctcgaaggtcagtccgccgtccagccagtcgcaggctttacttgcattggtcttcagcttttccatgcgtccggtgttcttgttatacagtgcctgctcattagggaataatttcattacggaattagcagacgccgataaattcaccctgccttccagcagagacaccatcacataattatcgtcatcataagcacggacattgaataccgtgccgactacctgcacctgcacatcgttcgtcttcacgaagaagggaacctctgcatttttcgcaactttaaagtatccttcgccatccaacgtcacattacgttcgcggataccaaaaccacggtgatagcgcaatacagaacctgcattcagagaaacctccgtcccgtcaggaagaacgatattcgttcttgatccggcaggaaccttgatttcgtaaggagaatcggcgttggtatatacttccgtcagattttccgtatacgtataccagaaatagttgcagccgatcagcagaataacggcggcagccactttcagccagacaggtatcagtttccggacaggcttcgaagagacaggagcagtcattctctcctttatctgcactaaattggaattttctatttctgcaaacgacggcacggaagaaagtgcccatacggcagacatttcccggaaagtccgggcagcttcttcattggaagccagaaaggcaagcaacgtttctttttcttcatcggtgctattgcccgacaaataattactaatctgtaattccagttcttctttatcgtaatattctatcataaaccgttctttttctatgggtgtatataactagatacgcaataaaaaaagaaacgtttaaaagaaaaccgtttttttttagagaaacatcaaaatagctatcatatagggagtaccaagggattcgcgcaatttagtcagcgcaattttcatctgcaccctgacggtagcgacattaatattctgctcttccgcaatctcactgtacgacttgccttcatacaggcttgccttaaaaacagcacggcatttggcagggagctcctctactttccgcagaatgatctcgttcatttcgctgctttccaatgcctgtaacggattgtcggaagaaagaatatgattttcaagaaaagcccatatttcctccatctgctcggtcatcatacgctcattaaaagcggaagaccgcaaataactgatacttgcattctgaatagcccgacgaagatacggaagggcaggataagtgatatggtggcgattctgccagaaagaaacgaagacatcattgactatttcaccggcgactctcttgtcatgtacgtagtaaacagctatcgcacacaggtataaatagtacgtatgataaattttatcaaatgctttggtgctaccgtgattcagttgttcgattagtttttcagagacttctggtaaattcattcgttctttttctttaagggacgggtgcaaatatagcgattaattcagaaactcaaaattccggttgttaaaaccggaactttgaatcgtgaattatagccccatcggtatcttcaacagataccagacgataaacagtaacgtccatgctgccagaatgcacaaggagtacctccatgtatatttcagcaacgatccgtatgtgatctgtttgtcatattgccgcatatacgtcaacaccagcggcatatagaataagaaaggagtaatggcattcgtcgaactgtctccgatacggaaagcacactgcgtgacgtccggcgaaatccccatctgcgcaaacatcggaatgaagatgaaagacataaatgcccatttggaagtggcggataccataatcagattgataaacgccgtaaacaggataaacaagatgagtgcggacaagggagccggctcaaaagaagagagcaggtccgctcccataatcgcaagacacttgtccagatgagaatactcgaaacaggcaaacatctgggcagcgaagaaagcaataacgaaatacacacccagcagtttaatcggctgggtaagtccttcgatcacatcattatcgctgcgataacgaccggagctgaatccgtaggccatccccgtaaagcctgcgcccagagatagcagaaacaggataccggctatgaagggcgagtgcatcaaacctccgttaacgccacgcaggataccataggaagagaaagtaagccacaaaataagggcaacgtatatccctgccactgtaacagccaccatcagcgcacgacgttctttccgtgacaaagggcggtaggcttcgactttcacacttccctcatattttcctaagttcgggagaagccatttctgagtcacccaataaacaatccctgtaattaccactgtcgaagcgctcataaagaagtagttgcacagcggctccgtgtttccctgatatcccatcagtgtgagtgcggcttcctgagtggtatgcgccaagagcgggtccatcgtactcaatacgatattggcactatatccgcaggccacggaaacgtaagccgtcacaatccccgctatcggatgaagtcccacccactgaaacagcatggcggcaatgggaagcagaataatataaccgccgtcaccaatgacgttcgacagcaatccgaggacaatcacccacagaataacttttcttttctctttccggtttcccactcccagacggatgcacgcatcgataaatccggaatgttgggccacccccagtccgaacatggcgataatcaccatgccaagcggagcaaaaccggtaaaattcttgatagcattccgcaaccaccagcggattccctcaggactcagcaggctttgcacccgaatatcctcccctgattgcggcagcgttactttcagtccgtagatatcacatatccacgaaagaaagaccaccgccattgtcagcagcaggaacatcgtagcgggatgcggcatacgccatttactcttcatcagcttccagattatccagatcgataatgcgtaattccaatgcacggacagccagacgggtcgcgttcactcccacccgttctccattcgggaagagacgtccgatcaggtcattctgtcgtttctccaatgatttcacgccgaatggcatccctttcaggttggcaatcatatctttggtgtagcctaatgccagatggcgaagaaaacgctcgtcatattcatcaatatcatagttgattaccgcttcctgacgcttggcatcattcgctaccgactttttgaaacgatctacgatcttctccagaatcggatagttgaataccagcttcttgccgtccattacagcttgtacgtctgtcttggtcagcaattctcctgttttaagaataatgccgtccgctcctgcattcagcacatccacccacagtttttcattcagtatttcccccgtaaagatcaatacacgaacccccttgtaacgtttgaaaatattccggcagatatcaacgccaatcgtcgtagaacctcccagtcccaaatccagcaaaaccagatcgggaagctgcgcttccatcaacggccagaactcgctttctgtcattgccgtgccgatcacttctgcgttgggtatctcatgacggaaaatttcttctgtgcctttcaattccagttttacgtcctctacaataataactttaaacttctgttcttccattttatttatctaataacttttatgtgtcttctttcttatctgcgcgggatggtgaagtaaaccgtaaatcctcccccttctgccggttcggcattgatacggcatcctctgcgccccgcaaattcatcatggtcacgaataatctgcttgcatatcagatattccgttcccctcaactccccttttttgccggaagtcatacgagccaggttcggatagaacaactggttcagctccgtcacactcttctcgcgcctggtatccgtaaagaggaaacggatatattcgttgtccttacgagcctgcaagcgtatcactccttcttcacgaaccgccaatgcttcatcaatcagattctcaaacaggaaacgcaactgattcacgtcgccgatcactttggcttccatcggttctatgattagttctaccttttccgtccggtttttcatgaccttcctgaagtattttccagcagcatcaaaaagctcctgtaccggaatcgtattccggcggaaagtaacctcctccagctgtcgggcagcgcatgaactcagaatcgtaaagatccctttatagtattcaatcagttccgtaatcgtctccacagcttcccgttcatccttttccggaaggttctgcgtattcaaccgaccgataatctgtttaatcttgtttggataataaatcgtctcatgcttaatagtcgaaaggcagttatcgagcaccatgttctgcacatggagcatactgtcttcccacgaagcacggcgtgtttcctcgtgtgccgactcaatatcccggtattgcgtggcaagctttaccactgcattgaacaccacaatcgatacataacgtgctaccagctcaaaaagaagatgatccgtttcctgttgcgtcccttccctgcgttccagataaagcacgcctacacattgatgctcacctccggcttccaccatcaacggaatcgcctgcaaattctgttctgagagatattcacccgtttcaaaacattgctgcaccatctccggcatttcctgtccgggacaggaagcatattccagccgatgcgtagtctcattataaaccgcaatgcccatcaggctgattgtcagcaactcatttactgagccaaaagcctcattcacgatgcgctgcggaatctctttaagcgtattttcctccctctgaagagcttcctcgttctcctgagtctgaggtctgaccaaagaggcggcaaaaactttctgatttatctcaagcacctgttccaggttcaaacggttctgcaacatcttcctcatatacaagagataatagccgatcagagaaacgatcagcaagacgaaacagaggatgataccaaccgtcttattcgtgttggatcgttccaactgcctacaatatccttccagagtctggtcttctccctgtaccttatataaatccgtaaaagccgaattattataactgtaggcatcaatttgtttcaaagcaaggaatgctaccgccgcttcatttctgatatccaaaatcacatgatagtctgaatcaaaaagttcattccaccaaaacagttcagcaggggttccttttcccaccagtttcatgtatcgatgcggcttaggggtacgcgtatatttcttataatgctcattcagcgacatcattgccgaatctatatactgcaatgctatttcgtagttctcatccacattggcaaaataagcggcattggcataatcagaggctgcatcaagcagatcttcataagtagaatctgtagtaatcgcaatggagtcactatcctgcaatatcgacggaaggggttcatgcagacaagaagccattcccaacggaagcaacaggcagagcaacacgccaatcactttacgtactcctgaaggcaagcggaaataaaaacggcttccctttcccggttcgctttctatatcgaatacgcatacccggaacagttcattcgttttcttatatttctctatgattcccttgcagttcatcaaaccaaaaccgcttcccttattctctttcagttcttccggatctgccgcgtctttcatgccgatagcacgcgaatcatataccttttcaccaataatatgcgcgatatcttctgctgaaagtcctctcccattatcttctacggagatttccacatacgcgtcggtagcatgcgcatatactttaaccgttcccccctcgggcgtatacttacgggcattttcagccagtgtattaatcataaacaaggtcaatgcgcgatcggcctttaccatcagggtggtcggttcgatttccagcttttgctttttcatttcaaaagcacgccgtccttttcccagcaaatcaaacagttcattcagactgaatgtctcgatgttcagactaagcgtaccttgcttcatcttgatccaaagtgccagaatatcattatattcgttgatggtagtcaccagttcatcaatgtactggtatttctctttctttatcctggcgtcatcaatatatcctttttccgtcaacttatgtacttcgttcagaatccggtcgatataaggattaatcccgttcacgatggccatacaagccttctttatcagattctgacgtttgtttcctgcaatatgctgctcgtagatataccgctgtttctccagctgatttcgctcgtcgctcaacgtagccaccatttgttcattttcagcagcccatacgatataaggttccactacatgcaccaatgccttctcgtcccggttcagtcgatgggaagaaggtaccagtgcagcttttccttcttccggaatttccagcgtcagacgtcctttcccaaacaactggtcaatgccttgctgaatcagaggtacgttcatcggtatggaagaagtgatatcccgacaaagagagagaatccgttgcagacgttccacatccacctgattcctgatcttggaacgtttgttgaagaaccaccaaaggatgatcaccagtactaagccgacaataaccagaaaaagaacgaccgtcatctgtcgcgatcctgcttccaaagacaaataacggctttccaactccttatcctgacgggtaaagttcaaaatatccagatagatattccggttataatcagaagcatccttcatccccagcccggcatatgaaacgctcaactgctcccttatccgtgagatccattcgggaacggtcttcaccttctcctgtccaatccatggaactccggtataagtagtatctccctcggcaaacgtatataatttatccagcgtatccacttcattatgataataaagcatgtgatgatggtttacgcagttcaatgcttttgataatgtatccaaagcttcctgataacgtccgtgcgcattcaggtatttgccgatagatacataagctccggcaatctgatacaagtcattatattcgcgaaatttctccagtgccagttgggccaaacgcaaagggaacaaagaatctaccggaaaatcaaactgatccaacgcatgtgtacgccttgtcttgaaaaactcaaaattagacggggatgccatcagattggcaagcccctgcattccattcccctcaaaatacggatgcttgctcttcacggctgtccgccaagtgaaataaagttcgtcaaactcgcggagtttccgttcttccggagtattcgctgcgaccaaagaagccgatcctttgagataatgataataaagaagctgattggtatcgctcaacgcttcgtcttcctgaatattatcgatagaggttatcgcttcctgccgttgctggagatagtaatagtaaatggaggaaacgagaaaaaattcggtaaatgcgtaatccagccgaagcgcttcgtgacggtcggcaaagaggtcgctctcttcacggatacgcttcatccgtcggagggcactgttccggtaatcataaaattctttgttgagcgctgtccgctggcagattttcatcagtccgatgtctgcaatcaacagctcaagctcatttttagtcagtttgtatacctctttatgatacgcctcggcacggtcgaaatccatattcatgaaagcacagaaccccagattattggaagcttccgctttccccgacttatacaggtttacttgccgatatgctttataggcgtatttgtaggaagagtccagattacggtaacgataagcatacgcttttccattcagcgagtcgataagcctcacttcttttgtgggcaccatgtcggtacacgaaaaaagggaggaaagcaacaatactcctattatatataatggagaatggaaaatggaaaatggagaataaaaagacaggcgataactatctttcattcttcgctcttcattttctgtttttcgtccataattcttcattcttcattctcagttcttcgttcttacttgcaaatctacaaatatttccgataagttggagagaaaattattttttctacaataagtctttctaaataataagagaaattcctacctttgcaggcaaattaacaaataggtaacatctattacaaaatgagcgaaaaagcaccctttatggtattctcgggaactaactcgagatatcttgcagagaaaatctgcgcaagtctcaattgtcctctgggaaacatgaacatcacccactttgcagatggtgagtttgccgtttcttacgaagaatcaattcgtggcgcacatgtattccttgtgcagtctactttccctaactcagacaacttaatggaacttctcctgatgatcgacgccgccaaacgtgcatctgcaaagagcgtcgtagctgttatcccctatttcggatgggcacgtcaggacagaaaagacaaacctcgtgtatctatcggagctaaattggtagccgacctgctttcagtagcaggtatcgaccgactgattaccatggatttgcatgcagaccagattcagggattcttcaatatccccgtagatcacctgtatgcatcagccgtattcctcccctatatccagtcattgaaactggaagacctggtgattgctacaccggacgtaggtggttcaaaacgcgccagcactttctccaaataccttggtgtacctttggtactctgcaacaagtcacgtgaaaaagccaatgaagtagcttccatgcaaatcatcggtgatgtgaaagacaaaaacgtagtattgatcgatgacatcgtagatacagcaggcaccatcaccaaagctgccaatatcatgatggaagccggagccaaatccgtacgcgctattgccagccactgtgtaatgtctgaccctgcttctttccgtgtgcaggaatccggattgactgaaatggtatttacagacagtatcccttacgctaagaaatgcgcgaaagtgaaacaactgagcatcgctgatatgtttgcagaaacaatcaagcgggtaatgaataacgagtccatcagttcacaatatatcatctaaatgaagaatgatgagtaaaggataagataaagaaagccggctaaacttgaatttagccggctttcttatttatctataattctttcttttaaagaagtcttcccattttataggttccttttttgatcacctttccgtctttatctgtttccacaaaagggccatctttctttccttgtttgaagaagccttcgaagcggttaccgtctttgtcgatctggacgccttgtccgtcttccagtccgtctacgaaaccacctttatattgcataccggcaacggttttcagagagccctgaccgtgaggacgattatttttccagtctccttcgtaaacatccccgttactccatttatagatacctttgccttcgcgtttattgtttttccagtcaccttcatacacagcaccgtttgcccacgtgaaggtaccttttccatcctgcataccgtctttgaaatttcctacatatttatctccattggcatgatagtaaacgccttctccggtacgttctcccaaaagataagaaccttcgtagcgatctcccgtatggaaaaaataagtaccttttccgtgctggatgtcatctgcccagtcaccatcgtacttatctccgttagtatattcgaatacgccttttccgtgacgtacatcatctttccagtcaccgtcgtacttgcagccatcgtcccagttcatggtgcctttgccgttcttcttgtcattcttccagtgaccgctgtatttagcaccattcgcccacgtataagtaccttcgccctcacgcttgtcgttcgcccagttgcccacgtataagtcgccattatgataatacatcgttccggcaccatgctgataatcctggaaccacataccgtcataacggttattattcataaaataatagattccttttccgtgttgctgatcctggaaccactgaccttcgtacttctctccatccggaaaagaatagattccgtagccttcacgttttcctttgatatattccccttcgtagacatccccatttttaaagaccgttttcccttttccgttcggtttgcgtcctttcatctctcctgtatagacgctaccatctttgaaagtataatttccgatttttatttctgtagagaatgtgtctttcaactttccgaagaacccacctttgctggtattattatcttgtgccatcactcctccctgtgcaagaagagtcaaaaaaagtgtagtatatagatatttcctcattagttttactcgttactcattaaaattacagtttggacaaagatacaacttctctcccaaaaagtgccataccggaaagcaaattatgacaactttttaccagcaatgacctcttttaatgtctctttgcacaaatagcgctgtgccaattcctgtatttcctgaggtgtcacctcatttacagcctgcaaagaacgggagaaatactggtcatccagccccgaagtagcaataaaaatccacgcatccgccagcgagaaaggcgattcgtagctccggcacatttcacccagcatatagttgcgcaccatcgtcagttcttccataggaacaggctcccggtgtagtttgtctatctcattatatacttcctgtatcagcggttccacgtattcattatccgtttcggtcgagattcccagcaaaccactatccggatagaacataattccggcagaaatcccataagtatatcctttctcttcacggatattagacatcagacggctgccaaagtatcctccgaacagcgtcatcagtacgcgtaatttcagatagtcaggattctgacgggtaatggtggtacatcccatcttcaccgcactttgcaaagcgtcttcacgctctatgaatattcgtttttcgggaacggcaacgaatgaaaatatcggttttgatgctttcagctgatattgtccgaaaggagtcccgaaagcaccggtcacccggcggatgatatcttccgtcaccttacccgacaggaaaatggaacagttgcccgaatgataatgccgtccgtagaagtcacggagtacttccggtgtaatggcatgataatcctcctccactacaatttgcccacatggatgctgtgtcccgtaaagcgcctgtaacaggccacggtgtgcaaggaagtctactttagaagtattgaccagatattgctggatattcgtatccaggatggtatgcagttctttctccggaaacacaggttccttaatcatggattccacgacttccagcgtttttgccagatacttgttcaacgagtagacagtgatataagcatactccgacgaactggacagttcgagccatgaaccataataatccagtttctctgcaatggttgccgccgtatacttctgcgtgccttcacgcagcatccggtttgtaaacagcgcctgcaacttctgcgactgttgccagcgccctccggcaaaaagaatatccatacggaccacctcctgttcaccggcattgacaaccgtcaacgggacaccgttcggcaaagtagtccggacgggagaaaggatatggaaatttttcagggcttgtatttcaggttgtatcgtacgatccataaatcagcttctgttcttcaaaaattcttctgcatgtttcagatcctgcggtgtgtcgataccgatcgtttccacgtcactgatgcctacctttattttatatccattctccagccagcgcaactgttcgagtgattctgccaactccagagaggattgcggtagagcggtgatctccttcaatacttccgtgcgataagcgtacagaccgatatgtttgtaataggtatgtcccttcagccagtcttccttatcggcattgcgctgaaaaggtatgatggaacggctgaaataaagtgcgttccaattcttgttgagcaccactttcggggagttgacattctccagtacggcaaacggttcatcggctgtgaaaggcttcaccaacgtagcaatctgcgtggtagggtcttcgaaacaagcctttacagcattcagctgggaaggctggatgaaaggttcgtccccctgtatattgactaccacatcaaagtcgcccccgatctttgtgcacgcctcatagcagcggtcggtaccacttttatgatcaatggaagtcatgactacttttcctccgaatgcttttacggcagcttcaatacgttcgtcatcggtagccacataagcatcatccaagatgcccgctacttgttcgtatacacgctgtatcaccgtcttcccccccagcatagccaatggtttcgcagggaaacgggtggatgcgtagcgggcaggtattattcccagaaatttcatatctgattgtattttaattcttctaatcctttcacaacatactctcttttcaggtcttccggcttcaacacccggtcatcgaaagagagcaaatcaatatccagactgactttttcttccttcttatcctccggacgacgcccggcggactgctcgatagctttcagctccttgcgcactctttcctcctccgcttccgagaagaacatcgccacctgattggagaacaatgccggacttctgaaaaacaaagggcgtgtctcctgttcagacgtaaagcggatggtaggaaacaaatccaccagtctcctgcgagccagaagaagattctctttccggttgtagttacttccgatacaaatgatacatttatgcacgatgagaggtttaattaaacaaatcgtccagtcccgtttcttcgaagacttctccgtccggtgtttccgaaccggcacaagggtcaaaaccttcgggcagtttaaacgtttccgtctggctgtatcccaaagtcgggtcatcgtagactttcttcatataagttgcccagataggcaatgcggcggcagccccttgtccataagtcattgtaccaaagtggatgtcacgttcatcacctcctacccagcaaccggacaccaatgatggagtaaagcccataaaccagctatccgagttatcattggtcgtacctgttttaccgcccatatcggccgtaattccgtaacggcgaacacgtccgcctgttccttcattgataacggaacgaagcattaccaacatcttgtatgcgctcgaaacactgataacttcttccatctgcggtgcaaacgtagaaagcacattgccgtcactatcttcaatgcgggtgacgaataacggagctacccgaatccccttattggcaaaagctgtatatgcgcttaccatttcaccgacagaaatttcgcagggacccaaacaaagtgaaacaacagggtcgatcgccttgtttcgtacaccaaaactatgaatcagccttacaaggttataaggattcagtttacccatcaggtaagccgaaatccagttatccgaattggccagtccccatttcagagtcaccatttcaccataacgtttattattggcgtttcggggagtccatgcctctcctgtttcggtaatcagcgtttgttctacatgacgcacctgatcacaaggtgaaaatccgttctccatcgccagtgtatacagatacggcttgatagtagaacctacctgacggcgtcccaccattgccatgtcatattggaaatatgtataattcggtcctccaacatacgccttcacatatccggtcatcgggtccatcgacatgaatcctgtacgcaggaagtgtttgtaatagcgaatagagtccatcggagtcataatcgtatccttctcacctgcccaggtgaaaacagacatttcctgaggagtatcgaatgctttgcgaatctcctgttcagaagcacccgctgacttcattacattataacgttcggtttgtttcatggctctggtcagcaattcttccacccgcgcctgcggcaatgcccttgcatacggggcgttcttacttccttgtttttctttaaagaacagaggttgcaagaagtcgcctaaatgttctttgatagcatcctcagcgtattgctgcatatgcgaattgatggtggtataaatcttcagaccatccgtgtagatattataattcgagccgtctttctttttatttttggcgcaccagccgtacagcggatttgtttcccatgaaagtgaatcttcataatacttctgcatctgccagccgcggtactcgctcttaaccggtttcttggcagtcatcacaccacgaagatattcgcggaaataggttgccagaccttctttatggtctacacgggtatatgcaagtttcagcggaagtgcctgcaaagaatcacattccgcatccgagatgtaaccggctttttccatctgacgcagtacgacgttacgacgtcccaatgcattctcacggattttcggatttcgggataccggattataacgggacggattctgacacattcccaccaacatcgctgcctgctctattttcaaatctttgggttcacagccgaaataagtagacgcggctgtctttataccgacagcattattcaggaagtcgaacttattaagatacattgtcagaatctcttctttcgtatagtaacgttccagttttacggcaatcacccattcgatcggtttctgcaacagacgctgcatagtattgcttgccaccttttccgtaaacaactgttttgccaactgttgtgagatcgtactacctccacccgcacttttctgcaacaataatccacgcttgacgatggcacggaaaagtgccttcgcatcaataccggaatgttcggcaaagcgaacatcctccgtcgcaatcagcgcatgaatgatgttgggagaaagatcggcatagctgctgtatacacgattgtttttttccattgagaaggtacccagtactttcccgtcttccgagaatacctcagttgcaaatttataattgggattttccagttcttccacaggaggcatatagcctatccagcccttagagatagacacaaaaacaactacgatagctattaaagcaactgccaacaatacccaaagagcgtttattatttttcgaatcatgtttcttctagcttaaaaaagatgcttataattaagccgcaaaggtagataaaatatagcatacagcaaacgagtttttgatttatttgatattttaaaaccaaccgaaaaacgaataaaaagagaaaaaaagtttgtattttacattttcttcgtacctttacactccggtaaaacaagttctatccacataaaagataacaaaatggaaaacagaagtttagtaaccattgccgaacattctaaagaaaaaatcctctacatgctcgaaatggcgaagcagtttgaaatgaaccccaaccgccggttattgcaaggtaaggtagtagcaaccctgttcttcgaaccttccacccgtacccgtttgagtttcgaaacagcagccaatcgcctcggcgcacgcgtcatcggatttactgatccgaaagcaaccagctcctcaaaaggagaaacactcaaagacacgatcatgatggttagcagctatgcggatatcatcgtcatgcgacactatctcgaaggagctgcccgatatgccagcgaagtagcacccgtacccatcgtcaatgcaggagacggagccaaccagcacccgtcacaaacgatgctcgacctctactccatctacaaaactcagggaacactggaaaacctgaacatctttctggtgggagacttgaaatacggacgcaccgtccactcactactgatggctatgcgtcacttcaatcctacattccacttcatcgcccccgatgaactgaaaatgccggaagaatataagctatactgcaaagagcatcagatcaaatacattgaacataccgaatttaccgaagaaattatcgctgatgccgacatcctgtacatgacccgtgtgcaacgcgaacgcttcaccgacctgatggaatacgaacgagtgaaaaatgtatatatcctgcgcaacaagatgctggagaacacccgtccgaacctccgcattctgcacccgctgccccgtgtcaacgagattgcttacgacgtggacaacaacccgaaagcatattatttccaacaggcgcaaaacggtctgtatgcccgtgaagccatcctttgcgacgtattaggtatcacattagaggacgttaaaaacgatattttattatgagcgaaaataaacaagcattgcaagtagctgccctgaaaaacgggacagtgattgaccatatcccatcagaaaaactctttactgtcgtacagctactgggcgtggagcaaatgaaatgtaacatcaccatcggcttcaacctcgacagcaaaaagctagggaaaaaaggcattatcaaaatcgccgacaagtttttctgcgacgaagaaatcaaccgcatatcggtagtagcaccttacgtaaaactgaacattatccgcgactatgaagtcgttgaaaagaaagaagtcagaatgccggacgaactgcacggcatcgtaaaatgcgccaatccgaaatgtatcacgaacaatgaacctatgcctacgttatttcatgtgatagacaaggataattgcatcgtgaagtgccattattgcgagaaagaacagaaacgcgaggaaatcaccatcctctagtttctccattcctcattcttaattttttattaaattgaaacaagactggaaaccgggaacgatgatctatccgctgcctgccgtattggtgagttgcggaaaagatgaaagtgaatataatattataacagtagcatggacgggtacgatttgcacaaacccgcccatgtgctatatatccgtacgaccggaacgacactcctacgacatcatcaagaaaaatatggagttcgtcatcaatctgacaactaaagatatggcgttccccaccgactggtgcggagtacgttcgggacggaattatcgtaaattcgaagagatgaaactcactccgggacgctgcaccgtagtcagcgcaccgctgatcgaagagtctcccctctgcatcgaatgtcgcgtgaaggaaattgtttcgctcggttcgcatgatatgtttatcgccgatgtggtaaacgtccgtgcagacgaccggaacctgaatcccgaaaccggcaagttcgaactggcggaagcgaacccgctggtatatgtgcacggaggatattacgacctgggagaaaaaatagggaaattcggctggagtgtagaaaagaagaaataaagaaaaaagtactgccatgaatatactgcgcaacataattcttttcggttggatggcgatagcttgcacagctttcgcccaagatcgtaacgcagataaagtggaacgtcccaacacaaagaaaatcaactttggtatcaaagccggatttaattcttccatgtttatggtatccgaattgaaaatcaaagacgtaacgatcgacgaagtacaaaataattataagatcggctattttggcgcgatcttcatgcgctttaatataaagaagcatttcattcagccggaagcatcctataatgtcagcaaaggcgagatcacctttgacaaactcggttcgcaacaccctgccatcgaacccgattatgcttccgtacaatccgtacttcacagtatcgacttccctgttctctacggatataatgtagtgaaaaaaggaccatacggaatgtctatctttgccggtccaaaactccggtatctatggggaaagcagaacgaaatcactttcacaaacttcgaccagaaagggattcatgaaaagctgtatccgctcaatgtcagcgttgtgatcggtgtcggcgtcaatatctcccgcatctttttcgacttccgctacgaacaggggataggaaatatctccaaatccatcgtttatgacaatatcaattcagacggcagcacgggagtcagccctatcattttccgccgccgcgacagcgcattaagtttctcgttcggattcattctttaaagaacatccgacagccggctgatgaacttttgatagtcggcaaccggcaaaaacagacacctcctattcattccgtacgataaattatccattatctattaatttcctccatttactaacatttttcttatagttccttcgttctttatttattttcactaactttgtgcgcttaaaataggtatctcgaattaaaaatttaatcttacttataaaaagaatgaaaagagacgacttaattttcgacatcatcgaaaaagagcaccaacgtcagctgaaaggtatcgagctgattgcatctgaaaactttgtaagtgaccaggtaatgcaggcaatgggttcttgcctgactaacaagtacgcagaaggttatccgggcaaacgttactacggaggttgtgaagtagttgaccaaagcgaacaaatcgctatcgaccgcctgaaagaaatcttcggtgccgaatgggcaaacgtacaaccgcattcaggagcacaagccaatgcagccgtatttctggctgttttgaatccgggcgacaagtttatgggattaaacctcgcacacggcggacacctttctcacggttcattagtaaacacttccggcattatctacactccttgcgaatacaatctgaatcaggaaaccggccgtgtagactacgaccagatggaagaaatagccttgcgcgaaaagccgaaaatgattatcggcggcggctctgcttattcccgcgaatgggactacaaacgtatgcgtgaaatcgcagataaagtaggcgctatcctgatgatcgacatggctcaccctgcgggtctgatcgctgccggactgttggagaacccggttaaatatgcacacatcgtcacttcgactacacataaaacacttcgcggacctcgtggtggggtcatcatgatgggaaaagatttccctaatccttggggaaagaaaactccgaagggtgaaatcaaaatgatgtctcaattactggattcagctgtattcccaggtgtacagggcggaccgttggaacacgtaatcgctgccaaagccgtagctttcggcgaaatcctgcaaccggaatacaaggaatatgcaaaacaggttcagaagaatgctgccgtactggcacaggctttgatagaccgtggttttacaatcgtttccggtggtacggacaatcactccatgctggttgacctgcgtagcaaataccctgatctgacaggtaaggtagcagaaaaagcattagtttctgctgacattaccgtgaataagaacatggttccgtttgacagccgttctgctttccaaacttccggtatccgtctgggtactcctgccatcacaacccgtggtgcgaaagaagacctgatgatcgaaattgccgaaatgatcgaaactgttctgtctaacgtggaaaatgaagaggtgatcgcacaagtacgtgcacgtgtcaatgagacaatgaagaaatatcctctttttgctgattaagatttctttctttgagtaaccaaatgccggtaatgtgaattagcagcatttgtgttcaacatttcataaagaatttcttttgaattttataagcctgctttctgtgaagaaaacaggcttttcttttttatttattaacagaatcagacaaactatctgctcgaaaagatgttttcttactacaaaaagagaaattgaaatacgcactatactcttccggaaagcagcgacttcaatcgtacagtgtatcagacaaggtcaacataccggtacactggactctatatacaatcatccccgtcttcccaaactatcagaagtggaaagacggggatttatattggatgattgagtacagaaatatactaaatgaaatagtaaaaatcagctcagtccttcaatttcaccatctacaatgtcgatatgcaacgcttgcggttctttgggcagtcccggcatacgaaggatttctcctgcaatcgctacaatcatttcggcaccgttattaatcactatatccttgatatggaactcgaaattattcacggcaccataaatcttcggatcggcagaaaaagagtattgtgtcttggcaatgcaaaccggataatgagtgattcccattttctcaatcagcttgatgcggttgcgggcgatgctgctgtacgtaatgacgctggctccataaaggttggtagccaccttctcaatcttctgctgtatgctgtcttcttctttatacgtataacgcaaaggttcggacggattattttctatcgtatcaactacgaggcgggccatatctaccgctccatcaccaccttcgctgaacgcattattgatggcgtaacctacccccaactgttcgcagtgctcgcgcagcatttccatttcctcgtccgtgtcggtggcaaacttattgaaagcaaccactaccgtctgtccgaaggagcgaagattacgaatatgtttatccagattgcgcaatccttctttcagtccttccatgttcggttccttgatgcggtcgagactgacaccaccgtgcatcttcagtccttgcgccgtagcgacaatcacagtcagtttgggctggagtccgcttttgcggcatttgatgttatagaacttttcagcaccgaggtctgcgccgaatccggcttccgtaatcacatagtcaccgaatgacattgccagtttggtggcaagaatagagttacagccatgagcgatattggcaaacggtccgccgtgtacgaaagcggcggtaccttcggtcgtctgcaccagattcggatggatggcgtctttcagcaataccgtgatagctcccgccactccgagatctttcaccgtaaaaggctggtcatcatatgtaaaaccaagcagaatattttcaatgcggcggcgcaagtcttccacatctttggaaaggcagagaatggccataatttccgaagccggagtaatatcgaagcctgactcctgcgtgatgccgttcgacttgggtccgagtccgactacgatgctgcgcaacgaacggtcgttcacgtcgagcacccgacgccagagaatttctttcaatccgaaacctttcgcctgattctgataaagataattatcgagcaaagcagaaatcatgttatgcgcggaagtaatcgcatgaaagtctcccgtaaaatgaaggttgatcttctccatcggaagcacctgtgcatatcccccacccgctgctcctcccttcataccgaagcaaggaccgagagacggctcgcgcaaagcgacaatcgccttctttccgattttgttcagtcccagggcgagaccgatagatactgtagttttgccgatacccgcctttgtcgctgtgatggcagttaccaggacaaggttacttttcttcactttctcctcgtcgatcagttgttcgggaatcttcgcgatgtagcgaccataattttcgacttcttcacgagggattccgatgctttcggcaacttgcttgatctttttcaactcgacactgcgagctatttctatgtctgatttcatacagaatatgattagttttatttgaagtgacaaaagtataacaaaaaagcgaaactgagaaatttaagacgctctctcgtttacccgggacttccgcacaattaatttatatttttagaaactatgacgataacgtacttaacccactaaactctttttgcacaagaactgttgttatgaacataacctaaacaagaacaacatatatggaatggattattaatcaactcagggatcatcccgaacttgccattttcctcactttattcgccggcttctggctgggcagattcaaaataggaaaattttcgttgggaacagtaaccagcgtgctactggtcggagtactggtaggacaattaaacattagtgtagacggcccgatgaaagctgtctttttcctcctgtttttattcgctgtgggctataaggtaggtccgcaattctttcgcggattgaagaaagacggattgccgcaagtaggatttgccgtcctgatgtgcattgtcagcctcatcgccccatggatacttgccaaaatcatgggctaccatgtaggcgaggctgccggattgctggcaggctcacagaccatttccgcagtaatcggtgtggcaagcgacacgatcaatcaattaagcatcagcgatgcgcagaaagcgacatttatcaatgccatccccgtagcatacgctgtgacttatattttcggtacggcaggttccgcatggattctggcttcactcggtcccaaaatgctgggcggactggagaaggtgaaagcggactgcaaagagctggaagccaaaatgggaacttccgaagcagatgaacccggattttacaccgccctccgccccgtcgtattccgtgcttataaaatagataacgaatggttcggcaaaggaaaaacagtcagcgaactggagaactatctggtggaaaacgataaacggctgtttgtagaacgcgtacggcaaaagggcgtcatagaagaagtcaccccggatatgcttctacaaccgggcgatgaagtcgtattaagcggccgccgtgaatatgcaatcggcgaagaagactggatcggtccggaagtgatcgacgcccaactgctcgactttccggcagagacgcttccggtaatggtcacccaccgcacattcgcaggcgaaaaggtctccacgatccgtgcgctgaaattcatgcacggagtcagtatccgcagtatcaagcgagcaggcatcaatgttccggtactcgctcagacagtgatcgactccggcgatatcctcgaactgaccggaacaaaactcgaagtagaaactgccgccaaacagatgggctatatcgatcgccccaccaaccagacagatatgatcttcgtgggactgggtatcctgctcggtggtctggtcggcgcacttgccattcacctgggaggtatcccgatcagcctgtccaccagtggaggtgccttgatcgcaggactcgtattcggctggctgcgcagcaaacatccgacctttggcggtatccccgaaccttcgttgtgggtattgaataatgtgggattgaatatgtttatcgctgttgtcggcatcgctgccggacctagtttcgtgaccggtttcaaggaagtaggattcagcctgtttatcgtcggtgcactggcaaccgccatccctcttctcagcggactgctgatgggaagatatctgttcaagttccaccctgccctcacactgggatgtacagccggagcacgtaccacaaccgccgcactgggagctattcaggacgcactaggaagcgacactcccgcgttaggatacaccgtgacgtatgcagtcggtaatacactactgattatctggggagtagccatcgtattgctcatgtaaatgtcagtataatgaatgtataggaaatcaaaattaagtatcaaaacaataagaaccattatggaaaagaaaacaactggcacagctatcaccaagaactttgccaaaaagatggaaacgatcagccctttcgaacttaaaaacaagctcatcgaaatggctgacgagagtatcaagaaaatggcccataccatgctgaacgcaggacgaggcaacccgaactggattgcgaccgaaccgcgtgaagcattcttcctgttaggaaaattcggactttgcgaatgtcgccgtgtccaatccctggaagaaggaattgcaggcatcccacaacaggaaggaatagccgcccgcttcgaggctttcctcaaagagaacgagaaagaatccggagccaggttactgaaagaaacctataattatatgctgatggagcacgcagccgatccggacagactggttcatgaatgggcggaatcggtcatcggcgaccagtatcctgtccccgaccgtatcctgcacttcaccgaactgatcgtacaggattatctggcacaggaaatgtgcgaccgccgtccccctaaaggcacattcgaccttttcgctaccgaaggcggaacggctgccatgtgctatgtattcgattcattgcaggaaaactttctgttgaatcaaggggattccatcgccttgatgattcctgtcttcacgccctacatcgagattccggaattacgccgctatcagttcgatgttaccgaaatatctgccgatcagatgacaccggacgggctgcacacctggcaatataaagatgaagatatcgataagctgaagaatccgcagataaaagcgttgttcatcaccaatccgagcaatccgcccagttacgcgctgagcccggagactgccgcacgtattgtcaacatcgtaaagaatgacaatccgaatctgatgatcattacggacgatgtgtacggaacattcatacctcacttccgttcgttgatggcggagttgccgcataatacactctgcgtctactccttctccaagtatttcggagccacaggatggagaaatgcagtgatagccctacacgaagacaacatctacgacaaaatgattgcccgcctgtcggaggagcaaacagcaatcttaaacaagcgttatgcaagcctcagtttacatcccgagaagatgaagtttattgaccgcatggtggccgacagccggcagattgcgctgaaccataccgcaggactctcgctgcctcagcaaatgcagatgagcctgttcgccgccttctcccttctcgacaaggaagaccggtacaaggcaaagatgcaggaaatcatccaccgtcgcctgcatgcactctgggacaacaccggctttacgctgatagaagacccgctgcgtgccggatattattcggaaatcgacatgctggtatgggcgaagaaattctacggtgacgaatttgtagactatctgcaaaagacctacaatccgctcgacgttgttttccgccttgccaacgagacttcgctcgtcctgctgaacggcggcggatttgccggaccgaaatggagtgtccgtgtttcgctcgccaatctgaacgaagccgattacgtaaaaataggacaaagcatcaagcgcgtactggatgagtatgcaaaaaatagataatacttattatttaaagcgggaagtatccacctcttcccgctttttctccttgtatcctccgaatttgtagttgaaggaaataccgaaggcacgggtagtcttcatatagtgattcttcacattctgttgtccgaaacggacattagtcgaaatggtggaagtattaaatatgtcgtcgcatttcaaggtcagttgtgcttttccctttgcgaaagtatagcgcagggccgcatccagatttcccgaacggggaaggtcgaaaatgccttgtatcgctttgttctgataaaatccgcttagggtaaacttcaaatcgggtttggtggagagagtgaaggtattgttcattgtcaatacaaacgtatatagtttgcggtcgaacgggatatcccagaaatcactgtctttctgacggtaacgaaagccgattgccgtgatgcgggagtccagccatttcttcactttaaagggaactaccattaccaagcccgcctgttccgagaagtcgaagttaaagcatttatagatctcgaccagacgttccggagactggtaaagcgtctgcatttccttgtttttcgtgcggctgtaataggcggtcagcacatatttaccttttaatatatagctaatgttagcttcgtagttggttgccggtttgaggaagggatttccctgaatctcggaataagcgcccatgtaggaagtggagttctgcatactccagtattccggatattctttgtcgctgctcaatgaaaattgcaggatatgtcccggagcaggcaaataagtcaggttggcaaccggatacaggctccattcgttccacatatccgtatgatattgctcggcagccagagagacgtccgccgaaagtttctcaccgaagctcttgctgagtccggcataaaagttcagcgtctgctcgcgacgacgggattgcatgttgttgtccggcagtaaagtttccgtttcgggatcgaaatacatttgataactattgtccaatgcggtcgtataagcaataccataattcaatccccagtctgcgcccaaagtatgttcttgtccggcatagaaacgccattggttgatccgttggttatctttgctcaggaagttcagtgtttcttctcccagtgtgctgtaaagcagctgactgccgggagcatgataataggtaaattccgctccggctttcagtccgaaaggagtctgatagtcgagtttggcattatgaagctgtccttccgagtgcgaatcggtgaccgagttctgcgcaccggtgactgtggcgtaaggtttgacatcggtgaaagcagtggtataaaccaagctcagcaaatgcttgtcggtaaaggcatagtccatcccaaggcgtatctggtgattgttgtggcgggaagtagtgatatcatacatattcatcggatgcaccgaaccgtcggcgagcgtgtgaagcgcttccttgtctgtctccctccgttcgcggctgtaagagtaagagtagagaagatcagcagaaaatttgcgtccggagtatagaaggctcgcacgctctgccagagattcgtagtgtaattggctgtaggcagtatatagttctccctgaagagaaggttcttttcctatgcccgaagtcagtatcaaattgatcatcggtccgcgcacctgataacgtgccggagcggaatacatcacttccgccttttcaatccgactgacgggcattgatttcagcagggtgcttaattgctctacagagagggtggtcacttttccgttgataaccacagtgaccggttgccctcccaacgtcagggcatcattcatggagacaactcccggcaggttctttaccgcatcataggcattgtctaccggcaggctgccgaccagtctcggaacgtcgtataccagtttcccctgttcggcttttactaccggacgttcgccggtgatcatgacttcgggaagttcccgatacaggctgtctatataggctacattttttacgctgtcggcaggttcctgcgctgtctgtacctgctgtgcagaagcgtacatccaatacatgaaaagtaacaaaagcagtaaataagttcgtttcatatcgcatttatttttgagtatgctgcaaaatacgggagaaaaaacgaaactttacgttatcgccggcttatctagtgttatttagtcttatcaaagagaagaaaaataacagtttcatactatctttgtccgtatgaaactaccgttgaaacatatcattatccttgtcatctgctcgctgacaggcatctttgtttaccagacatattggctgacagggctttaccgcacgatgaagcaggaaatgaacaataatataaaagacgccatgcgtacgagcgactttaatgaaatcgtgcttcgcgtcaacgaactgcaaaaggataatgtggaacatggttcggtcaccgtttccgccggatatggtgcagacggcaagtcgctggtgacaagccagactgtctcttatacagacagtacctacaaagacaccctgcatacacgcacggaaacagcagtagataccctggccgtcaatgacaatgatccggatgccagcgccgttgcctccagcgaaagcggactcgatgtattattaaagagacaggactcgatgaaagaactcatactcagcgtccaacagggtatgcactccggcgtggacacctacatcgacatcaacctgcaaaaatatgacagtctactgaccgatgtactgaaagcacacaacatagatgtacctcaccacaccttatatatatacagcggagccactcaggattcatcccagacattcatagatacactgggcatcgcaggagacagcacctatatccccagcccgaaagccatccgctacgattacgaattcaacaggcatcacagtcaacgctaccaactgataatggaacccatcacctcactggtatggaaacaaatgaccggcatcctggtcacttcatttgtcatcttcctcatcctcggattttccttctggttcctcatccgcacactgctgaaacaaaagacgctggaagaaatgaagagcaactttacgaacaacatcacgcatgagttaaagaccccgattgccgtggcgtatgccgccaacgatgcactgctgaatttcaaccaggcggaagaaaagagcaaacgtgaccaatatctgcgcatcagccaagaacagctacagcgcttgagcggactcgtcgaacagattctttccatgagcatggaaagccgcaagacgttcagactgcaccccgaagagatttgtctgaaagaactgattacttctttaatagagcagcaccagctaaaagcggatatccccgtacacataacactggaaacagaaccggaagcactgacgatagtagccgaccgcactcatttcagcaatatcatcagtaacctgatagacaatgccgtgaaatattcgaaacaagaagcagagattatgattcagtgccgccaaacgggggaaacagtgactatcaccgtctccgatcatggaataggtattccgcttgacaagcagaaacatatattcgacaaattctatcgcgttccgaccggaaatcttcataacgtgaaaggatacggcttaggacttttctatgtcaaaagcatggtcgaaaaacatggaggcaccatcaccgtcaaaagtgaatccggcaaaggaagtacatttaccattactatctaaaacatcaaaaacatgagcaaaaacgacattacagtattgttggtggaagacgaactgacactcgccatgattatcaaagatacgctcgaggaaaacggttttaccatccataccgcctccgacggcgaagaaggattgcatcttttctttgaacttcgaccggacgtgctggtggccgatgtgatgatgcccaaaatggacggcttcgaaatggtacgccgcatccggcagacggacaagcagacacctgtactgtttctgactgcccgttcggccatcaacgatgtagtagaaggattcgaactcggagcaaacgattatctgaaaaaacctttcggcatgcaggaactgatcatacgtatcaaggcgctgatgggaaaagcgttcagcttcacggagacaaaggtatccagccgttttgagataggaagttatctgttcgatccggtcgcgcagacattgctgcatgccggagtgagacaggaactctcccaccgcgagtcggaaatactgaaacggctttgtgagaaccggaatcaggtggtcaatacgcaggacgttctgctggaactttggggagatgacagtttcttcaattcccggagtctgcatgtgttcatcacgaaactgcggcataagttgtcgcaggatgagcaaatacgtatcgtcaatgtgcggggaatcggctataaactcattgcaaactaagctctaaaatagtgtcactatcctactggtatagtgtcactatccccacaggatacttacactatcttagtgggatagtgacaccatcccgacgagacagtggcacactcctttttaaaggatttttctctaagaaaacataacggaagcaggcagtcagactaaaaatctctatctttgtcatcaatcaacctttacgaagatgagaaaactgattctatttctttcgctgatattatcggtcggttttgcatccgcacagtcggaagttccttccgatagtattcgtcgtgctccgtcgagcaatataaaggaattcggtggcttcctgctcgatatgggattaatgaatgtggcccctcccaaacttccgaaattcagtctcgatgtaccggatgtaagtaaagactataatcagatattccgtctgaatacagacgcgacctatacgcagggattcaccgacgcattttcttcccctttctccggtttcggatatgggtatggctggggattgtcgtcttcaccgcagttcatgcagatgggtaccttcaaactgaaaaacggatggaaaatcaatacatacggagactatgacaaagacggatggaaagtgcccaaccgtagtgccatgccttgggagaagaataatttccggggagcattcgaactgaagtcctccaatggtaatttcggtatccggatcgaggttcagcagggacggaacggtctttattaactacgctactcattatgatcgacttgtttcggctattagcatattctgattagctattagcataatccgattagctaatagctaatcagaatatgctaataggatatttcaatcatcaataacaagatgagccacttattcagctaacgtttattctgcttcaaaagctctgtctgccgcagccatcgcatcggctacacggtcgcaccatgaatcgaactccggatcaggagtctgtgtttcggggtgcgaaagcatatattgcactgactgccttaaaccatccgccatcgaagttgtacagataaagtccggcacaaggcgttttattttcgaattatcaaagactaccgttgcggctttatcccccaacagttcgccccgaaagtcatagttcccgccatgtctcgcaagaaaatcggaagccacatgaagtgcgttcagaggtttccccagcgcatcggcaatggtttgataaatctgattccaagtcatactctcatctgtggtgatatggaaggcattcccgatggcatgagggttagccatcagtcctacatatcctttggcaaaatctttggaatgtgtcagtgtccacaaggaacttccgtcaccggggataataaccggtttcccgtcaaggatacgtttaagtatctgccagttccccttatttccatgcaggcttacaggaggtttcgttccattatacgtatggctgggacggacaatcgtaatcgggaaaccgctggtacggtatgctgtcatcaacacttcttcggcggcaatcttatgccgtgaatattgccagtaaggattcactaaaggggtactttccgtaatacggtaatcagccaacggtttttggtaggcggatgcactgctgataaaaatatattgtttcgtcttattacggaacagacggatatcacgttctacatcttctgctgtgtaagcgatgaactgagctacgacatcataactttcatctgcaatagctttcgccacagcttcctcatcgtgaatgtcggcaatgatactgcccacaccttccggcagtttttttgagccccggttaagcaatgttatctcccaccctctctgttgagccaattctactacatcggtactaatcgtaccggttcctccaatgaataatgctttcataaaacaagtctttttaaattcgcaggaacaaatatattaattctactattcacatcccttgattatcccgtttttttgtttccgacacgctgatatttagctggaaaaagtgagtttgcctcctactgcccgccagcattgtatacaaattactgaatcttatacccaaattactgttttgcaaatccggaatgagaaagatacatttaaaagctttatctttgtgacagatcaaaactgtaagccgtatggaagaaataacaaaaattgaaagtattgaccagtatgaccaactgttcggactagagaccttgcacccgctggtaaacgtgatcgacttttcgaaagcgacaaagacggtagactactatcgtatgaatatcggattctactctctgtttctgaaagacgcaaaatgtggcgatctcagatatggacggaagtattatgactatcaggaaggaaccgttgtctgcatggctccgagacaggttatcgggatagataaccgcaagcagacaccaattcgtacaaaatctatcggtcttttatttcatcccgatttaatccggggaacttctttagggcagaacatcaaacactatagtttcttctcttacgaagtgaatgaagctctgcatctctccgaacaggaaagggaaatcgtgaccgactgtatccacaaaatacaaatcgaactggaacatgccatcgacaaacacagcaagcagctcattgtccgcaatatagaactattgctcgactattgcatgcgcttctacgaacggcaattcatcacccgtaatcaggcgaataaagatatcatcgtgaagttcgaacagttattggacgagtattttcagaatcagactgcacttaccgaaggacttccttctgtaaaatactttgcggacaaagtctgcctttcttccaattacttcggagacctgatcaagaaagaaacaggaaaaacggcacaggaatatatccagcaccggatcatagaacttgccaaggaacggatattagaaggcagccagacggtcagccagattgcgtatgaactggggttccagtatccgcagcatttcagccggttgttcaaaaagaatgtcggatgtacgccaaacgaatataagcaacagaactaaaaacagctccactaatcaggatattagttacgtcatgggagataaagtacttaagataggaagtgtgcatcaatgtaattgctgcatggggagtaagacgctgcaccctctggtcagtgtcatcgacctttcaaaagccgatttatcctcccatacggatttcaaattcggattttacacgattctgttgagcgaatgcaaatgtgaagcctacagatacggacatcaatactacgacttctcggacgggacacttctctgtctgactcccggcgagtcaatcagtatgaaggatagtgacaacacatgtccttccaaaggatggatactggcgtttcatcccgacttgatctgcggcactgtgcttggagcgaacattcgtgactatactttcttctcttatcgtcccgaagaagcactgcatgtttcattacgtgaaaagcaggtcatactagaacttctggataaaataaatgaagaattgcaacgctgtatcgactgctatagtcagaagatcatttccaaatacatcgaactactgcttgattattgcgaacgcttctacgaacgccagttcatcacacgcaatgaggctaacaaaaagattatcgaacggtttgaccgtcttttggatgatcatttcaatactatacaaagtcagtcctccgatcttcccactattgaggagtgcgtcagagtacttcgtctttctcccgcatatttcaatgatttgctggaatatgaaacggggaaatcgtacaaagaatatcttcagttcaagcgtttcgagatagctaaagagtggttgataaatacagataaaacactcagccagatagcgcaggaactcggtttccggaatccgcaatatttcagccgcctgtttaagaagatcaccggttgtttgccgaatgatttcaagatgcctaactgacttttctcttaataaaaatagaattaagaattcaaattcttaatcaatgttataaaacatactatttttcttggataatttgcaaagttcacagaagtccgtatctttgcaatgtgtttttcatagtattagatttaaggttaacaaaggttggagcaaggcgttgctcctttttttatgtccatacgtgagctattggactttcgtatatagtagaattacattatttttcagtagatttgcagtaacacttgaaaaggatacattcagattatattctgaatatataaatcaaaaagtgctctttttacgttatatatcaagaagtaactttaatcctgacaaaacaatgaagacagagcggaaatatcaccatttgattaaatcagttatcatcgtactattcctttcttttggcatgacttcgtgcgaaaaggaagagccagttccggtacctacagaacaaacggtattcatgtatctcccctggtctgataatctcacatccaatttctatcagaacatcagcgaccttgaaagtgtagttgaaaagaatatcttgaaggatgaacggataatcattttcatgtgtaccacagcaacgaaagccactctttttgaactcgcttatgagaatggcaagagtgtgcataaaactctaaagaactatacagatcctgcatataccacagcagaaggtatcacatccatcctaaatgatgtgcaacgctactctcccaccaaacgctattcgatggttatcggctgtcatggcatgggatggatacccgtatcaaattctaaatcacgtagcggtcttcgtaccaaaatgcactgggaatacgaaaatgtaccaatgacacgctacttcggaggattaaatgcccaatatcagactgatataaccacacttgccaaaggaatatccaatgccggacttaaaatggaatatatactctttgacgactgctatatgtcaagcattgaagtagcctacgctctcaaagatgtgactgattatctgataggatctacaagtgaagtgatggcgtatggtatgccatacgccgagataggtcagtatctaattgggaaagtagattatgccggtatctgtgacggtttttactctttttattccacttatagcacaccctgcggaacaatcgctatcactgattgctcagaacttgataacctggcaactattatgaaagaaattaatcatcgatatacttttgatccttcactaaccagttctttacagagactggacggatattatccggttatcttctttgactatggtgactatgtttcaaaattatgccctgatgaaactctagtggcacgattcaacgaacagctcaatcgtacggtgccattcaaaagaaatacagaatatttctattcgatgagcagaggagaagtgaaaatcaataccttctccggtattacaatctccgatcccagtacgcactcgctggcctcaaaaaaagaagaaacagcatggtatgcagctactcactaggaacaagagataagatcaggaaatctcttaataaaaatagaatcgagaattcaaattcttaatcaatgttataaaacatactatttttcttggataatttgcaaagttcgcagaagtccgtatctttgcaatgtgtttttcatagtattagatttaaggttaacaaaggttggagcaaggcgttgctccttttttatgtccatacctcatctcgtcagctaattttatcctttgatcaccgccataggcgccaattccaccaaaggctttactaaatcccgctcattagcgattacttgcgcaatatctttgtaagctcccggtgcttcatccaatccatccggcatgcgcatcggacctgataatgatatgcttaaattcgcaaaagagcaaaagaaaaagggaactacgaaatctatttgcgtaactaaaattattttctacttttgtgaaaataaatatagaaagccatatttctgaaccgaacgactatatagaaacagcccatgaagaatataatgattatcggtgccaatggattcaccggacgccagatactgaatgacctgtcaagcaaggcacaatataaggtaacaggatgttcccttcatccggatatccttccgaaaaatggaggcaactatcatttcatcaccacagatatacgggatgaagcagccgtaaagcaactttttaaagacgtacaacccgatgtagtcatcaactgttccgccttatccgtccccgattattgcgaaacgcatcacgaagaagcctggctaacaaatgttacggcagtagaacaattggcacatctctgcgaaagttacaaaagtcggttcattcatttatctacagactttgtctttgacggaaagatagacgagaagtccggacagctttatacagaagaaagtctccccgctcctgtcaactattacggtttcaccaaatggaaaggagaagagaaagtggctgaaatctgtagtaactatgccattgcccgcgtagagattgtctacggaaaagcactaccaagacagcatggaaacatcgtgcaactggtgatgaatcgtttgaatgcaggacaagaaatccgtgtcgtatcagatcaatggcgcacgcccacttatgtaggtgacgtatcagccggagtgcaacacctgatggaaaatgccgcaaacggaatttttcatatctgtggcgacgaatgcctgaccatcgcagaaattgcttttcaggtagcagactacatgaagctggactgttcactcgttcaccctgccacaacagaagaaatgcaagaagctactccccgtccccgtttcagtggaatgagcatagcaaaagcccggactatacttggttaccaaccacgaaagctgaaagacatcctcatggagtggaaacattaatcggcaaatcctattaatcagattgtttgcacaaatgaaagtatgtgctctacacaacatagaaatttgactcaggcatcgaactggcaactaaataaaaatgatataaacacataatatataaaggttaaggtctacataaccaagtttttactacattctattcctagtttcagctacctttcccattctaattattgcatatttattttgaaaatatgcaataagttcttatctttgcacccgaattaaagaaccagaagatgaatcaaacattacaattacataacgcccttatatttcatgcggaaattcccaatttctgcacgtcatgttgcgtgcatgtacattggttcagcggattcatctaaattccccttactcattcttacccctaactgcctgttgacttatttcgttactcacagacagtatttccatctgattgtcaataagatgtatgtctttttggggattatctatgctatttatgaattgtttaacctaaccaactaaaatatattacaatatgttctctattatatctaccatgtttttgggaatcggtatcggatacggattacgtaactggagtatcttacaaaagactgaaaagacaatttctcttacaatattcctgttactctttatccttggagtatccattggctctaatagcctgattgtgaataatctcggtaagtttggatggcaggcgatcattcttgccgtatccggcgtattagggagcttgttggctgcccggcttgtgttacaactatttttcaagaaaggaggcaaacaatgaaaggaagtctcatcgttatcgtatttttctgtgtaggctgtatcatgggagtttttaataaattccagttcgacacacatactgtttccatgtatatactatatgcgttgatgctgcaagtaggaatcagtatcggttccaataagaacctgaaagcgatcatctcacatttgcacccgaaaatgctgctgattccattgggtaccattaccggcacattgttgttttctgccttggcaagcattttgctaagtcaatggagtgtattcgactgtatggcagtaggaagcggattcgcctattattcgctatcttccatcctgatcactcagttcaaggaaccgaccatcggaatacagttggctacagagctgggtaccattgccctgctgactaatatcttccgcgaaatgatggcacttctaggcacaccgcttatcaagaagtatttcggaaaacttgctcccatttcggcggcaggagtcaactcaatggatgtattattaccttccatcagcagatattcgggaaaagaaatgattcctatcgctattttgcatggtattctgatcgatatcagcgtgcctgtattcgtttctttcttctgtaacttataacctaacgccccaccgtcgccaacacaaaacgaatatcagcgtaagaaacgtcatctcccaatgcagctttaatagccaccactcccataaattcatgggtctccagataagtccggaccttctttatcttgtccgctgtcactacctgttccaactttattttatcttcacggagataatgttccagatgagtagcaatcgttcctgtcaccaaatcacgagctttggctatctcttctatcgtcatcccctggcaaaacatttcataactcaccagctttgaatctttcttcttctctttctgtttctccttctcctcattatgctgtgcatccagctttctttcccttgcatcctctttccccgaaacagaagtaaaaatctccggtcgttccagtttgttctccttcatatatttgcgcacaatgcccaaaatctcaagtccgtacttctccactccttttgcgccgaaataaggtatcgcttccaaagctgccggtgtatccggcaacagattcacaatacccatcaatgccttttgctgcatgatcacataagccggcatattcacttcgcgcgtctttgccgttctccattccgacagagcacgataaagttccggatgcagaatatccgtcggaacttctactttcacctttcctgaattgctgcgagtgcgttctttccgttcttttttctccttcggagccttggtggaagaaccggaagaagcagtttccccttcgagattcaacatcactttcgccttccgtttcagataatccgttaccgtaaatttctccgtccgcatcgcatccagcaaagactctttaatccataaagcatcgtccaatgcctgcaaacgttcattcagttgtttccgcaactctttattatcaagaggcatactggtcttgtcaaacagcgcccggacaggaagcaatgcttcacagaaataagcagcaccagaatgaatcctttgctgtagctcctcatttccggcataattttcattctcgttaatcagacgcgtatattgattacgaaagcgattggaaacttccaccaccttctctttgagatgcggagccagttctttatactcggcaagcaacttcggataaagtttataaagctcttcatccatcatccggagcaaccgcttataagcctgctcaagcgaatagaaattaaataaatcattcaacagatcatagaaataagccttttgcatgtcgttcaactgcttgctccccggtttattctgttccacatctcttgtgaaattatctacaatgctatcgctgattatcgcctccctacgcaaaggagtctccaacaccattccttccagagtcttgcaacggctcaatgctacatacgtctgcccatgagcaaaagagttacgagcatcgataatcgcccgctcaaacgtcagaccctgactcttatgaatcgtgatagcccacgccagacggatgggatattgccggaacacaccttctatttcttccgtgatctccttcgtttcttcgttcagcacatacttataattcccccattcttcgggcaacaactgaaagacatcactactgtcttttccacgtacggacattcctttttcgtcaacactcatcacttcgcctatcatgccgttatagtaacgtttttctgatgaaacgtcattcttaaggaacatgatctgtgctccttctttgactgtaagcacttcatccgcagggtacgagtactcaggaaaatttccctctatcttcgcccgaaaactataagcccgtccagacagtgatgccagttcacggtcgttcacctgctgggcctgatagttatgcgttgtcagtcggatatacccttcttctttccgtggacgaaaaccgggctgataacgacgattcaattcgttcaacacttcatcatctgctttattttcgcgtatcttgttcagaagagaaagaaagaaagtatcactctgacggtagactttctttagttcaatggtcatatacaccgtttccttcagtgcacggctggcaaaaaaatatggagtctcgtaatgattcttcagtagctcccattcattgtcttttaccacaggagccaactgttgcaagtcgccgatcatcagcaactgcacacctccgaaaggtttttcacggtcacgataacgacgtaaagccgcgtccacagcgtccagcaaatctgcacgtaccatactgatttcgtcgataacaagcagatccatgctgcggataatattccgtttctctttgctgaaacggtagtgcatcttggcagaattgaaagtcgtttccggcacaaacggagcaaaagacaactgaaagaaagaatgaatcgtcacccctccggcgttgatagctgcgattcctgttggagccaatacgaccatgcgcttgggggtatgttctctcaatcgttttagaaatgtagtttttccggttccggcttttccggtaagaaacagatgcgtgcctgtattttcaatgaactgccaagctagttgtagttcaggattattttccatgtttcctctaattttcggtaaaggtactgaatagattccaaccaccgaaattgaatgtaaggaaaagcaataatcaagccggtattttcatcatcatttctttactcccgaaatatttgtatacaaataaacaaaaaaggtcccggtttcttctcgcttgaagtacaccgggaccggatcaaatcagaacacaaagtcgtgtcacagttatatatcgaaattgtttttgtttcttaattcttggaagactgatatctcttgtaccaatctgtagattttgatccccaagaatcagcccaattcttgaaataaggatattctgtatcaatgttatgcgtctccgtcaccggaatgaaattcaacatcggaatatcgatggcaaacggataagctccgtcacgatcaatgtaatagacatccttactagaacctatcagcgatttgtcagcataagatgtcggtgaatatttaggcagatgtacttccgtccggttctgttgccctgccgcatattttactataatgtacggattatatatcttcagattctccttattaaaagtggccttttcaaaggttctggttatcgtacatgtacccactttccccttaacagcttgttttacacttgggaatacaataatagaagacgtttcgctctccacttttatatccttatctgaagtcactttaccaaactgtcctccatctatctgataagcaaatgcattatcatacatcgctccgtcgtgtgtgggcgtaaatgtatccacaatcttatttatcatgttttctgtgttgaaatatatggcacgattatattctacgaccacgtcgttcatgtcgtaatctcccccgtcaggccaaatatcttcaaaggctaaagtcccctttaagttctcctgtgcatccggcttttctattggtttatcatcactcgggatattgggtctgttcggattatcaatagaactttccggagaagcatctacgtaaaatagtagatcacaaaaacttctgtttgctccatcttccacaccaataatggtttttccactcttttcatcttttacagatacgaaaccaccattagaatacccattagaagttattaatggctttgtaatgtcaatttcattctcattttgatgatacccatctgcatatataaaccatcctactgtatatcctttcggaaatttctcacttggtttaccatcctcaccccaaaagagcagacgtactttatctccacacttcaaaatagataaagctccattatatacggaaaaagcaacatttggaaatacgatatacttcctcatattagagttactaactccatcacttgttttataataataatatccaaatgaattattaaatgaagcgtccctgtcaagaaagaccaaatctaacgtagttccctcttgtgttacattaatattagtgatttcagatcccttatacaaataagcgttgtcaacagaacctccggatggcttgaaaaaagagtttaaacgttctacaagatttccaatcaattcattacccacttgtttttgaggtgttacatatccattattaatagggtctggctttcctgtttgactattataaatataggtgagatttcctccttctccccacttacacaatgaatacaaattagcaccggaattgataagatacggcacgctacctttcgaaaagtcataagaacgcgttaccgctttagtattggcagtagaagaatcctttttactcatatcaaaactagccatccgatctttgatatctagttttacgcatcggggcactccccagcttgatgtatacaagtaaacagtctctacagaagtcggaatattcattttcccttcatattttccatttccatccgtgaaaattttgaataaagcttcaaccccttctttctttaccggaacattgtccactacttccatcgggtcttcatcatacacttcaagtagagccacaagtccggggacatcatagtttactgagagtttcacgtcgccacgtgtttcaaatccgaaatactcgctagggtccggaagaggttcttttccataattaggatcgtacagatctttttccatacatccagccaacagcccaccaatcaatgctgccgtagcaatagcatcagaaatgccgaataatcgcttttgtgtcataatctatatatttgttttgttagttatcaaggcttgttttgttcccatcaaaacaatctcacctctcaaataattttcaaatatatagattatttaattaccagccggacaaagcttaaaaacggaataccgattcacaaaatagtgttatcgtgcaatctttatttactgcatagaaccacccacgatatccaataattcgttggtaatagcctgctggcgactcttattatattgcttcgtcaaatcctggatcaattcgttcgcattgtccgtagccacctgcatcgccaatgtgcgtgccgcatgttccgaagcgttcgaatccacggcagccgtaaaaagcttctggctcaataccgttgggatcagattggcgatcagttcctctgcagaaggttcgataatgtaatcattcgctatttcacctccttgtacctcttcttccttttgcttctcttcctcatccacgacccgtgtcaggtcaataggcagataagtttcgcgaagcagaatctgcacgcccattgatttaaaatgatgatagatcagttctacccggtctatatctccggatacgtacatttccatcaggcgatgtgccagttcggaagcctcctgatacgatggtttgtcggaaagcgtcggtgaagtctcctgcggttcgaatcccaggcgcttcactgcttcatccaccttcttccctaccggaaatatcaggatattatcctgtcccagtgtacgaaactcaccgactgtttgcagcagcatcttaatcacatttgcattaaaagcaccacagagcgacgtattcgaagaaaaggcaacgattgccacacgcttcacttccctcgccttgatgtaaggagattcaacaggaaggtcggcactcaggaagttggtcagaatcttgttgagcttcctttcataaggcagcatattttcaatggctccttgtgccttgtgtaacttggcagaagccaccatcttcattgctgaagtgatttttcgggtactctttaccgaatttattctggtttttacttctttcagtgaagccataactatttaaattaagaattaagaatgagtgtgtgtcaaaagtcagtcccagttcagttactattgacttttgacacagcgtcttcattttataaatattgtttggcaaccatagcggcagtctcttcgatagccttggtcacgttatcgtctatcacaccggttctcagaacgtccagcacatcttcctgatgattgagttgtagagattcgatgaagctgcgttcaaaatcctgtacgttttccaagggaacatcgtggagcagaccgtgcgtgccgcaatacagaatagcaatctgttgttctaccggcatcggactatactgaggctgaatcagcaattgtgcattcttacgtcccttgtcgatagtcatcgccgtaatggggtccatatcactgctaaacttggagaaggcttccagttcacgatactgtgcctggtccatcttcaaggttccggccactttcttcatcgccttaatctgagcgttaccacctacacgggatacagaaataccgacattgatagccggacggacaccttgattaaacaagtccgtttcgaggaatatctgtccgtcggtaatagaaatcacgttcgtcgggatatatgccgaaacgtctcctgcctgcgtctcaatgataggcagagctgtgagtgaaccaccacctttcacgatacctttcaggctctccggaaggtcgttcatttcgcgtgccacttcttcttccttgatgatctttgccgcacgttccaacagacgtgagtgcaggtagaagatatcacccggatatgcctcacgtccggacggacgacgaagaatcaacgatacttcccgataagcaactgcctgcttggaaaggtcatcataaaccaccagcgcatgacggccggtatcacggaaatattcaccgatggcagctcctgcaaacggtgcataatactgcaacgctgccggatcacctgccgtagcggcaacgacaatcgtgtaatccatcgctccatactcacggagcgtatttacgatagaagccacggtagaacctttctgaccgatagccacataaatacagtacaccgggtcacctgccagaaagttattgcgctgattgataatcgtatcaatcgcaatggaagtttttccagtctgacggtcgccgataatcagctcacgctgtccgcgtccgataggaatcatagcgtctacagctttcaagcccgtctgtaacggttggtttaccggctggcggtagataactcccggcgctttgcgttccaacggcatttcatacagttctccgccgatcagcccttttccgtcgagcggttcgcccagcgggtcgatgacacgtcccagcatgctttcacctacacggattgaggcgatacgcttggtacgtttcactataaagccttccttgattctgtcggtaggtcccagcagaacggcacctacgttgtcctcttcgaggttcatcacaatggctttgatgccgttgtcaaactccagcaattcgttggcttcggcgttccgcaatccgtagatacgtaccactccgtcgcttacctggagcaccgtaccgatctcgtcgagctgcacgttggtgttaataccttcgagctgcttgcgcaatatatcggatacttcgcttactcttatattttcagacattatacaattctcctattcttatcaataaactgttgtttcactcgtttcaactgcgtggcaatgcttgcatcgagccgataatcattgatatcgaagatgaagcccccctctatcgagggatcgatcacagtatccagttccatttgggcatgcagaatatgtgctgctgcggaacggatccggttttctgtctccttgtccaccgggactgccgtaatcagtttgcctactccgatgtgtttcagtttccggtaaagatcgagatacatcaggctgatgaactgcaaatagccttcgcgcctgtttcgcagaaccagcgtgatgaaacggacaaactctctgctggattcaccgttaccatcggcagccgtacatatcagcgccaacttgtcctttaccgacaccacaggattatcaagcacttcgcgcagtcccggctggacacgaaaactgtgagacaatgtgaagaattcgttgtagagtctatcctccacacctttctcctgagcgtattcgatcatcgctttggcatatcgcattgagagtactccgacttccatcttccttagttcttattaggggttaatacttcatccagcatacggtcgatcattcccatctgggattctttgtcctgaaggttcttgcggagcaccttctcggcgatatcgacagaaagcacagctacctggcgacggatgtcgcggatcgcttcatccttctctatctggatttgttgtttcaccgcatccagttctttctgtgcggctatctctgcttgcttacgggcctcgtgaacaatcttgtcacgttcttccattgcctccttcaagattcgtccttgttccttgttggcagcagccacaagcgcctcgccctcttccttcaaatgagctaactgggcgttggcttctcttgccacctccaaggactggtcgatataggttttacggccttccaccatcttgatgatgatggggaaaccgtatttcgctaatatcacgaacacaaccccgaatgcgacaaacatccagaacaacaggccactatcaggtaatagtaatgacatatctatttaatattacaggaagaataccagcagacatactactaccgccaacagagccacaccttcgatcaaggcggcggcgataatcatattcatacggatgtcacccgaggcttccggctggcgtgcaatagcttccatagccgaaccaccaatcttaccaatacccaaaccagctccgattactgcaagacctgcaccgatagctgcacctaatttacttactcctactgctgctgcagtggcttgtaacaatactgatagtaacataattttcagttttaaaatggtttattttctcgtttatttatttgctctctcttcgcgtttattctgcttttacttttgcaccttcctgcgccagtccgataaatacggccgaaagcatggtgaatacatatgcctggatgaaagctaccaacagttcaagcgcattcataaaaatgttgaacagtacggaagctaccgtcagtgtaccattgagcgcaggtcccatgcttgccgagataaagatcaggcaagtcagtaccagcatcgccatgtgtcccgccagcatattggcgaaaagacggatcatcaaggcaaacggtttcgtaaagattccgaagaactcgatgaaaggcatcatcggtacaggcactttcagccaccagggcacatccggccagaagatatctttccagtaatgtttcgttccaaagatgttgactgcaaggaacgtacagattgcaagcaccatagtgatggcaatgtttcccgtcacattcgcaccaccggggaagaacggaatcagccccatgatgttattaatgaaaatgaagaaaaacgcagtcagcagatacggtgcaaacttccggtagttgggtccgacacaactcttgatgatatcatcgttcaccatcatgataaacatttccatgaatccgataaaaccacccggtgccaatgctccctgcggacgcttcctgtaccattgcgccacactcagcacgataaccagcagcagcacactgttgaacaacaaagcgaatgtcaccttcgtaatggaaatatcccacggacgaacctgctctccggctgcattatactccaccagtttgccttcgtacttacttccttcgggggcgacggagagcccttcataagtgcctccattctcagcgagacgggaagaaaggaacgtatgccaacctgtagtagaactataaacaatgataggtaatggtatagtaatgtgcgttttaccccacgtcgtaatatgccattcgtatgagtcgccgatatgcccgaacacgatctccttcacatcgaccgtattctctttctgctcctgcggagtcacatcttcctgtgtctgcgcgaagaccggcagaccggctaccaacatcaggcagagcagaaatatcggagctactatgttacgcaactgtttcatttttattcttatttttctttttccgtttcaggttcacttcaaaggagaagaagaaccacgtttcatatatcagatacaacagatagaacgagataaacgtcagcaagaaagccttggcttcttcgcgtactgccagacaataaatcagcagcagaatcagcgagagaatcatttttatcatcttcattgccagatacagcagcgacaacttctgcggagcatgccgccgacacgcatcgaacatataaatactaaacaaaccgaagatatagaaatataccggtataaacggatatcctccgaaataatgccccggcaaggctatgtgtaaaatcactgctcccgctgctccgcttagtatagcaaacagcgtattcagtgcgataaaattccgtttagtcttactaatgttcaccatgtcgttgtgtttttctgctgtatattatccatctcgtcttccctacgagacacataccgaagctgtcccgtcactcatttcaacaaaaccaccctgaatatccaatgtatgctcgtcgccgtccatcgtggtataacctaacgttcccgctttcaatgacgagacgatcggcgcgtgtcccggcagaatagaaaacgatcctaccgttcccggcagtgtgacaatcttcacttctccgtcgaatacgctcttttcgggcgatacaatacttaaatgtaattctttcatcatggaatgttgtttcgattactttttcgcttgttccagcaatttcttgcctttctctatcgcttcttcaatcgtgcccacgttcaggaaagcctgttcggggaggttgtctacctcaccgtcgagaatcattctgaaccctttgattgtatcctcgatgcctaccatcacgcccggaacgcctgtaaactgttcggcaacggcaaacggctgcgaaaggaaacgctgcacacggcgcgcacggttcacgaccagtttgtcttcttccgaaagttcctccataccaaggatggagatgatatcctgcaattccttgttgcgctgcaaaatctgtttcacgcgctgtgccacgtcataatgttcctgtcccacgatgtgcgggtcgaggatacgggacgtagaagccagtgggtcgacagccggatagatacccaattccgtaatcttacggtcgagcacggtcgttgcatccagatggctgaaggtcgttgccggagcagggtccgtcaagtcatccgcaggtacatatactgcctgtacggaggtgatagaaccttttcgggtggaagtgatacgttcctgcatcgcgcccatttccgtggcaagtgtcggctgataaccaacggcggaaggcatacgtcccagcagagccgaaacttccgaacccgcctgcgtgaaacggaaaatgttatcgataaaaaacaggatatcgcgtttctcaccttccttgccggcatcacggaaagattccgctaccgtcagtccggacaatgccacagaggcacgtgcgcccggaggctcgttcatctgtccgaaaatcaaggatacctgcgacttttccagttcattatagtctactttcgaaaggtcccagtcgcccttctccatactttccttgaaagcctcgccgtagcggataacgcccgactcgatcatttcacgcagcaagtcgttaccttcacgggtacgctcgccgactccggcaaatacggagaatccgttatgtttcttggcaatattattgatcagttcctgaataagtacggtctttcctacaccggcaccgccaaagagtccgatcttgccacctttggcatacggctccagcaggtcgattactttgatacccgtgaagagtacctcctgcacagttgtcaaatcttcaaactttgggggatcacggtggatggaatatgcgcctgtacggtcgagactcttcataccgtcgatagagtcgcccactacgttcatcagtcgtcctttaatctgttcgcctatcggcattgtgatcgggcctccggtgggatacaccttcatgcctcgctgaagtccgtcagtgctgtccatagccacggtacgaaccgtattctcgccgatgtgttgctgaacttctacaaccagtattttgccgtttggcctctttatctccagtgcgtcgtgaatgcttggcagcattaactctgcgtccgtaccttcaaagtacacgtcgaccacagggccgatcacctgtgagatatgtccgataatctgtgacataagcaatctttatttatattattctttctttacctatcgaattttagtagcatgacaaggaacgtttcgcgttttatctactttaatctactatagtaaacagttaaatttagcttttgttcaatcatgcccgatttctttttaacaaaatagttaaataaacaaccgcgcaaatgtagaaacaaattagcatcgttgttcttcctttttcattatttgtcgttcaataacacttgttaggccaacaaagactacaaacagaccaatatcggaacattccaattacgattgtatagtaaaacaagcctgttagttataaaatatcattaaaactatgacttaacatcaagttttcccattcaacggtaatattcaaacacttaaacgagtgataaaatagtagcatatgcaactagttttatatccgggcacgtacatcctattaaacactccccatttgcctgaagcggaaaagttttcggcaagaaaattataaattccttaattttgccactttgttaaatgtcagcagaaaaaataagaagcaaaaaacactcttctgataaaaaaagaagaaatttgctgcattattaatcctaaaaattatggtaaaaaaaaccttttggcttttgccgaaaaaatcggcaactttacgttaaacgtaacaatggtagacaaagcaggcaatccgttgacagtagatgatatatctcaatgtcacctacccggattccccatcttatttactcaaaatgaattacttgaaatccttgcaaaagagattttcaagcaacagtttctttggaaatccgtacaggataaagacatcaaagagtgcaacaaagaagaacggatcatcaagcagataccgctgatgccacgctgtccggatgtactgaaagggctgttccattgcatcgaaatccgcgacgaacgctctccgaagcatgccatagcctataaaagctgtctgggaaaactggaggagatggtgaaagaccaatgggacgattggaacagaaatcagtcctaataatcgatttggtaaaaaaagagaagttcctaccttcgcagccggaagcccgtgataactacaccacccgcttccggcaacttatatattatatttcaaatgagaaagcacatgtaccaagtgtcactatttatcaacacttggagtaaaactcccacgactataacttttgaagattttttcgcaatggtacgcaacggacattggaaagtgcctacggaaggccaccgcagctgtctggcaaaagaccgcaaacacgacgcgcaaaccatcaaagacagcatggcatgtgtcatccccgcaggcatatgcaagaatggacacgcaaaaaacaaccttacctccctgtcactcgcactctgcatcgacatcgaccatacggacgaacagacaaaggatattttcgtacgtgcctgcctgctcgaatacgtactgggagcgtttatcagcatctccggccgtggtgttaagttgttcattcgtatagatatcgatggagtaaacgattatcctgccatttatgaagcgacggcaaagctcgtttccaccgttctcggcgtagagaacgacgggaaatgcaaggatatcacccatccctgcttcggatcatacgacccggacgcatactacaacggtgacgcaaaggccgtcaacgactttctgccgaacggtgcactcactccgcgcgtcacctacgctcccgtcacttccgctccccgcaccacctgcactcccacctctttctccaacggacatccgcctgcgatgccggataaccggatttccgccgctcccttcgtacagtcctacctcaccctctaccctgccgcaacgggcgaccggaacggaaccgttttccggctcagctgcgctgcctgcaaacgcggcatcgaccgtaacgaactgaccaccgaattggttcgcaccttggaagaagacaacttccgtgagcccgaaatcgcacgtactgtaaaatcagcttaccagaatgtaatgactgcggcagagacggaaagcttcgaaaatcctccttcaaattccagtaaagtccaaaagtccgttataggattttcagaaaacgaaaatccggcagaaaaggaggatgaaatcatcggagaagagctcagagagcagactccgacctttcctgacgaaatttacgatctcattcccgccatcttcaaggagtgcgtctccatcgcaagagatgagcgtgaaagggacggactcttgttgtcatgtattaccacgataagcagcatgctccccagtgtaagcatccgctacaaccgacggaattatcagcccaatatctactgtatcgtcgtagcttcctccggtgccaacaagaacctcatcggctatggcatacgcctgcacaagcactattgtgagtattgggagaagcagagtctgaagatcgaaaaggaatacaagaaagcactcagggactataccctctccttgcaggcgatacgcaaaaagaatactgccgccaccaacctgccggacgaaccggaggagccgaagctggcatttccgctgatccctgccgacatcagccgtgcacagctcatcactcacctcatcaacaaccaaagttgttcttccttgctcaccagtaccgaagccagcagcgtcagcacagcccgcaaccaagattacggacacttcgacgatatcctctgcaaggcattcgagcacgaactgatcagttcgtcctacaagatcaacggacgacatccgctgaaagtggaatatccctccctgtcggcttttctcaccggtactccatccagcctcattttattcatcccgaccatggagacagggctgtacaaccgctttctgatcaatactttcagacttccggcagcatggcaggatgtgttcgcggaggaaaaggtgcgggcggacgatctcttcaacgagttgtccatgcgcttcgcacagatggcattgtttctgaaagattctcctacggaagtaaagctgacagatacacagaaaaaagaattcaaccgggtattcacgcaactgctcaaagatacggaccagttaggtaatgatgacctgctgggggtggtgaaacgttatggagtgataacggcacgcatctgctgcattttctccgccatcgacaagggaaccatgagaatggaaacacccgaagtatactgctcggacgcgcatttcaaagcagcgctcgccatcgtgctgtgttgcttcgaacatagtaaactggtcagtacttcggtaaaaagctctgccgaagatacgaaaccattacaatcgcccgataatctctcgcgacttctgacgaaactcaaaaagagtttttcagccaaagaagcatgtgctttgggagaggaattgaacctctcaagaagcaccgtttactacttattgaataaaggcattaaagcagggagaatcagcaagttaggtcacggttcgtatattctgaaaatctaatatggactttctggactttactggactttgaaaggggaaattcgtgacttttacttcattgtcacaagaaaaaaacaataagtcttattagcatatcgaaattagctattagcaaaaacaaattagctaatagctaatttcgatatgctaatagctaatttgtttcttccttacagacggacgacttatcaagaaacagattcacgactcatcgaaaaacagattcacggctcatcgagaaacttcacgatcagcctcacctgtctgctgctataagcatgatcgttttttccttctccaccgctatacatagcgtcataaagttctttattatttctgatccatccccgtagtttctgcatggcataaatcaatggcaaatgtggattgtacttgtgagccagctccgacttcaaatacggacggatgacaaacggttcttcttccgcttcttctttttctgttttcatatcgttgttattaagttctttcgtacttcaaatatactaaaacatatttgcgcacacaagcaaacaagtaaaataaaatcaatcagaaagaaagtaaatacattctgaaagaaagtacgacgaagtacgataaagtacgtattctcatggcttaagaataggctacctttgacacatcgaaagaaagaaacagagctcattctctctcccgacactgattgagtgacagcaatcagtaattattaatttatatttttctaaatctttaatttatcatcatggcaataccatttaaaagaatgggtcgtaaagacccgcgaaaaattgacggggtgctgaagtaccacccccaactggtgacgatgggacaaagtgtagaccttgacggcatcgcctacatcatgaaagacaagagttccctctccctgggcgacatccaaagcgtactgaccaactatgtggaggcaatgcgagcggcgctcttcgacggaaaatcggtcaatatcagagacttcggtgtattcagcctatccgcccatacgctgggagcaaccacgaaagaagagtgtacggtgaagaatatcaaatctatacagatcaacttccgcccttccagcagcgtccgccccaacctgacgtctacccgtgccggcgacaagatcgagtttctcgacctcgaagccccgaaaaagaagaaaggcgacggatcaggagaggacaacaaccccggtggcggtggaaacgaaggcggcggaggcgacgaggaagctccggacccgacagtgtaagaagtggagagttgagagttggtaatcaatgtacgaggggttgatagttagaattaatggctttatgaggaagattcatttaattgtgattcactgttctgcaacgcgggcagacaaggagttgacggcttttgatctggatacgatgcaccgtcggcggggatttaacgggacaggttatcattactatatccgcaaggatggaacaacgcatcttacccgtccggtggaacggatcggggcacatgcgaaaggttttaatgcggagagtatcggaatttgctacgaaggcggcctggactgccggggacgcccggcggacacacggacaccggaacagcgggcagcgctccggctgctggtgcatcagttgcaagagagattccccggttgccgggtgtgcggtcatcgcgacttgtcgccggatcgcaacggtaatggagagattgagccggaggagtggatcaaggcgtgcccgtgctttgaggtaaaggaggaaagttatcgggagtaatcggtcattcggtaatgattcacttagtaatcaatcatataaagagtcggaaaggaggtgtgtagagttatggcagtcaagagatccctttgggataccattttgaaagtagtcatcgcggtggcttcggcagtgctgggtattgtaggcggtaatgcgatgagtctgtaagatcagagaaataacaatgtcataaacgtgagagagaggatgcaggttcagacttctgtcctctctctttatttataaatctaagtacagtataaacgttgatattcttcctagaaagaaggagttatcatcagaagtagtagcgcagcccacccagcaggttaaagcgggtgattccacaacgttcgtcttctttcagcagcatccagtcctgtttgggcatacttccaccgatcccgttcagagtcaagccgagtccccaattagatgaaagcatgtactcaaatcctaatgtggcatgaaggccgaatccggcagcattgtagaaaggatcatgataaaggaaaacgccgacaccaacgcctgattttaagatccatctgtcaaattttgtacggcttacccactccggagctatataggagaacatcatatcgccaccggagaatgacttcttgaaaccagcatattgaagtccgattcccatcccaccgttccagacatgttcgtaagcgagcttccattcaactcctcctttcgaatctaacgccctaccgttgatatcataaatcttgctgatcacccatccatatccgaagctcgcttcaaacgtgttggcaggcgcttttctgctttctgcatagtctttagcaataaccaggtcgagatctattacgtcttgtacaggatttgttttcagtgtatccacacttttatccgacaaccgcagcatcagtccggaaatctgatgacaggaacttccccaaaaagaaggtttctggtgattagtgatggcgagtccattgccaccaatctttcctgtagcctcttgtgcaagatgtaatacctgatcataacggcaattcgtagaagtaccccgatccactactgatacacgcccgatagtctcggctgtattgggcactttttctcccaaaccgatgacatagaccgaatctgccggaataatatccggataggttcttacaatgttagtgaccactttaggtgaacaggaagtcagtaatagcatagcagtagctgccaatagtttagtctttttcatgtttttcattattagttatataagaggagatgatgagagagaatcaaaagcaatattcactatccttttgcttttgactcactctcattctttttatttagtatacctctactttctcggcgattcgtttcgctttatcacgcaacgcatccagatcggagttcagcggtgcatagcaaagtacgactcccatgcgacggttgacgcgggtaaacggcttgccgaagatgcgcagataagtgtcttcttctttcgtcacttcttccatgccacgatattgaggacgttcctgactcgctatcggagaaaggataacggcacttgcaccgatccgctcctgcttgatgccggggatgggcagaccgagtacggcacgcaggtgaagttcgaactcattcagattctgcgttcctgccaatgtcaccatgcccgtatcgtgcggacggggagaaagctcggagaagtagactccgttttcatggctcaggaagaattccactccccaaagtccggcaccagtcaaggcacgggttactttttccgccatttcttcggcttctttcaagtgtgcagggtcgatgtgtgcaggctggaaactctcacggtagtcaccgcctttctgtacgtgtccgataggaggacagaacagcgtaggtccgtttttctgtgtaacggtgagcagggtgatttcactgtcgaacttgatgaattcttcgatgatcagttcgcggatatcgccacggctgccactgcatccatattcccaggcatgttcaagctcgtcggcactcttgacgagagactgtcctttgccggaagaagacatcaacggtttgacgacacaagggaaaccgattttggcggctgcttccttcaattcgtccagtgtcttggcataaaaatagttggctgttttcaagccgagttctttggcggcaaggtcacggatcgccttacggttcatcgtgaagttgacggcacgggcactgggcactacctgaattccttctttttcaaagtcatagagacgctctgtgcggatggcttctatctccggaacgatgatgtccggatgatgtttttctacaacgcgttccaatgcttcaccgtccagcatgtcgaagacttcaaattcatcggcaacttgcatagcaggtgctccggcataagaatcacaagcaatgacgtgttgctccttgcgctgtgcagagatcacaaactcttttcctaactctccggaaccgagtaacaatattttcttcattattttgagtgttttatgttagtgatgcaaaattagtatatttctttttattaatgacgtaccttaggatatttattgtggaaacggaaaccgagtccgagcatcagatagttgggcgtctggaagttctgcaaattgtatccgatgtgaagaaaggaactgcgggtaacggctattttcaatgcaagaatctggtagaagcctctcatatcgccacggctgagcacgttggctcccatgccgacaccgatggtaaaataaggcatcacatattccgcacgtcccgaaagtcccaaggccagttgatgctgaatgcccggtttcaggaactcacgtttagaactgctgctcccatattccacaattacatcttccctatatacattggcactgccatcataaacaccgtccagtgaagctcccacgcgaaacttataacccagattatacatcggggcaaaattgaatccggcaacgggatacgcattgggagatgcgatctgcttctctcctacccacactccctttcgacgccatgacccgaacagcacgacatcataactgatatggcggggaaaacgggtggtgacaggctgatagagtgatttcgagaggtcttcttccgtacgattgaaattgtagacgagtccgatcttggctccggcagtattgattccggcattcgggaatttagtgttaccattggagaagtgcgtgaaatcgcctccgacaatcagatcgaagtaacgggaaaacgcccagtttatgtaaactccggcattgatataagcattcatccgtgaaccgaccgcaccattataggaattataataattgtcgtatggcttccatccggcggacaaaccgaaattccactcataattgagcgaggcacggggagagaaacggacaattcgtgctccctgaaacacatagaatgagaaaggatcgcccaactgttttttatcgccaaaggtggtaagggatacgccgataccctgataagctccaccgtaaatacggtcggcacaagtattggggcgaaacttgaacgagtatttcaagtgggcagcaaacgatgtctgaatcggtttccagcgttcgttctctccttgcaggaaggggttggtaggaaatacatattgcggacgggcttccattcccaaacgatggataaaaccaaaagactcctgccctgccaaaggagtcttcggcaggcaaaacatgatggaacaaagagcgatggttttccatctcagggtcttgtttctcatagtgccgtcattgttagtctccagatcctgacggtttcataaatcaagggtctcaataaacttggcaacatgataaccatccatcagtccgtgatgacaagtgacggaaatggggagcatcagcttctctccttcccgaaagtattttccggtggatattttggggacgctatcgcccgaacgcatgttcgaagggtgtttcatatctgtaaaggccagccatgggacagccgaatagtgaatggcgttgggatggaaagttcctcctttgttcagtccggtggtggcttgcagccgctccatttcggttttcgccttacggataaaagtgagctcatcgggatcgtactcaaaggcggcaaaagaaaaagtatgatcggcacgccctactgtcgcttcgggaagaagactgtcatagcagactaccttgtcgccctcgatgcggtaacggaattcctcgactttgcttgcggcagtgatgatacgatgtaatagtaaaagagaaaaggagacgcctttgtctttagcctcctgataagaacgggtacagtctacatgaactgtcactccgaaaaagggatcatcgaatgcgctgaaatgttcaaaatgctcttttctgttccatgttgcaatgtcaatgatcttttctatctgattcatcctaaatactctttttattataagtagtgactaaaaagtcggttgtatctacactagggctgactaaaagtcggcagtatcttaaatctcctccttcgggaaggaggagatttaagatagtactgactttttagtcagcctctcagattttgcttttacttaattagtaattataatgattgggagagacatttgtctgtatctgccattcggacgaccgcggaggaggaagaatgacagactggacccaatcttgttttaaatcctactgatgctgttcacgcaacagatcgttcaccgttttcaccggattgaaagtggtaagaggaacttctacgaatactgtgttccagtcgctcatcgcaccattccataagccgggaagttcaagcgctttcaggtcttttccgttctttgatttataagaaatgaagccggtcgccttatctacatatttcaccaggtcgaacttgtgacctttataatcgcgtacggcacaaaccaagtctaccggattgaagtgcgtacccttttcgaacatttcctttttggcaggatcgttcatgtcgatctgagagctttcgaggatttgcagtgagatagttccgtcactgttataagcaaggaacggaccgccacccggctcacctacattcttcaccataccgcatacacgcatcggacggttcaatttgttcttcaggtagatcaccagttcggcatcttcgaggttcttcgtttcgggattcttgcagaaaagttgtttttgcaggaattggagaatttccatgatttgctcgtgcgtatactttccgctgtcgagcagttcgaggtattcgaatgcctttttctgcaaggacacgagtacgccggcaatcagttttttataagtaacggtgtcggctttcagtttatcgggtactacgttgtcgatattcttaatgaagataatatcagcgtcgagatcgttcaggttctcgatcagtgcaccgtgcccacccggacggaacaggagtttaccattgtctcggaacggctggttgtccatatcggcagcgatggtgtcggtatttggtttctgttcggagaaggtgatgtaatagtctactccgtaacgtttgccgaatgcttcggctttctcttccaccagtttcttgaagagttctcgatgttcggtagagacagtgaagtgtacgttgactttaccactttttccggctgcatacatagcgccttcggcaagatgttcttccagtggagtacgtgaaccttcgggatatttatggaatttgagcagacctttcggaagtgctccgtagttgagtccggcagtttcgagaagggcagctactacggctttgtaattaccttcttccatcagccccggaatatcttttccggctgtacgctgacaagctacattcaagtcgtcatagaaagcaaaatccttgattccgtcgaagaatgcctgctcaaactttgtagtaggtttgtcatactctgcggacagaaactcgaacagattcttgaacatacgactggcagcgcccgaagcaggaacaaacttcacgatgattttatccgtattcttataagcatcccatgcagccagatatgctttctgatcttctgcgtcaggagccaatatgcctttttctatggaagcggcagcgtccagtttcaaataaggaaaacccgtctggaagcaagccagctgttctgctatctgcgcctccgtgatgcctttcttggcaagcaactctttgtcctgtgtcgttatcataatatctatttttattaattgatgcccaaaaatacaaaatgttatttacttcttgccgaataaccgggaaaaaaagtaattttacgtcgaattaacaagattgaatatggacgacttttttacatcggaggaaaagaaggagcttttttcactctacaggcatctgttgcaatctgccggagatacgattttctggagggattgccaaaaattaaagaaacatcttatcaaagccgcccagtgtaacgggctgcaacgcaataacttcgggatgaatcccgtcatcagagatttacaaacggcagttatcgtagccgaagaaatcggcatgaaaggttcgtgtctggtcggcatcatgcttcacgaaatagtgaaggcacatatcctgtctatcgaagaagtgaatgccgaatatggcgaagatgtaggcagtatcatcaaaggactggtgaaaacaaacgaactgtactccaaaagtccggcgatagaatcggagaatttccgcaatctcctgctctcttttgccgaagatatgcgcgtcatcctgattatgatcgcagaccgtgtgaatatcatgcgccagatcaaggatacaggcaacgaggaagaccgggtgaaagtggcgaacgaagctgcttacctgtatgctccgctggcacacaagctgggactttacaaactgaaatcggagttggaagacttgtcgctgaaatatacgcagcgggaaacttactattatataaaggagaagctcaacgagacgaaagcatcccgcgacaagtatatcgcttctttcatcgatcctatccagaagaaggtaaaggaagccggactgaagttcgacatcaagggacgtaccaaatccatccattccatctggaacaagattcagaagcagaagactccgtttgaaggtatctatgacttgttcgctatccgtatcattctggattccgaaccggacccggccaaagaaaagcaggaatgctggcaggtctattctatcgtaacggatatgtatcagccgaacccgaaacgtctgcgggactggctctcgattccgaagagcaacggttatgaatcgttgcacatcactgtgatgggtccggaaggcagatgggtggaagtacagatccgtacccgccggatggacgagatcgccgaacggggactcgccgcacactggagatacaaaggtatcaaaggggaaacaggactggacgaatggctgacttcggtacgtgaagcgcttgaaaatgcggataacgactcactgaaagtgatggaccagttcaagatggacctttacgaagatgaggtattcgtattcacgcctaaaggagatttattcaaacttgccaaaggagctaccgtgctcgatttcgcattccatatccatagcaaactgggatgcaagtgtatcggtgcgaaagtaaacggcaagaatgtacagctcaaacagaaactgaacagcggtgatcaggtagaaatcatgacgtcgaatacccagactcccaaacaagactggctcaacatcgtgacgacttccaaagcccgcaccaagatacggcaggcactcaaagagatggtagcacgccagcacgatttcgccaaagagacactggaacggaagttcaaaaaccggaagatggagtatgacgaagccaccatgatgcgtctgatcaagcgactgggctttaagaacgtgacagagttttatcagaagattgctgacgagacattggatgtcaacgacattctggataaataccttgaacagcagagacgggacaatgacacgcacgacgagattgtgtatcgtagtgccgaaggatataatttgcaggcaactcaggaagaacctagctcaaaagaagatgtactggtcattgatcagaatctgaaaggactggaatttaaactggccaaatgctgtaacccgatctatggggatgatgtattcggatttgtgaccgtgagcggaggtatcaagattcaccggtcagactgtccgaatgccaatcagatgcgtgaacggttcggataccggattgttaaagcgcgttgggcagggaagtcagtcggtacgcagtatcctatcacgttgcgcgtagtaggtcatgatgatatcggcattgttaccaatattacttctatcatttccaaagagaatggaatcagcctgcgttccatcggaatcgattccaacgacggactattctccggaacgcttacagtcatggtgggtgataccggacgactggaagcactgatcaaaaagttacggacagtgaagggagtcaaacaggtaagcagaaactaagcactctatgctaacagcaaatctgttgacagttttttaataaaaagactggcattatctccgtcaggataacgccagtctttttatttatgatagacaatcatgtcgcggaaatagtgcgcgaaacgatttatctcactttctttctcttataatatggatatgtaaccaatataaagaaaatcaaagcgatcacagctaccacctgtcctgtatagagcatcttatccgcttccaaatcgaagtaacacgcaacagctattccggatgcaaatccgacttcgctggccaacagatgagtggtatttgccgtaccccgctgacaatgatgagacagtttcacgaacatgaccagaaattccggcatcaccaaccccagtcccaaacccaaaagtacggaaggtacgcctaccggaaaaccggaggccagtagagtgatggctacaatctccagtatgatgccgacgagcaccagccgcagagttttttctttcagaataaacagacgcgccagcaacagggaggcaagatatccgatgcctgtaccgacaaaaaacggtatagggattccactgcttcccaatacggaatcgttaaggaaacggtgtacaagcggaatcaacaaccccggaacgaaggtaatcagaatcatattgatggcaggcacccatccccgcaacaacaaaaagcggtcgaaggaataaagcttggtcacgatcggtgcacggaaaggcacatatactccggataccatcaaaacacccgctgctccggtaatcaccgatacggacaatagatttttaaaggaatagctctgataaagccagacacccagaacaatacctataatcatccccagacgtgccatccaggagaagctgacatttccggcactgcgaagtgtggcgttcgttatgtcaatggcaagtgtgattcctgcggtggtagcgatcccgaaagccagtccctgtacggtgctcaacaagataagttccgtgatgttcgtcacaaaggcgtatcctgccgttgctgccaccatcgtggcaaaagagaacatacacacgtacttacgcttgtaggcatctacgagataagcatggaacggaccgataaggaacattcctaaagtgaaaaaaagaaagatcactcctgtctgtgccaccggtactccgagacggtctgccatctcaacggaaagtaccggaaataagatatacaaggagataaacaacagcaaattagctacgcatatccgcataaaatgaactgtccacaatttaactgccatatactgtttaatattgttccttctcgttagggaagtcgcaattcttcacgtcggatacgtaacggctgatagcgtcagtcatcaccgtatacaggtctgcataacgacgtaagaagcgcggacggaatccgttgttcattccaagcatatcctgaatgaccaatacttgtccgtcaacatgaccaccggcaccaatacctataataggtatcgtcagttcggaagccacacgttctgcaagagtagccggtatcttttcgagtacgatggcaaagcagcctgcctcttcgagaagatgagcatcacgaatcagcttttcagcttcgttgtcatctttggcacgtaccgtgtaagtaccgtatttattaatagactgaggcatcagtcccaagtgtcccatcaccggaatacccgcactgatgatacgcttcaccgtatcgatgatttcttctccgccttccagtttcaaagcatcggcatggctttccttcataatgcggatggcagaagcaagaccttccatttcgttaccttgataggaaccgaaaggcatgtctactacgaccatagcgcgttttacgccacgtactactgatttagcgtgataaatcatctgatcgagagtaataggcaatgtagtcacattacccgccatcacgttcgaagcggagtcgcctaccaaaattacgtccattcccgcaccatctacgatctgtgccattgtgtaatcataagaagtaagcatagatattctttcgcctctttgcttcatttcaaccaggcgatgagtagtcacctttcttgtgtcatctgatatataaccagccatgtttcttaaattttaaattaaaactagaaattaaataaggcgtcaacgccatcaaaaattgcggcaaagttataacatttctttcataagtgagaaagaaaaagaaaaaatcctttcaaacacctccccaagttaatgagaaggcggccaaaaagacaaattaagaagataataagaaagaactaacggtgcaaggccaataagtgttcaaaggtcatttccgaaaagtcatctattatataatgtgcttttccggtgatggcctctcttgtattggtagtggcaagaccgataacagtggcaccggaagtcattccggcttgcagaccgtggaaggagtcttcgaacacgtacgagttttcgggagtagcaccgaatatttccataccgagcaggaaacagtcgggagcgggtttagaacgggcaaacatttctccggtcaggatgcggtctaccattcctttaaattcgggatgggcgttatagacgttttgcatcttctcttcgttggagctggttacaacggctatttttgctccgtgtttacgaagatcggcaataaaagcttctacaccggggatgtactcataggacatgcttttctcataaatattgagtccggccgtaatctcttgttgagcttcggggaggtccgagaaatatttctcgtaaatctgggtcagcgtctgtcccttgatgcgacggccgaagtcttcttcattcagatatttacgtccctgttcatcccagaaaacagtgtactgtgtttccgtatccatgatgacaccatcaaaatcgaacagtgccgcaattgtctttgttgtatccatacgtaatctttctttttacctaaaacgttaaaccttgtgtattgaattgtgcaaagttccgaataatcatcgaatcaggcaaataattcgtacctttgccccacttaaaaaaacgtaacattcgttttcatccaacaatccatacgagcgcatgagcaaaaacgatccgcacatattaggaaaagaaagcatcggtaagctactgttgcaatactccattcccgctatcatcgggatgacaatcacgtctatctataatatcatcgacagcatcttcatcggtcacggtgtgggtgcgatggctattgccggactggcggtgagctttcctctgatgaatctggtcgttgctttctgtacactcgtttcggcgggtggttctaccatcgcttctattcgcttgggacagaaagatatgaaaggggctacggagattctgtcacatacgctgatgctctgtatcacaaattctttctttttcggtatcctgtcttttatctttcttgatgatatactgactttctttggtgccagtcccgacacactgccttatgcacggagttttatgcaggtgattttattgggaactcccatcacatacacgatgatcggcctgaataatgtgatgcgtgccaccggatatccgaagaaagcgatgcttacttctatggtaacggtagtagcaaatatcatcctcgctcctatctttatctttcactttgaatggggaatgcggggagcggctacagcaacggttatctcacagctgatcggaatggtatgggtggtgaaccacttctgcaagaaagacagtacggtgcattttgagggaaaggtctggaaaatgaaaggaaggattgtagagaatattttcgctatcggcatgtctcctttcctgatgaatgtctgtgcttgtgccatcgttatcgtgattaataatagtttgcaggaacatggaggcgacatggctatcggtgcttacggaatcatcaaccgattgctgacgctttatgtcatgatcgtattgggactgacgatgggcatgcagccgattgtaggctacaacttcggagcacagaagatagaccgggtgaaacagacgctaaagctgggaattatttccggtgtagtgattacaagcagtggctttctgatttgcgagtttttccctcatgcagtatcggcagtcttcacggatagtgatgagttaatcggacttgcggtggacggtcttcggttgactgtacttatgttcccgtttgtaggagcacagattgtaatcggtaacttcttccaaagtataggcaaagtaaaaataagtattttcctttcgttgacgcggcagttgctttatttgctgccttgcctgttgttattcccgcattggtggggactgaagggaatatggatcagtctgccggtatcggactctttagcatttattacggcagttatcagtctgatgatttatataaagaaagtatcgaaagaacatccgatagcggataaagtggcggaataaagcaaaaagaacgctatgtcaaaagatatatcagtatgaaaaatatttaggcacgaatacacggattaagatgacttctgcaatgaatgcatctcataaaagccgcgttaatccgtgcctaaaagataataatattcttattcgctctttatacttttcaccggattctcattggcgatgtgccacgctttcaacacaacgcaaactacgatcagcaataagacaaacagcgccgtacccacaaacaataacgggttcatataaatctgttcggcaaactggtcaagccatgcctttccaacgaaataggaaacaatggtaccaatcaatatggaggaagcggagacatacagaatctcgcgtatcaacagacgcaaaatatgagaggcttcggctccattcactttccggatggctatttctttgcttcgacgttgcgtttcatcattcacatatccgatcaatcccattattacaatcagcagaataaagcttgaagtgatccagactgaattacggaaacgatatacactcttgtatatatcctttatcataccgtctacagaactgaaatgcaaggctacattcggaaatgtcttatcggcaaactcgttcagacgtttcagattttcatcatacggctctttcagacggacatcaaatacatgattggcattctccgatcctatcaagacaataggtgcctgagttgaaaagaagctatagttgcggacatcccggaagacaccgacaatcgtaccctgtatatcattcagtttctttcctaccgccccatctgtccatttcatcagacgtaccaactcttcattcaccaataaatcgtcctgtttcttaagagtgctgccttcgataatctttattcccattacttcgggatagttataactgcaataattaaagttaagtgtagcgattcttttaccgtcattactcatcagtccgcgtgtccagtactgtccgattactccgcttgtggcaacagccactccctctaccgtaggctggcgacgcagttcatcggtgacatgctctaccgtttctttcggcaaccaggttcctgcctgaaccagtcccggaacgtttattcccatatcgcggctcatcagatggttgtattgcaggagcgttaccagcaacagccccaaaacaaaggagacacctgtgaactgtataaacaacaacgaacgtttccaacccgttttaccatcagagtaacgacggaacacctgcgtgactggtatacgcgaaaacagccgtcccggtatgccacctgccaaaaggaaaagtatcacaatcgtaagcaaaggcacccatagtgtctcccacgcaaaaagtgaggatagacggacagaaagcaaatcttcgattatttcatgtgcgttgactatcagcagaagactaagaagtacggaaaagataacaaggattcctgtttctgccaaaaacatgccgaagatatttccggaactggcaccactgcatttatgtactcctactcctttggcacgacggcttagggtggcaatagatatcagcatataattcatgatggccacaaagaagatagcgaatcccagaaagccatatatgatcaaacgcttctgcacatcggaagatatcaaatgatacttcaccaatgggatgacactgaaattcattttccagtcatcatactgggcaggagtgtatttctcgattacccgttggatgttgtcattcaccttgtcaatatccgcagcattacgcaggcgaagaaacgtgtaaaagacatcatttcccttccagccatatcctccctgatatcctccatcccgatggacggagacaacaaagtcgtgagtgagcaccgtattctccggcatatccttgtatacaccacgaatagtaaaatcattttgcctgtctgctttaagaattttaccgatagggtccgcatctccaaacgtttcacgggcaaaatgctctgacacaaacacacttcccggcatgatcatatctttcgggttcccttttaagacagggataccaaaagtctggaagaaacaagtatcagcgtatatatagttaacgtccgataataatttgtcttcgtaatatatactcatcccttgtccggtgaggacacaactggcaaactctatttcttcgggcatatcctgcgccaaagtagatgcaaccacatcaaaaagtgtgtaatcataattgttgccgtcgtctcccattgtctcccccgtgctaaggttagtggtcaggcaacgtgcaatagccagtcgttccggttccggataacaatgttcataactcaattcaaacgcaatctgcgaaaagagtaaaataccaatagtaagtcccagcgaaagagaaattatcctgatgatatttgtgccgcgttcgcgcagtaaggttcggatgctataatagatttgtctcattgtcgttccggtttatgccgttacacttgccactacactaccgtcaaacagatgtacggtacgatgtgcgaaactcgcatcgtgctgtgagtgcgttaccatgataatggtggttccctccttgttcagttctgtcagcaggttcattacttccgcgccattcttggaatccagattaccggtaggctcatcggcaaggataagctttggattagtcactaccgcacgggcaattgccacacgttgttgctgaccgccggaaagttgttgcgggaagtgtttggcacggtggctgatattcatccttttcaggatgtcttctaccatgcggcggcgttcggaagatttgataccaagataggtcagcggaagttctacattctcaaagacattcagttcgtctatcaggttaaaactctgaaatacaaagcccagtttgcctttgcggacgccggtacgttccttttctttcagtccggcaacttcttctcccagtaatcggtaagaaccttcggttgggttatccaataaaccaagaatattcagtaaggtggacttgccacagcccgaaggtcccataatggcaacaaactctccttcctttacttcaaggttcacgtgatttagtgcgactgtctctacttcggtagtacggaatactttactaatgttttcaatctgtatcatcttgttcatttattatgttgttatactttttatttcttctttattcgctctttatactattgaccgggttttcattggcaatcttccatgatttccaaagtacgcatgccacaatgactgccagatttgcaattgctatcagaagataggcagcccaactgagcggaacatgttcggcaaacaaatccatccacataccattgacgtaccatgctgctaccactccgattaaaactgcaacaacagctacataaagcacatctttcaccagcagttccaagattccggttgcttcagaaccattcaccttgcgtatggctatctccttggaacgacggcggacctcatccgtagtgtagcctatcaatcccatcaacatcacaaaaaacattgttattgccgccagcatcgtagcattactgaaaacacgaacagagttataattctctttgatcatctgttgcatcgaccgaaattcgatagtcttatcaggaaatgcactctccatctccttattcagtttgagaagattctcggcaaaaggttctttcaaccggacatggatacaatcaccaaacctcttggtgtgcataagcagcaacggttgttgcgggctggtaaaacttccgatgcgataatctttcatcacgcccactaccttacatacgtatcccgaattataaaccgtacgattcagtatattgtttccccaatgcatccactcggcaaaagtctcattgacgactgtctcatcgtcaccacggggcatacgtccctccttcagaaccatccccatcatcttcggataatcatccggaacactgcaataacgggatgaaaatagtgactgtccgctttcatcattaataatcgttccactatatccgtagacaggatgataagtggcactggacacggattccacataaggcatattccggaaaacattcaaggcataatttcctttttcttcctcaccgaagctggcattggccaccactacacgctttggattataacccaaatctttattcaagatataataatattgcatcatcaccacatacatcagtccgcaaataaatgctacaccggcaaactggataaacagcaacggtcgtttccagccctttttaccttccgtgtatcggcggaatacctgagtaacgggtatccttgcaaacagtcgtcccggcaataccccacccacaacgaaaagtacagccaccgttaataaaggtacccaaatacgatccaagctgaacaaagcgcttaacttgacagctgccgtatcttcaaagaaatcctgaaaattcaataagatcaatcccatcaggatcagggcaaacagaatgataatcgctgtttcccaaagaaacatactcaatatggtcatgtttcctgccccattgcatttatgcacaccgaccgctttcgcccgataggaaagtgatgaaacagaaatcaacacataattcaatgaagcgatgaaaagaatagtaatacccagaatagtcatgatgttccgcatccgccttacatctttattgtcacggtatacatcacggatgggctttacaaaagcggtatatccaaccactttttgatcttccgcaggacgatacttctgtatcattgcgtctatccgggcattcactaccgacttatcggctccgggacgaaaacggatgaacgccagccagctgtcgccgcctctccatgagtaatttccccatttgcggctccatatcgacggcagagaaatcaccgcttcaggccttaccgtcgcattctccggtatatcagcataggtgccttttaccgtaagttctatctccttactgtatgagataaccttgcctatcggattctctgtgtcgaacatctttcgtgccaaacggtcactcaggtaaactacatctttttgggctaaatctttcaccggagttccgcttaagacctcgattcccatcgtctggaaaaagagggaatctgccgccagctttctgacttcaaaacggacactaccatgatagagaggatcattcacccaaaggcagtaactggtagccgcctccacttctttgggaaagttttcaagaattgcacccgctaccggtccgcaattttgatcctgcggttcgagttgttcgccattcatcgtaaagatggaaaagacttgatataagttttcataatccttaaagcatttatcaaagctctgctcaaaagccacgcgggcaaataataaaatactcattgtcagcccaagccctaaagaaatgaccttgacaacattggaactacgcccccgcagcaaagttcgaatgacataatagatttgtctcatgattatataatatattcctgttttttttatgatgcagtgcagataacgtgccacaatagtgagaatactcattctcaatcatttatagttatctgtcctatcatctactgtctaataattagacacatgcgtctaattattagacaaagacaatcgtatttcctttctcagtggaaagtatgcattaatgcctatttattgttccatttttcttatttcgcccaagcaatcgcccatatctcaactgaaaactctatcttcgcatcaagttttcaattaaataaattattctatttatggtaaacaagaatttatacactctcctggtctgcctgcttctggccggatgcgatctgatagactaccacccctacgatgtacgtatcagtggagagacagacgtaaatgctcataacattgaacaaatagaagctaagtgcaaaggaaagacaaccatccgttttatcacgatgggcgattcacagcgatggtatgatgagacagaagactttgtaaaagaggtcaataagagagatgatatcgatttcgtcattcacggaggagatatgagtgacttcgggctgaccaaagaatttctttggcagcgggacatcatgaacggactgaaggtgccttatgtcgtccttatcgggaatcatgactgtctgggtaccggagcagaaacttatcaggctgttttcggacctaccaacttctcattcatcgcgggcaatgtgaaattcgtctgccttaataccaatgcgctggaatatgattattcggagcctattcccaatttcggttttatggaacaggaactgacggacagggcggatgagtttgaaaaaaccgtagtcagcatgcatgcacatccttttgcagatgtgttcaacgataatgtggcgaagccgttccagtactacatcacccaatatccgggactacagttctgcacggctgcccataatcacggattcgatgacagaatcctttttgatgacgatgtgcattatattgtcagcgactgcatgaaaagtcgcagttatctggtatttactataaccccggaaaaatacgaatatgaactggttgaatactaaatatatgatccgtgcaggagtactgactatgcttctactcttccccagcctgctttcggctacttgcaggacagatacaattatcaggaactataaacccgactcgctgaaactggtgattaaggcagattctatcatagcctttcatgagggtgattctgcgttcacaatagtcaaagcagacacagtactgccttatgtagccgaaccggttcttcgcaccggctacgacaaacgtgtccatcgcttccgcaaaaactgggaacgcatcattccgacccactctaaaatacaatatgccggaaatatgggattactctccttcggtaccggatgggattacggaaaacgaaaccagtgggaaactgacctgttgctcggatttatcccgaagtattcgtccaagaaggcaaaagtgaccatgacactgaaacagaactatatgccctggagcatcaacctggggaaaggattctctaccgaaccgctttcctgcggactgtatctgaataccgtattcggcaatcagttctgggtcagcgaaccggaacgttatccgaaaggatactatggtttttcaagcaaagtgcgtattcatgttttcatgggacaacggttgacctatgatattgaccctaaccgcagatttctggcaaagtccgtgactttcttctacgagataagtacatgcgatctttatctgatcagtggcgtaacgaatagttacctccgtccccgtgattatctgagtttatcattcggattaaagttccaatggctataaattcaaatccgaattttgaattatgaattactttttcgtaagtttgtagcgtacaaaccaattcgaacatgagtaaatcaggaacaatcatcattgtagacgataataaaggggtgctgactgcggtacaaatccttttaaaaaactacttttcgaaagtcatcacgctgtcgtcaccggtcacactggccactgcgatacgggaggaaacgccggaagtggtactattagatatgaatttcacttcgggcatcaataccggcaatgaaggattgttctggctgcacgaaataaagaaagtacgacgggagcttcctgtcgtactttttactgcttatgcggatatcgatctcgccatccggggaatcaaagaaggtgcatcggactttatcgtcaagccctggaacaatcagaaactggtagaaacactacaggctgccgcctcatccgcacagcaagaacgaaagacgggaaacaaaaaggaaccgatcaacactccggcactctattggggagaaagcaagtctatgcaacaactccgaatgctgatcgaaaaggtagcctccacagacgccaatatcctgattaccggtgaaaacggaacaggaaaagaaatgcttgcccgtgaaattcacgctctttccaaccgcaggcaacaggaaatgattgctgtggacatgggagcaatcaccgaatctttatttgaaagcgaactcttcgggcatgtgaaaggctcttttaccgatgcgcataccgaccggacaggaaagtttgaggctgccgatcacagcacattgtttctggatgaaataggaaacctcccctatcacctgcaagccaaactattgacggctatccaacgaagaagtatcgtgcgagtgggaagtaacactccgattcctattgacatccgtctgatatgcgccaccaaccggaatttgcaggaaatggtagaccgggaagagtttcgggaagacttactctaccgtatcaacaccattcatatagaaatccctcctttgagggaacggaaagaagatattgtccctcttgccgaaagatttatcatccgcttctgcaagcaatatgataaggaactgatgaaattcagtccggcagcgaaggaaaagcttaccgcgcatccctggtacggcaatatccgcgaattggagcacgcaatcgaaaaggtggtcatcattaacgacggggtgcaaatccctgcggaattgttccagttatcctcccgaaagacagaaacttccgagaagaatatttccaccttggaagagatggaagtacaaatgatacggaaagcgctggatgcttgtgcaggaaatctttcggcagtagctgcgcaactgggaattacccgacagactctctataacaagatgaaaaaattcggattatgaaccggattctacaacaagtagccaaccaatattggttcagggtatcactgacggtcatttgctgtctggcgactatctgtttgggcgtgcatcagtcttatgtctggttcagcgtcagtgcctgtctgctgatcttaagtatcatctggcaagtccggctttatcgcctgcacatcaagcaggtgctcttcatgatcgatgcgttggagaataatgacagtgccttccgtttccccgaagagtccggtactcccgagagtaaacagatcaatcgggcactcaatcgggtgggccacattttatataatgtaaaagcggagactgcccaacaggaaaagtactacgaactgattcttgactttgtcagcacgggactgctggtgctcaatgataacggagcggtctatcagaaaaataaagaagcactccggcttttgggactgaatgtatttacccatgtccgccagttgagtaaagtagatgctacactgatggagaagatagaaagttgttgttccggagataagctgcaagtggtgtttcacaatgaacggggaacggtcaatctgtctattcgcgtgtcagaaatcaatgtacacaaagaacatctgcgcatccttgcactgaatgatattaatattgagctggacgaaaaggagatagattcatggattcgcctgacccgagtactgactcatgagatcatgaactccgtgactcccatcacttcgctcagcgatacgcttctctcgatggtggaggacaaagacgaagagatcagccacggactgcaaaccatcagtgccacgggaaaagggctgcttgctttcgtagaatcctaccgcaaattcacacggataccgactccggaaccttcattgttttacttgaaagcattcatcgaacgaatggtggaacttgcccgccatcagaatccttgtgaccacatcacgttccatacaaagatcgatcctgccgacctgatcctgcatgcagatgagaatctgatttcgcaagtagtcattaatcttctgaaaaatgcgattcaggcaatcggtgatcagccggacggacaaatcgacattcaggtttattgcaacgaaacggaagaagtgctgattgagattaagaataacggtcccgtcattccaccggaaatagtggagcacatttttatccctttcttcactaccaaagaaggaggcagcggaatcggactaagtatttcgcgtcagatcatgcggctttcaggtggaagcctcacgctgttaccggacaacaaggaaacgaaattcatattaaaattcaaataacagaccagcctatgacacctgcactcaccaataacccattattccgggggattactccggagaagttatccgccaatctggaagagatcagtttccacacccgttcttatagaaaaggagaaatactggcacgacagggagatgtgtgcaaccgtctcgtgatactgaccaaaggaagtgtccgtggcgaaatgatagactattccggaagactcatcaaagtagaagacattgccgcaccaagggcccttgcccctcttttccttttcggagaagagaatcgctttccggtagaagtaaccgccaacgaaccgacggaagtaatcgaaatccccaaagccagcgtactggagctttttcgtaggaacgagcagtttctggagaattatatgaatctatccgccaattatgcccgtaccctatcggataagcttttctttatgtccttcaagactatccggcaaaagatagcatcttatctgctacggttatacaaacagcagcaacagctacagatcaccctcgaccgctcgcaacaggaactgagcgattacttcggtgtctcccgtccttctctggcacgtgaactgtcgcacatgcaggaagacggtatgatcatagccgaccggaaacagattactatcttacagaaagaatggctgatccggctgattcaatgaccaagagttcactccggtttcattatagctaatctttttttcattatagctaatcggaatatgattatagctaatttaatttagctcatagcatccgatttttttcgcccaatgtaacattggttacaaacttacctcaaactttccccctacttttgcgttcataatcaaataagactaattaaaacgtaaaagttatgagtatgttctgttatcaatgtcaagagaccgcaatgggtacaggctgtaccttaaaaggagtatgcggaaaaacatccgaagtggctaacctgcaagacctgctgctctttgtagtacgaggaatcgccgtgtacaacgaacatctgcgccgggaaggacatccttccgaagaagcagacaaatttatctacgatgccctgttcgtcaccatcactaacgccaattttgacaaagcggccatcatcagaaaaataaaagaaggactacaactgaaaaacgaactcgccagcaaagtaaccattgcaaatgctcccgacgaatgtctttgggatgggaatgaagatgagtttgaagagaaagccaggacagtaggagtacttcgcacacccgacgaagatatccgttcgctgaaagaactggtacactacggactgaaaggtatggcggcttacgttgagcatgcgcataaccttggataccagtcgccggaaatcttcgcctttatgcaaagtgcactggccgagctcacccgcaatgatattacgatggaagaattggttcagcttactttggcaacaggcaagcacggagtttccgccatggcacaactggatgccgccaatacaaacagctacggaaatccggaaatatcggaagtgaatctaggtgtccgcaataatcccggtatccttatcagcggccatgatctgaaagacctcgaagaattgctggaacagaccgaaggaacaggtatagacatttacactcacagtgaaatgctccccgcacattattacccccaactgaaaaaatacaagcatctggcaggaaactacggaaatgcctggtggaaacagaaagaagagtttgaaagtttcaacggaccgatcctgtttaccagtaactgcatcgttcctccgcgtgccaacgcttcttacaaagaccgtatctacatcaccggagcctgcggactggagggagcacactacatccccgaacgcaaagacggaaaaccgaaagatttctccgcactgattgcacatgccaagcaatgtcaaccgccgacggccatcgaaagcggaacgttgatcggaggttttgcccatgcacaggtagtggctttggcggataaggtagtagaagccgtgaaaagcggagcgatccgcaagttcttcgttatggcaggatgtgacggacgtatgaaaagtcgtgaatattataccgaatttgccgagaaacttccgaaagatacagtcatactgactgccggttgcgctaaatacagatacaacaaactggctttaggggacattaacggcattccccgcgtattggatgcagggcaatgtaacgacagttactcactggctgtcatcgcactgaaactgaaagaagtattcggattggacgacgtcaacaaacttcctatcgtatataacatcgcatggtacgaacagaaagcggtgatcgtattgctggcattgctggcactgggagtgaagaatattcatctgggacctactcttccggccttcctttcaccaaacgtaaaaaacgtattgatcgaacaattcggaatcggtggcatcagtaccgcagacgaagatattatgaagttcttgtcataaacacaagacgtatatacatgctaagccttaactattaaatataaaaaggaggggtgtcaatagtaactaaactggggctgattaaaagtcggtcctagtttagttactattaaccttgacacagtcctgaccatttcaagaacagagtcaatcgtccttcggtaatatcaaattaagaagtactccgaccaaagcggccagtccgatgccggataatgaaaagtctccccacgtgagaacagctccgccaatgccgacagtcaatgtcagagagacaatgatgatgtttcttgtacggctcagatcaatacagttatttactagattacctattccggcacaagcgatggttccgaacagcaaaagcataattccccccaataccgcactcggaatggatttcagcaacgcactgattttaccgacaacggagaataagatagcggatatggcagcaatccggatgacttgcggattggtgattttcgttaatgacatcgcacccgtcacctccgaataagttgtcaccggaggaccgccgaccaatccggcaaagcagcaagccagcccatcgcccaacaacgtacgatgcagaccgggatctttcacgaagtcttttcctgtaactgtattgactacgtatacatctccgatatgctctatcaccggagcaatagctaccggaatcataaacagtatcggctcccatgagaacttgggaaacacgaactgcggcagcccgatccatgccgcatccctcacaccggacaaatccagatcatagaaaagccatgccgccagataaccgacaatgataccgcaaaagataggaatcaacttcaaaagtcctttcgctttcatcgagacaacgactgccgtaaccagcgacaacaaggccagcacccagttctccttcgccatatttactcctgtccccgcgagtgacaaaccgatcagaataataaccggcccaataaccaccggaggaaacagacgttcaatcaccctcaccccttgccatttgaccaacgcgctcattacaaaataaaccaatgcgacgcccaccattccggataaagtacccggcaatccgtaaagttctgtcgcttttattatcggggcaataaacgcaaaactacttcctaaaaagataggcactttccctcgggtaaccgcatgaaaaatgagtgtaccaatgcctgctgtgaacaaggcggtggaagggtcaagccccactaagagcggcacgagtaccgtagctccgaaagctacaaacaagaattgtactcctaccactcctttccgtaaaggagtaagattgtttgaatccataagtatgatgtagattaattgagtgcaaaattaatctttttagacaatttaactaccttttttcacaaaaatacatccaaaaagactctttatttgttttaaataatgtgtaacttcgcacggtgagacctattacgacacatttaataacttaataatatattgcctatgatatttacagcagaaaacaccctactaattggttctatcttacttttcgttagcatcgttgtcggaaaaacaggatatcgcttcggagtgcccaccttattactgttcctcgtagtaggaatgttgttcggaagtgacggactcggactccagtttcatgacgcaaaagatgcgcaattcatcggtatggttgctttaagcatcatcctgttttcgggaggtatggatacgaaattcagagaaatcaaacccattttaggtccaggtatcgtgctttctaccgtcggagttctactaaccgctcttttcaccggattatttatctggtggctgtccggaatgagctggacgaatatctatctgcctatcaccacgtcattgctactggcatctaccatgtcctctacggactcggcttcggtgttcgccatcctgcgttcgcagaagatgaatctgaaacacaacctccgccccatgctggagctggaaagtggaagtaacgacccgatggcatacatgctcaccattgtcctgatacagtttatccaatcggcaggtatgggagtcggggctatcgccgcttctttcatcattcagtttatagtcggcgcggctgccggatacgtgctcggaaaactggctatccgtatgctgaacaagctcaacatcgacaatcaggcgttgtatcctatcttgttgctggcgtttgttttcttcaccttctctatcactgatttactgaaaggaaatggttaccttgccgtatatatcgcaggtatcatggtaggaaacaacaagatcatgcaccgcaaagacatttatacgttcatggacggacttacctggttgttccagatcatcatgttcctctgcctcggacttctcgttaatcctcatgaaatgctggaagttgcagcagtagcactattgatcggtgtcttcatgattgtgatcggtcgcccgttaagtgtgttcctctgtttgcttccgttccggaagattacaatgaaatcgcggctgttcgtctcctgggtaggattgcgtggagcagttcccattatcttcgccacttatccggtggttgcaggagtcgaaggatcgaatattatctttaatgtcgtattcttcatcacaatcgtttcactggtagtgcagggaacaacggtttctttcgttgcccgcctgttacatctgtccaaaccgctggaaaagacggggaatgatttcggagtggaacttccggaagagattgatacagacctcaaagatatgactatcacacaggaaatgctggaagaggcagatacgctgaaagatatgaatctccccaaaggcacgctggtaatgattgtgaaacgtggggatgagttcctgataccgaacggaacgctgaaactgcatgtgaacgataaattgctgctcatctccgaaaagcccaaagaggacgaggaagccaacagcgaatcctgatgtttatagggactgactaaaaagtcaatagtatctccaattcccctcctttcggaaaggagaggtggctgaaagccggggtggtaggtaaaataaggtttattcctattctattgtaaacaacagagttatgtgttcacctaccacctccccctacggggactcctccttcccgaaggaggagagttaagatactaccaactttttagtcagccccatttaaggtactaccgactttttagtcagcttttcctcccccgttaattaaccgtaaaacttaattgtaaacttcggtttccgttaatgaaatgttatttttgcgcaattttaaatcaaatgtgcaaaaatcgaatggaacaagaacatcagttcattgattatattgaacagagcatcattgaaaactgggataaagatgcattgacagactacaaaggaatcacgcttcaatataaggatgtagcgcgcaagatagccaagtttcacattgtattggaaagtgccggtatccagccaggagataaaatagcagtctgcggccggaacagtgcccattggggagtcaccttcttagccactatcacttacggagccgtcatcgttcctattctgcatgagttcaaagcggataatattcataatatcgtcaatcactccgaagccaaattactctttgtcggcgatcaggcatgggaaaatctgaatgaagacgcaatgccgctactggaaggtatcgcttcactcaccgatttcactgcattggtatcgcgcaacgagaaactgacttacgccttcgaacaccggaacgctatttacggtcagcgttatccgaagaatttccgccccgaacatatctgttaccggaaggaccgtccggaagaactggctatcatcaattatacctccggcactaccggatattccaaaggagtcatgctcccctaccgcagtatttggtcgaacgtagcatactgtttcgagatgcttcccgtgaaagcgggcgatcacatcgtttccatgcttccgatgggtcatgtattcggcatggtatacgatttcttatatggtttctctgccggagcgcacatttacttcctgacacgtatgccgtctccgaagattattgcgcagtcttttgcagaaataaagccaagagtgatctcctgtgtacctttgatcgtagagaaaattatcaaaaaagatattcttccgagagtggacagcaaaatcggtaaactattgcttaaagtgcccattgtaaacgataaaatcaaatcgttggcgcggcaggctgctatggaaatcttcggtgggaacttcgatgaaatcattatcggtggtgctcctttcaatgccgaagtagaagcgttcctcaaaaagataggctttccctacaccatcgcttacggtatgaccgaatgtggcccgattatttgctccagccgttgggaaacactgaaactggcttcctgcggcaaggcaaccacccgaatggaagtccgcatcgactcgcccgaccctaaaacacatgccggagaaatcgtatgcaggggaatgaatatgatgctgggatattataaaaatccggaagcgacggcacaaattattgatgccaacggatggcttcacacgggtgatttaggaacaatcgacgacgaaggatatgtgacagttcgcggtcgtagcaagaatctgcttctgacttccagcggacagaatatctatccggaagagatagaaagcaaactgaataatatgccttatgttgccgagtcactgatcgttttgcagcacgacaagttggtcgcactgatttatccggactttgacgatgcttttgcccatggcttgcaacaggccgatatcataaaagttatggaagccaatcgtgttgaactgaatcagcagcttcccaattattctcagataagcaaagtcaaaatccatttcgaggaatttgaaaagactgcgaagaaatcaatcaaacgctttatgtatcaagaagcaaaaggataacacatcctttcaaaaccatactcaataaaaacaaaaacggtgaacaggtatcaaaactctgtccaccgttttttcagtctaacctaaccaacttaattttatcttgttatcctccgacaatctctctactttaacaacctcacttattaccctcacctattacttattacctattacctattactttttataaacgaaacagcctgcccgcctccgggagccatccgtatactcaacgtattttcagatgttacaatctgttccgtaatcttataatcggtaggattcgttttccagtcagccttttcgccatccgcatagatgacagccttatactgcttgcctggttccaggaagtccaattttacttctaaagtacgggggctttcattagtagctgctcccaggaaataattgccttttgctttacgtaccactgcaatgaactctcccggttcacctgccagtgctttcgattcatcacaatccggatcaaaatcacggaagaactggaatgccggatgtccttcataatgctcgatcatatccgaagccatctgcaaaggagaatacaggattacccaattagccagttgtttagccagcgtcgtattcacacggctattgcctttatcctgatcgttccacttctgtcggcgcggagaatccttcgttttcaagaacagaatatcaaaagttcccggcgtataatccatcggaccggacagcaggcgggtgaacggtaacatcacgtgatgagaaggaggattgccttcactccacgcattccattccatgcctcttgccccctcacgtgtcatcatattcggccatgtacgacggataccggtatctttgatcggttcgtgtgcatccagagtcatttgatgacgggcggcagtttccactacccgttgatagtgattgacaccgtattggctatgatgcagatacccatccggaaatgcgcctgcatatcccgtcttcaggaggtggataccatgatcggtataccattgcatggcatgatccatctgacgttcatagttaggaatattccctccggtctcatgatgtcccatgatttcaacacctttctctttggcataacgtacgatttcatcaatatcgaaatccgcatatggcttggtgaaatcaaagctctgcataccgccccaactctcccaaccttcgttccaaccttcgaacaggacagcttcgatatgattggccgcggcaaaatctatgtatttctttgcattggcagtagtagctccgtgacgttcgtccatcttccaggtctctacgccgagatgcatcccccaccatactcctacatatttcagcgggcgaatccagtccgtagtttccagtacgcaaggatcattcagattcagaatgagtgaagagttgatcaaaccgacagcttccggtgcgatctgtatggtgcgccatgaggtcgtgaagtgatttcccttacgcgccttaatgccgtcaggccacggggcaagttccgctttcaatgtataatggccgatttgcttcagagtcatttccggaaaatcatacaaagcggcttcgtgtatacttccgtaaactccatccgcagtcttgaatgtgaaaggtgtattagccgtttccacttcggaaatcggttgttgttgatagagtagttcatatgtttcggcactggcgggaatcgaccacgaagttccgtcacgatggaaatggaaagtagtcagttcgtcggtaatcaataaagaatctacagtcggcaccgtgtattcatagcggaaaccgattccatcatcaaatacacggaaacggagtgtcagttgtacctgatcttcatttgtcaggctgactgccatttcgttataatgattccggttctttttgttttctccccacggctgtgtccaagtttcgtcttcactgctgaaagtcgtgttcttcacctgaaaaccttctgccagaatgatgccgttagccgccgtaaagcccatggctgaattttctatcaagagggagtcatccaccgacacattataaaacggtttgccgttttcgtctaccgtcaatgtcatcttgatatgtccgtccggtgactggacctctgttttcgggctactacaggcatagcatcccagcacacacagaaaagctccaactaaatgttttactttcatagtataatcgtctgtttatatataatacagttcagaaaggagaaacacttaaatgtatgccgtttttctttcttcggatgcaaagaaaaagtatctttgcatctaaacaatgtagatttatggcaaagatactattagcagaagatgaagtcaatatcgcctcctttatcgaacggggactgaaagagttcggacattcggtaacagtctgtcatgacggaaatacgggttggagaatctttcaggaagaacctttcgaccttgtaatcctggatattatcatgccgaaaataaacgggctcgaactttgccatctctatcggcagatgttcggttaccaagcaccggtcattatgctgacggctttaggcactacggaagacattgtaaaaggactggatgcaggagcagacgattatcttgtcaagcctttcagttttcaggaactggaagcacgtatcaaggcgctgctgcgacgaaacaaggagactgtaaccaatcaactgacttgcgacaatctggtattggactgtaacaccagacgggcgaaaagaggtgatgcggatatcgatctcaccgtaaaagaataccgtctgctcgaatatttcatgactcaccaaggggtagccttgtcgcgcattacgctgctcaaagacgtatgggacaagaactttgatacgaataccaacatcgtagacgtatacgtcaattatctacgggtaaagatagaccgtgacttcgacaagaaactgattcatacggtagtaggattaggatatatcatgaatgcctgaacatccatcaaataaatccgtgtatgaaaataggttctaaaatagctctcttctatacgttgctcagtgtactgacaactatcatcattattgccgtattctatcttttcagcacacagtttatcaataaactctatgcctcctaccttcgtgaaaaagcatatctgaccgcacaaaagcactgggagaaagacgaaatagacgaacagagttaccagattatccagcgcaaatatgacgaactcctgcccgaagctcatgagattcttttaaatatggacagtctctccgaagtccgtgacacactgaacaaatatctgacccagcatcagcaggcactcctgatagccggtgaagacagcattcctttttcttttaaatacaaagaccagttgggagccgccctttattatcccgataatgaagggaatttcatcgtcctagtcatgtcccggaatgtgtacggtgcagaaatcaaagaacacctcttgcttctctccatctttctggttttattcagttccatcctgatttatttagtcgggaaaatctattccggccgtattcttatccccctgcagcatatactgaaggagctgaagaggatacgagccaacagtctgaaccgccggttaaagacgaccggaaacaacgatgaactggaagacatgatcaaaacactgaatagcatgctcgaccgtctggacagtgcttttaaagctgaaaagtcctttgtcagccatgcttcgcatgaactgaacaaccccataaccgccatacagggagaatgtgaaatcagtctgctgaaagaaagaagtaccggagaatatatcgaagccctgcaacgaatctcatccgaaagcaagcgaatctccaatctgatccgccatcttcttttcctttcacgtcaggatgaagagctcataaaaagcaatatggaggcaatgtctctgccggatatgctgaatgacttaataaaaatgaacgaacgaatccgtttccatcatcaagaaacaggtaaggcttccactgtaaaggccaatccttatctgctcaaaatagctttaaagaatatcatcgataatgcctgcaaatattctgaaaaggaagtagacattacgctcagccaaaaagatcaatacctcgttcttgaaataaaagatcagggcatcggcattcctccggaagaaatagaacatatattccagtctttctatcgaggcagcaacacacatgactatgcaggtcagggcatcggcctcagcctgacgctgaaaatagtatctgcctacaacgccagactggaaatatcttcggaaatagaaaaaggaacaaaagtacgggtgatcttctgatccaaccgacttttgtcccttcctcacttctacctactgaaaacgaaattaaaatttaatctatgccgtttctttcatagaaagaatagaaaatgaattagatacgtctttgcaataattttccgtttttatcatatagcattcgttcatacactacttccacaatcagcgggaagatgaacaaggcgaagaaagtcgctcctatcaatccgccgataatgacaatcgccaacggacgctgtgattccgaaccgataccatgactcatagccgcaggcaacagaccgatagctgccatagccgctgtcattatcacagggcggatacgtgaacggactccttctttagtggcctcctgtaaggacgaacccagttttagatttgccttgatatcggaaatcataataacgccattctgtatgcagataccgaacaaagcgataaaaccgatacccgccgatatagagaaattgaagcccgttatcagaagggctgcgatacctcccacggcagcaaacggtacattcagcaataccagtcctgcatctcttgcattggagaagagaataaacagaataataaaaataatggcaatgctgataggtactacctgtgccagacgtttcgaagcacgctgctgattctcaaaatcacccgtccatttcaaagaatatccagccggtaaatggacggaagcatttacctttttctgcgcttcggcaactgccgtacccatatcccgtcctctcaccgagaacttgacagcacagaaacgagcatggttgtcacggaagatcaataatggtcctgtaatcgtagtgatatctgccagttccttaataggcaccatcgttccgtccatcgccggaaccagtatcttacctatctcctcttcattctgacggaactcttcactatacctcaccatgatattaaatttccgttcgtcctcatacaacagcgaagctgacttcccgccaatagccatttcaatgatagactgaacatcttccttagccactccataacgtgccaactgacgttcgttcagttcaatacgaagttccggctggccgatattgcgaatcactcccaagtcttcaattccctgcacggtatttaagatcttatcaatctggacggccagtttttccgattcgtacaaatccttaccgaacactttcaccgcaatagaaccttttacaccggaagccgcttcttccacattatccgtaatcggctgcgaaaagttaaagtcaatgccgggataaatggataaatcttcctgcatcttgtcgataagctgcagtttggtcagtttgctttcccagtctttctccggataaatatctacgtgaaactcaatattataaaatccggttgcatccgttccgtcgttgggacgtccggtttgagacagtacctgcctcacttcggggaaagtcaatagtttctttctcatcttatttgccagcgttacggattcatccagcgatatactttgcggcagcgtagcacggatgtagatcgaaccttcgttgagctgaggaagaaactccgtcccgaggaaagagaaaagccataaaccgactcctgcaactacggttgccagtccgatagtcagcttgcgatgagcatagaaggtatcaaaaagagccgtgcacttttgattgatgaaatggacaaagcggttgttcttttcgcgtacattctttttcagcaacatggacgacatgacgggaaccagcgttaatgtgaaaataagcgcacccagcaaagcaaaacccaatgtatatgccaaaggtgagaacatttttccttccactttctgaaaagagaaaataggaattaaggcagtaatgatgatcagtttggagaaaaataccgcttttgccttatccttggcggtatgacggatcagtcccatcttggacatcacattgaatgcgggcattcccacctctttcgccttcttgtccaaagcgacaaacacaccttccaccatcaccactgccccatcgataataataccaaagtcaatggcccccatagaaagcagattggcagacatccccatcacgcgtaaacaaataaatgcgaataacaaagctaatggaataatcaccgcaacaatcacggttgtccgccaatctgccatgaagattaacacaataaacgtaaccaacaatattccttcaatcagattatgggtcaccgtttttaccgccaggttcaccaagtcctcacggtcgtagaacggtattatccgtacatcttcaggaagtacattctgattcaattcttctatcttatctttcagatttgcaatgacttcaccggggttctcccctttacgcatcaccacaattccctgaacgacatcgttctcatccattcgtcccacttgtccgaggcggggcaggcaggattcgtgaacatctgccaggttctttacgagaatcggcgttccgttgatgttcttcactacaatgtttcgcaattcatccagatcgtttatcaaaccgattccccggactacgtatgcctgagaacttttcgtgatgacatctcctcctacattgatattactcttggctatcgcgtcataaagttcgagagaggtaattccgtaattaatcaactgatgaggattcacgctcacttcgaatgtcttcacctcgccaccgaaactgacgatatcagctacacctgataccgaacggagatttcgttcgatcacccagtcctgaatcgttttcaaatcgcgtacactacgtctgtcactgcgcagggtgtagcgatagatttctccggtaggtccgtacaaaggctgtacttcgggagtcacgccttcgggaagatcggcatcattcagcaaattgtagacttgctgacgggctgtaaagtcatcaacacgatcttcgaacattacattgatcacagaaagtccgaaaagagtggtcgaacgaatatccgtttttttctgtacgggattcatggctatctcaatgggaatcgtgataaatttctccacctcttccgcactacggcccgcccattgcgtgatgatcgtcacttttgtattcgttacatccggaaaggcatctatcggcgtatgtttgaatgagacggctccggctataacggcaatcaccgtacagaagaatataaagaacttattcttcagcgagaaggctactatattatctatgaatttatgcatactattctctgatttttaatccgcattcaaagcattatacactaacaatacattattattcagtaccctgtctccttcggaaagaccggaacggacataacattccttgctcaactgtttgtaaacgtctacttcctttatcttcagacgctggtcaggctctactgtgaccacataattctttcctccctcgaacaccagcgcatgggagtcgatacgaggcatggaagtatcttccgctttacattttacgctcacgtttgtaaacatacccggcttcagcaggtaatcctcgtttttcagtttgatgcgtacgctcattgtcttgctttcactgtccagcagatgatagaccttgtcgatcgtacctgtaaatgtcctttccggatatgccaaagtcgagatacggacatcagctccctcggaaaccttactaatatcactttcatacacatccgccatcacccatacatcggacagaccggaaatcgtaaacagcgcatccccctggtcggggcgcagctgcatatccctgctaatctgcttttccacaataaagcctgatacgggagatttgagctgataaaaagcatttccggagaagtgataaatggagaatatttctttgattcgtctttcttccgcttccgcagttgccagttcctgcttggcctgaagtacatctttatccgatgccatgccggaagtgtacatatcctgtgtggcatccatgttccgccgggccagcaagagttgttgttcagcttctttcaattgtttctcataatccgccacttccccgctacggatcactgccagcacttctcctttgtgaacaaagtctcctatttcggcacgcagttccgtcacggttcctccgaacatcggatacacatttgccacctgatcctgattgaaagtgacccgtccattcaatgtcagttcatctaccacttcacagacgtgcacggtatcgacggatacgattctcagcaggctgtccgtcaggcatagtgtagtcggttctactttgggttgttctccttttccggagcatgctcccaaaaggctgccaaacaatatacaaggaagaaatttattccagttcatagtctttgataatttatggattgtgatctttaatcgtttcatattggtcggtttattagtagttcaatacattttgtccgacaactgtattcaggttttccatagcgagaaatacgtttttctttatctcgtatagttggatacaggtttctttatagctgtcataatagtcgataaattccagcaggctgatattctttctggtgaaattctcattgactcctgtgatcaatttctcgaagttacgttccaggtccatattagtggattgatagagttgagtcgctttctccagagacgtataagcggtgaagagttccatatcggcacgattggcagcatattcctgctgcactcccgcctgctggatactgaagcgggctgctttgatatttccctgattacggttgaagataggtacggacaggcttactcctatcgcgaaatagtcattgataaagtttcctacacggtcataattccctttcacagagaactcgggaaaggccattgacttctgtagtttcagatttgcacgggaggcattcactgtgcttcgggcaatcttttggtcgggccgttcattgatgattgctttcaggtctgcaaatgataattgcgacaggtccagttgttgcagtacttcttcgtctaatgagagttgaacttgtgtatcttccggaaggttcagtaataaattcagttctcccctggtagtcagtaaatcattctcccgttcgttcttctctttcctcaaggagaagagcatggattccagacgggaaatttccattaaagagatgtttcccttttcctgctgaattttcattccgcccaaaagtacttgcagggaatttacttccttttcatagatggcaatggacttagaaagaaagtagacttctacaaacttttcattcaattcctgacggagcgtccgcattacttcttcaaactggtattcagctatttccttattgattttttccagccggacttgcttgttccgctgaccggcaagatggatcacctgttctatttcaacaacagcttccccttcttttccaaaatcaaaatacttcccgttcaatcggttgtagacattctgttccagcgaaatgaccggattttcaaacaatttggcttgtaatacctgcgcctgtgccatgtcgatattgtaccgctcggctatcaacgataaattgcgctctaaaaaacgctgctctgcttctttcagtgtcaatgtgcctgcaacctgttgcgcacacatctttcctgccaatagaagaaatagtaaaaataaaaatgctctgttcatcgcaatctttttgttaccttaatttgttttccgacaaaagtacaactctgcaacggtagaggctggataaaagcgattataaggctctcatttcagattagaatttgattagaaaatatctaaggaaaggaaaaattgtaaacacaacaggaagaatggctatccctctttctctaccatacccctatctttgcaaagtagaaataaataatgaatcattaaaaacaggaaatatgaaaattatagatttaaccaaagaaagctttgttgagaaagttgctgattatcaatcttatccggataattgggaatataaagggaataaaccttgtttagtcgattttcatgctccatggtgtggttattgcaaggcattatcacccatattggaccaattagcagaagaatataaagggagactggacatttataaagtagacgtcgatcaggaagaggaactggaaagtgcattcaagattcggacaattcccaaccttttgctttgcccggtgaatggcaaaccgataatgaaactcggtacaatgaataaggttcaattgaaagagtttatagaaacgactctattttcatgataaaatagaatatagagtactcacattactacttttcttactgaaaaagtccgaatcccaattgctttttgcaatttaaaggttcggactttctattttcagatttaacagatagcacttatcatttatgcagcaatctatcagtccccggaacaacttttcccatcgaccagacacaccgtacattcaattccttatcaagtatcacaatatcagcatctttacctttagacaatgcccctttccgatcgctcacaccaatcagacgggcaggagtttcggaagccatacgcacagcatcttccaaaggaatacttgctttcttcaccatcgtacgaaccaacacatccatagtcgccaaactaccggctaatgcagaatgatccgccatcttacatactccgtcctcaataatataacgcggatcaatcggctcgttcccttcattggcagcataagccaacgcatcagtcaccagacaggtattctcaactcctttcagtttataaaccagtttcagaatagtagcaggcaaatgaataccgtctgcaataacttctaccgtcattccatctgtcagatatacactctctaccgtaccttcatatttatattcgcgacgtttatgaaaaccgggcatcgcattatagaaatgagcagcatgcgagaatcctaccgcatacgctgccttaatctcatcatattcagcctccgtatgagtaacggctgtcataattcccttggaacgagtgtattttgcaaaatcatgtgccccatgcaattcgggactgatatcccagcgcttgatacaggaagtatgttccaacagcggcacatattcattttcatcgggagttttcagaaaaccgtcatactggcttcctgccatcttcggattcagataaggtccttcgatatgcagaccgagaatcggagactccggttccttcatcagcttctcgcaaacatcgaccgcctgatatatcctctcaaacgaagtagatgacaaagtaggaaatatgccggtagctccatgcttcaaatgagcagttgctgcgatacggaaagcctcctccgttgcttcggtaaaatcatggccgccgccaccatgcgcatgcatgctgacaaatcccggtacgatcgtcattcctctggcatcaatcactgttgcaccgataactgccagatcactgttggttacctctaatatttttccatcacaaatcaatacagagccgtctttcagccagccttgcggagtaagtattctaccgttgattatttgagttaacatcgttttcttttttagtcgttaaaacagcttgtttgtaccttctaccaattgtcccatcgcccagaccgctcttacattcagatctctatccaaagcaataatatccgcgtccttgccacgttccaacgtacctttgcggtcgagcactcccatgatacgggccggagtctcggaagccatcctcacagcatccgccaaaggaatttcagcattctgcaccatcgtacggatcaaacggtccatcgtcgccacacttcctgccaatgcagagcggtctgccagtttgcacacaccgtcttcgataatgacacgcggatcaaaagcagtcttactgtcacttgccgcacaagccagcgcatcagtgatcaggcacgtacgctccactccttttatcttatagaccagacgaagaatggtaggaggcacatgaatgccatcggccacgacttccactgtcatatcatcaatcaaataaatactttctaccgtaccttcatacttatattccttccgtttgtgaaatccgggcatagcattgtagaaatgggtagcatgcgtatatcctgcctcatacgcagtctggatatcttcaaattcggcctgtgtatgtcctacagatgccaatacgccttttgcggtgatatactttccgaactgcatagcccccggaagttccggtgccgcatcccaacgtttgatgcaatgggtttcttccagcaaagggatatactcttccggatcaggatttttgatattctccggaatctgtccgcctgccatctccatattgaagtaatgtccttccagatgcaggccgagtacgggactgtccggctctgccatcatcttttcggttgtttctgcggctgcacggatcataggaatagtagaagaagaaagtgtggggaaaatactggtagttccgtgttgcatgtgagctttaatcgctgtccggaaggcgtcttccgtcccctccataaagtctcttccaccaccgccatgaacatgaatttctactcctcccggaacgatatacatgcccttggcatcaatcagttttgctccgataaccgccaggtcgcagttagtcacttccagaattttatgatcacgaataagtacggacccatccttcaaccagccctgaggggtaaggatgcgcgcattaatgatttgtgttaacatatcacaagttcttaaattaattataggtctgtgtgagtcgatgacactctttttgggggaagtacatcgactttcgtaattacaaaaagaggtcgccaatcttatcgactgacaacctcactactttgagcggaaaacgagactcgaactcgcgaccctaaccttggcaaggttatgctctaccaactgagctatttccgcaaactaaattttctccattcagaaatctgaatttcttgtgcccagaacaggactcgaacctgcatgcctctcgacacacgcacctgaaacgtgcgcgtctaccaattccgccacctgggcaaaatttagttccaacatttcaaagaaacatgagcggaaaacgagactcgaactcgcgaccctaaccttggcaaggttatgctctaccaactgagctatttccgcaaataactttaatgactgtgaagagaaggagactcgaactcccacgacataactgtcactaccccctcaaagtagcgcgtctaccaattccgccacctctccagaattttaaagttaaaatctttgtgcccagaacaggactcgaacctgcatgcctctcgacacacgcacctgaaacgtgcgcgtctaccaattccgccacctgggcaaaatttagttccaacatttcaaagaaacatgagcggaaaacgagactcgaactcgcgaccctaaccttggcaaggttatgctctaccaactgagctatttccgcattttttcgtttgcggttgcaaaggtagggattttccgtaattctgcaaacattctgcatctttttttcacaagaatctgcacactttgtttccgcaaacaaacaattgttttgattatcaactcattcggtcccgatagtcttcataagaaaattgcttgtatatttccgctttcccttcttttgtccacaaagcgatggcgggatgatggattccgttaaacatatttgtcttgaccatagtatagtgaatcatatcttcgaacacaatccgttctccgatctgcaactcatgatcgaaactccataatcccatataatcaccactcaaacaagaattacctcccaaacgataaataaattctccttcattccccatctccgcaccacgaacggcaggctgataaggcatttccagacaatcgggcatgtggcaggtgaaactcacattcagaatagccgtcttgataccgcgactctcaacgatatctaccacttccgaagtcaggactcctgtctgccatgtaaaagcagaaccgggttcaaggatgatctgcaaatgaggatatcgtgctttcaggtcttgcaataatttaatcagatgttctgtatcataatcttttcgggtcatcagatgcccgcctcccagattcagccatttaatttgcgggaaccagcgggagaatttctcttccagatgctgtaaagtacgttccagctcgaaagaagaagattcgcagtgacaatgacaatggaaaccttcgattcctttgggcaaggtatccggtaataagtcggcggtcattccgaaacgggtaccgggtgcgcacggattataaagttctgtttctacttccgaatattcgggattcacacggataccgcaggagattccgcttccttcggccactgtcatcggatagaaacgacggaactgtgccattgaattaaaagtgatgtggctgctgcaacgcatgatttccggaaaatcctgttccgtatacgcaggagaataagtatgggctttacttccaaattcttccaatgccagacgcgcttcatacacagaacttgctgtggaatgctccacgtattcgcggaatatcggaaatgaacgccacatggcgaatgacttgaaggcgagaataatctctactcctgccctgtcggctacgctttttatcagacacaggttctttcgcaagagttcttcctccataatatagcaaggagaaggaaattgggtgaaatctatcatatataaatttattatctaaaataacgccttacggacgtgcctgcaaaaatacaaattcaaaagcaaagagagattcttttatttttaattaagatattgagtttcgaaaactttttcttatttttagacctttatattatagatgtagttgtttcatcctaaatacccgattgattatgaataaagatttaagaaaagtggtgattctcctggcgcatcccaatatgaaggaatcacaagcaaacaaagcactgattgatgctgtgagtgatattgaaggcgtagcagtattcaatctttacgaccagcaaggcgcttcttttgatgttgacgaatggagcaaaatcatttccgatgcttccgccctcatttatcaatttccctttcattggatggctgcgccgtcattgctcaaaaaatggcaggacgaagtattcaccttcctttccaagactccggcagtagccgggaaaccattgacagtagtaaccaccacaggttccgaatatgaagcataccgtagcggaggcagaaaccgcttcacagtggatgagcttttacgtccttatcaggttagtgccattcattcggggatgtcgtggcaaacgcctgttgttgtttacggaatgggaaccgcagatgcgggaaagaacatcgctgagggagccaacttgtataagcaacgggtagaaatgctgatcggcagcagcaatgcaggaaataactggtgaattatctcctataccttatttcgattagctattagcaaaaacaaattagctattagctaatcgaaatatgctaatagctaatttatttcttcaaggcttcttcaccatcatcttctttttattcaaagtcagtaccggcaagaaaataaacacgccgatcacggacattaccagtccaccgatagtacctgcagccaaaggaaaccagaaaccttctttctctgctcccaccataaaggggataaagccaaggatggtagaaacaaccgtcagaaaaatggggatcactttcgtattccatgccttcacgtaagcacgaagaggagaaaggcagggaaagcgttttcgaatcgcattgtactcatttaaaatataaatactggcattcactgtgataccgcagagcagaatgaacgaagcgaaaccaccctggtcaaagttcaacttgaaccagtagaacgtcagaaacacaccgatataagagatcggaatgacaaagatgatcgctaacggctgtttcaacgaattgaacagaatgcttgtaataaagaaaatgatagcaatcacaatcaggagcaagcgatactgtttgttggcacctccaccccatgaccagttattactttccgcttccgccttatatcccatcgggagaagttcattaaactcttccaggtcttttttcagcagcttatttccctgttccgacgcaccgatatactcatattgcaggcataagcggtattgttgattctccttcgccacttcctgcggcatctgtcccttctctaccttagccagttccgccagtttatactctttatcgcctacacggaaaggataatactgcatggcccatatatcccgctgatccgactggcgggaagagagtttgattttttccgttccatcttcggtaacaacggaaccgatttcctgattccgcccatatatgggacgaatagcagcaaacagttctccggctccgatccccgctccgatcatccgttgtttatccagctcaaaataaaactcctgataatcatccttccaccacgagaaattggaaccgaccgtaacttccctgatacggcgatgagacaataagacctctttcagttttgtagcccagctataaagttcatcataattatatccgtacattttcacccggaatgatcccgcattctcgcgtacactattactgaatccctgatcctgtaatccataaatactccaatctcctccccccaactggagagctttactgatcatgttagctttcagcgtatatgggaacccgcttttctgattttcctttgtgaaacgaatgctgatagatgccctgcgggcgctttctaccgatgtctgaaactgcttgatctccttgaactcgctcagataagtttccatccgcttgatcagtgtattcatctgttcaagcgtactgccgttcggtaaattggcgttggcataaagcaccacctcctcattccgggtaaagtagctcccttcatacaccttttgcacaaacagcctcagacttcctcccaacgctttatccactatcggtttcaccttttccttataggtaggagtccccagtgtcttattataaatctctgcccatttgccatccccatccatcttttccggcaacagaaagaccggtaatccgaatgccagtaacagcaacagacaaaccgctattctccagcggcaaagcctctgtatcagccacctgtagaaatgacagaaatagaccggcccccttcgcatcttcgaacgcagccatcctaagaaacgggtattccccattttccattttctcttcactccggtcagagaagacttcctgcgtcgtttcaacccgattttatcaatcaaagaaggtacaaagaacagagcaaccaataatgaaactcccagattaatcatcaccactgcggcaaaatcctgcagattcagacgaatcctctcgtccagaaagaagatgatgaccaacgctcccattgttgtcagtgtagccgccaatacagacatgaacgccttccggtttttacatcgaagataatgatcactcatcacaatcgtattatcaatcaccaggttcagtgaaaccgtgatacccgccaaagaatataactgcatttccagtccgaagacatagtaaaagataacggctattgccatattcacggtcagactggtgacaatcaaaaacagatatttggggctgaaagtaatcagtagtacaaacaagagcaggatagccaccgtcactcccgtacgcaaataaatcttgttcagctcgtcatgtataaactctgtagtatcataactggtatgaatctcgtatcccgccggaagcgacagtctgatatcatccatacacgcctgtacctttttgctcagttccagctgattagccgcctcttcagcgacaacagacagataaatcgaattcagtccattgatccggtaatagctctgaggctgctcttccatacggacgaccttcaccagttcgtccaagcggatgattctcccatccttcactttcacctgtatctgcccggcgtcaaactcccggttatcatgttcgggcatcagcaccaaccgaatccattccttgcccgaagccgcctgttccacatcataagtccccagaaactctttctgataatgcagaccgactgcctgactaatttcatccgtactcacccccaacgcacgcaactgctcataatcatactccagacgccattccatcggtgtggctccgctgacgtttatcttatagattcccggaagctgcgcaaggcgtgtctttatatgttcctccgcatacttctgaatcagactgggagtggcaggcgcattaatcgtgaatgcgataaaaggtccctgacttttctgctccggacttgccatctgaatgtacgggtaactaactcccgccggcaattccggccaagtctgacgaatgatggtcgaagcctcaaaacgtgcgacagccgcatctgcatgcttgtccagactcacatttatacttccccagccattgccggaagtcgaagatatgctttgtattcccttgacacgggcaagcatcgcctccagtttgctggtagccgtcatctccacgacacgcgccgaagtccctcccatgccgaaccacacagaaaatccgggtaaggtccgtgacggattcagcttcaccggcagcaacggaacaagtgccagcccgaccaacgccacgctgataaaagcgacaatgagcgtaaaagcggaagcctttgatgactttttaatttcagaacctatatcttgcatgattcatttgtctatatcccaaaagaaattactatctaatcagtcttcctccattaaagtcgaaacgatccgaaagagaaagcttcgtagcaaaatcgaataaagtcagacgacgtattttataataattcagccagtagttctgcaaggcagaaatgtagttgcgctgcgcctcctgctgcctgttgagcgaaagcgtcagactattaatatccgctttaccgataataaaacgttgccttgtctcattataagccagtatcgccaggtccagcgcttcttccgcactggcaatcaactgctgctggatattaaaatcactcaccgtcatgatgacttcctcctcaatactgatctcatcctgacgtgccgaaatcttcactacattcagattattccgtgccatgttgtatttgcccttacgaacgccccagtccagcagcggaatcgatacgctgaccgctaccaagtcctgctgcatcggtttatgatacacatctccgaagttttccgccacctggttgaaaccgatactggcattcacgctggcattgaaacgggattccttctttgttctgtccacattccgctccgcttccagtacattctgcttcagttccagcaactgcggattattgctccttccccatctcaaagcctcatccaccggaatctccatcatacttgggcgtgaaggaagctccagttcgatctgggtattcttatccagattcagaaaagatgccagtgagaacattgcccgtttcaaggcgcttgccctattctgcaatgtattctgtgcattcactttatccagctttaaagtcaacaggtccgcctgtgaaatagcggcgatccggtgccgttgctgtccgatgcggtacaaagtatccgtagatgcgaggttttcctttgccagtttgtattccgcctgcgccatcgccagcgaaaagaaataattcgtcgccgtttccgaaaccttttccacattataaagaaattcctttttcacacgctcgtatttcagcggttcgatcttccggtcccatttgaaaggattatacccgaccaggctctgcgaataaccgagccgtatcgggacgctggtaaactgcgtcgcactattatccccgaaattacgcatataggcaaggttcgactccagatagaacgtacctccggtcaggtccagattttgacggacacttaatcctccataggcataatatgactgttgcgtacggtagacatccaggtcctgtcccgaatcataacgtttcgtgatatcccggttatattgtgccggggtaaggtccattgtcagactcggcaaacggtttgcccggtacgtccggtattcccaataaccggacagatacatattttgtgtgcggaatgactccagcgaactgtcgttagctaaagcgatagtctggttcaagtccagcaccagacgtttctgggcatatactgaagagaaacatatccccgatgctgccatcaatacaaaaagaacggatgatttcttcataattcaacatgtttttcatttggtttgtgattcccgctttttccccgatagataaaccagtaaagcagcggtatgataaagaggctgaccgccgtaccgatggacatcgtgcctatcatggcgatagacaacggcttttgcagttccgatcccatatccgaggagaacagcaacggcaccatggcaaagatggtcgtcagcgaagtcatgataatcggacgcagacgcctgcggcctgcttcgtgaatagcttccagcaaaggaacgcctgccttgcgcagttcattgatcgcatccagtttcagaatagagtcattgattacaataccacaggtcacaatcagaccgatggcagacatcagattcagcgtatgcccgcatatccaaagcaagagtaaggcaaatgccacatcaatcgggatttccgccagtaccagcaacggctgcagaaaactctcgaactgtgcggcaagaatgaaatacatcagcagcagtgagatcaacagaatcacgaccagttcatccagcatctccttgttggagaagatactgccggagaagcccgtatcccagtcccctgtttcctccgccacctgtttcacttcacgcatcagccggttcgcatcctgcacgccgtaaaagtcgaacgggacatactcgccgttacgtccggaagtaatacttttcaagtcttcggcgggagctacgttgatcaattcccgaagcgggataaaatcgacattcccacggttgtccggttgcgtctgcaccagtgtttcctgcaacacctcgttcacagtcttttcatccccggcaatgttgatcggcaaatactgctgataagagtgcagcatcgtcacactgttttcccggaaagccgttttcagtacccgatacagttcgttgtaggaaacacggtagagcaagagtttctctttgctgatactcagattcaactggttttcgaaggcgatacctgtcggattgattccggtttttcgtcccagttcctgttcaacgctacggattgcttccgctttgggggcttccgctttattacgggtgtaaaattccgccaccacatccggttcacccgtcacaaagagtttctcaaataccgtttccggcggagagaaagaaatgacagagagcggataacgttccttcagtttccggtataccgcctgttccaaagaggcaatagcattggaagtctccgtacggaaataaagttccgcttcggaagaagacagttcccgttcccgattgagaatgaaatcctgtctgccgatagaggctgtttgctccagtacttcatctttcagttccttgaaaagttcatccacccgtcgtttgttttcatccacatggatattctcattccattctatccgggcgatcagttcattttcctcgatatcgggcatccgttctttgtctataaagaaaaagaagaatacgcaaagcggaatggaaatcacacagaacagtacactgaacgttttatggcgaaatacccagtcaacacccgcatcatagaagcggtccagcgtgtgatccttgatcgggttattaaatttgaaagaaagccacttccatttccgggtgcggacacctgtccggtaaaccagcagataaagtacgggaagcagcatgataccggtgagataagacaccatcagtcctacagtgacagaaaaagcctgatcaaagaaaatagcgcctgcaataccgctcataaaaatcagcggggcaaagacagcaatagtcgtcagagaagagctcagcatgggggtgaccacttcactggttcccgtcacacaggcacggcgcaaggagtatccccgttcacggtattgcgatatattctcagtcacaataatcgaactgtcaatcatcattcccaatgccaggatcaatccggcaagagaaatgatattgagagacatattgcaaaggtagaaaaagacaaagctgatcacgatggacaccaccatactgagtccgataaccaaaggagactttacatctcccagaaacagaaccgctaccagacaaataaagagaaagcccagggagagattctgttgcagattagagatggtgtagtccagcagttccgtctgattacggctgatgctgaaatcgatctccgggtatactaactgaaaataggtcatcgtgcctaccagcgcctgcttcatcttatccatgttctcatccgcctgtttgatgacggcaaggctcaccgcccgtttgccattggacagggatactcctttttcctttacaggtacgacgcttactttgcagaagtcttttaactgtacgatgcggtcgcccttacgcagatagatattttccacatcctccgccgtacgcagcaatgtcgagaatttaatattatattcataatacccgtctcgcactgtcatgctgcccggttccacattattagaagataaagccgattcgatatctccaatggagagtcccatcatggcgagcttgtccttgtcgggtacaatttgtacctgtcgttccaaaattccggtcacgtccaccatggcaacttcttcaagctgctctatcctgcgcttgatgacagactcggcaaactcacacaattcaaggaaggattgttgttccgtagctccgtaagcactgtcattcttcagtgtcagattcagatagaatacgggaatatccgttgcactcgctttgattaccttcgggcgttccgcttctttcggaagatagttcatggcggcatctatcttctcatttacctcgataaaggcaaggtccgtattcgttccatattcaaatgacaagcggataatgcccgccccgtctctcgattcactatggatatccttcagggtagagacctgaatcaactgcccccgcaaaggtttgacaatcgtgttttccaattcccgggcagaggtattggcagacgccacctgtaccgtaatctcaggaatagcgatattgggaagcagcgatataggtagcgtagagtacgtcaccagtccgatgatgaaacaggcggtaaaggccatcaatacggcaatagggcgctgaattaagaattttatcatagattcattatttaattcttaattcttcatttaacatagacttccgcctcatgcgccagattcagatttccggtgacaatcaccgtatctccttccagcagaccatcctcaatgcctttctgcgacttgtcggagacgacacattctgtcgcattctccagtcccgtattcacataattccacattgccttgccgtctttcagggtaaataccacttgtttgccggaacgcaatacaacggcgctcttcggaataaccagccgctctcccagcgaacggcggacacttacccttacattcattccgctgaacagttttcctcccgcatttaccaatgctttcactttcaccatgccgttggcatctaccaatggatttatctctgatacactgccttcaaacgcatctcctccggcataaggagtaattaccactttatctcccatcctgataaaagcaagttcattttccagtaccgtgaaatcagcttccattcctttggaatcgataatagtacagaatgcttcagaagtatttgccggattataaggcttcgaaaataaattggctaccacaccgtcaaaaggagcaatcaacgtagcatgctccatctctcttttcgccagttcatactgggatttcgactgttcatacccgctttttactttggcgattttcattgtttcggcagggactttactaaagtcgtcaggagaatatccctgcccgatcagtacgtctttcaattccagttcggctttcagcaaagcatcttccgactgggataatttctgttccaggcggaatttatccagatcagccagtttctgccctttctgtacacggtcgccattcttcacatagatatgagcgatgacttcaccggtttcaaaacgcagatcggctttgccacgggcactgattttgccgttactcaccagttcgtgattaaagtcacgcttcttcaatatctgaacagctacttcattcttcgtatccggaaggactgtggagacgcctttctccgattcatctgcagtattcttcttgtcggaacaagagagcgtcatcatacatgcaaggcacaataaaatccatgtagaattatttttcatcgtatttattggtttgtttattctaattatctcacatataaattcttatatattgtatgtaaatctgtatcatgtttgccaaatttagacaaaaatatctattaatcaagtttgtacagtcattttttttcttcacccatttattttagtagttttacttcttctctcatctcccttatcgctgtcgattgtacttttggttcctttgtcaatacaatctgaaccgcctgttttaatttctccgggtgccgatattccggttccgcataaagctttgccaacaagtaatatggataaattcgtcccggaagccgatgagtagatcgtatgaaatattcttcggctttctcatattctcctgtagcctgataattctttcctattatgttcagaatcatagggtcacaactatgcgccattgcctctttcagtattgttgtagaactattatattctttcaacttatgtaaagaatgtccatattcaaacaaaaatgctcccctatcattcaattccggataaattttctcatacccttctttggctaaacgaaatgcgcctatattatagtgcattttatacctaaaccattcttcacaagcattatactgattatatttccaatagtaacttcccaataaagcaatcattataataaagaacaatatttgtaaccgtgaagaacccactacacaagcagccaataaaaaatagaatgctatagcaaatccgggtatttgcattggataagatgaaaatgcaaatactaaaacagaaatcaaaccagcacatgcacttagtcttttctctgttattcctatccaaaggcaaaaaacaataatcaataacacaaccaatagaaataagactccatattctacagctatttgcagatattcattaaaagcgtattcaggacttccagctactaattcttctgtagatgtaaactctttttgggagaaatatttttcctgagccattccataagccgatgcaaagtttccagtaccatgtccaaggagaggtttttccacaatagccataacactcactttccaaattaacagacgtccattagccgaatctacttttaattgaaaaagagcataaccaactattatcaataccattcccccggcaataatagccggaaatactcttttcttatattttcggcctatcttccttaaactagttccccatgaacgatatgtagcatatacccatatcccagaaatcgcaacagccatccatgccgaacgactcatacctgccggtaaaacacaaagaattaatagcaagactcccaaagccatacaatatttaccttgctctacccaagtacgtttcttcacctttcttaaattcaaccattcattcaaacaaataggaaataccattgctaagtatccggaataaggccccggattgtagaaagaacctgtaagcgcatataatgaatgattagaaacagctaaaccgtatatctgccttaatccccaaacagcttcaaccccacctaatataataagagaccaaacgactgataaataaaaagtatttccctttttatctaaacataaagaaataagactacatattacaaatacaatagtcacacgccccaaatatagcttctgatatgccatatctccaaccgcaatagtataagatgaaacagtcacaacacttaaaagcgcaatgactccaaacagcattaataaatgaacgatatatttattctgtaataacatcttctatcatctcccatctttatttgatcttcattaaaatccgttcccaacgtatctgatcggtatatttttcttttgagttccaaatacgggtagctttacctacaatatattcttccgacaacattccccaataacgggaatcttgtgaattcgccaaattatcaccagatacaaaataatagttcttttcaaaacggtattgatgaataaggctatcaccaataagcacctatccttcttttagttctattttttcttttgttcccatgctatcagttgtctatataaaaaatataagattaattgaatctaatccctctattatctccttctagctaataattgtaatccacaaatatgtaccacattacatcggcataattcaatatagagtaggtaaatcattctcttgtataatttgtcctcaaagccatatatcgaaacggcaggttcgaagctcgttatcaggtttttatgatacctaaagtcccttccactagaacaggggacgggtctgtaacttgtatccctatgccatttctcaattttttattaaagcagaacgactgtacaaatcaactctcttcctatacaatattttgacgtttactcaagaatggcacatttctttaaaatcaaagggacgttgttttgaagaaacgtgccattcttgagtctatatcagtataattcaatattaataaatcataaagtcacctccatcatttcgaaaagaatgtaaactaatcatcaatagaaagacatttcttaataaagtcatctaattgttttttatcttgtgatatttcgaatatacacgcatctcttattcgacaattattatcaacaattatcataacaggagtcggtatatacctcaattcttttcttattaaatcattcttgtctttataaataaaccctctatatgaattccttttttgagtagacgtaacttcatgaaacatacttacaattacttttacatattctctttttttactattatcaatgaggtttactatttcaaagcctttatctatgcatgtctcacagtcataataattaaaaatatatacaattacacacttttcagtctcccccactacagaatccaaagaaagaatttgccttcctttcagcctatcaacatcctgattcaacaaagatgaaatattttgctctaccattttattttttttattgctattacaattaggaaacaaacaaagaaaaaaactaaaaaggcatattaatcttatatatttccatagcacactgctcataattcattgcataaatataattttcattagcacaaatcgtattatatattttaccaggcaaacggcaaacataagatggggttaaagccgagtctagaacaagaatagtatttacttcatatcctttttcccaagtagcacacaacaaatataatttatctttattccaataagcatcgcataaatatgtaaaaaagcttctagaagatatatttttctgctttatataagatagattatttttaataatattaatatctgagagatcacatgaagcaagtagtctattttcatgcaaatcatatttttctattacaggataacttggacatatagcatacaaacaatcttcaccttttactagatggcgttgattacgtaatatattcatatctgtatgttcagttatagaaaatacctccccacaaaattgtatgtcgccactatttatacggtcccaatttctttcagtcttaacataacatgaactatcagtcattgttgttgcataaatagtgtcattttctataaagaaacgaaattcattacatgttggaaccgatactgattctatgaatcccttcccatcataaaatttcaaagccattgaaccagcatctaagataccaatagtatccttctgtacataaaatcctgttggcgataccacttctttagggccttctccaaatttgccaacagtatagaaagtatctttatcaatatccagaatagcgacatcagcccttgacggatcaaacatataaagtttaccatcctcaaaatataagcatgaaatactcttaaaaaaagttgagtcaggataagttctaaaagaggaaaataaagaacattcaagttccattaagtttttttcctctttgcaactcatgatattaaacacaaataaaagagtgcaaatacacaatataatcagcctcatttttctatttatttagcaatatgttttcaatccgtcacattcaacccatcgcttctcttttattatgacagtgccactcttatcaatccctcgatgacatttttcagttcccgtacacttaacttcaccgtctctttggcccgacgaatttatacagtcataactaatagagcatgtagctgttccggtctcaggagttcccaaagcttcaatattaactatatccattaaactaaaaagagaattagtcgagcttttgctacaataagcccatgaatacacactaaaaacagcaacacaaatagctagcaatacatttacttttttcataacactaatttttaaataataactataatataaatacatatttttcaataaaaaaacagg

SEQ ID NO: 4835 - DNA, 206 bp, Unknown
  gut microbiota DNA sequence
tatcattatctgtcatttgtttgatgttgtcatttgatttacagtgtattaatgtctgaggtgtcaattcttaacgattgatatttcagacattaataattgataaatcatcctttaatagttgataactccgctgtttttgagtgataagtgatttattgtttcttggaagagtaggttaatcgaacagttggtgcggtcaagtt

SEQ ID NO: 4836 - DNA, 692 bp, Unknown
  gut microbiota DNA sequence
aaaatgaattatactgatcgttgcggagtctgcaaagatatagcaggtacactgatttcgttcttgcgcatggctggtttcgaagcctatcctgccatgacgatggcaggcagtcgggtagaaagtattcctgccgaccattttaatcattgtgtggcagtggtgaaactgagcaatggaacatatatgcctcttgatccgacatgggttcctttctgccgcgagttatggagcagtgccgaacagcagcagaactatctgccgggtgtacccgaaggttctgatttgtgtatcactccggtttcggctcccgaaaaccattatgtacgtatcaaagccgacaaccgcttggaagcagatggtacactacgcggtacttttacccttacagccgaaggacagagtgacagcaatatccgtcgcatctttaccaccggctttcagagcgaatggaaaagcacgatggaacgtcagctgttggccatctctcccaaagccagattgttgagcgtagactatggaaaaaatcccaaagactatcaggctgcacctattaaaatcacttttcgttatgaaatacccgattatgccttgaaaggagagggcgagatgtttttccgtccgatggtgatgaataacctttataatcaggtacgttcttatatgtggatcgatacttcggtagaaaaccg

SEQ ID NO: 4837 - DNA, 300 bp, Unknown
  gut microbiota DNA sequence
ggttcctgcgcaaaaagcgataacgataagattgacaggataaacgctgaacataaagtagtaattctcatcatatttgtctatggtttaggctgcaaagctacattattttgtttagaaatcataggattcttttaaaattgcattttttaataaaattgtggagacgaaagactgtaatcttcctcttttttttataattttgcggtttttaagttcgtaagaatactactaagtaaacaattattaaaacagttatagctgtgggagaaacaaagtatattttcgtcaccggtggtg

SEQ ID NO: 4838 - DNA, 1501 bp, Unknown
  gut microbiota DNA sequence
catgatttataatgcgttttccctgcggtgaaataaaacacgaacacctattgttaaacacactaagtcagagtatgtgacaggcaaagaagcggtaaatcgcatctcatggaaggtactttgtcacgagaaggacgggcattgaggaaaaaagtgagagacaactcaaaaaacaatgtaagtatgtcaaaagtcaaaagtaactaaactctcctccttcgggaaggaggagagtttagttacttttgacacaccttcattcggtatgccactgattgcaagaagtttaaatagagcagagtgagactaaaattattttttctaaaggaggaaaggatgtctatttcttccggctatctatttctttaagcaattcatccacagccattttgagttgcgtgtcctctcctttcactacagtttccgggctgttggcaaccttgacatcaggttccaactgagtattttccagataactgccatccggtagacgataaccgatgataggaatcccaaataccaatgaagggtcctgcaaagtttcccaagacacacttgtcatagttcccggaacaggcatacctaccagttttccaatattctgatgcttgtacacccacggggtgccatgcgcattcgaataattggcttcacactgcaacataatagaaggcttgttccaacgacgacttggcatatcacaggcttcacgtccgcgtaccacctgagtgaaatatttctgaccgctgaaaagtatttcaatatcttcatgcagacgaccgcctccgttaaaacgggtatcgatcacaattccgtcacagttattgtattttcccagaatatccgagtaaacagtacggaaacttccatctcccatagattgaatatgaacgtatcccaaacgaccgccggaccatttctccacatcctcagcacgttgtttcacccaacgtttatataataagccattaagttgtccgcttgtgacaggttttaccacttcttcccaacgttccttattctgcgggttgtacagcgaaaccagtgttttcttccctgccttattattcaaaagatcagtgatgtccttatccggagttatttcttccccgttgattttttctataatacaccctgcctttactttggtacgggaatgatcgaacgggcctttctctacaatttcagcaatctgcataccctttccctgataattccagtcaaacaataagcccagattagaggttacatctccattgcccctcggagaatagcgtcctccggtatgcgaaacattcagttcacctaaccattcgctcagtaattctgcaaagtcatagttattatcaatatgtggcaggaatttacgataggcagctgtcatggcattccagtccactccgtgcatattaagattatagaagcgtttttgatgctgtttatatacatgatcgaacatcgcctcacgttcggctgccaaatccattttcatttcagcctg

SEQ ID NO: 4839 - DNA, 3725 bp, Unknown
  gut microbiota DNA sequence
cggcaggaatttacgataggcggctgtcatggcattccagtccactccgtgcatattaagattatagaagcgcttttgatgctgtttatatacatgatcgaacatcgcctcacgttcggctgccaaatccattttcatttcagcctgataactgataggtttcagagcatccgacttcgcgtccattttctgcatatttctgcttcccagcaagaagatatctccttttttatccagcatcagtgatgaccagccggaattaagtttatggagacgcttcgtgcctttttcacgaagattcattttccaaaggtcatacccctcttcgaaagctgaaaagtaatacagattttctccatctttggaaagaatagcactacctaaatcagaagagttaggagtcaggcgtacaatacggtcctcaataccgctgagttccacaacaatatctttcttgtctgccttgtccttttcggtatcctccttatctccttctttgtctgccttatctttttctttgtctgccttgtcctttttagactgacttccgtcctttttcttatcaccgtctttctcctttgcttttttctgctccttttcaaattctttgagcagttcgaagtcctctttactcaaacggtaacggtcgtaagcatcctgattcaagaataccagcatcacatcctgttgtgatccccaggaagcatgggcacgcataccataacgctcggtctggaacagaatggcatttccatccagtacccaacgtggagagccgctaatataaccgctgttagtcagattagtgatagtacctccctgtgcactgacaataccgatatccgaatagggatcatgacgattgccgataaactcaagcgtaaaccacttgccatcgggcgaccattcgtaatcgaatccgcctcctgtattgtaccatgtagaaccgtctgtcacctgacgtacttttttggttttcaggtcgagtaccatcaaccggttacggtcttcgataaaagccagttccttaccatccggagagtattgcgggtaagcacgttctacggttttggaggggagcaatacttcctcttcaataagagtggcgttagggaaattcgcctcttctttacgagctatcttagcggtataaagttgccagttgccggtccgctcgctggcataaaccagtgtacggttgtcgggagcaaaagatacaccggattcctttgccggagtatttgttatttgcttggttgtagcataatcggttgaagttacaaaaacatcacctcgcacaataaaagccacctgcttaccatccggagacacagaagcagaagtcgcaccctgagaaaatctgagagtagcaatctctttttcatcatcacgcacaagatcaacatttactttcttcgggcgggcattggggtcttgtgtataaagttctccgtcatacgtatagcataaagttcctttatcgctgattgacaagaaacgtaccggatgcgtgcggaaagtggtgatggctttcacttcctgcggagtgttcagggtaaagttatatacattaaatgaaccgccattgcgctcacttagaaaatagaccgaattaccatccagtgcatataccggattacggtcttctccttcccgattggtcagattggcatgtttcccggtcgaaacatcgtatagccaaatgtctcttgttatagatgaggtatggtgttttctccattcatcttcaaaacctttacggtcctgataaaggaagttttttcccgatttatcaaagcaaacccattcggcaggagtagccagcacttgttcggtacgtcctccggtaaccggaactttatataattccgtcatggctccggtaggaaaaagggcactttccgcagggtcctgaatggaggcggagaaaagtacaaatttaccatccggagtaaaagccgaaggaatctccgaggcagaatgataagtcaaccgacgtgcagttcctccatcggcagacatgataaagagatcgaagttcccattccggtcgctggcaaacgcgatttgtttaccatctggcgaccaaacaggattagcctcataagaagcttgtgttgttaattgggtagcggttcccccttgaacggggactttgtaaatgtcgcctttataacaaaagacgatttcctttccatccggtgagatacgtgcatcacgcatccacaaaggggtaatagcatagctggataatgcagtcagtaccagcgctaaagaagttataagtttcttcatatcaaattattatatattttgttcttaaatacttgtctctatttgttttcctgtatagttatagaatatcctgtcgccaaaatctttataaaaagaagcatatttatctactcccgtacaatggcagacacctatcttttgaggtaaatattcgtgcaaataatcagcaataacctgatatttggattcttctgcattatgaatatgaaatccacctaaaagcaaattacaggggagttccggaaatgccgttcgtactgtccgcaatatatttgtaatgccccggtgagaacaggcacttaaaatggaaagtccttcaggctcaaccagtaccatagctaactcgtccggaaaggtatcggggactctagaaccatcttccttttgaatccaaaatcgttcaaaatgtgtatccttcgggtctataatatccacagagggaaaaagaaatactccgggaaccagttcagtcaactcatcaataaaacgaaaacgagaaagatcaagcgagcgtgtatatttcattccattctcacgttcatccttgaatttaggaaaaaacacttcgcgtttgcagacaaccgttgcttcggcatttagttcaagaaaatggcgtagtccacccgtatggtcactgtgaccatgagataatactaaataatctactttttgcaagtcaatattcaataaccgggcattacggataaataaatcggaagctcccgtatcaaaaagtaatctgttttccggtgtctcaatatagagggaaagcccatgttctgcctgcaatttacgtccatagacacaattttctacaagagtcgttattttatagttcatgtggtttggttcttaatcaaataatacgaaataaaaagttctgctacaaaattataataattctacggcagaacaagtaatcaatcaatttaaatcgactgtaagggtaaaagattttgtttcaggcttctattgccgaattattcattttgtagtttgaatacaaataattacttttacatccatatcaaaccctttaaataaagaatcaaaatggagaaagaaacaaaaggtaaagcaaatacagttcagatacagtactatcaatctccatgcgggacattgatactcggttctttcgagaacaagctctgtatgtgtgactgggtggtgagtgaagaacgcagagcagcaatcgataaacgaatacaaaaagcgttaaatgctcagtacgcaatagaaaactctgaagtgataacgcaaacgatcagtcagctagatgagtatttttcccgtcaaaggactacgtttgatattcctctgcttcttatcgggacagagtttcaaaaaagtgtatggaatgaattattaaacattccctacggaacaacgatatcttatgctcaattatcacagagactggataatcc

SEQ ID NO: 4840 - DNA, 352 bp, Unknown
  gut microbiota DNA sequence
gtcgggacagagtttcagaaaagtgtgtggaatgaattattaaacattccctacggaacaacgatatcttatgctcaattatcacagagactggataatcctaaagctatccgtgcggtagcctcttcgaatggagcaaattctatttcaatacttattccttgtcacagggtgattggcagcgatcataaactaaccggatatgccggtggtcttgtagctaaaaagactttattggagctggaatcgaacgaaagaagattattgtaacagaatcgtctcattaaatccagacaaaaagatagtgtcactatatactcagcatagtgacaccatcctgaaaagctattat

SEQ ID NO: 4841 - DNA, 428 bp, Unknown
  gut microbiota DNA sequence
taaactaaacttctctcattaaatccagacaaaaagatagtgtcactatatactcagcatagtgacaccatcctgaaaagctattatatgatgcgggaaatatttacccaaagcgaacgtttacaccatttttcccatctcataggcttcctgcatatagggagtatcttttatttctcctaccttccaggcacctattccataaatcactcctttttcctgcggattttccagacaatcgaggaagccacggaaaccatcaatcgtacgttccatcatccccttatcattctccgccgctgcaataatgaaataaaattccttattcgttatttccgtataacgtgcacaacaacggtcaatcataatcttcatctgtccgcacatcgtatagaaataaacaggtgttgccattacgatgacatcag

SEQ ID NO: 4842 - DNA, 832 bp, Unknown
  gut microbiota DNA sequence
tccttaaacagttgcatagcttcggaagccttgttgcggtcttcttccggaaaagtagtcagccatgaagcacggcagacatcgcatccgtgaatgttggcgatcgctgcgaaacgaggttggaatccccatgcatggaaaaagtaaatccaattgatgtagggggcgacgttatgtatcttataagataaaatcatatgtttataagtgacgagttgctgtttatctgaatcttaactcctgtccacgataattctcgtcaatggttccgttatcatataacagatgaccgttcacaaatgttttttctactttccagtggaaagtatgaccttccagcgggctccatttacatttgctcaggatgcagtctgtggtaacagtccacgcactgtcgggacgaaccaaaaccagatccgcctgatatcctttccggataaatccgcgattacgtatctcatacatttgtgcaggagcatgagacatcttctctactaccttttcgatgctgaaagcgcctttgtctgccaattcgagcatactaaccaaagagaattgtatggtcggcatgccggacatggcttttaatgcacctccttctttttcgctcagtaagtgcggagcatggtcggtcgcaatagcgtcgatcagaccgctgttgactgcctcctgcaaagccttccggtcttctgccgttttgatggcaggattacatttgatgcgcgctcctaaggtctgataatcttcttcggtaaaaattagatgagacacacacgcttcggcagtaatacgcttctctgccaaaggtgctttggagaataaactcagttct

SEQ ID NO: 4843 - DNA, 246 bp, Unknown
  gut microbiota DNA sequence
atatccctcgccttaaacagccgccataataggctctacataaccgacaggcatatccacacaggcacatcccaacatattcaggcgaacggcgatcttactcttgccatccacattaaccagttcacctacaagccccgtcagggggcctttaatcacgcggaccttttcaccacgggccaaaggggcactgttcatgcttatcgattcttctgaataatcaagcatgaaacggaaacgggccat

SEQ ID NO: 4844 - DNA, 1858 bp, Unknown
  gut microbiota DNA sequence
aaactctaacgtcccatcagagtttcgatatgaatgagccttccacaactccggccatttcacccgttttatccaattcgaattttccgtatcatatccaaaccttccaataaacctaagtcctttggtgataaagtctaatttctgttctaatgtcacattcgtttgaatattattctgccaactctcattgaaacctgtttgtgtagcttgtgtatatggatttatattatcttcttgtgcactccaagaagggatctttccatttgaatacgtcaccggcatcattataggattataccccattaacgttgtccatatagcatcggtacctactcccggatcattctgttgacgtaatgatccagaaacaccgactttcaaaagagtcgtttttgttatatcaatatctacattcatacggtaggtccatttccgaaaattcgcattggtattatagtctttcaatgatttatcagtcttgtatatgccctgttgattttgataactacctcctacataataccgagctgttttacctccaccagtcatatttaatgatacacgggaactataagatatatcacgcaacattaaatccatccaatccacatctggatataaatctggatcaagtcctaaacggaaaacttctaattcctccggctgatagagcggttcttcattacgtgccaattttgcctcatttgccatggaagcatatgtatatccatctacaaactctggaagtttagtaggcatagatgcaaatccctccacttttgcattaatattaattttaccttctttaccacgacgagtattaatcaaaaccacaccattagctcctttactaccataaattgcagtagcagaagcatctttcaatacactaaaagattctacatcctccacattgacttcattcaaatctcgttcaaaaccatcaactaaaaccagcgctgaactattagcaccaaatgtagaaatactgcgtatccagaattcagaaacagtacccgggcgtccattactctgcatagcctgaattcccggcacaactccagctaaggcatctgccattgatgtactaggggttgttttcagttcttctatatcaacatttgtaatagcacccgtcaccgtaagttttttttgtgtgccggttccggtaataaccacttcgtcaatagctgtagcactagattccttcattacaacattaactacccgctgttcttttaccaatacctccaacttctcataaccgatataggaaaacacgattttatgatatggaggtgtttttaacgaatatctgccatttatatccgtaatagctcccaaaccaggcatatctgcaacagatacatttacaccgatcataggttctttgttcgtatcagtcacgatacctgttactacaatattctcttgtgcaaaaacaaagccagagaatcctagcaacaacaaacatgttaataaaaaatgtttcattatattatgtgtgtttatcattattattcctctaaagcaatcttacgtatgcgatgattattagaatcccccactaagagatatcccctcacttcatcgtatacaatgctcgctggataattaaaacgagcctgtgtacgcaaatctccgtcattgaatcctttcgtaccatccccattcggacgtccggcatacaaagtcacttttcccgccggtgtcataactcgaacacaatgattctgtttatctacgaaataaaaatcatactcatctgtttgtcccacataatcaggatttttaacaaagcatccttgctggggttggttcaaacgaaccatacttccgactccatcctcacaac

SEQ ID NO: 4845 - DNA, 1001 bp, Unknown
  gut microbiota DNA sequence
atgtctatttctcaccataatatacatatagttccctgtcggatgcattacaacatataaatcaagactagcacgatacatttgcaagaaacttggattatattctcctgtttctggatcatatctgccaatccaccctttatcatatctagatgtatatatttctccattcacgggatgaggaatcgccgccctacatccccgagcataaagagcttttgtctgtgttgtaaaatttgattcaggggaaaagaagaatataccatttttattatctgtcgttatattccgaacaacaattaactctccactattactgaaactcaaaatattacattctccagcagcctcacctgtaaacgcgatagttcctaatgttttttcctcaaaatcaacaacacgatgtgtttttgccccaccacaaacatacaatttatccttattattagggtcgaaaaccatccattccattttttctagaccaccacaatcgccccatggaccatcttttacatcaaaattattattctcatctgctatctctggatctgtttctcctataagtgttgtcaccaacatttttttcttatagacaaaaacatcttctgcttcagcataggctatttcctccccctcatcacttaaaatactcacttcaatatctccatcataagcctttgctggaacgaaacaatacaaattgttatttttgaccccaatcacgcttgctttttgtccaccaatcgttacctttactttagagacatcgtttccaaaattatctccatacaatactagacggctccccaagcccccttctttaggagtaaaatcagaaataactacaggtttacttgggtcaaagggctgttctcctccttcgtcatcatctttgcaactgacgaaacagaaactaaccaatgccagcaatccccacaaaaaatgccaaacatgattctttgttttcattttcataatacattgattttaaatgttaataa

SEQ ID NO: 4846 - DNA, 698 bp, Unknown
  gut microbiota DNA sequence
tattcgtattgttcttcactgacagtgaatagtcggttgtaccgagcttcgatatacgcccgacataatttatcgaacgcttctctatcttcgggagtattaactggaaatacattagcaaaacctcgtgaacggcttttagccatcgggcccaacacttccaatttatgagatttagggcgagtgccactatggacaagcatatacgtcttgtagtaacgttcgcaagcttgatgtaaaaagaatgaacctaatttatattctttttccacttgagccaattttccatgtcttaataatccctctgccatgtcgaaacatcctgcatattcttcctccgcatattgctttatttcccgatatggcaacttctccggtttgccaatctgaaacgtgccgtcatcatataacagaatgccgtctcttaaggcctcataaaagaaataatgtttccttcggatagcccgattaaaagttgtcgtgctttcaacaatgatctgaggtggtgcaggatgtctccttccttccattcgtttatcatacctgggaacaacaaaggcgttcgcatgattctccgctttaatagcatcgcccgtatcacatatcaccagaatatcaaggtcgctttggtagtaagtaagtccacctcgttcgtcgtatgtttcatcccaaatgacatattctccacgtgcataact

SEQ ID NO: 4847 - DNA, 971 bp, Unknown
  gut microbiota DNA sequence
aaagtgaaacgcttgaagtcaacaatcttcagttcaggatcagcagcagccaacacttctcttacagtcttcttagcgtccatgatatcttcttggttcagcaggcaaacttctttcaagaacttagccagacgacccttagcgatgttctgaatcatttgttcaggcagatgtgcagccttttcagcagaaacagtagcaatgatttcttttgctttcgctacatcttcagctgtaatccaacctttagccatattgctttccatgtggtcttcactgtctacatgagccgggttgatgttagctttcttcagagcagcttctacagccttctgtacctgttcagcctttgtcttttcgatagctacttcgatttctttttgcttcacttcttcagaaacaccatcctcatcaatagcaatcggattcatggcagcaatctgcatagctacttgcttagccaactgctcgtcaacgttcttgttaaaagcaacaatcgtacaaagaccatttctgttcatgtggttgtaaacagcagtgcttgcgccttctacagtcatgtaaccatcaagttccattttctcacctgtgataccgctacggtcagtcactgcatcctgtacagtaccgttacccatcggcaatgcttttacttcgtccaatgtcttgcatttgttagccacagcaagatcaagaatatcctgagtcagtttcacaaagtcagcattctgagctacgaagtcagtttcacacttcaaagcaatgacaacggcatagtcaccggtagtcttagccagaacgcaaccttcagaagcctcacgttcagaacgcttagcagcaacagcttgtcctttcttacggataatctccattgccttgtcgtaatcgccatcagcctctgttaatgcattcttgcaatccatcataccagctccggtcattttgcgcagcttggtaatatcagccatagt

SEQ ID NO: 4848 - DNA, 149 bp, Unknown
  gut microbiota DNA sequence
aggttgacaggcccgatcttctgaatattgatggtgccttcaggagagatctgctggcggatcgtgttctggctggcaccccagatatcgatgatgacttcatcaccgggacccagacggtaattggcaggagtggcaaggttgacact

SEQ ID NO: 4849 - DNA, 151 bp, Unknown
  gut microbiota DNA sequence
aaacgctggaagagttctcgctggagaagaacatcacaggtatgcggctcaaagcacgtgccactggaaacttatcaacgaccaatctgaagctcgacagccaattgaagcagcaggcggagtatcagaaaccgacaacgcccggaggagg

SEQ ID NO: 4850 - DNA, 185 bp, Unknown
  gut microbiota DNA sequence
tcgagcatctcctgtgcgctgtccagaacctcaacgctcatgggagtcttcgtcttgacacgattgtagcgcagcacgttgctatcaagagcggatttctccaaatggctcagatcggcgaaagacatcccgcagaactggaacatcagagcggcgatagcctgggtacggcggagacggtcaga

SEQ ID NO: 4851 - DNA, 28695 bp, Unknown
  gut microbiota DNA sequence
gcaactctacttttcaaatatacacttatattttgttgtgatatttaatactgcaaatgtaaatgtgtcaaaagcaactaaactctcctccttcctgaaggaggggaatttagttgcttttgacacatcttcttttctgtttcttatttcagtaaatgtcccccttccctgtgttttgatttactacttaatctgttaattattagaatgataataacagatgttcttttctctaattgtccccctctttctttccttgttttataagccgattgcctatctttgcggcaggtctttaaataataaattaaaaagagaaaactactttatgaaacacatttcaaacttcctcagatcaaaaagctggaacgtatttttgtttttatatcttgctcttcctttgtttgcgcaaaaggaatataagatcgatcaggtatccgttgtcaatgtaggcgatggcagactgttgtttcgggaactgaaaacggaaaaagcattgaatggcgaacatcgcatcatagatggttatcattccgcctatgtgctggcatcttttaaagatggtttttatgatggcggatacaaagaatatgtggacaatatattaataacggaaggaagttataaagaagggcggaaggatggcctcttcaagattaactccaagtttgacggtaagctgaaagaagaaaagtcctataaggaaggtaagctggacggtacgagcaaaagttactttactaccggaaaagtggaaagtgaaagaaacttccggatggggaaagagcacgggaagcaactgtcgtacgaatctgacggtactttgcggaaagagcataattacaaggacgggaagcaggtaggcaaacagtatacttttctgaaaggtacatatgatttgtatgagaccgtttatttcaatgaagaaggtttgcaggacggtgaatattcgtccgtgtttacgtttggctcgccacgtatactgggtagttataagaatggaaagaagaatggtcggtggactacttttgctgaaagcggagatacgctgatgattgaaacctatctggatggaaaagaagatggactccatgtctcatttgccaacggaagtggggtaaggcagaaagaatattatatgaagaacgatcgtaaagacggtttataccgtgaatataatctggaaaatggtgaattgagatatgaagctacctatcaggccggcagattgcatggcaaggaacgacggctgatagtgagcaaccgctttgattattgggaaacttctacctatgtgaacggaaggcagaacggaccgttcgaagctcgttatgtaaagaatgaccagcttcgtgaatgtggggaatataagaatggtcgccgtgtaggacgatggaaacgctacactattgatggtaaactggaaaaggaatgggatgaaaactaaccggtagatgaaaggtcagggcataaaaaaaggagcaacgccttgctccaacctttgttaaccttaaatctaatactatgaaaaacacagtgcaaagatacggacttctgtgaaatctgcaaattatccaagtaaaacgctatgttttataacattgattaagtgtttgttttacgctttatacttttgttaatactttccgatggtctgaaagaggactgctttccttctttttagaataataaatagctgaagttagagaactttacagtattatttcttatttttgttcttaattggattacagaaagaactacgaaatgatgagatggatgaagacgatgagatatctgaagtggatgctggtgctgttttgtttaatcgggatgacggcttgccggcaggatacaccccgttttcgtattggggtggctcaatgcagcgatgattcatggcgacataagatgaatgatgagattcttcgggaagcgatgttttataatggtgtttcggtggaaatccgttcggcaggggatgataacagtaagcaggcggaagatgtccattattttatggacgaaggagtcgatctgctgattatttccgctaacgaagctgctcctatgactccgattgtagaagaagcttatcagaaaggcatccccgttattcttgtagaccggaagattctttcggataaatatactgcctatatcggagccgataattatgaaattggtcgttcggtaggaaactatattgcctccagtctgaaagggaagggaaatatagtagaactgacaggattgagcggttcgactcctgcaatggaacggcatcagggatttatggctgccatcagtaaattcccggatataaagctgattgataaagcggatgctgcttgggaacgtggtccggcagagatagaaatggatagtatgcttcggaggcatcctaagattgatgctgtgtatgcccataatgaccgtatcgctccgggtgcctatcaggcagcaaagatggcagggcgggagaaggaaatgatttttgtcggcatagatgccttgccgggtaagggaaacggactggaactggttctggacagtgtgctggatgccacctttatctatccgaccaatggtgataaggtactgcaactggctatggatattctggagaagaaaccctatcccaaagaaacggtgatgaataccgctgttgtggaccgtaccaacgcacacgtcatgcagttgcagaccacacacatttccgaactcgacaaaaagattgaaacgctcaacggacgtatcggtggctatctctctcaggtagctacacaacaggtcgttttatacggcagtctgattatccttttattggtagccggcttattattggtcgtttataaatcactccgctcaaagaatcgcttgaataaagaactttttaagcagaagcaacaattggaagagcaacgtgacaaactggaagaacagcgtgaccaattgatacaactttctcatcaactggaagaagctactcatgccaagctggtattcttcaccaatatttctcacgacttccgtactccgttgacattggttgccgatccggtagaacatttgttggcggacaagacactgagcggagatcagcaccggatgctcatgctgattcagcggaatgtgaacatccttctgcgtctggtcaatcagattctggatttccgtaaatatgaaaacggcaagatggaatatactccggttacggtggatgtcctttcttctttcgaaggatggaatgagtcttttcaggcggcagcccgtaagaagcatatccatttttcttttgatagtatgccggatacggattatcatacactggcagacatggagaagctggaacgtatttatttcaatctcctgtccaatgcctttaagtttacaccggaaaacgggaaaatagccatccgtctgtcttcccttagtaaagaggacaagcgatggatacgtttcacggtggcaaataccggttccatgatttctgccgaacatatccgcaatgtattcgaccgtttctataagatcgatatgcaccataccggttcgggaatcggactggcattggtaaaagccttcgtagaaatgcacggtggtatgatctctgtagagagcgatgagaaacagggcacggtctttaccgttgaactgcctgtacagtcttgcgaggctgttgctgccgaaccggataccacccttgtttctgcggattcccgtacaacagatgttctattggcagaagaggaagaactggaaaaaggatatgactcttccaaatcgtccgtattgattattgatgataatgaggatatccgttcgtatgttcatacgctgttgcatacagactatacggtgattgaagcggcagacggctccgaaggaatccgtaaggctatgaagtatgttccggacctgatcatttctgatgtgatgatgccgggcattgatggcattgaatgttgccgccggctgaaaagtgagttacagacctgtcatattccggttattctgttgacagcgtgttcactggacgaacagcgtattcagggatatgacggtggtgcggattcttatatttcaaagccgttcagttcacagctgttgttggcacgtgtccgcaatctgattgattctcaccgtcgtctgaaacagttctttggtgacgggcagacattggcaaaagaagatgtctgcgatatggacaaggattttgtagaaagattcaagtcattgattgaagagaaaatgggagactccggtttgaatgtggaggacttgggcaaagacatgggactaagccgtgtgcagctttaccgcaagattaaatcattgactaactactctccgaatgaattgctccgtatcgcccgtttgaagaaggcagcttctttgcttgcttcttcggacatgaccgtagcggagattggttatgaagtcggtttcagttcaccttcttatttcgccaagtgctataaagagcagtttggagagagcccgacagatttcctgaaaaggaaaggatgatttcattgtgatcgtaaagagggatatatgaaagattataaagtagataaagagagcttttctgaatcctttcggaaggaagtgtacgaagtcgtatcccagatacctgtgggaaaagtatctacttatggaggtattgctttgctgttgggggcaccccaatgctcgcggatggtgggacgtgcattgaaagaagtgccggatgaattatccattccctgccatagagttgtaaattccgccggaaggctggtgcccggttgggtggaacaaaaacaactcttgctggcagaagaagtttctttcaaagctaacggatgcgttaatctgaaagaacatttgtggcacgtggatgaatgaaggatgcaaggaaggtaagccatatcatccgtatccatacaataaagaaaacccatacatgaagccataaggtcctggtaatgaaatctctgatgggtacagggacgaatatgtcgataggaacgatacataacagcacaaaacagcaccaaaatagaatcttgtctgttgcggtacgtgttggtctgctccaataccagagcatgaaacctgccaatgcgataatataggtatgcttctcggcggagtcactcagtaatactacccagcccatgagaatgcccaaagcctgggcacggaaggcaaaagacgaccatttgcggaaattccccaaaaagagcagagtcagcaagccgagcattcctatctgaagtgcacggaagtgtggcaatgtccatgctgcaatggggcgggcatagaaaaatgaatcataagctccggtggactgatgaacagcaagactatggcaccattcttcataataggggagcaaatctgcaggagctattttgattaacggtaatgcaagcaatacaatgcccattgtaacggcatagccaaagttacgccatacgtgaggatagcacagcaacaatgccagttcgaaaattccatatactttggtacatcccgaaatcatgattaacagaacagccagaaatccacggtctttttccaataacgtataggcgaataagaataaataggctaccgttatgttatactgaaatgaaagtaaactttgtcctaaaatcagtaacagaaaaaggaacatacggcatttctgctgctgggtgaattgttggggcagcgtgaagatcgccataaagaacagcgaataattgaatagattccacgcgaaaggtcccagccatgcaggcagatacgcaaacggagcgaacaataccgtgaaaactggagaataaaggaagtagcgtccgtgagcttctacaaattcagttgtgtatgggctgatgccttgccagaagaattgagtagcgtccgagaagaccataaagttttgatgccgtcctcgtataaattcgagcagagtcactataaaagcgagcaagaaacctatcatgtagagattccgccggctatagaaaaacggcattttggggttctttttactaaggaactgtacttggcttttgtcgtctagtgtggcagtacctgtttgtttttcttttgttgtgtaatgacaattatccttccccaggaaaattgtaatagccctgttgaacatataaatctagtttagttattgacgccaaatatacggtgtttaagtgaaatattcaaacttattttatatttatctgccggtttgttctattttgctgagtgataggggaatattacccggaaactttccatatcattacaaataaagccctctgtatgccccggattttgaatataatttgtatgtttaatccgttttttgtatctttgtgccagcaagatactggaacaggctgtttttatacataaaaatgctattttttgctattcgttgaaaggattatcttatcaaattctattccttttttaattactcagtctgtcaataatcattttattaattatttcgggattcattgttatttgtcccgtatttaaatcagaactttatacgatataaagaaagattcctgttatcgtttgttcttgtcttgctgtgtatattattttaataacctaaaccattttattgtatgagtaaaatagaaattaaagatctctatctggtttttggcaatgagaagcagaaggctttgaagatgttgaaagaaggtaaaacaaaaagtgaaatattgaaagcgaccggatgtacagttgcggtgaaagatgcgaatctttccattaatgaaggcgaaatattcgtcattatggggctgtccggtagtggaaagtccactttactccgctgcatcaaccgtttgatacgccctacttccggagaagtgattatcaatggaacagacatagccaaagtgtcggataaggaactgttgcagattcgccggaaagaactggctatggtctttcagaacttcggtctgcttcctcaccgttctgtcttgcataatatagctttcgggctcgaactacagggagtaaaaaagggagaacgggagcagaaagcgatggaaagcatgcaactggtggggctgaaaggctacgagaatcagatggtaagtgaactgtcgggtgggatgcagcagcgtgtcgggctggcgcgggctttggccaataatcccgaagtcctgttgatggatgaggccttctcggcactcgatcctttgatccgtgtgcagatgcaggatgaactgctgactttgcagtcgaagatgaaaaaaacgattgtctttattactcacgacctgagtgaagcgattaaattgggtgaccggattgctatcatgaaggatggagaaattgtacaaatcggtacatcggaagaaatcctgaccgaacctgccaacgcttatgtagaacgatttgtggagaatgtagatcgaagcaagattataacagcttcctctgttatggtagataaacccatagtggcacgtttgaagaaagaaggcccggaggtgctgatccgtaagatgcgcgaacggaatctgaccgttcttccggtagtcgattccaataatctgttagtaggagaggtgcggttgaatgacttgctgaaactacgaaaagagcaaatccgctccatcgagtccgtagtaaggcatgaagttcattcagtgctgggtgatacggtgctggaagatattcttccgttgatgacaaaaacgaactcgccaatctgggtcgtaaatgagaatcgggagtttgaaggcgtagtgccactttcctcattgatcatcgaagtaacgggaaaagataaagaagaaattaatgaaatcattcaaaacgcaatagaattatgataaatatcggacaatatatagagactgccattaattggctcacagaacattttgcttccttttttgatgctctcagcatggggatcggaggattcatagacggttttcagcacgtactgtttggaatacctttttatatcacaatcgcagtgctggctgcgctcgcctggtttaagtcgggtaaggggacagccgtatttaccctcttgggtttattgcttatttacggcatgggcttttgggaagaaacgatgcagacattggcattggtactttcttccacttgtctggcattgcttttaggcgttccgttgggaatctggactgccaacagtgatcgttgtaacaagataatgcgccctgtcctcgactttatgcagacaatgcctgcctttgtctatctgattcctgccgttctattcttcggattgggaactgtgccgggggcttttgccaccatcatctttgcaatgcctcctgtggttcgtctgaccggtctgggcattcgtcaggttcctaaaaacgtagtagaagcctcccgctcttttggagctactccctggcagcttctttataaggtgcaattgcctttggcgttgcctactattctgacgggaatcaaccagacgatcatgatgtcactttcgatggtagtgattgctgccatgatttctgccggaggattgggagaaatcgtgctgaaaggtatcacccaaatgaaaatcggactcggatttgaaggcggtatcgcagtcgtgatattggcgatcgtgctggaccgcatcactcagggtatggcagataacagaaaaagtaaaaagaaataagaatcacaccaaagaaaggaataatcaatgaataagataaaaatgattgcggcaatgtttattgccggcatactcttaaccttcgtttcctgcggagacaacggaaagagtaagaagataagtatcgcttatgccaactggtcggaaggtattgcaatgacaaaccttgccaaagcgatttttgaagatcaggggtacgatgtaaagttgctgaatgccgaccttgcacctatatttacctctatctcccgtaagaaagcagacgtatttatggatgtctggatgcctgtcactatggaagattatatgaaacaatacggggataaactcgaagttatcggggatatttatgatggtgcccgtatcgggctggtggttccggattacgttacgatcaactcaatcgaagaactgaacgcggaaaaggaacgtttctccggtcagattgtcggtattgatgccggagccggtattatgaaagctaccgatcaggccatcaaagactatggattggattataaactgatgacttcgagcggacctgccatgactgcttccctaaagaaagcgattgataagaaagactggattgtcgtgacgggatggacgcctcactggatgttcgaccgtttcaagctgaaagttcttcaggacccgaagctgatatatggaaatacggaatccattcataccatagcatggaaaggttttagcgagaaagacccttttgctgccgaacttttgggcaacattcgtctgacagatgcggaaatcagctccttaatgactgctctggaagaggcgcagacaacggaaagacaggctgcccgtcaatggatggaagaacatcaggaactggtgaacagttggattcctgagaaagattgatatgcaaacactacttcaaccatcccgccattctttctttaccatagaagtagtagaaaagtagtcccagccagctggtaagaacgattaatacaatcgctataagtcttttctctacagccgcatttatattccagatctctatggcagctctgaaagtcagtatcaaaccgataatccaaataacaaatccgatcatatctttagagttttaatgaatatcttcgtgagaagtaatcgttacttctaagatataaacaaaaaaggcaggaatctgtttccaggattcctgccttttattatgtacaaagtatttctacttattattcagctgtatcagctccccagttttctctggcaagacgtttgtagctgttgtaacgccatttagcgttttcttcagcagctttaaacagttcttcagcttcagcaggatattgtttcattacagaagcgtaacgaacttcacccttcaagaaaccttggaagtcttcccagttaggttctttgctatccagttggaacggattcttgccttcttcttccaaagcagggttgtaacgccacaagtgccagtaaccgcacttaacagccttttcttcttcttcctggctcttacccataccggctttcagaccgtggttgatacatggagcgtaagcgatgatcagtgatggtcccggatatgcttcagcttcacggatagctttcagagtctgagcctggtcagcacccatagcaatctgagcaacatatacataaccgtaagtagtagccatcagaccgaggtctttcttacgtacacgcttacctgcagcagcaaacttagcgatagcgcctaccggagtagctttagaagactgaccacctgtgttagagtaaacctcagtatccaatacaaggatgttaacgtccttaccggaagcgattacatggtcaagaccaccgtaaccgatatcataagaagcaccgtcaccaccgatgatccattggctgcgtttaacaagatattgttgcagatcagcgatttgcttgcagtggttgcatttatctttagcagcttctaccatcggaatgatcttttcggccagttccttagtcttttctgcatccagcatattgttgatccattcagcaaatacttctttgtattcagccgggcagcaatcagaagcgatagcttcgttcatcactttcaccagacgggcacgcatcttttcgttagccagttccatacccagaccaaattcacagaagtcttcgaacaaggagttagcccatgcaggaccgtgacccttttcgttcatagtgtacggagtagaaggaactgaaccggagtagatagaagaacatcctgtagcgttagcaaccatttcacggtcaccgaacaactgagaaatcagtttcacgtacggagtttcaccacaaccggagcaagcgcctgagaactcaaacaacggagttgcgaactgagagttcttcacgttagccttgatgtctaccaggtgttgtttgctcttcacgttttcagcgcagtaagtccagttatcagcttcggccaactggctttcaaggtgtttcatggtcaatgccttaccacccttcttcggattacccggacagatgtcggcacagttaccgcaacccagacagtcgagaacgtctacctgaatacggaatgtcataccatcgaatgctttacctacagctttcagttgctcgaacttagcacccttctgctcttcagcatcgagtacgaacggacggatagaagcgtgaggacaaacgtaagcacacttgttacactgaatacagttttcagcattccattcgggaacgaatgcagctacaccacgtttttcgtatttggaagtaccttgataccaagtaccgtcttcgatacccttgaatgcagataccggcagcaagtcaccgtcctgtgcattgatcggacgaactacttcgttgatgaaagcaggatcattgttttctgcttttgcatcatccggcaggttagcccaagcaggatcgacagtcagagtcttgtattcaccaccgcggtctacagcagcgtagttcttgttaacaacgtcttcacccttcttgccgtaagacttaacgatgaatttcttcatctgttcaacagcttgatctacagggattacgcctgtgatacggaagaatgcagactgaaggattgtattggtacggttgcccaaaccaatttccattgcaatctgagttgcgttgatatagtatacagagatgttgttctgtgcaaagtatttcttcaccttgttaggcaggttcttagccagttcttcgccttcccagatggtgttcagcaagaaagaaccgttcttacgcaaaccacgtgttacgtcgtacatgtgcaggtaagcctgaacgtgacaagcaacgaagttcggagtatttaccaagtaagtagaacggatcggagtatcaccgaaacgcaagtgagaacaagtgaaaccacccgacttcttggagtcgtaagagaagtaagcctgacagtgtttgtcggtgttgtcaccgataatcttaacagagttcttgttggcacctactgtaccgtcagcacccagaccgtagaatttagcttcgaacataccttcaccgcccagagcgatttcttctttctgaggaagagaagtgaacgtaacgtcgtctacgataccgatagtgaagtggttcttcggcattggcatagccaagttttcgaatacagagatgatctgtgccggagtggtatcttttgaacccagaccgtagcgaccgccaacgataacaggagcattttctgcgccatagaagcagtctttaacgtcaaggtaaagaggttcgccgttagcacccggttcttttgtacggtcaagcactgcgatgctctttgcagtcttgggtacagcagccaggaagtgtttagcagagaacggacgatacaagtgtacggcaaccatacctactttttcgccgtttgctaccaagtggtcgatagcttcgcgggcagcttcagttacagaacccattgcgataattacgcgttctgcatcttctgcaccgtagtaatcgaacaaaccgtatttgcggcctgtgatcttggaaatttcgttcatgtattcttctacgatagcaggaactgcttcatagtagttattgcatgattcacgatgttggaagaagtggtcggggttttcagccataccacgggcaaccggcttcatcggattcagtgcacgggcacggaattcagccaaagcttcctggtcgatcagcggagcgaggtcgtcgttttccaacatttcgatcttctggatttcgtgagaagtacggaaaccatcgaagaagttcatgaacggaacgcgtgatttgatagtagccagatgagcaacacctgccaaatccataacttcctgtacagaaccttctgccaacatagcgaagccggtttgacgagctgacattacgtcctgatggtcaccgaagatacacaatgcgtgagaagccagtgtacgagcagaaacgtggaatacacaaggcaagaattcaccggcaatcttgtacatgttagggatcatcaaaagaagaccctgagaagcagtgtaagtagtagtcaatgcaccagcctgaagagaaccgtgaactgcaccggcagcaccaccttcagattgcatttcctgtaccaatactgtttcgccgaagatgttcttacgtcctgcggcagcccattcgtctacgtactcagccatagtcgaagaaggagtgatggggtagatagctgctacttcagagaacatatacgagatatgtgctgcagcttggttaccatcacatgtgatgaatttcttctgtttagtcataactaaattaaatatttaagtaaataaatctttttagtataagaatccgaacatccaaagaggtatttggttgccgcggcctatctcagccttttgcaacgcatacgtcacgtccgggttattctttatttttgtaccttccgcacaaattttgaacggcatcacttcgtctaccatgaaagagacgtttttatctcctttatgtaccttatggtctttccataaagtgttaacgaagaacgtgtcgagtacatcctgttcttccactttcaccggataaatggagtacatcaggttagagttgtgcatcataatctttgacggtttctttgggaattcttctcctttcgggtaaaccagattaatcagacgcgcgtctgccagatacttgatatagttcattaccgtagcgcgggatgtctgtacgtcacttgccagttggctcacgttcggagctttcggtccgtccacagccaacaaatatagtaatttttttatctttgaaagatatttcagctcaatttgtttgatcagcaagatatccacttctaccatcatgttcattgttttcagcagattctccgagaaattacgtttttcaaggaagaaagggtagaaaccatgatgcaggtaatcctgaaaataatccagcggtcgtactttggaaagtactcctttggctatctgttcatgtgtactgaggatttcttcgaggctgtatgcccggaatttcattcctgtctgcaggttcagaaattcacggaaagagaatccgcgcaggttataacttttcgcaatgtcacgcaattcgaggttttcctctttgagtcgcatgacggaagaaccggtgaagacaatcttcaggctggggaaacggtcatagcacattcgtagctctttgctccattcgggatgtttgaacacctggtcgatcagcagtacttttccgccacgtttctgaaactcgttggcgaagtcaacaaggctgtgaccggagaaataaaagttgttcatattgatgaacagacaggaacggtcggtgccgaatttctctttggcgtactgcaggaggaaagtggtttttcctacgccacgtgtccctttgataccaatcagacggtcactccagtcgatctcgtccataagatcgcggcgaacgggggcattggtgtgctcaacgaggtaggcgtgtgtgcgatagaatgattccatttcgtttctttgtttttcggctggcaaatatagtgctttttttaggatttgcaaagtagagatagcaaaaatgtgctttaatttataagtttctctttattgtgtaagttcctgattatttcctgtatatatttgcagaataatgtgttgaatccatctttgacatgacgaaaagacctgtttatatattcaatccggagcatgatatggcgttggcaagcggtgagacgaactatatggcgccggcttccgcccgacagatggcgagtgacctggcgttgcttcctatgtggtatgccgaagcgggaagtgcggtgcttgcaccgtctgcttataatgcggacttcctgaaaacaaagagtgaacttttgggcatggatgtggccttgttgacggaaccggaagtggctgacggtaaagaccggaagttctctccgtgggggtgggaccctgctttgcggaagcgtttgatgacattgggggcagatcagacggagctgccttctgcggattatatgaatattctgagagagcattcgcatcgtctgcaggcggtaaagttgttgcctgggttgcggttgaatgaatacttctgtggagaatctttttatttgagtactttggcggagtgcagtgcgttcgtcgaagggcgggaagcgtgcttgttaaaagctccgctttccggaagcgggaaaggattgaattggtgtaaaggcatatttactacttttatttccggttggtgtgcccgtgtcgctgcttctcagggtggggtggtaggcgaacctatatataataaggtggaagatttcgctatggagttttatgctgacgggagaggaagggttgtttttgccggatattcggtcttccacacgggtgggagtgggatgtatgcagggaatgacttgctgtctgacgagaagattctgcagaaactatcggcttatgtgccacaagaagaatttatcaggctgcggactcgtttggaagaagaattgtcagctttgttcggtggcttttatcatggatacttgggagtggatatgatgatttgtcattttccggatgaagcgcctgtttaccggattcatccttgtgtcgaaattaatctgcgaatgaatatgggggtggtggcatggctcttgacggatcgttatttggctgcggatgcggaaggagtttttcggattgattattatcctttagccggtcaggctttggaggaacatcggcagatgtcggcttcgttccctttgtccgtagagaataatcgggtgtgtgccggatatttgccgttagtaccggtgacgcctcaaagccggtatcgtgcgtttcttttgcttactctcccccagtgaaaaagatagtgcttttgctctcatgctctaacagttcgtctgtatccctttattcatcgatgttttagctgttagagatccagtggtagcagagtgagagcaaggacttgctctcactctgcatcgtcctgataaataccgtttttactgtgttattctttgatttacaggatgttaatatctgatatctcaactgttaacgtttgatttctcagatattaataattgagaaatcaagtattaaggactgataatttatgtattattgactgatatatgatttaatgttttcagagagagcagtactattgaagtagctgatgcgttcaatgtgattggaacatgcggttaagtcaatcaaatcaacagtagtttcagatagtttcgagcgtttggaactaaagtttcaagcgtatgaaactctagtttctcaccgatgaaactacagtttcacaccgatgaaactctggtttcaagcaatggaaactctttgaagatactgctaaattggaattggtgaacatcggaaaagtcatattgtggtaatactgtctgaaatgcctacttatctccatttatgggtgcactctcattcccgcaacggtcgatagccgttactgcaaaatacttcttggcattccaaggctggatgggtgcataaatgtaacttgtttcacgaatactttgtgcgacaatattttccgctttctttgtatctaccggatattcattggaagcataaatcacgtacatcggtttattccgttggtcattatccgtcgctggttgccagttcaattcggtatatccgttgtcgatggacgtaactttgagtgctgagggggcagacggcggaacgttatccaaccatgtcatcgggggctgtaatgccggataggcatagaagttctcaatcagttcgtcataaattccctgagtattgtccatcagatacttgacacggtaatgcccttctcctgccattttctgattacggatgaaattaatctgacgatccacttcgtcgcgtgtccacttcccttcgtcgggatggaggaaatagatgcccagccccggaataacctgtcgtccgttgctctgttcctgccagtcgagcgcgaaaggatagaaactgtttccctgaaaatacatcatgggatatatctgatcctgaataccttctccgagccatccttgcgggtcttgataaacggtatagaacgcattccaaccacgggaagaatagcgggaagtatctctgtattttcctacagggcaagtacttacctttacccacggcttcattgctttcacacctttatatatgtaccggacgatttcggaaatgttatcccgtcgccattgatccaaagtacgtcctttgctgtaacggcggaaatcgtatttgtcggggaatagaggagcattctccggatagcgcaggtagtcgaaatgcactccgtctatatcatagcgctccaccacttcacgaacgagtctcatgagatactctttcgtagcaggatgccccggattaaggaaatattcatttttataaggcacgcatatatctttcactcgcttggtgacagattgtttgccgagagaagcgacgtgctttttgttgcctagcggaatagtcaccatccacgcatgacattccatcccccgcttgtggcattccccaatcgcaaaagccaacggatcatatcccggatttcctccgacttttccggtcaggatagaattgaacggttcgatggaagaaggatacagcacatctccgcgtgtacgggtctgaaacaggacagtattgaagttggcagctttcagtttatcaaggatatccaccaattcttccttttgcttgcggatgccctgaggagtcgtggcccgtgtacggggccagtccagaccatatacagccgtaatccatgctgcacgaacttcgtgcttgggttgcgccttagccggaaggataagaaacaaaagtgaaagaatgaaaatagttcggtgcatattattcccttttagatgctaaatctctgcaaagctagcaaaaatgtccgtaaattgattattccttttttatttaatgctatttgacagaaaattactgattctcttttagtggtatctgcattcttagccgtcttttaataaggtacgaaatataaaatattaatataacaagataataaacaatgaaaaagctactatctgtgtcgctctgtcttttgtttgcggcgagtctgactgcccagacgggaaagattagagttgctactgttggaaacagtatcaccgggggaacgaatgattatggttattacgcgatgcctctggctgaaatgctcggtgatgattatgaagttaccaaatttggtaaaggctcttccggggtatttataaaattaagagaagatgcgactactcccgaaaatcctaatgaatatcaattcgcttacattaattctgagcaatgcgcagcggcacttgagtataaacctaatattgtcattattaagtttggtgcaaatgatgccaacaagaagaatttcgaaaaatatggtaaagagacttttaaagcagactataagaagttgatcgctaaattccaggctctttcgactaaaccggatatttatatttgtacgcctccgccgatgtattatggcgatgggggatttcttggttcatttgatgacaatgtagcaaagaattatattcagcctgccgtaagagagattgcggaggaacttaatctggtctgtgtagatctgtataatcccttgaagggacatccggaatttatgccgggtggcaacgattgggtgcatcccgaccatagagggcattatattatagcgaaggaagtgtataaggcgataacgggtgaattcgttatgaaccccggtgggataacagtggctgcttcggatatttctctttcgggttcgaaggcgaagatgaagaatggtgctattgaaaaagcgaagaacggtacgagattgtcattcgatgtacattttggctcattgcctacgtatgagaaagtagaggttgacgtgcaattgaataaaaagaaatcgggatacttggatttctatctggatactgaaacaattccttttgcctcggttgatgtttcgggtgccgactctaagaatttcactacacaatctgctcttttcgaccgtcggataaaaggcaaacataaagtgactgtacaatggagaggacaggatgccaaactgaaatcagtaactatcaaggaaaaatatatgccttatgtaaccgataatgtatctcaggtctatttggtaaacaaggcaaccggtatggtactggattgtaatccggattcgaaagtgatttctgccgcaaaatatgattcggaaaagaagtcccagttgttttgtatcgagaatttgacgtatcatatcctccgtgtcagaaatatagcgaccaaccttcatgtaatgaataatggagataaagtgattgtgggtaagccgggtgatgactggcgagtgcatgatcctaaatatgcattgttcctgacacctacggatgatgaaggctattattcattggggctgtctcctgaagcaagaattggtttgtcttctgccaacagcacagaggtggtaggcaatagaagcggccaaattgaagacttggataaatggaaaatcgtgacagctgatgaaatgaagaagcagtaattcagaccttggtgtatatattggattatctatattagcattgaaaagaaaggaggttgtatctgaacctttgccggaagaacaagaaacaaaagtgaaagaatgaaaatagttcggtgcatattctttattttttgttttaaatccctgcaaagttagcaaaagtgtcggtattgttgggctgtttcgtgagattatgttacatttgcgacagttaaaaaacaacacgccatgattacatttaccctgtgcctgctggcgttgatagcaggctatttcacgtatggacgcctgatggagcgcgtctttggtccggacgaccgtaaaacaccggctcttaccaaagccgacggagtagactatattccgttgcctacttggaaaatattcatgattcaattccttaatatcgccggactgggtccgatattcggtgcgattatgggagcgaagttcggtacttcttcttatttatggattgtattgggaagtatttttgcaggcgctgttcatgattactttgccggaatgctttctttacgtcatgggggagagagtcttcccgaaatcataggccgttatctgggactgactaccaaacagataatgcgtggatttactgttcttctgatgattctcgtcggttccgtcttcgtagccggacctgccggactattggccaagctgactccggaaagtctggacgctactttttggattgtcgtggtcttcctatattatattctggctaccctgcttccggtcgataagatcatcggtaaaatatatccgttgtttgcagtagccttgctgtttatggcagtcggtatcctggtaatgctttatgtcaatcaccctgttttgcccgaactatgggacggcttgcagaataccaatccggatgccagtgaactgccgatcttcccgattatgtttgtgagtatcgcctgtggtgccatatccggtttccatgccacgcagagtcctttaatggcccgctgcatgacttcagaacgtcatggacgtccggttttctatggtgcaatgattaccgaaggcatcgttgctttgatatgggcggcagccgctacttatttcttccatgaaaatggaatggaagaaagtaatgcttccgtgatagtagacgctatcactaaagactggctgggagctatcggtggagtgctcgccattcttggagtaattgcggctcccattacttcgggagataccgctttccgttccgcccgtctgattgtggcggactttctgggactggaacaaaaaagtatgcgccgtcgtttatacatttgtattccgatgttcgcagtagctatcggtctgcttctttatagcttgcgtgacgcggacggatttaacatgatctggcgttactttgcctgggccaaccagacattggcggtgttcaccctctgggctatcacagtctaccttgtggtagccaaaaagccttattggattacgctgatccccgccttatttatgacgagtgtttgttctacttatatatgtattgctcccgaagggctgggactctcgcatatagtttcctactgcatcggtataggatgcgtagtggtagctattgcctggttctttatctggctgggaaaacaaaaaactagaaaactatcagaatgaagaaaataaaaaaatcgacaggagttgctatcgcattccttatttatgtatcagtaacggcagcctatttgttacctcgcaacacggaagtcggccagacggagaagattcttacggtggtaggttcttacgtcatcgtactcttgctttggctcgtgctccggaagaaggaacaaatgcgtgaacgccgtaaaaaagacgaacaatctattcacttaaaaaagtaaatttatgaagaaattagctttagctatttgtctgctggtggtatcaatagctgcccaggcacaatttgagaaaggaaaaatgattcttaatccttctgtaacgggattggatttttcgtatagtaaaaacgataaggcgaagtttggtattggtgcgcaagccggtacattccttgccgacggtatcgcattgatggttaatgtcggtgctgattggtcaaaacccgtagacgaatacacattagggacaggaatgcgtttctactttaattccaccggtgtttatctgggcggaggtctcgactggaaccgcttccgttggagcggaggacatcaccagactgactgggggctaggcatcgaagccggatacgcttacttcctttcccgcaccgtaaccatcgaacccgccgtatattacaaatggcgcttcaacgatagcgacatgtcacgtttcggcgttaaggtcggattcggattctacttttaacaatggataatggataattgaaaatggataatgagctgcgctgtttactgcatagccattatccattttcaattatccattattcattaagcaagcttttctttcagaaactgccccgtatagcttgctccgcaagtggctacttcttccggggtacctaccgctacgatatttccgcctttgtctccgccttccggtccgaggtcgattacataatcggcacatttgataacgtccatattatgttcgatgatgacaatgctgtgtccccgtcggatgagtgcgtcgaaggcatccaacagcttgcggatgtcgtggaagtgcagtccggtggttggttcgtcaaaaataaacagggtcgggtcggctttctcctgactcaggtagaatgccagcttcacacgttggttttcgccaccggatagggtagaagaggactggcctaatttgatatatcccagtccgacatcctgtagtggaagcagtctttttacaattttcttctgaccatgttcggtgaagaattcgacggcttggtttactgtcatttccagtacatcatagatgttcttatcctggaatttcacttccagtgtatctgctttaaaacgtttaccgtgacaggattcgcattccagcaccaagtctgccataaactgcatttctacggtgatggttccttcgcctttacattcctcgcatcgtccgccttcgctgttaaaactgaaatgtccggctgtgtatcccatttgttttgccagaggctgttccgcccatagcttccggatttcatcataagccttgatgtaagtcaccggattggaacgggacgatttgcctattgggttttgatcgacaaattcgatatttctcaagtcacgtaggcttccaccgatagaagagaactctcccgggcggtcgctgcattcatccagttcgcgctttagtgcccgatagaagatatcccgcactaacgtactcttaccggaaccggaaacacccgtgactactgtcatcacattgagagggaactttacattcactcctttcagattgttttcgcgggcacctgtcagttcgatataattgttccacggccgacgatgttcgggaacgggaatctcctcttctcccaacagataacgtaccgtatgactattgctgccttttttcaggtctttcatatcgccctgataaacgacttctcctcccaggcggccggcatttggaccgatatcaatgatgtaatcggcggcacggattatttcttcatcgtgctctaccactaccaccgtattgccgagttcctgcaattgacgcaatacgcggatcagacggtcggtgtcacggctgtgcaaaccgatactcggctcatccagaatatagagactgccgacgaggctgcttcctaatgacgttgccaggttgatacgctggctttctccacccgacagcgagttgctgagccggtttaaagtcagatatcccaaccctacatctatcagaaagcggatgcggctgttgatttcaatcagaattctgcgggctacattgctatcgtgttcgttgaggttcagatggtcgaagaactcttttagttccgtgatgggtaaatctaccagttcggaaatgctctttccgtctacccgcacatatcctgcctccggtttcaaacgtgtaccgtgacatttcggacagattgtttttccccggtagcgtgccagcattaccctgtattgtatcttatattgattctcttccagcatcttgaagaaatcgttgatgccatggaagtattggtttccttcccagagtgtgcgacgttgctcgtctgtcagctcatagtaaggagtgaaaatcgggaaatcgaacttatccgcattatgaatcagttcatctttccattctcccatcttctcgccacgccagcagacgatggccccttcatacacggatagcgagcggttgggcactaccagatgctcgtcaatgccgatcaccttgccgaagccctcgcatacggggcaggcaccgataggagagttgaacgagaacatctgatcgttcggctcctcaaaagtgatgccgtccgcttcgaatttcgtactgaaattatatagcctggtggtgccgtccggcagataaaaacgtagcatacacgtaccgtccccttcatacatggcagtttcggcagagtccgtcagtcggctgatggcatctttcgtgtttgccactgccatacggtctaccagcagataaacttcgtcgcctgccactggcttgtattcatcgatacgcttcatttcaccgttcacttccacccggttgaagccttgtttcaggtctatctccagttgttgctgcagggtacggtcttcgcgcaggcggataggggtcaatacggtatatctggtcccctccggatgcgaaagcatacagttgacgatgtcctccgtcgaatgcttcttgacttcttctccgctgacggggctatatgtccgtcccacccgcgcataaagcaagcgcagatattcataaatctcggtggaagttcctacggtagatctcggattgcggctgttcactttctgttcgatggcgattgccggtgggattcctttaataaaatcacattcgggtttgctcattcgtcccagaaactggcgtgcgtagctgctaaggctctcgacataacgacgttgtccttctgcatagagagtatcaaaagcgagcgacgatttccccgaaccggatagtccggtgatcacgacaagtttgttgcgtggaatatctacatcgatgtttttcaggttgttaacccgcgctcctttgatcgaaatatgtttgttttctgacataaaatactccttttttatgatagtcggcaaagttagcgattttattgatagaagaaaggtttttggtcgggttaagatatgttataattggtaataaaaagaaattgcttcgggataattggcgtatcttggtccggaatttacaacaaacatttcaaaataataacaaattgacttgaatcgtgaaaaacatccggatggttattagcttattcattctgtgttttgcatctactttagcctttagtagcacaaacaaagaaaaacagttggaagccctttccgacagtgtctcaaataaaataggtcagaaagattttatacctttctatcaggaatatatgcgattggcaaggcagcagaatgatactgctaaaatcgacgatgcttattctcagattgcttcccattattaccggttgagaaatacggatagcctgaaagtggttgcatatgaatatatggactggtgtctgaagcgtggtaatatcaataatcgctatacgcagtggcgccagtatattcagttgcttaccgagaaaggtttgcaggatgaggccatgcgtgagactggacttcttcagaaggatgcggatgcggccaaaagtgctttcggaatggcttgcagcgagatgtgtatcggatataatcatcgggtgttcagcaacaacgtcaagctctgtctcgaatactattcttccgcactgaaaaaatttagcgatgcgggtttttatgaagatgcctatgtggtgtcactgaatatcatccagacttatctggctagaggggagtatgccaatgcgatggaatacttgaaccgtatgccgggactgattgagaaaatgaagcgtaaggatatccctgtccgaccggagcttaccatgcgttattatcagtttcaagtgattgctacgctggcattgaaagggaagaaggaggcgcagccgtttattgcagaagcggataagttttatcacgaaaatatgaatgcttttccccgtgaaggatggttgggatataaaattctttgtgcgcggacgttgaatgacaatcagatggcactcaactatctggactcattgatggattatcatcattcggtggggagctgttatcctgccaatcacctgttgaaagcacagtttatggagcagatgggacgctttgaagatgcctgcgaggtttataaatcttatgcacatattaatgattccattcgttcggcagaactggacgagcaattaagcaaatataccgtgcagttcgaagtggataagttggagcacgataagctggaattgcgggcggaggtcaaccgcaatctctttataacttccgtgattgtcggatgcctggtgttgatattgttgattgttatcacgttttactatatgcgttctttgtcgttgaaccggaaactggatgcggcaaataaggcagtcatcaaggctagccacatgaaaagctcttttatccagcatattacacatgaaatccgtactccgctcaattcgattatcggtttttcatccttgatggctgccggtgggctgacacaggaagagatggaagaatatgcccgtcagatggagagcagcaacgcatatctgcttgatttggtaaataatgtgattgatatagccgacatggactctcagacggatgatataccgaagaagccagtgagtgtagatgcgtgttgtcaggaatgtttgggattgattcgtcagaatctgaaagaaggaatcaagttgcaatatatgccttcttccactccggtcgaagtgtgtacggttgaaatttggatgaagcgtgtgctgctcggtttgctgaacaatgccaataaattcacggaatccggctttatatgtctcagttatgcagaagacaaaccgaatcgtctggtacgttttattatcgaagattccggtcccggaatcgatgaaaactaccgggactccattttcgaacggttcgcgaaggtcgatgccttcactcagggcaccggactgggattgtctattatccgtcagatcatggaattagtggatggaaatgtctatctggacactagctacgcgggtggtgcaagatttgttgtcgaatggcctcaataatagttggagatagtatctgcatctattatctttgcaccacattattttatgactcaagaacattatgaatctgaaaaactatcttttcttattagttctgcttctggcggcaggagtaagagcgcaggcgccgtcgggcaatgcatatcctaaacgtgagtttcgtgctgcatggatacaggctgtcaacggacagttccgtggcataccgacagagaagctgaaacagacactggtcggtcagctgaactctcttcagggagcgggtatcaatgcgattatctttcaggtgcgtcccgaagcggatgcattgtatgcttcacaacacgaaccgtggagtcgtttcctgacaggaacacaagggcaaatgccttccccgatgtgggacccgatgcaattcatgatcgaagaatgccataaacggaatatggaattccatgcatggatcaatccctaccgtgtgaagacttcattgaagaatcaactggcaccgacacatatttatcatgaacatccggaatggtttgtcacttatggcgatcagatctattttgatccggcacttcccgaaagccgtgagcatatctgcaagattgtttccgatattgtatcccgttacgatgtagatgctatccacatggacgattatttctatccttatccgatcaagggagtcgatttcccggacaatgcgagctttgcccgttacggaggcggttttagcaataaggcggactggcgtcgtggcaacgtgaatatcctgatcaagaaacttcatgaaacgatacggggcatcaaaccgtgggtgaagttcggtatcagcccgttcggtatttaccgcaatcagaaaacagatccgttgggcagcaacacaaatggtttgcagaactatgatgatctttatgccgacgtattgctttgggcacgtgaaggatggattgattataacattcctcagatttattgggagataggacacaaggcagccgattacgaaacactggttgactggtgggcgaagcatgcggaaaaccgtccattgtttatcggtcaggcagtcatgaataccattcagcatgctgatccgaagaacccttctatcaaccagcttccacgaaagatggctttgcagcgttcttatcagactatcggcggaagttgccagtggtatgcggcagccgtagtcgagaacgctggaaaatatcgggatgccttggtacaggagtatcataaatatccggctttaattccggttttcgactttatggatgataaagctccgggcaaagtacgcaagatgaaaaaggtatggacagaagatggctatatacttttctggactgctccgaaagcggagactgaaatggacaaagccattcagtacgtagtataccgtttcggttccaaagaaaaggtgaatcttgatgatccgtcacatatcgtagctatcacccgaaatcctttctacaaactgccgtatgaaacgggtaagaccaaataccgctatgtggtgacggctttagaccgtattcataatgagtcaaaatcggtaagtaagaaggtcaagctgtaaattgattaaataaagaattaaaaatggaga

SEQ ID NO: 4852 - DNA, 15038 bp, Unknown
  gut microbiota DNA sequence
taatcattaatatcggatttgccttgtattttctggtgccgataaaagctatcaggaagataatgatgctgatgacaaatgtgtaggtgtcttctgtaggtgaaccgaagttttccacattcatcaataccagtgcggcggaagctaataatccgacaactgccggacgcagtcctgcaaaaatagattccactaccggatgtttctgatatttcagaaagaatttgctgattgtcagcatcagtatgaaagagggaaaaacaacggcgaatgtagcaacaactgatccccatacacttcctgtcgacgtaaaaccgacataagtagccgcattgataccgataggccccggagtcatctgactgatggcaacaatgtctgtgaattcttgcgaagtcacccacccatagcgggttactacttcaccttgtatcatcgaaagcatggcgtaacctccgccaaaaccgaaaagtccgattttaaagaacgtataaaataactgaagataaatcatctctttttaatttagaattatgaatcttgaatcatagccttgggtgttcactctccacttttttaaattttccccataggaaacctcctacaccggcagcaatgataatccatatcggggagaagcccaatagccagatcaataatgccgatacgacggggatccataagttgtaccggttgattttggccgaccgtcccatggtgaaagtcggtgcggcgatcaatgccaccacggcgggtcgtattcctttaaatatgcgttctacaatcggattgtccttgaaagaatggaaaaagagcgcgatggccagaatgataataaatgaggggagtatagtccccagtgctgtgacaatacttccccggatgccacgcagcttatatcctataaagatagagatattcacagccagaatacccggagcggactgagagatagccagcaggtcgataaaatcttcctgtgcgatccatttccgtttggttacgatttcattctcaataagtggaaccattgcatagcctccgccaatggtgaaagcgcctattttaaaaaagattccaaatgattcgaggtaaatgttcattcttctttttctcctccttccttatcggacttgttttcttttccagccttgccctccttgtggggcttgccttcttttccatattggctggggcttacgttgaagtgcttcttgaatacttcacggaagtacttcgcatcactaaatcctgtcatttctgctatttctgttatactgtgtgtaccttctttcagcaacttcaccgaacgtttcaggcggatcaggcggatgtaatcgcccggagcctgatcggtcaatgccctgagtttgttgtagaagctggtacggctcatgcccatcagattgcaaagcacatctactgtaagagccggattgtctatattatcttctatattcttccgtacattggcgataaacttccagtcgatatcctgcgagcagttgatgcattcgtcttcatgatcatcctcatcgtccatatccagactcccgtatttgcttcgcaaaagggcgcggttgatcaacagattggagacggtagctttcaatattccaatattaaatggcttgacaatatactcgtcagcaccaatctgaagaccggacaatatgtctttttcattattaagagctgttagcaggataacaggaatatgcgatgtctcgatattatttttgatggcgtcacacaattcgtcccctctcatttccggcatcatgatgtccgagataaccagttccggtttgtattccggaatgatggtcagtgcttctttcccgttgcagcagttctgcaccgtatattcttctgccagtgtctgtgacagatagttgcgcagctcatcattatcttctacgattaggattcgctgatgattcggattctgttccttatgcacattctcatagatgctggcaggcacattggttgtgcttgttatctcttgccggcgtttgcttggtgtggcaaggtgtgctttatggaagcgtttgctgtcttttgggaaagatatcttaatcaccgatccctgattctccacgctcgacaggttgattttgcccttgtgtaaccggacaagtttccataccagcatcaaaccgataccgcttcccgtcactttcgaattgatggcattgctgccacggaaatgaagcttgaacagtttcttttgctcgctggctggaataccgattccggtatccttcacttccacgctccacgaatcattgttctctgatacgaaaatctgcacattaccattttccggcgtgtattttaatgcgttcgatattatattcttcagaatagattccatcttttccttgtcaaaccatacattcatataccggaaattgctttcgtacgtaaagttgatatgcttgatattggcataaggctgaaatgcattgaatatttctgtcatgaacgtgtttagctcatgctccgaaatgtataattccgaagaataaacatctgctctctcaaagttgataagattcgttgtcagacgcaacaaggcatttacattgcgtatggcagtgttcatgttggctatgccttccttgctcagagcttctttttcgcgcaaatcttccagaggagctttaatcaatgtcaacggggtgcgtatatcgtgtgccgtattgatgaagaagtgtattttttcatcggaaaccttccgctgttttttcagaataagaacccgcaggatgataacagcaatgagggaaatcaggattgcatacaatatcattgcccagggagtgagccagaaaggctgggcaatgataatatcaatgcttctttcttcaagcatcacccgttggtcttcgttggagatggcacgcacacgcaatacatattttcccggagcgaggttggtataacggattgtactttcattgccgggtttgctccactcttcgtaaaattcttccagcttccatgaataaagaacattggaaggataatcatagttgatggaagaaaccatcagtgaaaagatattctgattatattttagtcttaattctttggtttcgttgatatctttttccagtggtgaattcttgtctcccggatataccgtctgataaaacagcttgaaatcactgaagatcatcttggaagagtacgtcctggggagcttcatgtctttattgaactctatggcaccgtccgagctaccgaagataaaattgttatttctgcgcagggtaccggacaacgcattgaagtgcgtagtcatcagtcccatttcctttgtccagttgtagaaggttttttgtttgggatagaagctggtgagtccgttctccgtacttaatagaatttcattgtcttcatccgataatatcgtgtagatattgttggatatcatggcacagtttcctgtataataatgggtaaacaactttgtctggggatcataaatcagtactcccgatccgctggtacctatatacagtgagccttgtttggtctgatacagggagtagacataggtagattctaccggcagttggatgcgttcatatttcccggattctatatccagaagaaacaggcctgttgccgtacctatccacatacttttgtcatccttttcgatgatggcggtaacggaatgcagtccgtggtagagccgtatgtctttggtctgtacgttgattcgcttcaggttataatatcctccgctccatacataaccgcgtgagtctttgcgtatgtcacgtatgtatttatccggacgtatactttcatgagcatacgaagcgggtgtaaaataagttgttttcgacgtgcgtttatctatctgataaagtcccgagaaatatccgcctgcccaaataatgccgggagatacttcacataaggttgtaaatatatgatttttgctgttctgtacattctcaaaggtgctcagaaacgagcgccattttccggtttttgagtcttgcaggctaattccgttgttggtgccataccataagtctccctcgctgtcttctatgatagagttcacctggtcgttaatcagcgactgcttattaccgacagaatgtttgatccatttataactcggataacgattgttctgaatggtaattcctatcggatagtttgccatccatatcctttcttcgtcgtctatgtagatgtcgttaatgctgttgccgttcatgccattgtagctgttgtagtctgctacgataaaaggtacggtctggtacgtatcgacattcatcttatagatacctccgccatcggtagcaatcagcagttctttggcattcagtggtttgatgcgtgatatacttacgtctttcaggctgacttccggttgtgtgatggtttttgtgttcatgtcgtaaaccatgacgccccgttcgaaggcaccgatgaacagtttgcggattttggggtcgaagtgtaaatcgttaacttgaatattgacgttgtctagcttgtcgcaggggagaagttgcagtgtgttgtttttcagttgggcatgatgaatacccatctccgtcccgataaaatagtgggattcgtcgatttgttcgatgtcgtttatagcttcgctgaggcagtttttaacatgagtaacctcttccgtccgggtgttgtaaaggaagatcgtttcttcgttgcacagccagatatgattgttatgatcgatccagctgaaagtaatgggagccggtaaatccttaaagtcttctatcggcaacttgtagacgagttcgaaagtgtcatgaatacggtcataccggaaaatcttgcctttcttaccgatttcccatagcgttccttccggatcgatatataaccaattcagatttaacagcgagttgagttctttgtcgccgtccattaatttataccgtttaaactctttgccgttgtaccggtcgattccctcgtgcgtaaggaaccacatatatccaacattgtctttttgaatgtagtacactctccggttgcttaacccgtcttccactcctagatactgataggtctgggcgacacaggtcagaggaaacaataataataaaaaaagccattttttcatacaaataggacttttatgggttattgaatctttagtgagggggaaagtttgacaaaattaagaagatttttcgacactacaaaattttaggttaagataacggtgctctcaaagtgaagtatacaggagctttcgcagctatttgtatatcctgtttatttagggaaattaagttgtaatatgcagactttgggtatggaaaaggagttaaaacaagaggctgttactttataacaaataacagcctccgtttcaatgatagaaagatatcttatttagtcttctcttctacccatttgcgggcgttgacaaatgcttctatccatggagtaatctgatcgctgttcttacggtcagcaggatagcagccattctgccacgggaagatagcacgttcgaggtgaggcatcattgccagatggcggccgtcggcgctggcaagacctgcgatagaataatcggaaccgttcgggttgccggggtattcatcgtagctgtattttgccactacgttgtattggtcttcatcgtaaggcagagagaatttaccttctccgtgagccacccagatacccagtttgctgccgctcaatgagccgaacattacactgcggttggtcgggattgtcaggcctacataagtcgattcgaatttatgtgagtcgttgtgcagcatcttgcctttcttttcgtgttccggattgataagtcccagttccatcatcagctggcaaccgttgcagatacccagtgaaagcgtatcttcacgtgcgtagaacttgtcaagtgcctctttggctttagggttgaacaagaaacctcctgcccatcctttggccgaaccgagtacgtcggagttggagaatccaccgcagtaaacaatcatgtttacatcttccagtgtttcgcgtccgctgatcaggtcggtcatcgtcacgtctttcacgtcgaagccggcaagatagagtgagtaagccatttcgcgttcgccgttcgttcctttctcgcggatgatggcagcgcggacaccgctcggagtacgacggtccggagtgataccatactgagagagtttacctttgaatccgggcatgaaagcgaattcaaccggttgcatcttgtagttttcgaaacgtttctttgcgcagccgttcatagactgtttgcggtcgagcaggtaagaagaagaataccatacgtcacgcatgtagtcaacaccgaactgataagtagcgtcgcccttcgataccaggatatgacgttcgtcggtcggtttacccagtttcacgaatcctacgcctgcatcttccagaatctttttcacttcttctttatgcttgtcgctgatctggatcacgatacccggattttctgcaaacagaatcttgatgatatcttgttccttcatcttgtcgaggctgatttccataccgccttcaacgttggcgaagcacatttccagtaatgtagtgatcagaccacctgctgaaatatcgtgtcctgccaggatcagtcccttgttcaccagttgctgtacggcaaggaaagcatcgcggaagtattcggcatcctgtacgcagggtacgtcgtcgccaactttacccagagactgtgcaaaagcggaacctccgagtttcagttcgtcgaagctgaaatcgatatgatagagtgttgtcttttcgttgttcaccaataccggagatacgactttcttcacgtcggatacttcgccgccggcagatacgatcactgttcccggagaaatcactttctcgccgttcggatatttctgtgtcatggacaaagagtcctttccggtaggaacattgatttgcagagcgcagcagaagtcgctcaatgctttcacggcagtgtaaagacgggcgtcttcaccttcctgtgagcggcacggccacatccagttggcagacagggaaatgctgtccatgccttctgccatcggagcccagacaaggtttgtcagtgcttcggataccgaaaggatagagccggcagccggatcagccagtgcggcttgcggagcgtgaccgatagaagtggcgatacctttttcaccacgatagtcgagtgctacgacaccacagtcgctcaacggcaactgaagttcgccctggcattgctggcgggctactttacccgttacggagcggtctaccttatttgtcagccagtccttacaagctacggcttcgagttgcagcacattggtcaggtattcatgtaatttcggcaattcgtattccggcattttataatgacgttctacggtcttgtcgatcatataagtcttcggagatgaaccgaacatctgctcaacggccaggtcgaacggacgtacgccgtctgcctgctggaaagagaagcggtgatcgccggttgtttcacctactacgtacatcggagcgcgttcgcgttcggcaatcttacgtacatgttcgatggcttcttctttgatcagaagtcccatacgttcctgactttcgttggcgatgatttctttagcggacaatgtcttgtcgccgatcggaagtttgctcatgtcgatcagaccgccacattcttccaccaattccgacagacagtttacgtgacctgccgaaccgtggtcgtggatagaaactaccggattcacatcttcctcgcagagtgcgcgtactacgttgttggcacgtttctgcatttcggcgttggcacgttgtacggcattcagttcaataccgctgctgtaacgaccggtatctacagaagatacggaaccgccacccagtccgatacgataattgtcgccaccgatgacgactactttgtttcctgcttccggagtacctttgaggcagtcgcgttgtgtgccgtagcctacaccgcccgcaagcattataactttgtcgtagccataaacttcgttgttttccgtgtgttcgaaagtcagtaccgagccgcagatcagcggttggccgaacttgttaccgaagtcggaagcaccgttggatgccttgatcagaatctgttccggagtctggtacagccatttgcgtaccggaagaatatcttcccattcgcggccttcgtccgtgcggggataagaagtcatgtagacagcagtacctgcgatcggccatgagcccttgccaccacccatacggtcgcggatttcaccgcctgtaccggtagatgcgccgttgaacggttctacagtcgtcgggaagttatgagtttctgctttcagtgagatgacgcttttgatgtctttcacctggaagaagtcaggttttgagtgatctgccggagcaaactgttcaactaccggaccttcggcgaaggctacgttgtctttataagcagagatgattttattcggattctcctgtgtggtctttttgatcatctggaacagagacgattcctgttctacaccgtcgatgatgaatgttccaccgaatattttgtggcgacagtgttcggagttgatctgtgcgaaaccgaaaacttcggagtcagtcaacttgcgtcccagatcgttttctacctttttcagatagtccatttcttctttcgagagtgcgaggccttctttctcgttgtaggcttcgaggtcttcgatggatacgataggttccggttggcggttggtggtgaatacgttttggtcgagtcctttgtacatgcgttgcagcatcgggtcgtagtcggcattttcatcttttaccggaaaatattcctcgatgcggagaatgtcttcaagtcccatgttttgggtgatttctactgcgtttgtactccaaggggtaatcatttcgcggcgtgggccgacgaaacagcctttcaggttttcttcactttccgtcacggcttctccaaaaagccagcagagtttattactttcgtccggggtgagctgatggttgctctctacggcaatcacgctcttggaaggggttctgaaaaaaagaatcatgtttattttttgattttacgatttttctgtggcgcaaagataagcaattttggtgtatatagtgactcttgtgtggaaaaaacgttaatatcctatcctcttctcataaaaaagtgcgatatttgcggcatgattcagattgaaacaatattcgatataatagtgaaaggctttattataggcgttgttgtgtccgcacctctcggaccggtgggggttctctgcattcagaggacgctgaataaagggcgctggtatggatttgtgacagggcttggagcctcattaagcgacatagcttatgctctgttgacaggttatggtatgagctttgtgttcgattatatcaataagaatattttttatctgcagttgctgggcagcatcatgctgctgcttttcggaatctatacctttcgcagcaatccggtacaatccatccgtccggcatcgtccaacaaaggttcttactttcacaatttcattaccgcattctttgtcacgctctccaatcccctgattatattcctgtttatcggactatttgcccgttttgcctttgtgcagcccggtgtcgtggtgttcgaagaaattacgggatatcttgccattgcttcgggggcgctggtgtggtggctcggaatcacttattttgtgaataaagtgcgcactaagtttaacttacggggcatctggatactgaaccgtgtgattggcagcattgtgatgctggtgtcagtggcgggattaatctatacgttgctgggagagtcactttattaagaagaaaacttatgaatcagatagccagacagcttaaagagaaaaacattgccgagtaccttatatatatgtggcaagaagaagacctgatccgcgccaatcatggcgaactggaggagatcgaggcgaatgtgatcgcccgttatccggaagatcagcgtcctgccctgcgagagtggtacggcaacctgatcactatgatgaatgaggagggggtacgtgaaaaaggtcatttgcagattaacaggaacatcatcatcaaactgacagaacttcataatgcgttgacttcttctcccaaatttcctttctacagtgccgcttatttcaaagcgttgccgtttattgtagaattgcggaataagaatggcaaaaaagaagaaccggaactggagacttgtttcgaagcactctatggattgttcctgcttcgcttgcagaaaaagcctgtcagtgaggggactatgaaggcggtagaagctatcagcagctttctttccatgttggcaaactattacgataaagacctgaaaggggaattaaaacttgatgaataaatgagaattttagtgacgggtgccaatggtcagcttggcaatgaaatgcaagttcttgcaaaagagaatccgcaacatacgtattatttcacagatgtgcaggagctggacatctgtaataaggacgctgtttgggcatatattgctgaaaagcggattgagcttattgttaattgtgcggcatatacagcagtagataaagcggaagatgattcggaactggcttacaagctgaacagtgaagctcctaaaacgctggcatgtgcagcgcagtttaatggtgcggcgatgattcaggtgtctaccgactatgtttttgacggcaccgctcatattccttatacagaagaatgcgatccatgtccgaattcggtatatggaacaacgaaacttgaaggagaatatgaggtactgaatcattgcgaaaagtcagtcgttatccgtaccgcatggctttattccacttttggcaacaacttcgtgaagacgatgatccgtctgggcaaagagcgtgatagtttgggagtcattttcgatcaggtaggaactcctacttacgccaatgacctggcacaggccatctttgctattattaataaaggcatcgttcgtggagtctatcatttcagcaacgaaggagtctgctcctggtatgactttacggtagctattcatcgtctggcaggaatcacctcatgcaaagtgaaacctctgcatacgtcggaatatcctacaagagcgaaccgccctgcatattccgtactcgataaaacaaaaataaaaacaacgttcggcatcgaaatacctcattgggaggaaagcctgaaaagatgcatcgataccttataataaatatggcagataatacagaaatacagagacggcgaacattcgccattattgcgcatccggatgccggtaagacatcattgacggagaagttattgcttttcggtggtcagattcaggtggcaggtgcggtcaagagtaataaaatcaagaaaacggctacttccgactggatggagattgagaaacagcgtggtatctcagtgacaacttccgtaatggaatttgactatcgggactacaagatcaatattctcgatactccgggtcaccaggactttgccgaagacacatatcgtacgctgactgcagtagacagtgttatcattgtagtagacggagcgaaaggtgtggaaacacaaacccgtaaactgatggaagtgtgccgtatgagaaaaactccggttattatttttgtcaataaaatggaccgtgagggcaaggacccgtttgacttgctggacgagctggaagaagaactgatgattcaggtccgcccgttgtcatggcctatcgaacagggagcccgcttcaaaggagtatataatatttatgagaagaaactggacttgtaccaaccttccaaacaagtggtgacggagaaggtagaagtcgacatacatacggaagaactggataagcagatcggtaagccgctggcagacaagctgcgtggcgatctggaactgatcgaaggagtttatccggaactggatgtggaatcttatctggcaggagattgcgcgcctgtattctttggctctgccttgaataattttggtgtacaggaattgttgaactgctttgtggagattgctcccagtcctcgtcctgtacaggcagaagagcgtgaagtgaaaccggatgagccgaaattcaccggattcatctttaagattaccgccaatatcgacccgaatcatcgttcgtgtgtagcattctgcaagatatgttcgggcaaatttgtacgtaatgcaccctatcagcacgtccgtcatggcaagaccatgcgtttctcatcgcccacccagtttatggcacagcggaaaacgaccattgacgaagcctatgcaggagatatcatcggtttgccggacaacggaactttcaagatcggtgatacgctgacggaaggagaactgctccatttccgcggcttacccagcttctcgccggagatgttcaagtatatcgaaaatgccgatccgatgaagcagaaacagctggcaaagggtatcgaccagttgatggacgaaggtgtggcacagttgtttgtcaatcagttcaacggccgcaagattattggtacggtcggacagttgcagtttgaggttatccagtatcgtctgctgaacgagtacaatgcttcttgccgttgggaaccggtaagtttgtacaaggcttgttgggtagaaagcgatgatcctgctgagctggaagctttcaagaaacgtaaataccaatatatggcgaaagacagggaaggacgtgacgtattccttgccgattcaggttatgtgcttcagatggcacaaatggacttcaagcacattaaattccacttcacaagtgaattttagtctgcttggtggaatttaacaaaaataattggtaaaaggggaagaattatgttacctgtaaataagggaaggagaaatgaatacaacattttgggagaaaatccagcagggggatgaagaagcattccggcaactctacaatgaatattcggatttactttacggatatgggatgaagattgccggtgatgatgatctggtaactgaatccattcagtctttgttcgtttatctgtatgagaagaggcagagttgttccgagcctcagtccatatccgcttacctgtgtgtggcgctgaaacgcatgctgctgaatgagttgaagaaaactgctaatggcgtattcacatcattggacgaagttaattcaagcgaatatagattcgatttggagatagacatagaaacagcgattgtccgttccgaacttgaaagagagcagttagaagttctgcagaaagaaataaatggcttgacaaagcagcagagagaggtattatacttgaagtattataaaaaactgaattcggacgaaatagccgaagtgatgggactgacttcccgtactgtttataatactacccacatggcaatatccagactgagagagcgattgagcaaatcattcctgttgactgtagctgctaatttatggatttttaattgaggtgaggatatggagaataggaaagaacttctggaacaatatatggaagacggcaaacttcctctgaaaggtgagttgtttgcacggaagtctgtagttggtgggaagttagaagaatttcgtgaagaaaaacgtgcggatgcattaacaagcagaccgaacgctgcaggaagacagaaactgattgttcttaggagcagttgtatctactggagagtagcggccctgtttatcctgcttttcggaataggcggttattactatctgtcggaagagaagattacgtctgaagcagtagctgtcgattacaagctaccggatggcagttctgtgaagctgatgcaaaactcaactttgtcttataataaagtgagttggctttgggggcgtaaactgaatctgctcggatcggccttttttgacgtgactccgggtaaaacatttactgtacgaacggaagccggagatgttacggtgttaggtacaaaattcttggtcgagcaggaaggaaaaacgatcactgtcaattgtgaagagggaacagtgaaggtagagacaccaatcggcgaacagacattgaatgccggtgaaagtgtacgctgtgatgagaataagattggtcctgttcaggaaaaggaagaactgcccgaagtactcggttatgaagatgatccgctggtcaatgtagtagcagatattcagcatatctttgatgtggaagtggtagggtgtgaaaaatataatgaactgtactataacggaaccatcctgacgagagatctgcacgaaacattgaaaaaagtatttggttctttgggaatcaattatcagttgagcgggcagaaagtcatattagaatagacgggaacagaagtccacaccgtaaaaaagagaaattatccttgatataaagcaggaagtgaaatatttctgcaattaaaaaacgcctctcagagtgctctggaaggcgttttttaattaaatctattttttcttctatttttcttggtaaaaaaggaaagaaagctcctcttataaatataaggaactatttataaacagacaatagataacaggtggatgaactgtccatggctagacagaattttaaggggagtaaattaataattaggtagagaattagattgcttaagagaagaagtctcttgaaaagaacgaagaatgatgccaattgctgttttaaaagaaagcaatagcgaacgaattggcaattagtaagtgagtttaattttattgttttccaaatgtgagagaaaattgaaaggttttctctcacattttttatggggttacggattcgtgagcatcagctttttagtaattttaatatagtcaaacaagataaaactaagatatcgtgtttattcatcttactttgtaggttgtaataaaactagtgatgtaaataatgaataaaaatggatttagtcgatgtgccgatatctatatcggccgtttgcgagag

SEQ ID NO: 4853 - DNA, 182 bp, Unknown
  gut microbiota DNA sequence
gagggccgctattctacggcgcatgtctatcagaacgcccttctttcttttagcaagttttgtggtgtccatagtgtgtccttccgtcaagtcacccgtgaccgccttcgccgttacgaacagcatctttacgcatgtggtctgaagcccaatacgatttccacgtatatgcgtatgcttcg

SEQ ID NO: 4854 - DNA, 813 bp, Unknown
  gut microbiota DNA sequence
ccgccttcgccgttacgaacagcatctttacgcatgtggtctgaagcccaatacaatttctacgtatatgcgtatgcttcgtagtatctacaatcgtggtgtggaggcgggtagcgctccttatgtccaccgcctgtttcatgaggtctatacgggagtggacgttcgtcagaaaaaggcgcttcccgtcgtcgctcttcgcaggcttctttatgaagacccccattctgaccgtctccgccgtacccaggctatcgccgctctgatgttccagttctgcgggatgtctttcgccgatctgagccatttggagaaatccgctcttgatagcaacgtgctgcgctacaatcgtgtcaagacgaagactcccatgagcgttgaggttctggacagcgcacaggagatgctcgagcagctccgtaaccggcggtctccccgtcccggctgtcccgactaccttttcggcatccttcagggagataagaaaaggaaggatgagaaagcttaccgtgaataccagtccgctctccggagattcaactactgcctgaaatccctggcaaagcggctgcgtctcaacttccccgtcacttcctacacgctacgccattcttgggctaccactgccaagtaccgtggtgtccctatcgagatgatcagcgagtcgcttgggcataagtcgatcaagaccacgcagatttatctgaaaggctttgagctgaaagagcgtacggaggtaaaccggatgaatttgtcttacgttaagaggtgcggttctggcctgtatgtgtgatttagaatcctgatatacag

SEQ ID NO: 4855 - DNA, 1395 bp, Unknown
  gut microbiota DNA sequence
attgtggatgaactggctcataccaatgtagaaggtagcttgaacgagaaacgttggcaggatgtgataactttgctggatgagggaatcaatgtgatttcggcaatcaatattcagcacattgaaagcgtgaatgaagaagtgcaggagattacgggtattgaagtgaaagaacgggtgcccgacagtgttcttcaggaagcggatgaggtggtgaatattgacttgacggcggaggagctgattgcacgtttgaaagcgggtaagatatatcgtccggaaaagattcagacggcattggataatttctttcggacagagaatattcttcagttacgtgagttggctttgaaggaagtagcgttgcgggtagaaaaaaaggtggagaatgaggtggtgatgggagtagccgtcggaatccggcatgagaagtttatggcttgtatcagtagtcatgagaaaacaccccggcggattatcagaaaggcggcaaagttggcaacccggtataatactacttttatagccctgtatgttcagactccgaaagagagtatggatagaattgatctagccagtcaacggtatctgttgaaccattttaagctcgtggcggaacttgggggagaggtggtgcaggtgcagtcgaaggatattttggggagcatcgtcaaggtttgtaaagagaaacagatatcgactgtttgcatgggaactcctaatttaaggttgccatacgctatttgttctatactgggatatagaaagtttttaaataatttgtcacaagctaatgtagatttgattatacttgcataatattaatcgtatgaacgttatgaatattaaaacgaaactgattctcggtatcggaatgctggccggaatgattattttgctggtaacactttcagttgtgaatcttcaaattctgacagcgacagaacctgatagtcctgctgctatgcccggattggaacgtgctttgttatggatttccgtaacgggaggaatctgtatcttgaccggactgatattgctttattggttgccccgtactatcagcaagcctattaaagagctgaaagagggaattcttgaaatagccaatcataattatgagaagcgtctgcagatgaataataatgaagaattccgggatgtggcggatagttttaaccggatggcggagcgtttgaccgaatatcgtgccagtactttgtcggatattctttctgcaaagaaatttattgaagcaattgtaaacagtatagatgatccggtgatcggcttgaatatggagcgtgaaattctgtttatcaatgaggaagcactcaatgtcttgaatctgaaacgggagaatgtgattcgtcaatcggcggaggaactggcttt

SEQ ID NO: 4856 - DNA, 2686 bp, Unknown
  gut microbiota DNA sequence
aggtatctctcattcttttacgtaagcgtctcggcgatgtcgtcttttctttaattctacttcttcatatctttgctttcatattaatcaattcctacttatatgactgcacacgctttatacactcaaaccctgtctgagtataaatcccgtctgatatcttctccctgtttaactcttcgtagttattgtcatgagtgtcatgttaattatcatggtatggaactctggctttctcggcacggcattcgcattcgtgaacttcgttcttccctttcggcttcttcctccgaaaagccggtaccctgcttcagtcctttggttccctcatccgcgccttcggcccgtccgtcctcttcttcggatatgctttatggtatcaatattacttttccggatggggtgattatttccatcaagcagggaagttcttttggtattcaccgttttattgacctttacaaccgtaaaatacaggaggaacaatcatgtttgctttaaccgaaaatatgcgttattacctgtgtcagcattatgtcgatatgcgtaaaggtatgacgggactttatcagctgatcaagtccgacatgtcactttctcccgtttcaggagatgtttttgttttcttttcccacaaacgggacatggttaagattttacgttgggatacggatggttttattctttaccagaagcgtctggaagaaggtaccttcgaagtcccgcgttttaatccttctacgggtgcttacgagctttccaggaagagtttctttttaattatgcagggcgtctccctccggtcaaccaagtgcaggaaacgattccggctgaagccgtattgatgccaaccatctgacaaacagtattttataatgtaattgtataataaaaagctttgttgtccggttcttttttcgtatctttgaggtatgaaaaaagaccgggtcatagaacttctggaggaacagaacagacatttcaaggaacagattaaagctgctgacaagcgtgagcaacaaagtcagcgtctgatctgtgaactgacttcacaggttcagcaattgaccgatgccgttcaatccctggaagaagcgctgacgctgaagaacggcaaactgaaaaagcaggagaacattagccgcagtttgagtaagcttgtcagcaacgagtctgaaaagcaaatatctgataagtcgcaacccgtttctgagacagctccgtcccgtccgtctgcttccccaaaagaacgggggaataacaactccaaacgtaaagagcattttgaactggaagaaaagataatcgaagtcaatcccgatcatccccttttcagtatgtctcttgccaaatttatgggataccgtgattctatccgatatgtctatattccgccaaagttcattaagtacatttatcgacagaatatttatagctttaatgaaacggtcttcagcggttgcgcccccgccgccccttttctgaattcccaatatgacggttcgttcgttgccggtttatgccagttgcgatatatctactctatgagtgtagaacgtatcgttagcttctttcgggaaaacgggttcgaactcgagaagcccactgcccatcatctgctgagtaaaacggctgttttgttcgaaaacctctatgaagcactcagagaagtggtgcttgaagatccctacctctgttgtgacgaaacatatcacaaaatactggttccggagaagaacagtaaaggcaaaggggtacgaaaagggtatatctgggcagcagcggcggcgaccttaaagctggtgctctatttctatgaggacggatcacgtagacaggaggtgctttttgatttcctcaaaacctataaaggaacagtacaaagtgatgcatacgccccatacaggaaactggaaaccgaccaatatcacaatatcacgaggatcgcatgccttcagcacgtcaaacgaaagtttcttgaacaggataaggatccggacgcccgaaagatagttgaaatgataaaccaactataccaaaaggaacatgaacatcggacaagctatcagggatggacaatcaaagacaatctcgcacatagaaaacagtatgccccgccaatactcaggaagataaaaaagaaattattgagcctgcagacaaagccggacttattgccaaaaagccaaatggcggaggccattaattacacactatcccagtggaaggccatagaggatatctttaccaaaggggagtattatctggacaacaaccttgtcgagaggtataatcggtatatatcactatccagaagaaactcacttttcttcggaagccataagggggctgaaagaggggtaatactatattcattggcatgttcgtgcaggatgcatggcataaatacattcgagtatatagccgatgtgattaacaaagcggcgaagttaccaccaaatacagacaggaaaatatatagagatttattgccacacaaatggaaggaaaacagaaatagaatctgaaaagaaaaggataaggagatttttttcacaaaaagacgacatcgccgagacgcttacgttttctacgcaaaatagctttaatttggcttatctctcatccttttttgcttatctctcattccctttccttgcgtaagtaggtaaacagactacccttt

SEQ ID NO: 4857 - DNA, 420 bp, Unknown
  gut microbiota DNA sequence
ttaacagtacatagtacataaaaccatttaccgtacatagcacattacagtcaaatcccttctcgtccccatggatgacccccctcagataggggtcccttgaccaccatcctccgtgaaatcaatatcccgcacaagagtgctactctcctcgctccgggcccataacacttgggggtagctaaagtgaactgtatccgacatctggttcctacttcagggtcataaagcctaaatagcccacacgttccccttaaataagacatcacgatggatcacaggtctatcaccctattaaccactcacgggagctctccatgcatttggtattttcgtctggggggcatgcacgcgatagcattgcgagacgctggagccggagcaccctatgtcgcagtatctgtctttgattcctgcctc

SEQ ID NO: 4858 - DNA, 628 bp, Unknown
  gut microbiota DNA sequence
attatcccgttcaaggataagtttgatacttcgctgaaactgtacagcctgatgacaacgaagcctaatgagatgggaaaatataaggagaaaaaagaagcatgaacacatcgaatatttttgaccgactgagccgcaagattcatcatcactctgacatggagccgcacgaaagcgattccggcccgccctttggtgaggtggagccgctcaacttccacgatgaagaatcagtggtgcatacggtgctggaagatttctatgccgttggcacattggccgatgaactgactgacggctttcacatggaagcctacggttatcttgaccgtgaggaagtaaacgcccgtctgatcgcctttgcccggaagctggaacaggtgcttgacaagtgggaaacccacgcagccctgatcgcgtgacggctccagccggaaggaggtgatttccatagcagacaaaaagtttcggggcagagataaaatcgtccagaaaatgaccaaggatggtctggtggatgaaaacctccgcaccggggaacagaagtccgcaaccgcagaagaaaagccggagaaggaagattcggcagaagaaactgcggaaaaagaaacagacgaagcacctgtcg

SEQ ID NO: 4859 - DNA, 192 bp, Unknown
  gut microbiota DNA sequence
atttttctgaaagagaaagcaattcatccttgtacgggatgtagtgtttgcagcatgtatggcaaaccctgcccgcagaaagatgatgcagcagaaattgtagagaaaatgattgcggctgatgtcatcgtaatggcaacacctgtttatttctatacgatgtgcggacagatgaagattatgattgaccgt

SEQ ID NO: 4860 - DNA, 332 bp, Unknown
  gut microbiota DNA sequence
attatggattttaagaaactagcgaatcagtaccgggatgaattgttggacaatgtccttccattctggctcgagcactcccaagatattgagtttggcggttatttcagctgcctggaccgtgaagggaaggttttcgatacggataagttcatctggttgcagggacgtgaggtatggatgttctccatgctttacaacaaagtggaaaaacgacaggaatggctggattgtgccgttcagggtggtgaattcttaaaaaaatacggacatgatggaaattataactggtacttttcactcgaccgttcgggtagaccactggtagaacc

SEQ ID NO: 4861 - DNA, 17131 bp, Unknown
  gut microbiota DNA sequence
tggacagctgagtcttgctacgggaaatcaggagtatgcggacatagcaaagaagacctttgaaatcatcctttctaaggttgataatccgaaaggcaagtggaacaagcttcatccgggtactcgtaatctgaagaacttcgctctcccgatgattctctgtaatctggctttggagatcgaacatcttctggatcccggttatctggaacagacgatggaaacctgtatccatgaagtgatggatgtcttttatcgtccggacctggggggcatcattgttgagaatgtcgatatggacggtaatctggtggattgcttcgaaggacgccaggtgactcccggtcatgctattgaagcgatgtggttcatcatggatttgggcaaacgcctgaatcgtccgaaattgatagaaaaagcaaaagacgtaaccctgacaatgctcgactacggttgggacaagcaatatggaggtatctattactttatggaccgtaacggttgtcctccccagcaattggaatgggatcagaaactttggtgggtgcatattgaatctctgatatcactgctgaaaggttatcagctgaccggagacaggaaatgtctggaatggtttgaaaaagtgcatgactacacatggtcgcacttcaaagatccggaatatccggaatggtacggatatctgaatcgcagaggggaagttttgttaccgctgaaaggtggtaaatggaaagggtgctttcatgtaccaaggggattatttcaatgctggaaagtattggaacagctatagaaacaatgaattattatgttaaccaatcttattaataatctaaaaattaattctatgacagagtttaactcaaaaattaagcaaaactctcgcatattgaagatatttcttttctcaatatgcgcactttttgcatgtgctatcaatgctcatgcacagagtttggtgcaaggtactgttactgatgagacaggagaatctctacctggtgtaagtgttgtagtaaaggggagtactaatggtacagttacagatgttaatggaaaatacagcattcaggcgacttcaaaagatatattgtctttctcatatgtaggtatggcggaacaagatataaaagttgccggacagaaaacgatcaatgtggtgatgaaggatgatgtggcatctctggatgaagtgattgttgttggttatggtactgcaaaaaaacaatccctgacaggagcggtttctgcggtcaaaggcgacgaactgttaaaggcaccggcaaccaatgtatcaagtttgttaggcggacgtttgccgggcatttcttctgttcaagtctccggagaaccgggtgatgaccaagcagtattgcgggttcgtggttctatttacaatgttacttatattgtagatggtatgcctcgttccatcaatgacattgatcctaatgatattgagagtgtatctgtcttgaaagatggagcttctgcggctgtgtacggtttgaaaggcgcaggtggtgttatcatcgttacaacaaagagaggacaggaaggaaagtcaagaatcacatataacggttcaataggagcatctatgaatgcaaacttcccacagtttatgaatggtccccagtttgcatattattataatatggctgatatgatggataagctggctaacggaagtattgcggacatgaaacaatatacaccggtattcacaaaagcaaatgtggaagcgatgttgaacggcgaccctactgatggatgggataacgtcaattatattgataaagtgtttggcacaggtatcaatcagaaacacaacatcaccgtacagggtggtagtgacaaaatgcgttatttcacatctgtcggctatttgggacaggatggtaatattgataactttacttataaacggtacaacttaagaactaacattgaaactcagctggccaagaatttccagttaagtttgggagttgccggaaatgtaggaaaacgtgaaactccgggatatgcttccggtggtacggattctaattccgaattgggagaacagggctggttatcggtagctcaccagactgtcatgatgcatccgtatttaccggaaaaatatgatggactttataccgctactacacagaataatacaagcttaccgaatagtccgctagcagctatttatgaatccggctacaaacatactaatagctttgatttgcagactaacctctctttacaatataatctgccttgggtaaaaggattaagtgtaaaggttaccggagcttatgactacaagacctcacataataagaacctaaatacgccttattctacttatatcaataaaatgccgacctccactacggactggacttggactaaagcggatgatcctcgtggaactgcaaatggaataaatttaggtgaaggacaattcagttcccgtcaaatggtaggccagggaagcatcaattatgcgaattctttcggtaagcataatgtagaagccatggtacttgcggaaatccgtgattataaagaaaacagtttctccggatataataagaatatgagttttgcagaacttccggaactgagtttcggacaaccggcagactcccccatttccggatatagcgatgccaatcgtagcattggttacgttttccgtttgaaatacgactatgacaataagtatctggcagaattcacaggacgatatgacggttcgtataagtttgcgggtaatgtaagtggaaaacgttgggcatttttcccatcagcatcagtagcgtggagaatatctaaagaaaactttatgtccgatctgactttcctggatgatatgaaaatacgtgcatctgtcggtttgttgggtaatgacgatgtgagtccgtatgcatttcttagtacctataacctgatggacggtaacaaaaatgcgtaccagacaattctgaacggaaaagtcatgcaggcactgcgtgcatctgtaattgcaaatcctactctgacgtgggaaaacacgttaacttacaatgcaggtttcgactttaccatgtggaatggtttactgggtatggagtttgatgcattctataactatacctatgatattctgacagcaatgggaggcgattatccgccatcaatgggaggatattattatacatatgccaattataacaaggtagacagcaagggagttgaaatcacagtgagtcatcgtaataaattaaatctggcagggaaaccattttcttatggagccagtttcaacttgacttttgcaagaaatcgctatcttcgttatccggatagtcccaatactgtagaatggagaaaacgtacaggtcgcagtgtagacgcttcagtcgtatgggtggcagaaggtttgttccgttcggaagaagaaattgataattccgcatggtatggaacccgtcctaatgtaggtgacatcaaatataaggatttaaatggcgatggcaaaatagatgaagatgacagaacacgtgtaggacggggcaatcgtccggaactgacttatggtctgaacttgaattgtgcctggaacggatttgatttaagcgcacaatttaccggaggcgcattgttcgatgtatcattaaccggaacttactataatggttatgatgacaatacggtctggacacaagcattcaaagaaggtgccaactcacctttatatctggttcagaatgcgtataccacggaaaatccgaatggaacattcccacgtctgactctgggaaatcaaggacatggaggagacaatggattagcttctaccttctggttgcgtaatggcagataccttcgtctcaaatcggcacagctaggttatacattccctaaaaagtggatgagccctgtgggaattcagaatcttagaatttatgtagaaggttccaatttattcacgatctccggtcttcccgatggaatcgaccccgaatctccgggagtgaataacggatattatcctcaacaacgcacaatcatgggcggtataactctgactttctaaacctttaaaagatttattatgaaaacaaaatttataagtatcatattgttgggagcctctttagggcttggttcatgtagtgattatctagacatgacaccgacggacaaagcatcagataaactagtatggagtaaactggaatatgccgaacaagctgtcaacgatttctaccgttatatcgattatttaggagtttatcgtgacggacaatgcctggcaggcatgacggaagcgttgacagaccaactcaaatacggttcctataactatatgtctaaatgccagatacctagcgaaatcgcttatggaggatccgttctgacagtaagttatgtcagcacttatttaggcaattgggggacgatgtatgaatatgtacgccgtgtcaatgaaggtctcaataaactgaaaaagtacgcctcattcggtcagacggaacaagaacggctggaagcggaaatgcgcttcttcagaggatatttatataccgacttggtaaaacgttataaggaagtcattatatatgatgaagatctggataatataaagaaggatatgccggtcagttccgaagcagaaggatggaactttgtatatgaggacctgaagtttgcgggcgaacatttaccggttgataaaacccctaatggacgtctgactagcggagcagcttatgcaatgctgtcacgggcaatgctttatgcagaaagatgggatgatgcccggatcgctgccgaagaagtgatgggcatgggatataagctggaagaaaaagagaattattctaatgcatttaaagcaggaagtcaggaagctattctgcaatattgctatgacaagagttctactgtaactcatgattttgacggctatatggctcccggaggtgataaagcattggatggtaattcaatgaccggaggattcggaactccgacacaagaaatggtagaatcttatgaatatgcggacggtagcggttttccggattggagtacctggcatactgcagaaggaacaacggcaactcctccatacgataaacttgaaccacgcttcaaagcaaccattctttataatggtgcgacgtggaaaggcagaacgatcgcatcttatgtcaatggtactgatggttgggctgcatggaaaacggatgccaaaccagaaggacgttctaccacaggttattatttgcgtaagctggtggatgagactcatagtttcacttctgtgcaggcaagtacacagccatggaccgaaattcgttatgccgaagtgttactaaatcatgccgaggcttgctatcatttgagtggctatgccgataaagccaataaagacatcaaagacattcgtaacagagtcggcttgccttattcggacaagagtggagaagacctgatgaaagcgattcgtcaggaacgtaaagtcgaattagcttatgaaggacactattattgggatatgcgtcgctggaaactatctgcaacggcattcaccggtatccgtcttcatggacttaagatagaacagaatgcaaacggttcgttcaattacatttatgtagagtgtgatgacaaagatcgtaacttcccgactaagatgtaccgtttccctatgccacaggcggagttggacaataacggtgcggtaactcaatatgcagaatggcaataaatctaaaatgaaaacaattatgaaaaagaatatacaatatttactattaggagtattggcattaatgagttcctgccaagatccggaatatgtacttccaactgctgagcggcagggaatcacaagcttgaccgcactttttacatcaggtccttatgtggacaaagaagctgttgtctacacaattgcggatgcgtctgtagataaatatgtgattcctataccatggttttatccggaagacagtgaaaatgaaacggcggaatatatgaagacaatgagggtccaggcaaagttagctcctaactgtactattaaccctgttttgacgatattggatttgactaaagaaaattacttcacttatacagatgcgcagggatataagaaacaaatctgcattacgggtgaaagagtgaaatccaataaatgtcagttattaagtttctcaataccggccgaagatattagtggaattattgacgaagagcataagacggtatctctgatttctgcagaagatttatcttcctgtctggcagaatattcactttcctctcatgcgacaatgtcgccggatcctaagacagaggcgcttgacttcaattcacctgtagaactgacggtcatcgctcacgatggagtgacgaagcagacgtacacagttcagaaggcagtgccggataagatcccttatggatatagaaaaggcagtgagacagaattgtttaaattggatatgggagttataggtttgccctggacttcagccaactcaccttcactggccgttaatggcaataatttagttgtttgcttaggggacgattctactgctcctacctattataatgcctctacaggaagtaagattggcaatatgactttgggaagtgtaggtgttgcatctttaggttgtgtgacaagtgatagtaaaggaaacatattattggcaacaaaagcagctaatggtaaatccttctctatctataagacttcttctgtaaccaccgctccaactttattgacatcttataccaacaatacaagtctggatatgggtacaaaagtatctgtacagggcgatatcaatacaaatgccgctattattgctacgtgtgacggaacagcctcgtccggttctaatacgtttgttcgctggattataacaaacggtgtattgggaagtcctgaagtagtatcggtaaatggtgttggctattggggatctcctgtgtcaaacacgaaggttgtcaccaaaggaactactgcacaaagtgattatttcttatcctattatgatcctaacgtactttattgggtgaatggaacaagtaataatgcgtccaagtctttatccaattcggacaatggcaattcctgggcaatgaataataattgtctggatgcaagaacgttcaataatgcacagtatcttgtattggtatctacggctcacttcccgcaatggggcggcactccgtatttatatatgtacgatgtaacctcggacggatcgttcactggtacggtatctacttcagatgctttgacattcaatccttcactttcttcgttcggttctgcagatggtgtagcggcaacaggtgatgtactgcttgctccaactacagatggatataaacttcgtctctactatgttgacaacaactgtaagattatcggagggtatgaatttgattgtatcgacaaataattaatgtgtttcaaaagagttactgacattaataaacatatataatatgagaaatctttttaaaatattattattgacgttttgcggaatggttgctatcacttcatgtagtgatgattctgatggaatccccggatggccctggaatgataattcaacagagggaccggaaaatccggatgtaacagaaatcaagccacgctatgtctggattgatgcggcagctaattttccggattatgcgaataataaggagaatatctccacagatatggtgaaaattaaaaatgcagggtttactgacatcattgttgatgtgcgtcccactacaggagatgttttgtttaatactaccgcggtagatcaggtgaagcgaatggatgtgtggggaagttcgggttatgtatattatgaacgtactgaaacctgggattacttacaggcatttatagatgcagccagaagccagggattgaaagtgcacgcatcagtcaatactttcgtcggtggttacttatgtccctataacctcggatcagatggaatactgtttcgtgatgactcgaaaaaggaatgggcaagtgtggctaatctcgctgacggtctgacaaatacgatggatttgttgaatgacgagaccgattatggagctaaatttctgaatccggctaacgatgatgtgcagaacttcgttttgcagttactgggtgacctggctaaatatgacttggatggaataattctggaccgttgccgttatgacgattatggcttggaaagtgatttctcggctgtttctaaacagaagtttgaagagtacattggggaaacggttgctcattttccggaagacattatggcaccaggcacagataagataccttcagatcagcctgcctatttcaagaaatggttggaatttcgggtaaaagtgattcacgactttatcgtcaaagcacgtgagaaagtaaaatccgtaaattcagaaatcaattttggagtgtatgtaggcgcatggtattccagttattatacttcgggagtaaattgggcaagtcctaaatatgacacctcagcttactatcctaaatgggctacagcagattataagaactatggttatgccgatcatctggattatatattcttaggtgcttatgcatctgtcgataagatttatggtagcggcgaatggacaatggagggattttgcaaaaacggtcgcgagttgctgaaaggtgacgttcccttctccggaggtccggacataggcaatagtaccggatggactaacggtggacaagccgctaaaatactcgatgccatcgacgcatgtataaacaacagcgacggcttcttcgcattcgatctctgtcatatcaagatgtacgattattggagcgctttcaagacaggatttgataactatctggagtccgttcaaaaatagaaagttgataattcaatctgagaatatactcaatacaagtattctcctttctattcatagcactaagtctgagccgcaaggttcagacttaatgttaatgaattgctttatttgtataaagaacaatagataactatgaaaatatatttattacaacttgtcattttgatgagtttgagtttgaacttgcaggctcaaaatttatccggtactattcgtggaaaggtaacctgccatgggaaaggacttcaaggagtagttgtaacggacggaatcgactgtgttctgactaataagtcgggcgaatatgtgcttgctcctcaaagagatgcccggtttgtttacttgtccgtgccttccggttatctgccaaaaacagaaaagaccattcctttattctatcaacaaatagagatggataaacaagacggatataattttgagttgatgaagaatcctcaaaatgatatgaatcatctgtttctggtacaggctgatgcgcaagtcacttccgaagacgatgtgaaagcctatggcagattcctacaagacataaaagaatatgtacagccttattcgggcaaaagagacatattcggtattgattgtggagacatcgtgggcgataccccttctttgtatccatcttacattaataccgtatctactttggactttcccgtttatcgtgctatcggcaaccatgacatgacttatggaggacgtacttttgagtactcgtaccgtacttttgaaagttattttggccccatctattattcgtttaataaaggaaaagcccattacattgtactcgacaattgtttctatgtcaatcgtgactaccagtatatcggatatattgatgaacggacttttacatggctggaaaaagacctttcatatgtgtccagggataagctggtatttgtggtcatgcacattccttccagccttcagaaaaagttaagatataatactttggatcaggatgaaacagtgaatacagccgcactatataaactcttggaaggctataatgcacatatcatttccgggcatacccatttcaatacgaacgtttgtttcaatgattcgttgatggagcataatacggcagcagtgtgtggcacttggtggcgtgcggatatcaatgtagacggaactcccagaggttacggtatatatgaagtgaacggaaatcaattgaagtggatttataaaagcgcaggttatccgctggaacaccagtttcatgcttatccggcaggatcgtcggatgaatatccttctgatatcatagccaatgtatggaactgggatgatctgtggaaggtagaatggtatgaaaatggacaaaggatgggcgaaatgcaaaagtacaaaggatatgatcctatggcaaaagccatctgttcggataaggaaaaggtgaaatatgactggatatctccggttctcaccgagcatctctttcatgcaactcctcatgacccaaacgcaaggctagagattaaggtgactgaccgttttggtaatgtatatactcaaactattgaaaacaaataaactaaaatcatatgttcagaaacagatacttttggctacttataagtttgttctttgttctgaaaacagaagctaaagtaaccctgacctccatttggggagacaacatggtgttgcagcaacaagcagaagttacttttcgtggaaaggctactcccggaaaacgtgtatatgcttccgcttcatggaatcatcggaaaatctatgcagattgtgaccggaacggacaatggacactggctcttccgactccggaagccggcggaccatataccattactttttcggacggagaagagctgaccttaaaaaatatcctgatcggtgaagtctggttctgctccggacagtcgaatatggaaatgccggtaaaagggttccgcggacaaccggtctatggttcacagccctatatcgtgtccgctaatcctaaacgaccattaagactttacaccgtaaagaacgattggagcacgactccgaaagaagaaggaatagacggacaatggagtgaagcatcttcggaagaagtggccgatttcagtgcaacagcttatttcttcggcaatctgttgcaacaatctttggacgtgcctgtaggattaatacattgctcctggagtatgtcaaagatcgaagcatggatggacaaagaaaccttatctcatttttccgaagtaaccttgccggatacaaatcaggataaattcgaatgggctgccgggacgcctaccctgttgtggaacgctatggtaaatccatggaaaggattccctgtcaaaggagttatctggtaccaaggcgaggcgaatactcccgatcctgctctttataaaaagctttttcccgccatggtctctcaatggagaaatttctttcataatgctgaaatgccattttattatgtccagattgctccctggaagtccgaagggaatgacaagttggattgggcatggttccgtcaatgtcagttggagctgatgaaggaagttcccggagtgggaatggtgaccaccggagacgcaggcagcgaactctttatacattcaccttataagatcaaggttggagagcggttagcttattgggcactagcccagacttacggccaaaaaggattccaatattccggtcctgtctacaagacctatcgtatccagggaaatgccgtagaaatagactttgaatatggagaggaaggactgactccggaaaatcagaatgtaaaaggttttgagatcgtaggttccgatggcatattccgaccagcgaaggcggaggtcatcaatggcacatctactgtgaaagtatggaatgattctgttagtgacccgacagaagtccgctactgtttccggaattatatgcagggggaattatgcaataatgccgggcttccggcttctcctttccggatcgtcatcaaaaagaaaccggccttaatgtggattgatgccgaagcaaactttgagcgcttcagtcataaagattcgattgattattatttggaaaaaatcaaatcgctgggctttacacatgcggttgtcgacattcgcccgatcacaggagaagttttatataaaagtgagtatgctccgcaaatgaaagaatggaaaggagccaaagccagtgattttgactatctggaatactttatcaaaaaaggacacgaactgggactagagatacacgcctcattgaatgtattctgcgccggacacaactattttgaccgtggaatggtatatagcggacatccggaatgggcttcgatggtgtacactcccgataaaggaatcattccaatcaccgaagagaagcataaatatggtgccatgatcaatcctttgaacgaagaatatcgtacccatatcctgaatgttctgaaagaagtcgtgaccaaatatcccgacctggacggtctgatgctcgaccgggtacgttacgatggaataaccgctgatttttcttcattgtcacgtgagaagtttgaagaatacataggtaaaaaagtcgcaaacttccccgaagatatttttcgttggactaaaaatacagatgggaaatacataacgcaaccaggaaaatatttccggaaatggctggaatggcgtactaaaaacattactgatttcatggcgcttgcccgtaaagaagtaaaggcagccaaccctgacgtttctttcggcacctacaccggtgcctggtatccatcttattatgaagtaggcgtaaactttgctagcaaagaatatgatccgggcaaagatttcagctgggcaacacccgaatataaaaattatggctatgccgagctgatagacctttatgctaccggtaattattatacggacataaccatcgaggaatacagaaaaacgaaccggagtatctggaacgaaactgattcgcaggctcaatccggtacgtggtattgtgtagaaggctcatgtcagcatttacgtcagatattgaaaggtaataaatttatgggaggtattctggtggaccaattctatgacaaccctgccaaactttcggaaacaatagagatgaaccttcgccgttcggatggattaatggtatttgacatcgtacatatcattaccaaaaatctgtggaaagaagtagaggaaggaatgaaaagaggaggttccttatgaataaccgggcctatgcattagacgctttgagaggatatgcgattattacgatggtactttctgctaccatcgtaacgcaggtgctccccggttggatgagtcatgcgcagacgccgccacccgatcatatattcaatccttctttgcccggcattacatgggtagaccttgtttttcctttctttctgtttgcgatgggagcagctttccctttttccataggtaagcgtgcagagaaaggtgattctaaactgaaattagtatatgaagcggtgaaacgtggagtacaactgactttctttgccatcttcattcagcatttttatccgtatgttctgagttctccgcaggacatcagagcctggttgctggctattctttgctttgcggttctgtttccgatgttcatgcgcattcctttgaaaatgccggactgggcacataccggcataaagatagctgcatacggaattgcagtaatcatgatgcttactacttcttatgccgatggaagaacgttcagtctgtattttagtaatattattattctgttgttagccaatatggccatcttcggttctgtgctctacatttttacgatgcataaccgatggttgcgtttgggcgttttattgctgctgatggctgtcattttgggaagtactgtcgaaggttcctggacacaggtggtattcaattatactcctttgccctggatgtatcggtttgattatctgaaatatctgtttattataattcccggcagtattgccggtgagtacttgatggaatggatgaagggccgaaaagatatcgaacagccggcttcaccgcaataccgcaagataggaattgcgctgctgatattgactatggtgattattgtattcaatctctatgggctttatacccgtatgctgacagtgaatttattagcgacacttgtgctgttattgattggcaaattggtattcttacgtccgacagaaggaatcgctttgttatggaaaaagctgtttaatgccggagcatatcttctccttttggggctatgttttgaaccttttcaagaaggtatcaagaaagatcctgccacttttagctatttctttgtaacttccggtctggcattccttgcgctcttattcttaagtattgtttgtgattatttcagatgtgtgcgaagtagccgctttcttgttatgtccgggcaaaatccgatgatcgcttacgtggttggtgatttattcattatgccgttggctaatatactgggagttgcctcgctgttgtcttacttccagcagaatgcgtggctcggattccttcagggagtaatcattacgtctttagctgttttggtaacgatgttttttactaagatcaagtggttttggagaacttgacattattcaatagatataccgatagtataataacaggcattaaaaacaaaatgagtaaaaagcaaaatgatagataaactacaaaatagaaagcataatttccttattctcctgtttttgctatttctatcttttgatagatgggtcaagatagaaagagatatgcatacaatcttgaattaatatgcatgattatgaataaacgagcggtcatttgcataaaaaacaccgtatagtttgaaataaacataaggttgattgagctaaaacataaggttgattgtaaataaacataaggttgcttttaaaggaacgtcccattgctttaaaagcaacgctaagtccatttaaaaggagcacattttagctctaaaatgatgggtatcttatttattagactttgttttaggatgaaaaatattaatcagaatgatgcaaagtaatataaaaagagaaagatattacagaatagtgtgaaaaataacacaaaaagaatacatctagatgtatattcgcaacaaagtgatttcccgtaacggcaaatctctgtcattttattctctatcctatgaaacgatggaaatacgcccgttagagagtttataattatcaaaatgacaaaatgccattttgataattatataacatggtaagtcttaataaaacgattcctttttcaatggccatcctgtgatagttgacatataaggaatcaatgacatagccattttcatttgacctttgtaatttggatgccatactgctcctaggtctgtagtcggatcgcaaaggccttcgggaagaactgctatataaactttcttatcattcaagtctttgcgcatacgctccatgtattgaacgatctgccgttgagtaatagccggactgatgcataatatagggacatctccgtaatttgcacgaagacggcttattagtagcttataagcatgaataaactcatcttccaacggatatatattggtggaaaaatcattagttcctaaattaacaaccaccaaatcgggcttgtatgttttaaagtcccatttcttatccaaattcatatcaaatgtattcagcatacggtctttcattgtcacggcagatattcggacggaatctccataattgcggactactccacgtccggaatgtgcaataagcgtataatcggcattgaaatagcgggcgataatagtggcataagataagttgcaattctccgtttcagctttataaggttcgctacggtctttcccttctacaccatagccacacgtcagcgagttaccgataaattcgatatgtctggacgggcactccgtttctttcatcagttctcctttattgtgaagcacaaattgatgaatggttgtctttccccattccccttccgtacgtttttgaatcaacacatgatggatgcttttatccatgccggaaatgaaattaatcaaagtatctttaccggatacttttaccgttttgtgtaaaaggctgtctacaaaaacattgtaataattaataccagtatctgaaatcttcatagacaattctcctcccgaaagtcgggtacgaagataagtaccggtccagtcgaaagaaacggagccatcactctgtatttccgtacgtcccacgtaagaaacgttttcatcattagctttatagtatctgttctttgtagtttgagcatttacatcttcaaacaacagacagaggctaaccagaactaacacatttttccacatatcgttttctaaattaatcaaaggtaatcacacaacttccggacccgtcggatacaattctaagtcctttggctgttactttattaccggtaattgttattgatttacttttctctataatcgtaaaagacttctttgtataatcgacaggcaactgtattgtcctgtcgacgctcttcttgcaatctataaaaaggacctttttattatctataacaccttcataacacagcaaatcatcatcatcagaaacaggagacttaaaccaagtatacactccgctccaatgaataatatccccctttttgtgttctctatcagctataatcttgtggtacgtcttattgctggaatttcctatgaatataatatcatcatctgatatttcttcatgatttcccaatccatcggcaaacagataagaagattgatacgcatttgcgcttttctcaatgaaacggcgaaatgacggatactctttctttgtaaaggtagaaacatccttttgtactgtccagtccacatacttgccattggcagttaatgtatgtgtctccttgtcaaacatagattgcattccgtaatacatttgtactgtcacgggagactcattttgaaattcatgagtaaccaagacttgaatgttatttctataaatagaataattgacagtctcaatacataagatctcattcagaagtgtttttccactactggtatcggctttggaagggttcattatttcattgattacttcaatctttatctcttttgtcagagtcgatagatctgtctttatttcttttccgtc

SEQ ID NO: 4862 - DNA, 11729 bp, Unknown
  gut microbiota DNA sequence
ggttttggcatctaacttggctgatatatataaatcttcgccggttattttcactctcatttcttcggatatcgtttcagtcccgggagagtcttcttccgcagaaggcttatccgggagtccggaagaaattcccgaatctccattcgagcaggctactaagtgccaggataaaaatacgaatgcaaggattaaacgtttcgtcatggcttctatctttattttaattcaaatttgagaacatctttgatatccatagctgatgctgctatgatagcttcaaatttgcccggttcacaaatccattcatgtttttccgcatcaaaaaagcttaatgcctctttatcaatagacaaagaaactattttttcttcacccggcattaattttactttcttaaatctctttaattctttcaccgagcggggaagagaagactttatgtctctgatataaagctgaacaatttcctgtccttcacggttccctgtgttcttgacagctaaactgaaagttattgtttcgtcaactgacatgactttcttgtttgctgttagttttccatacgcctaccactctgtctccaatggggtgattcacatcttgataaacaggagcttgcgtcatgaaagatgatgccagaaaaggcatgattgctatgatattaattgatttcattgttttgttattcttgtccgtataaacagtataaatataatatgctgatggcagattccatcagcatattatccaaatgattattataagcctaagaaagctgtcggtgcatctgtggttatcagatcaaaaccattgtcaatacaccattgcatctcagaagggatatttacagtccatacattggaggtcatccctgaatttttcagatctttcaaccaatccggatttttatgataagcccaataattgtaatctgccccggtagctcccaattgtttcagttccttgggcgaaatatcctgtcccaaatacaaaattggagttttaggaggtgccagacgtataaactcacacatcacatgacgggaaaaagagatgtattctactctgtgagtcaattttttctcttccaccaactttaggatcatttcaacggctttcgtttcacgttccggagtactgaggggtttcatctccagtatcagatgtattttaagtttcttcgctttatcaaggaactgctctaaagttggcatattctccccattgcttaactttaaagtgcgtagcacgtcagaagatgttttctccagagagtatccgtcatgccatccgtcatgattcaacatcaactcatcgtcagctgtcagccatacatcaaattccgaaccgtaacaacctattgaatcagctttcactaaagctgctagcgagttctgtgcagatccgggtgtattccagaatccacgatgggcaataactttggtctgatgagattcttttttttgcttgccacgtcttgatacaatcagattagccagtctgtccatgacttcatgatctttcgggttcgttgatttatacatatcaagaacagcatgattgccactataataggccattgcagatgtacggaaggcttgttgtctttcaaaatgatcaatatacgctaccagacgattataaaacgagtccttggcatcaaacaatgctctttcgtcaaattcaagttccatccccatgttcagagtggcggcagattgacatgcttcttccaatcttttatcgggaatagaggctttaaaaaagtggttcggttgttgataagcaatatcaaagcctaattctttccattggttgtagccttttgcctgccaatacggaatccagcaaaatgttttgttcattgaatgaatatacttacttaatggaactgacagatctttagtgaaatcaatatcctctgccagccagtagaaacctgatagtttcagatgtttgtattttgcctgtttgaatcgcttcattaactcatcgatataccaacgggtggccttcacctgatcctcttgtctggaaaagtccattggctcgccatccacttctccccaatctttttgtccgggaagaacttccggaagacatagtactatctgatgagtaaaatccggttttccaatttctttaatctgtgttccgatacatcgatctaaggcagacagcgcttttccatcttcaaaaagacgatctaataaccatagccattctttttttcttgcatttttatctgagtagcgtgttgcaaagccacagcctttcccatctgtgaactccaaaaacaagaatccgtcaaataaccagtctttatgtccatctgcaaactgatgtaccacataggggagaaattgatccgaagtccagtcaatacgatgcactcctccctggtaaataagtgccagatcttttattttattctgtctatatcctttatctatggatagcgcatgactatccatagtaataaataacagacagaaacatatcaatccttttagatatagtgagaaatagttcataattttcatgtttttagttacataccccaagcataaacttcaccaagactaactctcagcccgtcataagtcggataggtatcagttattacaaaacgaatgtatcgggcttgtgtcgcaggaacatccatattaacgttgggttctccgattttgggagaagtccagtcttttaatttaacccaattctcgttatcaatactagcttctacataaccggctttcgatgtgcctgcccaaacgtgtgctgctggtgcaacagggttagcaaatccaaatctgaataatgtatattctttccccatgtcaaatacaaagtaatagggcaagggctcttttacatcccatcggcatagccattgtgtgccaggattattgtctatcaatgattccactccccatcccatattcagataccatccgccgtcttgggtacaacagttgttgaaatctataacactccatcctttcttgtctattgggtccggttggaatttaactgtgtacagtttggacgcagcatcaggacttataccatattttgaaacggaagtaatgcgtagtggaagtacatagtcaccaaataaataagtaccctcttccggtattaaccctttcttgtggtatttaattttaatgaatgtttccttcatgcctgttaatataactcctttattatctacagtaaaggaactctccggcaacattttataagccgtgccatgagcggtattataatcaatgactaactgaggatcgacttcaatctgaaatgaaatatcttcgtcattagaataattagttcttatctttacgaacagttctctttcattcaaatcgccgaaagtcggcataaaatcagtaaccggactcataccaggaacatccatttgcaaataaggttccttaatagtaggtacaataatggtttttagtcgctcatcatctgcagagataaaattttgcaccacactcatttgtatgggcaagccatattcctttcccgtagaaagaagatcggatagacggtcggcattccatttaatatcaaaagctttccgatagtcggaatcgttgagacgcagagcaggctgaagaatggtataacaatcggaaggtaataattggatcgatgttccattatccgtattataactctgaagaacagtctcgtcaacagaaatggaaacttctgtctcctgctttcctttcccacttttgataacaaataattgatagggggtatccataccacggaatatctccgtttctgtataggtagaatgcaatagtccgatttgatcattaaccatgagattatcacgatcatcagtacatgccgatgcaataaaaagtgcagcaactatgaattgtattgtcttatgttttttcatatttatatccattacatatatttaccatccgtaattctgagtaatattcttcatttcactcaattgttcttgattgatagggaagaaataatgcttaggctcaaatacccgaggaccacctttccaaacatttgatgtccgcgaccaagaatcttcgtatgaagtggccaataaattaagagaatattccggtccgggaaactcttgttgagcaatcatccagcgacgggcatcataatatcggtgtccctcaaaggctaattctaccatgcgttccttttgaatcagcatccgcaacaaatccttattgcctttcacttccggatacgctgtttcgagggcatttaaaccggaacgttcgcgaacaaggttaatatacttcaatgcttccgtttcattgcgttcgggcttctcattgcaagcttcagcatagtcaagatatatttcggccaaacggaaatagggccagaatacggttccccaactgccactttctgtattaagagcaggatcgagtgggcgtctccacatatatccgactttgacacaatctccggattctaagtacgaggacgatcctcccgtaaaaaaggtaacttgttttatgcctttatattgattgatccaataaaaaccatttggaaatacagaagcataaaaacgggcgtcacgtccgacacagctattatgcgctttaaatccaggtgcaaaactgactcccggctgcttgaaattttctgtaaaaccggtatttgtatatcccgattgctcatcaattacaggattcccgttattgtcatatccggtaacaggatatcttccggatttagccatcggataagtatctactaatttcagagacgggcagaaaccaccgacacccaattcacaaactctaggaggcatgcaccggctatacagatagaaacctatagctccgagtccagtattagtaggattacgtccccaggcaccccagatcgtctctttattccactcttcaaaaagaactccttgataagatttgatggcacgcagtaaagggtctgcttcagtctggtctttgtacaattcatagatgttcatatctataacgtctttggcagctttagcggctttttcccatttttgaggatcgggactttgtggaaaaaggaaatcaccatacagattcttcatttgtcctttataaagatcgcatccattatacaatggactggcggcatagagcattaagcgcgctttggcagccattgccgctcccttggtgatacgtcctgcccattttgtgaaatcgctgatctctgcaggaagttctgcaatagccttatcatattcttcagctatgaaatttacgttttcatcaactgtatgacggtctatcgtttccggttttataagttcatccgattcgatgtctccccagatatacacaggaccatattgacggaatagttcaaagtaataataagctcgcagaaaacgtgcttctgctttcattatacgtctcgtttcagagtcaatctccaaacattcgtcaacatggttcatgaatatactagcttgttttatgcctgtatactttgctttccaaatattatagtttggagtagaaggtccccatgatccattattgaaagagaggtagttgacccactgataccaggagaacatggcttcatcactacggggaactgcgcttccttcttccagatattcatattcccgtggcaagtagctataaacatgcgctaaatactgttcggtagagacacgcttactaaaggtttcgtcttgtgtaagctggtcgagcaaagtcacatccagataatcgttgcatgatacaaagctgaatgcaacggtgaagtataggaatattcctaaaattcgtatctttttattcatagttctaatatactttaaaagttaagattaagacctaaggtgattgttctcatctgaggatatatatttccatagttggaatcgagttcgggatcccacaatttgaatttgctgaatgtcaaaaggttgacaccctgtgcataaacacgaattgatgacatgcccagacgtttataaatatgcttcggaagggtatatcctatctccacatttttcaaacgaagaaaactcatattacgttgccagtaggtggagggttgaagattattctctaccttgctcatagaaagccgtggataagtagcattaggattaggattgctggttgtccaacgtttttcggctacatctgcgtaaatctgtcctaaacgctctatattatcagaggcaccataaagagcgtctccaccgataatacgagtcacatttcctactccctgcataaacagagaagcgtcaaatcctttccagcccagactaataccaaatccataatttatttccggtacgtccgtatagccaatcgctaccttatcgtatgcgtcgataacgttatcaccattgatgtctttatatttaatatcaccaggacgaacgtttccaaagttttgtttggggctattggctatatcttcttctgactcaaaaagacctagagctataagaccgcgttgctgacgataggcaaatccagcttcactttggtagggccatataggagtcggtttatcatcatacaactttttatttcgattgtaagtgaaattggcacgggcagagacataccagtcattaaatcgttgttcatactccatagaaccatcgaaaccttgattcttcatttctccaagattcacatactgggtttcattgagaccgacgattgaaggaacactttcttgctgaatatagataccggtacgcttttcataaaaataatcaagttggaatttaagctggtcaaataagccaagttccagtcccacattcgctttttgagctttctcccatgaaacattcaggtttcccggaatacctgtagaaatacctacgatacttccactaccgggattcgttccgaaaatatagccgtattgtccttctttcatggtggagttgaatgcaaaacgtctgtttccgccaatctggtcattacctatttctccatacgaacctttgattttcaacaggtggatagtagaacgcaacggatcccagaaagcttcgttgcttagcatatatcctatagcaaaagagggaaagaaaccaaaacgtttgtcaggtgcgaaattctcagagccattgtatccgaagttaaattcagcaaaataacggtcgtaatatgaataagtagctctaccggcaataccgatgtttttgtgggcaaaagcgtctacataattacccgggaaattgtctgtatagttacgcatactaaaaagaaacaaggctccaacacggtgcttttctccaaagaggcggtcgtaattggctgaggcttcaaagttgatagtacgtgtgcccgaattcgtccgtgtgagtttcatataatcactaccttcagtactccttacaaagtcaagatttccttcttcatcacgtcctgttgcatagtaggtagatggtgttacaatgcggtttagtgtatgcgcattgtaggcgtcccatgagaacttaacattggcttttaatcccggagttaccatttttgagaaatcctgtgtaagcgaaataagtgattgcgcattgttgaagaaatcctgcgagtacccagagttattcaggctgttataaggattggtacccgtacttggtttagctaaagtgccatctgaataaatagtaggagtagctatcggagaagttcggatcatataagcatacaaatctgatagtgaaccataaggacggttcttggtctcatattgattggacagtgagagactcagctcagtagatgaagttacattgatatcaatatttgaacgaaaactaaacttgttatagcgcattgaagcatcgtagcggtctttatccgaaatattgaatacactgccttccgaataaaaggagccgcctacataataacgtattttaggagatcccccggtaacgttgatattcacgcgtgtggtgttggagaagtctttaaacaatgtttgcatccaatctacattcgggtaaagatccggatctgtattattcaggtattttgctttttcttcaggttgtatagccaagcgtccggatgattccaaagtaatatcattataataattgatccattgttccgtattagccaattcgggcatacgtactggattggtaaaaccatattctacgcgtgcattaatcttaggtgctgattcggttccacgttttgtcgtgataagtacaataccattggctccacgcactccatataatgctgttgcggtagcgtctttcagaatagagaaagaagcgatatcctcaacatctacaaggtccatactacgttctactccatcaaccagcactaaaggtttgttgcctgcaccgaaagtattgataccccgaatccaaaaatcagcacctgcacccggttcacctgaacgctgcatgacaactataccagccaactgtccggccaaaccggaactcaatttagcaacaggcattttcagctcattcatcgaaactgtattgatggcaccaataacgcttgcttttcgctgtttaccatatgctactacggtaacttcgtcaagttctgctgtttggggttgcattttaactacgatatttgtttgcttacccaccaaaatagtctgcgtttccattccaagaaaagaaacgactagtttatctgttggcaagacttctatcacaaatgttccgtccaagtcagtgataactccccttgaacgtccttctaccaatattgatgcactgggaataggttctccaaattcatccaagacttttcctgttactttcttgccaggattgtcctttacttctttgatctcatctttttgtaaagaatgagcgagagtattactggcgttcatgtttactagtgataataaacagaatgtcgtaacagtccagattttaattgaaaaaatgttttttcgtaagtccgacatcatacattaataatttaaagttaagtaattctgtatttttttcttctttagatttgataatttccttaattataagttcggtattatattcataggctgttttgttttataatttataattattttgaggtatgtacttaataaaaatattgcatatatttctcagataatgtcttggccaacaatatcgggttctctccagaaattataggatggtgctctttggataatgtccactcatattcgaagtcagtaattgattgataaaattgtttttcatcaaacttctggccggataatgaagcggttattacttctgttgtaaagcgcttccaacgttcacgataataactgtaagttaatccaccccagcccctgtttgcatagtcatttaactgggttgccttttgtccccatactgtcaggatacaacgtgcattttcctcataatattctttttcagcttctgtttttccaaaagaacgtgcatcgtcaatccacttaccgattgagaaattggtttcacaggataacagacggtctgtatctatcaatagtgcatccatttgatcggcccatttcttcattccatctatgtctttttctgaataacattgagtgaaatgatctctaaacgaggaaaagagatttcctaatacttgccgtcctacatttattacatcaaatcgatatccagtattgtttatatgactggctttcaacatttctgtccaaatatcccataagtcacgattgttgtaagtgatgtccggataggtattccaactatctgtgcccactaacattggacgtgcattcattaaaacggcttgccctgctgttgcatactttttatatatttttttatgtaatgaatcccatgctttcagaatatgtctatcttgatttccccctctgcattttgcccagttttgaatccattgatcagttgttaacggataatcccatgcctggtcaaatacaaattcatacataaaaggattcacatcgaagccttccaaggtagctcctaggccatatacattctcaccaccttctacaaagagtttttcaattttgacatcaacatcatccagatttccgaccatcatggagtttccaccaaaattgcctaagtagcaccacatatatggttttccgtagtacatttccgtattcctccatatttctgtactgtcacaatagtaatccaacagtatgagtttgtcatctggcacagcctccaggaaagaacggattctgggttgtgtccatttcttttgatcatggtaaaacatccatgtcatttgcaaccacttagcctcagcatctacttgataaatggactcatatatcttcttagaaacctttgccaggaaatcttcattccaatttggagaatcaacctcattaaaaggatcaattccataaatatgatctgtgccatatattgccgtctgctcttccaaatacattttttgaatgatgttgaacagagagtccattggttctataaaatgactgcgatattttgaatcatatcctccccattgactcatttcgtgaattttggcatctggatagattgctttaagttctttaggtacgtgcccagaaaatgcaggtaaaacaggggtcatattaaagtcgcgttccctctttaatatttgtttctgtaatacttcttgttgctccaaccatgatttcggcaggggactttgccaataatcgacattagacatacgatgccagggcaagtgcgcaggtcctgtgaaatatgaacgtatttgttcatcgtttaatcctaatttgctccagaccttataccatactgtctcttgtccactgatagctaatggcatcgtaattccatttaatgccatccagtcaatcaacctttcccaatcagaccatttccaataaggcattgtatatccaaatgtacagtagttcaagaagaagcgattgtcacacttagaacggatagatattggttgaggaattactggtaactcttcgggcatatcaatgctatcagaggcataccaagatacattcgtatggcagtaatatttcagataatggttaagacctacggccaaagaattattattatttccttttatgcgaattttcttgtgtgccgattctagtataaaacgatccatctggtttgagtcatttagtaattcaaattcaaaagaatctgcatgttgagaaaataatctctggcacatctgttctaatactgggttacttgatccagtatcctttctacaacttgtaaaaagaaaaattgtaagtattatatagaagtattgtctgttcatatcagggtaataaaaataagaatgtattatatgttagatatttgattttcatggatgtataatttcatttgtttctcgtaactcttccagtactttccagcattgaaataatccccttggtacatgaaagcagcctttccatttcccacctttgagtggcagcaatacttctccctgccgattcagataaccgaaccattccggatattccggatctttgaagtgtgtccatgtgtagtcatgtaccttctcaaaccattccagacattttttatctccggtcagctgataacctttcaataatgaaatcaaggattcaatgtgcacccaccaaagtttctgatcccactccaattgttggggaggacaaccgttacggtccataaagtaatagatgccgccacattgcttgtcccaaccgtaatcaagcat

SEQ ID NO: 4863 - DNA, 22934 bp, Unknown
  gut microbiota DNA sequence
ccagccttttgcccagatccatgataaaccacatcgcttcgatagcatgaccgggggtcacctgacgaccttcgaagcaatcaaccagattaccgtccatatcgacattctcaacaatgataccacccagctccggacgataaaagacattcatcacttcatggatgcaggtttccattgttagttttaagtagtcagggtccagcagatgttctatctccaaagccagattgcaaaggatcatcgggagagcgaagttcttcaagtttcgtgtatctggatgaagcttattccatttacctttcggattatcaactttagagagtatgatttcaaaagttttttttgctatgtctgcatattcctgacttccggtagcaagactcaactgcccgaaggccatggtggcaaaagtatatgagaaaatattgtatggttctactaatggtctacccgaacgattgagtgaaaaataccagttgtaatctccattatgtccatattttttcaagaactcaccaccctgaacggcacaatccagccattcctgtcgtttttccaccttgttgtaaagcatggagaacatccacacctcacgtccctgcaaccagatgaatttatctgtatcaaaaactcctcctttgcggtctaagcaggtgaaataaccgccaaactcaagatcttgagagtgttcgagccagaatggaaggacattatccaataattcattccgatattgattggctagtgttttaaaatccatatatctttaagtgttaagttattaaggtttctttcttctactgttccgaccgggtccagtatctttcaatctcttccagtgactttcctgtggtctccggcacgagtttccatacgatgagcatatacggcacgcacatgactgcgaacaggaagaatgttccggcgggggtgagattctggagcatccagggggttaactgtccgatcaggtacgttcctatccacagggcgaatcctgcaatggacatcgccagtccgcgcaccttggtggggtacatctccgaaaggagcacgaacaccacggcacagatggagacggcacagcagaatacatagaacaggaagaaaacgagtaggaagaggctggatactccccaggaatcaccgaagaggaagtaaatgccgatcagcaggagggagacaaccatccccgaaactccgtaatagaccagttgcttgcgcccgaccctgtcgatgattacaagagcaagaacagtggtcagagtgttgactagtcctacgagaacttggcttaaattaactatagtatacagatgaagctagtaaagctcctctttttagttaaatatagaaaaataagaaggtaaaatgtatataagtgtaatttgttactttttatcgttatattcaaattactcgataaaaaacatgaatatatataaattgtcaatttatatatacgatgtaacaagctttcctgtgatataggatgtcagtttgaaatttttagtaaaaagattctgggatcaactgagtattgttgataataagtcaataaacagaaactatttgttatgagtttttattttactatgtatgttttgtccgttgtaaaaaaatgaaagtaattatagctaaaaagttttttattatttttgtagaatcattttagtaacattgaaatgaagttgttctcgaaaaaaagactacctttactctataataaagaattatataaataatggaacaaaaagaatatctcagtattaaatcctttggtccaataaaggatgtcaaattagataatatcaaaccattcactttctttattggtgaatcaggtagtggaaaaagtaccattttaaaggtgctggctatgatgagacatatgtgtaagcaaataaatcttcgttcatacttgaaattgggtaatgttattgataaaaccatagatttaagcatttctgaatatctacgtaatggtgggatgacagattatgtcaaaaatgatactgaaatagtttatagcaaaggagattgtaatataacctatactccacagaaaggactaaaaggaacaagaaaaataatcagcagcgagaatttatcattggagaagatctcatttttctctgataaacggggagctatagctcctttattagcaaatttgagtgatggagcagcgttgggattctattttaccgagacctttcaagactttaaaaaagctacagaagtgataaaggagctggaaatgccttatttaggtgttcgctactatgaaaagaaagctcagaatggaagcagacaattctttatcagcaatgtaaatgacacttataaaattcattttgaagatgcatcttctggcattcaaacgatgacaccccttgctgtgatcgctgaatatttctcaaaacattttgatctggtacacggatttaattcttctatagttactctattgggcaaaaatgatagtttatcatctttcagacatgatatgaatatcggtgatattgccaaccgttccatacatctgatgattgaagaaccggaactgagtatgtttcctacagcccagcgttcatcattaaatatgcttatagataaatgcttgaacggaaataaatatatgacattgactttggctactcatagtccatatatcattaatcatttgaatcttttgcttaaagcatttgacaaaggggtgaaaatagaaaatgcagcattggactatcataagactgaggtatatgtagtagagcatgggatggtaaaaagcattaaagttcaaaatgcccatctgataaacacggattacctatcggatgatattaacgagatatacaatgagtacgataaattagatgagatacaatgattgacttactaaaacgggaactaccgtcacattataaattacatcgtaccattgttgatgttccatatgagattactgctgaagagcactttgatttgacagacagaggtctgccatctatcgtggattataagactgggaatatttctttcgatcatagtaatcggacagaagttcaggttattaattatgaagcgtatctaataggcctgaagggaacaaaatttgaaaccggaaggaagaggtgtgattttattttgcacgagacaggaggcagttgtgatagtttttatatcttaaacgaacaaacatctaccaaaaaaaatattgagaacttatctaagcctatacttgataaggataaaaacgtgatctatcccggtggaaaatatgaaaaagcggaaatacaattgttggaaacgttaagaacaatcagggctgttccttctatttctgcttttataaatcgatataagcgtaaagtatgcttgatatcatatcttattaaacctgatgaagattcaaaggtttcaagcgcccaaaaatcttttggaagatataagctgattgaatctagagaaactggagaaaatggagctttattggaacatccttcaataaatgccgaaggtttcgaatttcgtagaatcagccatgaatattcatttaggttgagttgatatgcgttgagagatattcagaaaattaaaacagtagattaaataacatcttataaatctactgttttaatgcttaaatgtagccggatgaaaacgataaattcatagaccctatcgctttatcattttttttatgaatggagttatcaaattggcatatcttatcattcccaagtcggtaaaatgaatgccatcaaccgtagcctcaccatcttctcctatcatcttttccgaatgaatcaaatatatatctttttcccccttcttcttgagtgaattgaaaatctcattcaatgtttgattcttccttgttacttcatgagctactctctgatcaaataatgtatgagtaaaaatagggtcttctataaatacaatcggagttttcggatgcttgttgcgaatgatccggtaaaaagtttccatacgttctttcatctgttctactgaagcattgggtacaaaatccaaaacgaagacaccggcatccacttccgccatgactcttgcgacttcaaggtcaagttgtccgttaccactaaaaccaagattaatgcattctcggttcaaccttcttgatatgatattggtatgtgccattccgggacgtgaagcacagcctccttgcaggatgctggttccatagaatacaattggtttctcacggatcggataattaatctgaggctgatcaatggaagataaagaatcgactcctatagacagtgacacaagtccgtcataaagaggaagatatagcatatattccctttctttaggctgcatattggcgataacggtagcttgatttgtttttccattaggacgtgcactattgacaaatctccactgaccgttctcttcccaacaatataaatcaagaccttttattcctacatcggtcatatgattcatatggttattaaagagattctcccatttcaacgctattcgggtagagttactacgaaatcgtatcgccattcctgccgaattacgactcaaattccataaagggggacgagaaatgtttttgagagaatccggtagtctctcatatcttgcccctgtgtcttgtgttgcttttcctaaaagaggaaagcatgacgcatcatggtacgtcatttgttgtgcctgtaactgaatgccgaacaggcacaacattgtgaaaaaaaagaattgtttcatcatctatttaattccgacagcggtcagcactttcctttgtttgccgtcactgcctttaatggtttctttgccattgaccagcatgcacgatgaaccgcctccgtcaagattcagcgcttccgtacatcccagatctttcattactttagctacgttggcagtggtcagtcctgctactccttctgtcatgtttctgccttcgcacacaaagataatcatttttttgttagttgttataccaattgcggtacgaggttgattggaagctgcagaaatatccagcatttcttctacatacgtgtttttaatctctcctgcacgcagtaaaactgtgacacctccgataccggtggtagcctccaatgcttttgcgccgttggggaaagtagatgacggagcctgcaacggatccttgtttatatcgttatcagcaggggcgggatagcaataattaattccgtcggatgcttgataagtccatgtcgtttgaaatgttccgtccttcatttggcagaaggctcctaaagtcggataccacatagttacccagtcttttgaatagtagttctgattgggtgccagtaactgcccttcacgaatcactagattttgcgaataatagaatccggcactgtaaaagaacaatcctccattgatgactaccggtgccttggaagattcataaaactccgaaggggtatgtatcgatttacctccatatccattggcttcctgtgagaaagcgatgtcgcccagaacttcaaatttagctttactcatatctgcgacagctatgtaggcaatcgccttctttcccgccagattttcaggtgatttatagatgtgaatatagtccggaagacttccgaaattatcggctgtcgtccatccttgtgatactatatcaggattcgattcttcctcttcagtttcctgatcccattcccacggatgatcaggatagctttctccacatgaacatatagagaaggcaagcagtgctgttgctataaaatatagacgtttgattaacatgattcaagtcctccaaaaacattttaatttagtaaataatatggttattaataaagccagagaagttatgatgactccccgtaaaaagcccagccaggcattttgatccagataggaaagataggttcccagtcctgccagattcaatagaggtaatactaccaactgggtggatacgtatgcaatcatcggattctgccctgcatattccaatggacgggtcaatcgggaccaagaataaatgtcgcacataatagaaaatgcaatcatcgccataaaggcaagtcccgatgcaaggaagtaataactgtacgtagaaggatctttccggattcccccttcgtaagcttcaaaagccagccctaataatatcagataagttcctgctctgaagagtttataccaataaccggtgttttttccttccacctgcaagagaatgtagagaacgcataatatagcgattgtacccactaaattgagaaaaagataacgcatataaagtccgtataaattgaatacgatcagtccgatggtcaataagagtatccatggcattcttttgcgttcgtctttattgtcgtttacgggcatcgtgtttttgcagtgtaaccactcatgcagatattctccggcaatgctgccgggaattacgataaacagatacttcagataggagaacttatacatccacggtaagggcgagaatgccatcaggctatgattccatgattctgcgttttcatttcccaagaacactgccatgataaaaggcaatattgctatacgaatccatggcttattgatcgttaatgtataaatcagtgagccgaaaatggccatattggccaataccagaatgataatattactgtagcccagactgaatgtccgtccatcggcatagttgatattcagcagcatgaacactcccgttgcataagccagtattttaatcagcatccttacgtattccggcattttgaacggaatcctcatgaacatgggaaacatcaaggcaaaacctcccaatgcaatgagccatgagcgaacatcctggggagaagatactacccacggatatatatgctgaataaaaatagcgaagaaagtcagccggaaacctcttaaaaggctgtcgtatataattctccggcgggagctgccctttctgtatttgttacctattgaaaaagggaaagcagctcccattgcaaacaggaaaaaaggaaacaccagatcaacccaagtgatcccatatatagaaccatcaaacacaaagttggagcggggacctacctgagcatgatacatccatccgggaagcactccccaggcaacgctgccggagagaaccattgtcagaatagcatacccacgcagggcatccaaagaagaagctcgtgtactgttgttattcataattttcatttaattaatgtattacggcccgaaatggagaagcaggtatttccgcattattgaaaagatcaccttccatataattgcggaaacaataacgcacttctacaggatgaggcaccgaatcattccatactttcacacgggcagaaccattgattatttccgcttctgccggtacgatatttcccttttcgtctacaagttcaaatcccctcaacttttgattttcagggatcagtccatcactgccatgttcaaaagtgatttctactacattctctttcaattgatggcttttatacaaagggcctgcatacagaaaaccttctttgccataagtcttggccagagcccagtaagcaaggcgctgaccgactttaattttgtagggaggatgaatgaatttttcacttcctgcatccgtcgttgtgaccataccaacattaggaacttcttgcattaattccagctggcattgacggaaccatgcacgatcaagcctatctttaccttcggcctgccatggagtgatctggacatagtatacaggcattgcaggattatgaaagaattctctccactgagcgaccattgcgggaaagagctttttataaagagcgggatcagcagaattggactctccctgataccagatgactcctttgacaggaaatcccttccacggatttaccattgcattccataataaagtaggtgtacccgcaggccagtcgaacttggtttgttcaatatccggtaattgaatttccggaaattgtgacagtgtctctttatccatccaagtctctatcttggaagcactccatgagcaatgaatcagtccgacaggaatatccaatgaacgttgtagtaagtctccgaaaaaataagcggtagcactaaagtctccgacttctttgggagaaagttccgaccaatatcccgtaataccttcttccttaggagtcgtactccaatctcttttgactgtaaacaaacgtaattcccgtttggagtcggcagctacgatatagggttgtgaaccataaaccggctgtccccgaaagcctctgacaggcatttccatattcgattggccggaacagaaccaaacttcccccagtaagatgttctttaatgtaagcgcctcaccgtcagagaatgtaatagtataggggccccctgctgccggagtaggaagttgaatattccaatttccatgctggtcacttcgggttgttagcttccgatgattccatgatgcttcaatcgtaattttactattggcagaggctttgccgtggaaggtcacttccgattgttgttgcaacaccatgttatcaccccagatcgaagttaacctgactttggcctgcattcccaatgggaatagcaggctgataatccataggtggtatatgatatacttcatgaatctttatttagaaacgttttgctgatacactttaccgaaacggtctgttactctgatctctattttagctttcggattacggggagtggcacggaacatgtgtcctgtacttgctgctgatatccagctctgcatggttctttttttgtctgtacatacttgatgcgcatacgggtcgactccggtatattgagtcatggtacccatcacttttccgttttccagccattctactttccaatttttatcccagttccagacattggcaataatatctttggggaattcctttgatgttcctgcagcatagcttcgaaactggtaatctttcggatgaccggcacttttgtagtaccatttcacttggttttcgtctacttcgtagactccgtatccttgtggggtgccgtcgatacagacatccgcatgccaccagataccacatacggcagccgtattgtgctccatttgatgatcgttgaatacaatgttcgagttggaatgaagatggcccgtcaggaagtgtgtttcatagccatccaataattgatgaaccgcctcagcattgatcgtttctcctgccaacatggcatagtcgtaattaaatggccttttctgttccgttattctcgtaggaatatgcgttatgaaaaagactaatgtacctttagggacataagacagatcttcttccaaccatttaaaagttgtttcatctacatagccgatatagaagtattcacgtcctacataaaagttgttgttgataacaatatagtgggcatttcctttattgaatgagtagtgggtagggccgaaatatccttcgaaagtccggtacgacgtttcatgagtagctccattacaatccatatcatgattaccgattgcacgatatatggggatatccagtttctttgccttatcgatataaggtggaaagaatgtggccggtgtgtcccaaaagatgtctccacaattcagaccgaatacatcacgatccgaatactgatcgattaactgtttatagtcatcgacaatgggagcgtacagatcccagtgctctttcagaccggcctgtacatccgcttctagcacaaacaagtgtttactgtcgtctttaggattcttcttcagacggaaattatactcattcgtctcgttcaggtcaatttcctgatagaatcggggaatcgtctgttcacaatccgtcaagtatccggcaggagtcgtgatatatacaaagcgtgtgtttccgagattgggtagatggtaaataccgttcttgtctgtagtgacacaacgctgtccgtctgtcactaccacattggctatacctttgccatcgcaagtaacggttcctttgatcattcgcgcttcatccggcttagtttcgtccagtgcttcttttagttcgtcccaccatccgttgcggataatgtgtacaatgtcgaaaatcatcacaccgtccgattctttcaagttcatacggactgctttctggaattggtttacgtcccgtttgtagtcttctacatacagaccgccgcatactggcaccgcatctttcagcaagtatttggaatatttgcaaccgccttctacacataaatattctccggtagaaaactcgctgtctgtttcattcttaaatttaccggaagatttataataatcgtccagcgttacattccagtagtaattgccattcgtatagaaatccagtaattctgcaaagccataatttttatagtcgggagtagcccaactgaagtccttgctgacatcataattacggcttgcccagttgacacctacctcaaagtaagtaggataccatgcaccagtataagcagccaacatacattccggctttatctttttgatggaagtacgtacatcttttataaagttatatataacagaagctctccacgtcagccattgatgatagtatgggccacccacacggtctatgcctccttcggcattagggcgccattcaaaaatatcctccggaaacttctcaactttctttccgatgaatttctcaaacatcttctttgactcaggagaaaagtccgaatcaatacaatcatatcgtgcacggtcaagcatgatgccgtcaaatgcataattccgaacaacttctttgatcacatcaatctcatacttctgcacctctttcagtgccggattcaggaacatggtaggctttccttctatttccgttacagggagcagtcctttgcgcggtacataattggtagcctgccactttttgtgtttatcgaagatggcgccacgtttcacgatattctgtccgtcagcaaatatattcattccggcaaagatgatcatattgcgggcatgagcagcttcgataaaggtaccgataaagtcaaaatccggacggtcgaagtttttccagttcttcttctgtgcggcatatttgctgggatataatacttcacccgtattgtctttaatgtccaataccagatgcgtgatacctgcttcatgacatttgtctacatagaagcggattgaatcggggtagctgaaacgttggaaattagccgaacagtctaaccacattacttttggctttcccgaggcaaatgccagaatgcctatccataacaaaagggagataattgagaatcttttcatattcatagcgtattctttcgattttacttcagagctcctccggctctcattccgttttcaacttctttccataatcctttgttgatgatatgtacaatgtcgaataccatcagtccatcggaagctttcaggttcatttctatggttgcggataatttggcgggattgtcatagaattggtctaccagaataccacccataaatttattatctttcatgatattgcgtaatttctgacaagaaccttcaacagaataccacgtgccgctttgtgcctgtgaatctgtttcgttccatacgctcttcttgtttttcagagattcttctatggtgatatcggtataataatttccggtagtatataagtccatcagttcggcataaccgtaattcttgtattcgggagtagcccagtcaaaatcttcgctcggatcgtatttcttgctcgcaaagtttacgcctacttcataataagaaggataccatgctccggtgtatgtaccgaaagaaatatccggattcactttctttacttcattccgggcacgggccatgaagtcgtagatgttcttggtgcgccattcaatccatttcaggaaatgttttccgcgttcgggatagtatttatcattctcgtcctttttccattcgaagatgtcttccggaaacttttctactttctgcccgatatacgcttcgaacttctgacgggagaggtctgaaaagtctgccgttataccatcatagcgtacacggtccagcatcaatccatccagatcgggataacgtttcactaaatccttgagaacattcaatatatgtgtctgaaactcctcattgacaggattaaccattgccgaatatttcttcttttcgttggtgatggaagtgattccttccggagtgtatactgtcgatgcccattctggatgcgtggaatagactaatccacggtcgaaataattgtgtcctgcgacaaagacattgagtgaagcatgtacctctatacccagttcatgggcttttttgatgaaatgtcccaagtaatcgaagtctttgcgttcatatccatgccattcacgcattttaggagcaaactccgtatcgaacagtacttctccggtgatgggacgtacatcaacgatagcatgggtgaaacctaatgattttatttttgtcagataataatcaatggagtcaggattgctgaagcgttcaaagtttgcttccgcatcaaaccacatcaaagcgggcttggcattttccactttgggaactgtgcttttgcatgctcccaatgcaatgattaacagacttgataaaagtactattgttatttttctcatacgatcatattctaatgtgtcggttattcttttttattcaattgcgagtttgatgccttctttggcatattgccattgatcggctttcttcagatgaatcatgtcgaacagaaaatatccgtcgcaaacattcatacaggcttttacagattgtacgattgcctgattttcttgttcttgagtagcctgattattggtatcccaatttcctacatccggacctccggctacaatggggcattctccttttattttatctttagccaatgaacagaaaccttccatagtccattccgtcgtaccgtgtacctttagcggtgaggcataggcaccgatcagtatttgatccatacaggcggcatagccgtaatttttatatttgcttgtcgcccagttgtaataacgcgaggtatcataagtggaagctgcccagttgacacctacatcataataggtagaataccagccgcctacataaactccgaatttgatgccgggtttcactccttttacagcagtgcgtgctttctgcataaagtcataaatcacttttgcacggaattccagccacttagtcaaatatttaggataggtggcaggaagactggaagcacccggtagtaaaatgtcatccggatagttttgaattctgatgcctcccatatattcttcaaactgtttacgggattcttcggaaaagtcagtttgtagattgaggaaacgacctctgtctaagaaaatgccatcgagatcgtagcttgcaaggtctttcagtaaatcgcaaagaaaggtctgtacttcgggatgggcaggattaaagaatttagtactttcactggtattcatcacactcacaatccctgtctgcatattcatttgcgtagcccattctgctttggactggtctctgtacagtaacccagttcctccgtcaatctgatttccacctacaaatgtgttgatggcagcatgaatgcggagcccttgtttgcgtgcctcgtcaacaaaggcttgcaagtaatcccatgtagctgtacgttctacctttgtgtagttgcttccaatccaggcatacatgaatttaacctgatctacaatattggttttgaatagtacatcacctgtagtgggacgcacatctaccacaatatctgtaaaaccggcatctttggctaatgccagatcacgggctatattttctttactattagcgaaatcggggaagttggcagctgcatcaatccagatatatcgaggtttggaggcgttagggttctctgtcggttcttcctttccgccgttgctggtgtctccccaataatctttggtatcactgccaccgcatgccatgcacatacagacagctattcctcccaaaactatttttaatctgttttttctgatattcattttgtatggttcttaatcgttgaagtaaaaagcctgtacctgaaaaaggtacaggcttccgaatccattactggttatattacatatcgatacagtcgcactgtacgcaacctacatatccattagtaaacatgaagtagatgtataagtagtagccattggatgaaactttaagagctacgtcacctgttccatttgcattttgactacccaatgctttggcaccgtaattgccattgacacccaagccgtcacttccaaagtttatcggctgattatctaatgaattacccgccagatcgaataggtaaatactatcatctgtgccccatgtaaagctgttcacagagtttgaaagtacgtatgccactttattaaagactttataatctactgcgttttgaatccagttggcactgacttccggaccgttatatctgattgtattggtttttccattgaaccagcacagatttcgtggagtactgtagaatgctgcaaagtaatcacttgtcggatcggtcggatcagaatagattacatcggcattatcgccccatgaacctagtccctgagatactaccagatcaggagtttgtgattttaacgcaccattaacgacttgccagcgggcaaactgtccggaggttccatagtaaggagctgtgataatggcatctccatccaggctaccttgtactgaaagttttctaccgatagcagaagttacattgaattcaatatatttctccggagttccgtttacaccgcgtactctccatacggtaaagacgttacctgagttcggtactaagttggtgaataagatattatctccgtcatcagctgttgcatagaagtttgtgagacttcctgcgaaactgcttatgtttatagttcccacattagctcctgttcttccgtccagatagatagcgttgctgttaccgcggtcattaataactacatagtcattagttacggcaattcccgttaccatattggtacttgtgatacccacatctgtaagtttcttagtccagagcagtttggcactgttggcgcgaagtcctgcggcaatcttttccggaatttccttcttcactgtatacacagactgggtagtaccgttttgagctgttacggtcaacttttgttcttgatcatagtttagggcaacagttctggggtcgggtgagatggtcgcaccatgtgaaatggtaacatctgccagcatttcccctatactttccaaactgatcaaagagattgttttggtactttcattgatgattcccgacagccccaaacttgttagattgaatttcgtgattgcacattcattgctcttacgaatctctgcaacaactttatattcggtgcttgtgccggtctggtctttcactgttataaagttttcctgcgtcatatccataaataataatgtaggatacacatatacattattgtccagatcagcgatcacacgcatctttttcaggtcagactgttgcagaacattatccgagagtttgggatagttatatggaaatacaacggtaatcacatgattcgtataatctatctcactagtgaaactattgtcatcactgtcatcatccgggaaggatgctgtcaagttattgattatgttcctttcaacagtcggattgaaatcttccgggctatggcatgcgctcatacccatcagaaacgcaatgactgaaacaattgataatattttatttttcattgtattaagcttttagttatttccattcatcatattgctcaattaacgcattattctttatttcagaagtcggtaccggtaaaacgtataacttctgtgggaacttacgatcttgtccgtcgcaatcaatgtattcgtacgtaccgttcgtaatcttgagaccgtggcagcgatagttgttatactcaatgtgtgccagtttccaacggcgcatatcccagaacagatgtccttcgtatgcaagttcaactttacgttcgttgcgataatcattgaaccatgtttcaccactggaagacttgcccggcagatttaccccctgacgtccgcggacacggttcattaaagactgtgcctcaccggttttgttgagtctgtatgctgcttcagccttattcaacagaacttcagcaaatcggatttctacccatgcctgagaacttttggttcctttgacgtcaatcagtttctcatccaacagtttacgcaggaagtaaccggttgttgttttaccataggagtatgactgttcacgataagccatgaaagcaccgtttgttccacctacgctacaatccatcactctgcctttccacgtacagccacgataaataatagtagccgcaaaacgaggttccaactgatcataaggaggttctttggtggtagtgccgtgccattcggaccagtctactttgtttccgtttttatcttcataagattctaccatttcctgtgtcggagtacccagcgcaccaaagtcgtagccgtcacattgcggaacgtaatactggtcgaaggtatggttcggaccactgtctttattgtagtcaaattccaaaatagcttctttattattgcctttccaagcatctgcatagttgtccaccaaatcatacaactgtaacttttctacttcatcagctgcgtcataagcatcctgccaacgctcagcatatagcatagcacgtgatttcaatgcgtaagccgcaccttttgtcactcgtcctttgttggctgcatcccattctttaggaagattggttgccgcaaaatccaggtcatctgcaatgaattgccatgtttccgctgccgtgctgcgtgctttgtcattagaggtaggaagatcgtcatacagaatgactccaccatgccgtttggctaactgaaaataaacataagcacggaagaagcgtacctgagcttcccatttcagattcttatcatccgggaatgtagagtacttcttctgcataaccaaaaactgattcatctgacggatattaccgtaagccaaatccttatcccagatgttgtaacggcatccgtccggactgataacatccggattggtaacgtaattgttcggatgtccggctctgtctcccaaagctactgaaccgtatttgaatgtctcagtcaaactctctgtcaaacttcctgagaactgagcctccccaaattgtccgtatttatgaagatatgtatagaatgcattaacgtatttatccacgtatgcttcatcttgccaaacaatttcatcactaacggtcgaggtttgctccacaccgtccagccagtcattgcacgaacttatactaaagcctagtgccagtgctaatgatatatttaataatattcttttcatgtgatttcgttttttagaatgttagttttacacctagcgtatatgttctctgctgcggataatagccattgtttaccgccggtgattccgggtcgatgttgtatttggtaagtccgctgaaggtcaataggttgtatccttctacataaagtcttagtccttctatacctgccggattcaaccactttttggggaagttgtaacctatctgtgcagtcttcaaacgcatatagttaccattcctgtaccagaaagttgaagagtacccattgttgttactcggacctgtgatttccagacgtggaaattccgcgttagtgtgctcaggtgtccatgagttctctaccaggaaagtcggtgagtttccaccatgatagaaaggcttcgtaaatgaggtattatcctgtgtaccttcagaaccactggctgtatattgacctgtcagtgcaactacattgcccaatccccaagagaataataagtcaaagtcaaatcctttccaattaccgaataaattcaaagaaccggtatgcttcggagtagcacttttgcctacatagccttggtcttgtgctgctgtaataataccatcaccatttctgtctacatacttaatgtatcccggcaatgccttatagcctttaactgttgctgaatttgctatctcttcctcgctctgaaacagaccatttgcgataaaaccatatttagaaccgatttgctttcctgtcaaacgctgatattcaggagcattgtcggagtcgcctacatacttcagccaacgaccgtatgcatatgaccagatcaacttggcaccataattaaacttgttgatatggttataatgagtcaaagtaacgtcgaaacctttataatcagtcttgttcacattggcagaactgaaataatatccacctcttgaaggtgcgtatgctccggtcacagtggccagtttatcatactcgtatttatagaatacgtcaaattcaactcctaacaaaccattccacatcgttgcgtcgacaccgacattatagttcaggcactgtgcccatgacaagttgggattacctaatacggaagcatacatcatggtctgactgctgccgccaataacaactgcatttttgctgattcccattgtatttctccattggaaggcacttacgccgctggtggctgttttaccaataccggctctcagtttcagattattgacccagggagcattgaaccaactttcattgttgagtctccaacctgcagaaacaccgggcaatgttacccaacgtttattcatacctccaaacagataactaccatcgtgacgaagagaagcttccaaataatacttatcatcataattatagttcacacgacctacgaaacctgctactctggtatgtccgctatatcctccgatagatgggaatttttctgctccgtttcctgtcttattcgtgatctgattgagttcatccaattggataaagtccagcccataaccagtggcacttaatgcattacttttgttttcacgggtttctgccaggaacatagctcctacagtatgtttcccgaacttattgtcatacgtcacacttgactgtgtggtaaatgtatatccccgggaagcagattcactcagactgattgaattgcccgacgcgtcggttcctttatagtaagttaatgaagtgctctcaatagtcggaagattcatgatcattacttcataaggattgctgagaatcttactgaagttatatgtcaggtcataagccccttgaaatttaaagcttaatcctttcaaccagggtgcatcatatttcaggctgaaattggactggatataggaatagttggatttgctgtatccggattcattgatagatgccagcggagccaccggagaggaagccgtcggagtggatacattatatgtttttccttcatattcgtaagtgtcaggcacataaggcagggcacgaatcacttgttgcggcacattatgccagtcatccggattggctgaatagcgcggcgaatctcttttttcaatacgaccggatactcctaaggtgaaagtgaggctcttggttaactttgcatcaatattggaacgaagattcaaacggttgtaaccatagttatctatgttaccatcttcattcagataaccgatagatgcaaagaaacgcactctgtcactacctccggttgctgaaatgttatggtgcgtacgggtaccggtaccatatactttatcataccagtttgtgtttccccaaccatcaactccgtctttcatcttctgcaccatctctgctgtaaatacctgagagtctccttgcagttcgcgtgctttattataccaataagcataaccgggtccatccagccattcctgttgttccgcattttggctgaaaccgacagaacctgtataagtaatagacattttttctgccttaccctgtttcgtggtaacgatgaaaacaccattggcatccaaaccgtaaacggctacagccgaagcgtctttcagaatagataccgattctatttcgttagggtccagtccgttgaagtcggctgatgtacggcggattccatcgattacgtatactatacccgtttgtccgcgcatggtcaatgttgcattgtcagaccccggctgaccactggactgaacggctgccactccggcaatacgtgcgccaactacgttactgatactcatcgtcggagctttcagcaattctttgtccgatacggtagaaattgctgcagtgatgcttccacgtttttgagtaccgtatcccacaacaactacttcatccagtgaagcaacgtcgtctttcatagttactgagatgaaacgctggttgtttaccttgatgtcctgtgtattcatgccaacataagagaatatcaatacatcattatttcgggcattgatactgaactttccatccaagtctgtgatagtaccgctggttgtaccttttacagctacagatactccaggtaatggttcgccactaccatcattgactgatccctttattacgttttgtgccatacagttgagtgtgcacatgaacgcaataaataatgaggtaataaacctcggattccatttgattctttttttcattgcattacaatattagataggtttatagaataaagtgttcacaatatcgttcgtataagtgtccggcttgcagataagccgaattagggctcatgaaatgagaaaactcaaacgtgattgcattttccattcccgctcttcgcgcagcgtccagtttcaacaatagcttttcccatttaatgggtaggaaacgaataggcatgtcccggtcaaaagattcgatattggtccagcatttcatattgtatttatcagccagttttttgttaataaccagataatcatataattcatgatagtctacctgaccatcctgaaatgccatgatatcgactgctccctttacattatccaatatttcgtcccattcttcttcgtgttctttcactgacaaggctttgtcacccgccattacctggtctgtctttactccatgtatgtatggagaaactaaagtcgtcagattgccagagacactcttggcgtgctttccgacttccgcataaatcttagacatgtttttcgtccggcggctgatttcctgagataaataccatccctgaaaagatttatgatgaccatatttcttccatacttcatcaatcagagccatgttcaaatctatttctttctgaaataatccttcctgccagtacttcccggaatcgtacataccaaaatagaaagccatgtcgtatttatcggccagtgtcagaaacatctcgaccaagtctacaggcggataatacacatcttcttttcccaacaggcattgaaaaggagaagcaatccatttaccaagaccggcacgaatcaacactacggtattgattcccatctttttcatagctttaaaatccttatcccattcttttgtaccccaattctggtgcggaatatcccaactgatttcgtccagaaaagtagctttgataggcatccctttcaaggcattgggagtggcaaatgtctcaaatgtttcttcttcttcagatgctgcccttttgatgggagtgcatgccgtcagaagtttgctgcctgctagcaatgaacatgtggcaaatgcggtttttagaaaattacgtcgtccgtccatatcgttctatttaaataagggtttataaattttccagtactttccagcattggtacaatcctcttggtacatggaaacatcctttccatttcccacctttgagtggcagcaatacttctccctgccgattcagataaccgaaccattccggatattccggatctttgaagtgtgtccatgtgtagtcatgtaccttctcaaaccattccagacatctttcatctccggtcagctgataacctttcaataatgaaatcaaggattcaatgtgtacccaccaaagtttctgatcccactccaattgctggggaggacaaccgttacggtccataaagtaatagatgccgccacattgcttgtcccaaccgtaatcaagcattgttaaggtggttaacattgcttgttgtatgagctccggtcggttcagccttttgcccagatccatgataaaccacatcgcttcgatagcatgaccgggagtcacctgacgaccttcgaagcaatccaccagattaccgtccatatcgacattctcaacaatgatgccccccagctccggacgataaaagacatccatcacttcatggatacaggttaccatcgtctgttccagatagccgggatccaggagatgttcgatctccaaagccagattacagagaatcatcgggagggcgaagttcttcagattacgagtacccggatgaagcttattccacttgcctttcgggttgcttactttggacaaaatgatctcgaaagtcttttttgctatgtccgcatattcttgattaccagttgctagactcagctgtccgaaggccatcgtggcgaaagtatatgagaaaatattgtatggttctaccagtggtctacccgaacggtcgagtgaaaagtaccagttataatttccatcatgtccgtatttttttaagaattcaccaccctgaacggcacaatccagccattcctgtcgtttttccaccttgttgtaaagcatggagaacatccatacctcacgtccctgcaaccagatgaacttatccgtatcgaaaaccttcccttcacggtccaggcagctgaaataaccgccgtattcaccgtcctgagagtgttcgagccagaatggaaggacattgtccaacaattcatcccggtactgattcgctagtttcttaaaatccataat

SEQ ID NO: 4864 - DNA, 304 bp, Unknown
  gut microbiota DNA sequence
aagccgatgaaactttagttccaagcatgagaaacaaaagtttcaagcgggagaaactaaaaagctctgtataggagaaactaaaaaactctgtatagaccaaccaacagcccataagtaaccattgaaaacacggcagtgtgacagcaaaatttgccatcacctactgccaccacctcattaattattcatattcaatcaattacacccgacaccgtgacagatgacagcaaattatagtttttattttcatagagagcctggctgacacgtaagtaggggttgactgaaaagtcgattctat

SEQ ID NO: 4865 - DNA, 180 bp, Unknown
  gut microbiota DNA sequence
gtggtcgcagaccgaggtggtaggagaaataatgtttgttcctatttctttgtaaatgatagggttatgtattcacctaccacctccccctacgggtactcctccttcgagaaggaggagatttaagatactattgactttttagtcagtccccctaagaatgtcaatccaattgttgcg

SEQ ID NO: 4866 - DNA, 150 bp, Unknown
  gut microbiota DNA sequence
tatcgaattgttgcggatggcatagttttttctttttccaacagtgtagaactttaaaagactcctgtctctacccttttttcgtattttcctcccttgctacgatttccccttcttcctgccttcttccttttcagtctttcaatcccc

SEQ ID NO: 4867 - DNA, 413 bp, Unknown
  gut microbiota DNA sequence
aatccaattgttgcggatggcatagttttttctttttccaagagtgtagaactttaaaagactcctgtctctaccctttttttcgtattttcctcccttgctacgatttccccttcttcctgccttcttccttttcagtctttcaatccccttttcctccgtccttttttccttttctttggattcccgttctggtttcctttgcgcatcttcttcacctttcctgtatttcctcttcctttcccttgtgcatacgcccgtggcctcgccctcctaacgcgcgtgtgaatataataatgtgcatgcctttcctctgttcctcctatatccgagaaaaacatgttctacaacatccttataactcaacactttagcttctatcctcaaaaataattcaaaaaaagagtgattta

SEQ ID NO: 4868 - DNA, 503 bp, Unknown
  gut microbiota DNA sequence
tgcccttgcccttctaacgcgcgtgtgaatataataatgtgcatgcctttcctctgttcctcctatatccgagaaaaatatgttctacaacatccttatgattcaacactttagcttctatcctcaaaaataattcaaaaaaagagtgatttaagtttggagtatatttgaaaagggcgtacttttgcacccgctttccaagagaagaaagccttgttaaattgacttagtgtaaaagcgcagtactgcttgaccataagaacaaaaaaacttccgataaagtttggaagataaagctaaaagttcttatctttgcagtccgattcgcaaagaaaagtcgttttgtttttcttctttccctttcgctaagagagtctgagaaacgatagaaaaagaaaagcgaaaaaaaacttccgaaaacatttggtagttaaaataaaacctcttacctttgcacccgcttttaaaacgaaagcagcaagttctttgaaatattgataaac

SEQ ID NO: 4869 - DNA, 175 bp, Unknown
  gut microbiota DNA sequence
aactagtgatgtaaataatgaataaaaatggatttagtcgatgtgccgatatctatatcggccgtttgcgagaggagggccgctattctacagcgcacgtctatcagaacgcccttctttcttttagcaagttttgtggtgtccatagtgtgtctttccgtcaagtcacccgtga

SEQ ID NO: 4870 - DNA, 183 bp, Unknown
  gut microbiota DNA sequence
cccgatacctttccggacgagttagctatggtactggttgagcctgaaggactttccattttaagtgcctgttcccaccggggtattacaaatatattgcggactgtaagaacggcatttccggaactcccctgtaatttgcttttaggtggatttcatattcataatgcagaagaatccaaa

SEQ ID NO: 4871 - DNA, 12117 bp, Unknown
  gut microbiota DNA sequence
aatgggaagagcttcttttcagcagattatcggattgtccaccaatcgtgttcgtatgtccacctttcataggggaaacggggcgtatttttgtagcataattgatgaacgaatacacagatattatgaaaaacttgtttttgccagttcttttagtagcaggcagcttctttgtaagttgcacttcttccgtgtttactccgactccttctgctaatccttgggatgataattatttatcagtagccaaaatggaagattaccgtcaatggggaacatacaatgtacacgatccgtcctgccggaagctgggcgactattattatatgtattctacagatgcgattttcggtgagaaccggaaagaagcgagagagaaaggcgtgccgttgggatttatccagatgcgccgttctaaggatttggtacattgggaatttctgggatgggcatttcctgaaataccggaagaatcggttcaatgggtacagtttcatgcaggagggcagggggcgaccaatatctgggcaccgtatatcatcccttataaagataaataccgcctctactattgcgtatccgcattcggacgtaaaacatcctatataggacttgccgaatcaacttctcccgaagggccatggacacagaaaggctgtatcgttaaaacagatgattctactgccatgaatgctatcgatccgagcgtcatagcagatgaaaataccggtaaatggtggatgcattacggctccttcttcggtggtctgtattgcgtcgaactgaatcctgaaaccggattagccttaaacgaaggcgatttggggcaccttgtagcacggcgtgccaactatcggaagaacaatctcgaagcaccggaaataatctatcatccggagctgaaacaatattatcttttcacttcctatgatccgctgatgacgacttataatgtacgtgtcagccgttcggatgctgccgaaggtccgtttacggactactttggcaaggctgtgaaagatacgaccaacaacttcccgatactgactgcaccatatcgttttgagaaccataccggatgggcgggtacagcgcattgtgccgtcttttctgacggtgaaggaaactattttatggcacatcagggacgtctgtcaccgcaaaatcagttaatggtgttacatatacggcagttgttcttcactcccgaaggctggccggtcgcttctcccgagagatatgcagggactgcttcgcgtcaattcagcaaagaagatctggtcggtgaatgggaaatcatacgagtgcaggaaccggcatacgaacgtcagctggaagccggacagatcttatggggagagggagaactgaaagagaaggaatggaacttgtccacccgagtgactttggtaaaagacggcacgtgcaaagggcagatgaccgataacgaatggaatatagttcaaatgaatggaaaatggtcctttttgaccgaaaaacatctattaatggtagatttgaactcggagaagattgagaatctggttatctttgcaggacacgattgggagaacgaaaccgaaacaattctctttaccggactcgatagccggggacgttctgtctggggaaaaagaatcaaataactatatataatttttattgaaaaccatgagaagatacacagaattactggctgcattagccttatctaccggcatggcgcttcatgcgcaaaccaatgaaatggtgatccagactaagaagttgggtgctgaaatccagccgacaatgtacggactcttttttgaagacatcaattatgctgccgatggcggactttatgccgaactggtaaagaaccgttcattcgaattccctcagcgtctgatgggatggaagacttatggaaaggtgactttgcaggatgacggtccttttgaacgcaatccgcattatgtgcgtcttgataatccgggacatgcccacaagcataccggactggataatgaaggcttcttcggcatcggggttaagcaaggtgaagaataccgcttctctgtgtgggcacgtctgccgcacggaggtacaggtgaaaagatacgtgtggaacttgtagataccaaatctatgggcgaacatcaggcttttgcctctcagacactgaccattgattccaaagactggaagaagtatcaggtaatcttaaaagcgggtgttaccaatcccaaagcaacgcttcgtattttccttgcttcccagggtacggtagacttggagcatatttcccttttccctgtcgatacttggaagggacatgagaacggtcttcgcaaagaccttgcgcaggctttggcggatattcatccgggagtcttccgtttccccggtggttgcatcgttgaaggtacggatctcgaaacccgttatgactggaagaaatccgtggggccggtagaaaaccgtccattgaacgaaaatcgctggcaatatacctttacccatcgtttctatccggattattatcaaagctacggactgggattctatgaatattttcttctttctgaagaaatgggagcggcaccgcttccgatcctgaactgcggacttgcctgtcagtatcagaacaatgaagaaaaagctcacgtagcagtttgcgacctggacagctatattcaggatgcactcgatctgatcgaatttgccaatggagacgtgaacacgacttgggggaaagtacgtgccgatatgggacatccggcaccttttaatttgaaatatctgggcatcggtaatgaacagtggggaaaagagtatcccgaacgtctcgaaccgtttatcaaggctcttcgcaaggcgcatccggaaatcatgattgtaggcagttccggcccgaattccgaaggaaaagaatttgattacctgtggcctgagatgaagcgtctgaaagctgatctggtagacgaacacttctaccgtcccgaaagctggttcctcagtcagggagcacgctatgataactatgaccgcaaaggaccgaaagtatttgccggcgaatatgcttgtcacggaaaaggaaagaaatggaaccacttccatgctgccttgctcgaagcagccttcatgaccggattggaacgtaatgccgatatcgtacatatggctacttatgcgccgcttttcgctcatgtggagggatggcaatggcgtccggacatgatttggtttgataatcttaactcggtgcgtaccgtaagttattatgtgcagcagctgtacgcacagaacaaaggaacgaatgtacttcctctcactatgaacaagaaaccggtaacaggggcggaaggacaaaacggactttttgccagtgcagtctatgataaggataagaacgaactgattgtcaaagtagctaatacttccgataagacacagcctgtatccttgactttcgaaggtctgaaaaagcaggatgtattgtccgaaggacgttgcatcactcttagctcactcgatcaggacaaagataatacgcttgaacaaccgtttgccatcactccgcaggagacaccggtaacgatcaatggtcatgcgttaaccaccgaactcggaccgaacacgtttgcagtttataaattcacgaagaaataaaatgaatagcgttaaactagttatgatttcatgcgtattggcagccttttccgggctgtctgcgcagaatgacactacttttgtagccaatggcaatcccatcataaaatataaatatacagccgatccgggtgctatggtgcatgacggtaaggtgtacatttatgccggacatgatgaatgtcctcctcccaaagaacattaccagttgaatgaatggtgtgtattctcgtctcccgatatgaaaacatggacggagcatcctgtacctttgaaagccaaagatttcagttgggcaaaaggggaagcatgggctagtcaggtgatagaacgtgacgggaagttctattggtatgtgacggtggaacacggcactattcacggaaaatccatcggtgtagccgtatctgattcgcctgtcggtccttttgtggatgcccgtggttccgcactgatcaccaatgatatgacgaccgaatttaccaagatctcttgggaagatatcgatccgactgtttttattgacgacgacggacaggcatatctttattgggggaatacccaatgctactatgtcaaactgaaaaagaatatgatcgagctggatggtcctatcgtaccggttcatctgccccgatatacggaagctccgtggatacataagcgtggagactggtattacctttcatatgcttctgaatttccggaaaagatatgctacgccatgagtcgtagcattaccggaccttgggaatacaaaggcatccttaatgagatagccggcaattccaataccaatcatcaggctattatcgagttcaagggcgactggtatttcatttatcataatggaagcatcaatacagccggaggcagttttcgccgttccgtctgcatcgaccgtttgtattataacgaagacggtaccatgaaacgcattcagatgacaacggaaggcgtacaataaacaggaaattatagggttaggttagataataggtttttagatttttgttaattgaaaagtaagggcgtccttccattccggaaagacgccctgcttatttaattctgatgaataataacttattctactctgcgtgaaccgtcaccgattactacatcatatactttcgggcttctgccgaatttagctttgaaagcttcttttgtcttttcaacgaagttgtcatacagttcgttcttgacaaggttgatagtacaaccaccgaagccgccacccattacgcgtgaaccggttacaccatattctttagcgcaatcgttcaggaagtcaagttcttcgcagctcacttcgtacaatttgctcataccgtggtgagtttcgtacatcttctgacctactgtttcgtaatcgtctttttccagcgcatcgcaaacatcaagtacgcgttggatttcttcgattacatattcggcacgcatataatcttcagcgctgatatcagctttcgcttcttccagcatatccattgtacagtcacgcaggaattctacatgcggatgttttttctggatagcagcaacagcagcctcacagctctgacgacgcttgttgtaagcagaagaagccagttcgtgtttcactactgaatccatcaataccagacgataaccttccggatggaatgggaaatattgatattccagtgaacggcagtccagacggatcaagctgccagctttaccgaatacagaagcgaactggtccatgataccgcagtttacaccgcagtagttgtgttcagtagcctgacctactttagccaattcaaatttgtcgattttaccttcaccgaacagttcattcaatgcgaaagcatatgtactttccagagcagcagaagaagacatacctgcacccagaggcacatcgccggagaaagcggtattgaatcctttcacgtctacgccacgtttgatcatttcacggcatacaccgaaaatgtatcttgcccagcttgcacggggagcatcctcttcgttcagaccaaattctacataatctttcaggtcgatagaataagctcttactttgtcagtgccgttaggtttgatttcagcaagcatacctttgtctacagctccggggaatacgaatccaccgttgtagtcagtatgttcgccaatcaggttgatacgacccggagaggcatatataaatcctgtagttccatcaaaatgcttaatgaagcgacttcttacgtgttctatatccatgataaatcaattttataaggtgaataaattaaattcagattttttattctactggaatgtctttatttacgttcttgcaacctaccagaccgtagtacagcaagtaagccagagcagcgataattacccaatagctagccatgaaaccggctacgtcagctacccatccttgaattacaggcaggatacctccaccgcataccagtaccataaacagaccggaagcagcagccagatatttacccagtccttctacagcaaggttgaagataccaccccacataatagaagtacagagaccaactaataccaagtacatagcgttaatgggcacttctgcaaaaccgaatgacaaaccgccagttgcgctttgttgaagtacaggcagattcaccaatgttcctgtagaagagaagatagcaaggaatactaaaatcaatcccagagcggatgtaaatgtaagcatcgctttactggaaacttttgcaccgagtgaagcaccggccagacgaccgatcaacatcaggaaccagtaagttcctactacgaaaccggagattgtagaagcgataccggcaccgcctttttctacagggtcagtaaggaacaggttcagagtacctggtacacctacttcaatacctacatatacaaagatagcgatagcgcccaatacaaagtgacggaacttcaaagcacctttcatcagtgtgctgattggttcagttgtagcagcagcgttcggttccggaatgcgtacaaacaggagtacgaagaatgcgaaagcgaatacagccattgcggtgtacattacagggaaaatctgagagatagtagctttttcgatagatccggcgatcaggataccaacgaacatcggagtgatggtagccattacagagttgaaagagccgcccacctggataagctggttacctttgttaccttcaccacccagtttgttcaacatcgggtttactacagtgttaagcaaacacatagagaaacctgctacgaatgcaccaatcaaataaacggcaaaagccatctcagggcttgaatgaccggacaggaactggatacctacgccgataaaaccgatagctactgcgataagtgctgttttcttatatcccacacgttgcaacaagataccgctggggatacccattactgcataagctataaagttaccgaagtttcccagcatacccaaagcattggatacgtcgaattggttcttcagcacaatacccataggagctgcgaggttagtaacgaatgaaatcataccgaaaaggaaaatcatcgtgataatggcaatgatttttccattctttttttcttgtgtcatggttctattaaaaatgttagtttataaaattaggttagttatttttttatcttttatttttccacaccgaatttgtagatagtcacctgctggtattcatcgcccggcaataaagtagccgaggggaaatgaggtttgttcggagtgtcggggaaacattgtgcctcgaagcagatagcgcttcttgcagggaatgtagcaccgtgagcaccttcgaaaccattcagccagttaccggtgtaaagttgtacacctgcttcagtagtgtatacttccatggtacgaccgctattcggttcgaaacaagtggcagccaaatccagtgaacctgtttcaatcttgttcagtacgtagcagtggtcgtatccggcaccgttaatcagttgttggaatttatcgttgatacgttcgcctacggtatgcggagtggtgaagtccattggagtaccttctactttggcaacttctccggttgggatagaaacttcatcgataggcgtgtagaaattagcgttgatagtaacaatattgttttcgatagtaggagtaggattgctgataccagccagattgaagaaaccgtgattggtcaggttgactacagtagctttgtcagttgtggcacgatattcgattaccagtgcattttcttcttcttccaggcgataaaccatttcaacctccagattgccggggaaaccttcttcgccgtcggctgaaacataattgaactggattatattttcagccagttggtcggcatcccaaacgcgggcgtgaaaaccggtaggtcctccgtgcagggagttgggtccgttgttgatggtgagctcgtgctcttctccgtacaatgtgaattttcctttggcgatgcggttgccatagcgtccgatagtagtgctgaggaagggttccgggctgttgacaacgtggtctatgctgtcgtgtccgaggacaacgtttgcatattttccatctttatccggtaccatgatagcgagaatggcgcatccgtaattagttacggcgacttccattccctttttatttttgaggataaataaatcagtttctttattatttatctccttttggaaatctttccggctgagccctgatagattcccttccgttgggaatgtgttattcatgtctggtattcttaaaattttcttgcaaataaaggtaaattctttgttactcacaaattattccggctaaatatggtgggtagtttaggaaagtttagcgttctcacttaggtttctgtatttttcatccttcttttcttttaaagtgaacaatttttcgtatgtttgttcccggattattataatccgggagaatttaatctaagtttattaacaagaaaaacaaaaatgtatccattaaaattcgaacctattctgaagcagacgctttgggggggcgacaaaattattccgttcaagcatttgaattcagacttgaaaggagtaggagaaagctgggagatttccggcgtagaggacaatgaatctgttgtggctaatggcccggacaaaggtttaactctggctgatatggtgagaaagtatcgcgaggaactggttggcgaagcgaattatgctcgttttggcaataaattcccactgcttatcaaattcatcgatgcaaagcaggatttatccattcaggtgcatccggcagatgatttggcaaagaaaaggcacaactcaatgggtaaaaccgaaatgtggtatgtagtggatgctgataaaggagcgaaactgcgttctggattttccgagcaaatcaccccgaaagaatataaagagcgtgtgctgaacaatacgatcactgacgtattgcaggagtatgagatcaagccgggagatgtattcttccttcctgccggacgtgtgcacagtattggcgccggtgcgtttattgccgaaatccagcagacttcggatattacttatcgtatctatgacttcaaccgtaaggatgcaaacggaaagactcgtgaattgcatactgacctggcgcgtgaagccatcaattacgaagtgttggatgattatcgtaccaaatacgaagcggtgaaagatgagccggtagaacttgtagcttgtccgtacttcactacttccgtgtatgatatgaccgaagaaatcagctgtgattattcagaactcgattcattcgtaatcttcatttgtatggaaggtgcatgcaagataaaagacaatgaaggtaatgaactgaaagtaggtgccggagaatctattctgcttcctgctacaacacaggatgtaacaattactccggaagctggaaacgtaaaattgctggaaacatacgtgtaaataatagacaatattattgataaaagtatagaccgggcaggcgagaaaaactttctcgcctgctttgcgttgtagaaagaaaggcgtatcgattttgtcttacagactgacaaattcataatatgtgatggaatttaagttggatggtactgctgaagaagctatcaaacagattaatgaaaagcattatgcacttccttttgaggcagacggacgccgacttttcaagataggtgtcaattttagctcagaaacacgcaatattgagaagtggatagtggagtagcatcaattctatccccattcagttttatataatttttttggaaaggttttaaacttctgttgctaaatcatttttttcgtcttatcattgtataaatttactagtgatatatatgaataaaaatggatttagccgttgtgcggagtcgtacatcggtcgtttacgaaaagaggggcgtcattctacggcccatgtttatacgaatgctcttttttcttttaccaagttttgtggcactacccatgttgctttccggcaagtcacccgtgaacgcttgcgctgttacgggcagtatctttatagttccggtctgaagccgaatacggtatcaacgtatatgcgtatgcttcgtagcatctataatagaggagtggagtcgggcagagctccgtatgtgcatcgtctgtttcatgatgtttatacgggagtggatatttgccagaagaaagcgttgcctgtcggagaacttaatcgcctcctctatgaagatcccaaatcggaacgtttgcgtcgtacacaggctatcgctgccctgatgtttcaattctgcggaatgtctttcgctgaccttgctcatctggagaaatcttcgctggaacggaatatcatccggtataatcgtatcaagacgaaaactccgatgagtgtggaagtactggatactgcacaggatataatcagtcggcttcgcaactgtcagccttctcatccggattgtcccgactatctgttcagtatccttcttggcgacaagaagagagaagatgaaagtgcataccgggaatatcagtccgctctccgcaggttcaataatcgtctgaagagacttgcaaaggctcttcggctgacttctcctgtcacttcctatactatccgtcattcctgggctactaccgctaagtatcgtggtgttcctattgagatgatcagtgagtcgctggggcataagtctattaagactactcagatttatctgaaaggttttggtctgcaggaacgtacagaagtgaatcgaatgaatttatcttacgtgaagaactgtcggataggacgggtgtaaaatatttaataagttgatagtcagtatggatctgtttctgttacttcttaggtaacggaagtaaatttgatgcaaagatagacaaaaacacaaataagaaacaaattaaagcccactttttttagttttatctaaaatatagggtaaaaacatctttagacatgaaaaatacttattttcatgccccactccttatatacctaatttccattggtatatacccttctacttagggtgtaactctcttgacaacatatttgctgctgcttttcaaccttttttcattgttcgtttatgctgtatacacttccgttacctaagaagtaacggaaacatatggggtagaaaaacatgattctaacaaaagagaaatcagccatcctcgggaccaaaaatgggacaggggagggcgtagcgtgcttaaaacgctggtatgtggcacatgttcgcatacatcacgaaaaaaaagtagccgaatatttggggaaaatgggaattgagacttttgttcctgtccagcaagaaatccatcaatggagtgatcgccgtaaattagttgaaacagttcttcttccgatgatggtgtttgttcatgccgatccgaaggaacggatggctgctttaactcttgccacggtaagccgttacatggtgttgcgtggtgagggaaagcctgctgtgattcctgatgatcagatggcgcgtttccgttttatgcttgattattcggaggaggcaatctgtatgaattattctccattagctcgtggaaagaaagttcgtgttatcaaaggtcctttgacgggactggttggagaactagttgcgttagatggcaaaagtaagattgctgtccggctggatatgttgggctgcgcttgtgtcgatatgcctattggatatgtagagcaaattggcgaaagaaactaagaggtgatggggaccttcaataatagcatacaggagaaaatagaaaaactacaaaaaacagttgatacattgcttcatatgggtgagaatatggactgtatatgtgtcgacgatctttcactacttaataaagagatccatgaacagatcaatgatctgtatccttatcacggtaagactgctgagcaggaagctgctttgtgtctgtctcttctgatgggatatagtgtgtctatgtatg

SEQ ID NO: 4872 - DNA, 887 bp, Unknown
  gut microbiota DNA sequence
ctgggcctatttatgggacaggggaaggcgtagcacactcaaaacgctggtatgttgcattagttcgtatgcatcatgaaaagaaggtttccgagtatttgaacaaggtggggattgagaattttgtacctgttcagaaggaaatccatcaatggagtgatcgccgtaaattagttgaatccgttcttcttccgatgatggtttttgtacacgctgatccgaaagaacgtatggaagtcctgaactttactactgtgagccgctatatggtgatgcgcggtgagagcagtcctgctgttattcctgacgaccagatggcacgttttcgtttcatgcttgattattcggatgaaacagtctgtatgaatagctctcctttggcacgtggtgagaaagttcaagtaattaaaggacctctgcaggggcttgtgggtgagcttgtcaatgtagatggtaaaagtaagattgctgttcgactgaacatgcttggttgcgcctgcgtagacatgccgattggctatgttgagcctataggtgaaaaaaactaagtgggtaatgacgacttcctgtttacaagaaaaaatcgataaacttcaaaatactgttcatgctctgctccataaaagtaattatatggcgggtgtgtatgttgatgatcttgcacgactgaacaacgaaatccatgaacagatcaatgatctgtatccttgtcacggtaagactgctgagcaggaagctgctttgtgtctgtctcttctgatgggatatagtgtgtctatgtatgccaattcggaggatgaggcaaagaaagaaactgttctgaggcgttcgcaaatgattctgaaaaaccaattgccttcaccattgaaaattcagttacacacaat

SEQ ID NO: 4873 - DNA, 192 bp, Unknown
  gut microbiota DNA sequence
gaagactgttctgaggcgttcgcaaatgattctgaaaaaccaattgccttcaccattgaaaattcagttacacacaatctacgataaactattgtcatagtaaatctactttttttgaaaaaagactttataatttattggggtatttaaattatgaaacacgcatttgaccgttttgttcaatatttgcag

SEQ ID NO: 4874 - DNA, 185 bp, Unknown
  gut microbiota DNA sequence
gactttataatttattggggtatttaaattatgaaacacgcatttgaccgttttgttcaatatttgcagaaaaattattttagttattggattgtattaggaattgatacattcatagctttgatttgtacctgggtgtcatttatcggcattcattatataacggagacttctaaagaaatcac

SEQ ID NO: 4875 - DNA, 3244 bp, Unknown
  gut microbiota DNA sequence
gttcatagctttgatttgtacctgggtgtcatttatcggcattcattatataacggagacttctaaagaaatcacttctctcttccatattttggcgatttctgtgatctccagtgtcttaggttcctttttatttcatacctaccgtaatacgatccgtttttcccagttgaaggaattatggagacttgccggaagtgcactgataaaagctgtctgtatcgcaatggctatctggcttttcctgcctcagacgggactgcataatagtcagaaaatagtctttgtactgtttgatggtatgcttacttttattgccatggtaggcttccgtattcagttgattctggtatatgaactcctgctgaatatgctgaataagaagaatatgcatattctgatctatggcattgatgataagagtgtggcattgaaagtccggttaatgaacagctcccactataaagtggtaggcttctgtatctacggaacgggcgactccatccgacgcgtggctgatcttcccgtttattcatttaaggatgaagagtgttttaataaacttattcataagaagtgtatcggtggcatcctgtttgcccgttacgagaatacccgtgaagaggaagaccgcctgcttcagtattgtaaaaggagtggattgaaaacgttgattgctccgagtatcagtgaggctgacgaaaacggaagtttccaccaatgggtacgccctatcaagattgaagacttgctgggtcgttcagaaattcatatcaatatggaggaggtgatgactgagttttgtggcaaggttgtgttggtgacaggagctgccggtagcatcggtagcgagctttgtcggcagctggctcagatgaacatcaagaagctgatcatgtttgattccgccgagtcacctttgcataatgtccgtctggaatttgagaagaattatcccggtcttgattttgttcctgtcattggagatgtccgtgtgaaagaacgtcttcgtatggtcttcgaaacttatcagcctcagatcatctttcatgccgctgcttacaagcatgttccgttaatggaagagaatccctgtgaagctgtgctggtcaacgttgtcggctctcgccaggttgccgatatggcagttgaatatggagctgagaagatgatcatggtctctaccgataaggctgtaaatcctaccaatgtaatgggatgctcgaaacgcttggcggagatctatgtacagagtctgggctgtgctatccgtgagggaaaagtgaaaggtcgtaccaaatttatcactacccgctttggtaacgtcttgggtagtaatggttctgtcattccccgttttaaagaacagatcgagaatggtggccctgtcacagtaactcatcctgatatcattcgtttctttatgactattcccgaagcttgtcgcctggtaatggaggccgctactatgggtgaaggcaatgagatttttgtctttgagatgggaaaagccgtgaagattgtcgatctggctacccgtatgatcgaacttgccggttatcgtcctggtgaggatattgagatagagtttacgggattgcgtccaggtgagaagctttatgaagaagtcttgagtgataaggagaatacgattcctacagagaataagaagataatgatagctaaggtacgtcattatgaatatactgatatccttgacacttatggggagttcgagaagttatcccgtacggtaaagatcatggatacagtgaagctaatgaagaaagtggtacctgagtttaaatccaagaattcacctcgatttgaagttttggataaataactagaataattctgaacactaacataaatcaacaatggatacaaaagaatttaagattgctgttgcaggtaccggttatgttggtcttagcatagcaacgcttttgtcgcaacatcatcaggtgacggcagtcgatgtgattcccgagaaagtagatatgcttaatcgtaaacagtcacctattcaggatgagtatatagagaagtttttatccgaaaaggaattgaatctgaccgctacgcttgacggtaccaaagcctacagtgatgctgattttgtggttatagcagctcctactaactatgatccggtgaagcattattttgatacccatcatatagaggatgtcattgacctggttttaagtgtcaatcctgatgctgtgttggtaatcaaatctactattcctgtaggatattgtcggggactttatatgaaatatgcccgtaagggagtcaagaagcttaacttgcttttttctcctgagtttcttcgtgagagtatggctctttatgataatttatatccaagtcgtatcattgttggttatccaaagctgattgatggtgagcagtttgacgaggaaaacgaagctattaaggccattgcagatgttcccgtcctagaggaagctgcacatacttttgccgcattacttcaggaaggtgcaatcaaggaagatattcctactctttttatgggtatcaaggaggcggaagctgttaaactgtttgcaaatacctatctcgctttgcgtgtcagttattttaatgaattggatacttatgcagagatgaaaggactggattctcagtcaatcatacagggtgttggactggatcctcgtattggcatacactataataatccatcctttggttatggtggttattgtttgcctaaagacacgaaacaactcttggctaactatcaggatgtacctcaaaacatgatgactgctattgtcgaaagtaaccgtacaaggaaagacttcatagcagatcaagtgttgcgtaaagcgggttattacaccgcttcctgctcatgggatgctcagaaagaacgaaaaacaaccattggtgtatatcgtttgaccatgaaatccaattctgacaacttccgtcaaagtgctattcaagggattatgaagcgtatcaaggcgaagggggctactattgtgattttcgagcctgctatgcaagatggtgaaacattctttggtagtcaagtggtcaataacttaatcaaattcaaggaaataagtcaggccatcatcgccaaccgttacgacgcctgtctggatgatgtgaaagacaaggtatatactcgtgacatttttcaaagagattaactttatggtaacatacaatgttagtttagagaacaaactggttttga

SEQ ID NO: 4876 - DNA, 542 bp, Unknown
  gut microbiota DNA sequence
agcatccagatattcgacaaatatcagaaactcctcttcagtgactatgccgataaaggacacgtaagcgaaggcacgaagaaggtggaatataaaacgcttcgccgtgacgagcatttcttcgggcttggggagaagaccggcaagatggaccgcagaggagaatcttacaagatgtggaacagcgataaaccttgttacagtgtggtggaagaccctctttacaagagcatccctttctttatgagcagttaccggtatggtattttccttgataatacgtataagacagaatttaagttcggaacggaaagccgtgattattacagcttcgaggcgccggacggggagatgatttactacttcatcttcggcaaggactataaggaaatcctgagtcagtatgtaggactgacgggcaaacctatcatgcctccgaaatgggcattgggctttgcgcaatgccgtggcctgctgacaagcgagaaactgagccgcgaaatagccgaaggctaccggacacgcggcatcccctgtgatat

SEQ ID NO: 4877 - DNA, 1377 bp, Unknown
  gut microbiota DNA sequence
ggaagcggaccgtctgggatattttgtcaaggacagcacgaacgggaagagttatgacatgccgtggccttggggcggaaattgtggggtagtggattttaccttacctgccgtagccgactggtggggaacctatcagcagaaacccattgacgatggcatctccggcttctggacggatatgggagaacccgcatggagcaacgaagagcagaccgaacgccttgtgatgaaacatcacctgggtatgcacgacgaaatccataatgtctacggactgacttgggataaagtggtcaaagagcagttcgagaaacggaatccgaaccgtcgcgtctttcagatgacccgtgccgcttatgcgggattgcagcgttatacgttcggttggacgggagattgcggaaatggagacgatgtattgcagggctgggggcaactggctaatcagattccggtgattctttccgcagggctgggagtgattccgtttactacctgtgacattacggggtattgcggagacatcgaagactatccatccatggcggaactttatacccgatggatacagttcggtgcattcaatcctttgagccgtattcatcatgagggggataatccggtagaaccgtggctcttcggtccggaagcggaaaagaacgcgaaggaggccatcgaactgaaatatcgtttattgccttatatctatacgtatgcccgcgaagctcatgatacgggattgcccatcatgcgtcctctctttttggaatatccggcggatatggaaacgttctctaccgatgggcagttcttgttcggacaagagctgctggtagctccggtggtgaagaagggggcacgtacgaagaatgtctatctgcccgaaggcacttggattgactacaacaataaacaaacagtctataccggagaacagtggactaccgtggaagctcccttgtcgtgcatcccgatgtttgtaaagcagggttccatcatccccaccatgccggtgatgaactacacgcatgagaaaccggtctatccgctgatctttgaagtatttccggcaccaaaaggagaggaggcctcgttcactttgtacgaagatgagggagaagacctcggctatcaacgggatgagtttgccaaaactcccgttcgcttccggacggaggagggtggttatcttctttcggttggtgcccgtgaaggaaaagggtatgcagtgcccgctccccgaaactttattttccgtatgtatctgaagacggctcccaaaggagttaccgtgcaaggcaagaaagtaaagaaggtgaagccggaacgtctggaagagaatccggacgatgacactgaaagtatggtgtggag

SEQ ID NO: 4878 - DNA, 1125 bp, Unknown
  gut microbiota DNA sequence
gacagcagcgtgacggaaagatttgccgtcacgctgtcattcatttcagctattaataagccgagtttgttttaaggtatgaaactacagttcccattgcttgaaactttggttcccattacttgaaactatagtttcatacgcttggaacttttggtttcaagcctttggaactacagtttctcactgatgaaactctagtttcaagcagtgaaactaattaagaaatcaattgatgaactcgtaatctgtcagttgatatcttttctgcttgtattcttttgttcttttaagttttacctttccttttgcggcttccagcgttacttcgttgaattgtcctttttggaaatcgtaacttataccgtcatcttcgagaaggaggaacgttgccgaaggagcgccgtatactttgcaatgcagatcgaatacggtttgagcatctacataggggacaggtgcggccaatggcaataacgttccctggcgaacgtagagtggcaactgatctaattccgtcgtaatctcatattcacggttgccttcatatttctcattggtattgaagttgtaccatgttccttcggggaagtagaccgttctcgttttcttgttctggtataaaggagcagccatcaatccgtctcccatcatatactggtcactgatagtgcgcaaacgttcatctttgggataatccatcaataacggacggaaaggaggtacaccttctttataatatgtataaaaagcactgtacagataaggaatcagctgcatacgcagattaatcagtgtgcgggcatattcttcatacctctttgcttccggcaggaactcgccacgttcgttctttccacggtcgaattgcagccacggagcgtattgcagataccatgcattgaccatagcctgcggagaaagaatcaccgtttgcagacgatggaagaaatcttcggcagaatgtgcctcacgcacttcgggacaccacaacagtcctccgaatgccgagttgcaaagtgcctgaatgtactctttgggatcgtatgtatcactataaagtacggcgttgcgtgaagacatgaacataccggacgaccggtaatcctgataggtgcgggtatt

SEQ ID NO: 4879 - DNA, 603 bp, Unknown
  gut microbiota DNA sequence
tgtggcggaagcaaaagatatgttcgagttgtcacattcgtccagtttgaagccggagatgccttcttctatcagtgtgcggtggtaatcggtaaatattttgtgtgcttccggctggatgaagtccggtaccagtccgttccatacaaggaaatcgcctgagtagggctccagcgccttccggatgggggaagaaggatgaacatacgcgtgttcccacaggtttactttgtatcctttctgctgcaactggtccagcatttctttgtgccttggaaaacggtcgtcgctccagcgataagaacaggagtaagtggccgtctgccatcccggttcgagtcccagtacgtcgcacggaatctgtttctcgcggaaatagttggcaaaacgcatgacggagtcttgcgtcgcatctcctttgacacggtatttgaatccgagtccccacatcggaggaagacatccgccgccggagaggaggttgtatctcttgactacatccagcacttccggtccggtgatgataaatacctcaatgcctttggcgccgggtacgtcgatatggactttatttccgttgcttctgttcttatacaagtcttc

SEQ ID NO: 4880 - DNA, 6099 bp, Unknown
  gut microbiota DNA sequence
atgtgtatatccgagtccgttcagcggattgtcgtttactatcgggcgcttgcgcaggccacgctgaccgaaagtttcgaattgaagtccgaaaccgtatatttgttcgttgtcctccagagggacttcgatcagacagccacggtcggttatctttatttgcacttcgtcggggctgaagggcggctttgcagtcgggagttgtttcattgcttctacggcaggtttcccgccgaataaggaataaggggtaaaagtgtcaatttctcccgcttgcagcttgatgattcccggagcaatttcttcttgagcggatgcttgcccggcaaacaggagacctactgtggatagaaaaaggttgagtaatagttttctcattatagtttattttatcatggttatattaaaatagacttctgaaatgcgattttccactaaaatgcaataaaagaatattgcaaatataggaataaaacagatgcggtatcaagtattaatacctgagaagtcagataaagtgacctgtcacgacatatattaatgtttgtgacgggagatattaatatcttctttttttgaccgtgattctaaaaataaggttttatatttgtccttgtttaagaatgaaaaagaataaaaccatgaaaaagaattgttttctccttctctttttgctttgtgcctgcctcgttcaggcacaggatacgtatcgtaccgacaaggatgtaccttacatttccggctccgaaacagatgcttatcgtctggaacgttgtaaactggatgtttattatcccgagaataaaaaagatttttccaccattgtatggtttcatggcggtggtatggaaggaggaagtaaatttgttcccagggaactgacggatcaaggctttgcagtagtggcggttaattatcgtttgagtccgaaagcaaagaatccggcttatatagaagatgccgccgaagccgtggcatggacattccggaatatcgaaaagtatggcggtcgcaaggatcgtatctttgtttccggtcattcggcgggaggttaccttacgttgattctggcaatggataagaaatacatggctgcatacggagccgatgcggatagtgtagctgcctatcttccggtcagcggacagactgtcactcattttaccatccgcaaagaacgtggcctgcccaacggaatccccatcattgacgaatttgctccggtaaataaggcccgcaaggataccgctcctgttgtgctgattacgggggataagaatctggaaatggctgaccggtacgaagagaatgcactgctggcatcggtattgaagaatatcggcaatcggaaagtctctttatatgaactgcaaggatttgaccacggacaggtactcggtcctgcctgctatctgatcgttaattatgtgaagaggttcaagtaatagacctgtgatattctttcatttgatatggataatgtgtatatttgcacgaaactcatatcaaaaatgtgtaagttctcacatttcagatatcaaaaatgtgactcggtatgtttgaaagaggaattattcagctgttagtggcttggaaaacggatgtaaacaggaagcctttggttattcatggggcgagacaagtgggtaagacgtgggctttgaagtatttcggtcagaaatactttgaagatgttgcctattttagtctggataaagatgaaagcggactttgtgatatctttaaaacgactaaagaccccgagcgcattatacagcaattgtcctttttgcatggacgaaaaattaatcctcagactactttgctgatattggatgagattcaggagtgcaatgaagcgctgaactctttgaaatatttctgcgaagaagcacccgaatatgcagtggcttgcgctggttctttacttggaatttacctgaatcacataggcaattcctttccggttggaaaagtaaatcatctgtctatgtatccgctgacttttacggagtttctgaatacgaaagatccggcgatgtatcaatatatgtgctctgtcaaagaaatagcacctcttccccaaatcttcttcgacaaactgcgggaagccttcattgcctattctatttgtggcggtatgcccgaacctgcttctttgatggttgactttaatgatatgcaaaaagtggattcatcgcttcgggatatattgaatgactatgctctggattttgtgaaacatactacacctacgttggcgccccgtatcaattatgtatggaactctctgccctctcaattggcgaaagaaaatcgtaagtttgtttatcaactggtccgtcccggagcacgtgcgcgtgaatacgaagatgctattttatggttggaacaagctggtcttgtcaacaaagtagttctgagcaagtcgcctaggctgccactgaaagcctacgatgatttgagcacttttaagctctatgcattggacatagggttgttgaggcaattgtccgaactggatgcaagtgttttgttattgtccactcccggatatacggaatataaaggggcattggcagagaattatgtattgcaaagtcttacagcacaacttcaggcttcgttccgttactggacttccggtaataaagcagaagtggattttttacttcagcatggtaatcatatttatccggtagaagtgaaagcagaccagaatataacaggtaaaagtctgattcagtacgagaaactttatcaacctgcttgccggattcgatattcgatgctgaatttgaaacaagacggcaatctgattaatattcctttatttcttgcggataagacgaaagagctgctgaataataacgtgggataaagaatagagagaaatggccaagtgatgaaaaatacaggtcatttaaggaaaatatctgtgaaatgtaacgtttctcatagtctgtgaatcatttattatatcagaaatcggtcgtattggctacatttactccgattttacaaactaataaataaaatagctatgaagacattaagcagaactgtacttactctttttgttttatccttctcctgtttggcagcgatagccggagaagtatcttttaaaataaccaagcaatatctgaacttccccatctcccataaagagaacagaggaaggatgacttttgaagtaaacggcaagccggatttatccgtcgttatccgtctggcgccggatgaagcggaatactgggtgtttaaagatgtgtcggctttcaaaggaaagacgatcaagataacctacgacggcaatgagaagggattgagtaaaatataccagtccgacgaaatcgaaggacaagctgaactgtataaggaaaagaaccgtccgcaattccacttcactacccggagaggctggatcaatgaccctaacggattaatctattatgagggcgaataccacctgttctaccagcacaatcctttcgaaagagactgggagaatatgcactggggccatgcggtcagcaaggacttgatacactggacagaattaccggacgctctgtatcccgaccatttaggaacgatgttctccggttcggcagtcatcgactatgataataccgccggattcaataaaggcaagactccagccatggttgccgccttcactgccgccagcagtgacagacaagtgcaggggatagcctatagccttgacaaaggacgtaccttcacgaagtacgacaagaatccggtgatcaactccaaggagaaatggaactctcaggacacacgcgacccgaaagtgttctggtatgcgccctccaaacattgggtactggtactgaacgagcgcgacggacactccatctatacctcttccaatctcaaagactggaaatacgagagccatgttacaggcttctgggaatgtcccgaattgtttgaactgccggttgacggtgacaagaaccatacgaagtgggtgatgtacggtgccaccggtacgtatatgctaggctctttcgacggcaaggtatttactcccgaagccggaaaatactgctataccaccggaagtatctatgcagcccagacctttaccaatattccggcaagcgacggcagacgtatccagataggctggggaagaatctcccaccccggtatgcctttcaacggaatgatgatgctccccaccgaactgactttgcgtaccaccaaagacggcatccgccttgtcaacgttcccgtaaaggaggtcgaatccttgtgtaagcctcttcgttcatggaaatctctttcttcggatgaggccaaccgccatctgaaagagttttatgatgccgactgtctccgcattaagacaacgatcaaactctctcatgccacggatgccggattcaaccttttcggccagcgcatgatcggctacgacatgaactccaataccctgaacggccgtttctactctccccaagacccgatcagcatggagttgagtgccgatatttacattgaccgcacctctatcgaagtatttatcgacggcggactgtattcttattccatggaacgccgctctgacactaacaacagagaaggactccacttctggggaaaccgtatcgaagtgaaagacctgcaagtcttttccgtagaatccatttggtagacggaaatcaaaagctatctttgttttcagttatttaaataggaaagagaatatgaaaacgcgtagtgaagtttttcagtttgagaaagagttgaaatgggagcaccccgctccgggaatccgtcgtcagataatgggatacgacggacagttgatgatggtcaaggtagaatttgagaaaggagcggtcggtacgttgcatgaacattaccacagtcaggctacctacgtggcaagtggaaagtttgaactgaccatcggcgaccggaaagagatactgtcgaccggcgatggctactatgtagcacccgacgaaccgcatggatgcgtctgtctggaagcgggagtattgatagacacattcagtcccatgcgggctgattttctggaatagttcctgatgaatggtaggttaccggataatgatggtataaatttaccacatatatggtatttcctgtcaacaaaaactgcactatctttgtaatatcttaaaacaaaggaaattaaaaacagatatatatggaaaagattgcaaggaaattgacggatttggtaggtaacactccgttgttggaactaagtaattataataagagtaacggcttgaaggctcgtctgatcgtgaaaatcgaatcattcaatcccgcgggcagtgtaaaagaccgcgtggcattggcaatgattgaagatgccgaagtgaaaggagtcttgactcccggcacaacgatcatcgagcctaccagtggaaatacgggagtaggattggcattcgttgctgccgccaaggggtacaaactgattttgacgatgcccgatacgatgagcgtcgaacgtcgtaaccttttgaaagctctgggagcggaactcgtgctcactcccggtgccgacggaatgaaaggggcgattgccaaagcggaagagttgaaagctgccactccgggcagcgttatcttacagcaatttgaaaatcctgctaatcccgctatgcatctacgcactaccggactggaaatatggagagataccgaggggaaagtcgatatcttcgttgccggtgtaggtactggcgggacaattagcggagtaggagaagcattgaagatgcgcgatcccagtgtgaaggcggtggcggtagaacctgccgactctccggtactgtccggcggaaagcccggacctcacaagattcagggaatcggcgccggtttcgtaccgaagacttataatgcttctgtcgtagatgaaattattcaggtgcagaatgacgatgctatccgtaccagtcgtgcgctggcggaaaaagaagggctgttggtcggcatatcttcgggagcagccgtctatgcggctaccgaactggcgaaacgtcccgaaaacgaagggaagatgatcgtagccttattgcc

SEQ ID NO: 4881 - DNA, 232 bp, Unknown
  gut microbiota DNA sequence
ttttccaccccgacagaggcgtctgcgggctacattcattaaataagtaaagaatatttttaacccctgctctcagacgatggcagaggggagggaaatcttttgcaaaaattaaagaccaagccgtgttcttctcaaaaaatccgcagttttattctgtgtgtttcttttttttagtagtttatcagaaaaaatatcatttttgtttgcatgttttccaaaatatacccat

SEQ ID NO: 4882 - DNA, 275 bp, Unknown
  gut microbiota DNA sequence
gaaagaatagcactacctaaatcagaagagttaggagtcaggcgtacaatacggtcctcaataccgctgagttctacaacaatatctttcttgtctgccttgtccttttcggtatcctccttatctccttctttgtctgccttatcctttttagactgacttccgtcctttttcttatcaccgtctttctcctttgctttcttctgctccttttcaaattctttgagcagttcgaagtcctctttactcaaacggtaacggtcgtaagcatcctg

SEQ ID NO: 4883 - DNA, 192 bp, Unknown
  gut microbiota DNA sequence
atttttctgaaagagaaagcaattcatccttgtacgggatgtagtgtttgcagcatgtatggcaaaccctgcccccagaaagatgatgccgcaggaattgtagagaaaatgattgctactgatgtcatcgtaatggcaacacctgtttatttctatacgatgtgcggacagatgaagattatgattgaccgt

SEQ ID NO: 4884 - DNA, 151 bp, Unknown
  gut microbiota DNA sequence
aaaaaaggagcaacgccttgctccaacctttgttaaccttaaatctaatactatgaaaaacacattgcaaagatacggacttctgtgaactttgcaaattatccaagaaaaatagtatgttttataacattgattaagaatttgaattctt

SEQ ID NO: 4885 - DNA, 622 bp, Unknown
  gut microbiota DNA sequence
caaaacccgcagagccatatacaagctattattactattcatacgaagcggcacgacagttatccgccacagacttcgccttggctgaaggtcaattcacccccggacctacttacataaaaggagatactctttttgtagccaatattcaaagcggagcttttagtctggaactttatgaccggaacaagaaccgacatctggcttcgctcaaaagctggaaatataaagaggcagaacagaagtttccggataagattgaagcgatcggaatatccggtaaccggctgtaccttgcaaacataagttcccgaatagatgtattcgatgtacggacgctggagttcatcacacgcatcggcacaggtaactggggagacggaatcaatcagatggtacactctcacgctatggctatcacaccggacggaaatatcatgattcgtaccaaaaagaatctgttagtctaccgggaagctgacgtaactttggagaattatcagaaagttcctttctattgccgcagtaaaggagatggaatggatgtgaataacggtttccattctcatcagatggtgcaggattccaccggtatcgtttatcttgctgatttcgggcaata

SEQ ID NO: 4886 - DNA, 191 bp, Unknown
  gut microbiota DNA sequence
ttgtgcccagaacaggactcgaacctgcatgcctctcgacacacgcacctgaaacgtgcgcgtctaccaattccgccacctgggcaaaatttagttccaacatttcaaagaaacatgagcggaaaacgagactcgaactcgcgaccctaaccttggcaaggttatgctctaccaactgagctatttccgca

SEQ ID NO: 4887 - DNA, 464 bp, Unknown
  gut microbiota DNA sequence
aacagtacattatcatttaaagataaacaggcggaaagacgtcagatgaacttttacgtaaactatgaccgtacgtttggccaacatagcatttcggctatggcttccatcgagcgttatgaatcattctatgattctcgtgatattgaatatgccgatctggctcatgacatttctgatacttatctgggagtcggtggtccctccatcgtcgggccggacggcaagtcagctctggcttccgacaatacagtgacgcttaaaggtgaatcgggctcgctttcttacttgggacgtgtggcatattcttatgctgaccgctatatgctgcagtttattttccgttcggacgcttcgactaagtttgctccggagaattactggggattctttcccggtatctctgcaggatggatcatgtctgaagaatcatggttcaaacgctcgcttccttggtttgaatt

SEQ ID NO: 4888 - DNA, 255 bp, Unknown
  gut microbiota DNA sequence
tggttttgatactcgtttttttgatggtcgtttaagtgcggtattcgatttctactatgatatcaatgataacatcttgaatcagtttatggctagccaaccgggaattcccgtgtatgccggtggttcgtatgctgaagaaaattttggccgtgttgatacatatggcggcgagttgtctttgacatggcgtgacaaggtaggacaggtgaactataatatcggtatggatttcggtctgaacggtagtagagt

SEQ ID NO: 4889 - DNA, 243 bp, Unknown
  gut microbiota DNA sequence
gcgtacgcaggatgatattaacaggtattggtcttatctggaatcatatactcccgaaggcggacaaactaaatatctggataagacaagtaaagacgatttgcgtccgggtatgctggcttaccaggatttagggggcgaaatggtcaatggagttcaacaaggtcccaacggacagattgtattggaacaggattatggaaagttatgtgaaaagaataagacttataatgtctcgacaag

SEQ ID NO: 4890 - DNA, 242 bp, Unknown
  gut microbiota DNA sequence
ctgtaagagccaaaatcatagcaaggtcttttgctgtgatacgaaggcagactccatttgtaacattagccgtataataaaaaggtccttaacttcgaaaatatcttaggtttaggaagtagctatacacttctgaagagtagttatgtctatatacaaacttacccaaggatacgttaatgttcgtaaacttgggtaagattttatagatattgtttggagaggacttagaattcaccttc

SEQ ID NO: 4891 - DNA, 204 bp, Unknown
  gut microbiota DNA sequence
atggcccgtttccgtttcatgcttgattattcagaagaatcgataagcatgaacagtgcccctttggcccgtggcgaaaaggtccgcgtgattaaaggccccctgacgggtcttgtaggtgaactggttaatgtggatggcaagagtaagatcgccgttcgcctgaatatgctgggatgtgcctgtgtggatatgcctgtcggt

SEQ ID NO: 4892 - DNA, 10478 bp, Unknown
  gut microbiota DNA sequence
atcatgcaggacagcaaccggcggatccagggggacggcagtatcgaagattttctggcccgcaatgacccggcctacgaaacgcaggtggacgaattgatggagcggatcctagcagagctgaaagccaatgcccagcgccgccaagagggaaagcatctggccacagagctgtctcgctatgtggactaccggtactacctggaatatgatattgagtgccgcaaccagatcaccggcggcgtgacccgcctctctgcggtcagtcaggacagcagcggcggagagaatcaggcgccgttctatattgcaatctgtgcatccctgctgcagatctacgacaaatgcgagaacagcattcgcctggcactgctggacgaggcgttcagccgcatgaccagcgaccgcatccgccccatgatgcagatgctgcgcaaaatgcagctacagacggtactgatcaccacagtggaaaaggcctcggccatccagccctactgtgacaccacctgttccattatcaaaagcggtacgcgcaatgctgtccgcccattttatcaggatgtgagggaatgatggactacacccacgaaattctcacggcgatggtggatcgctatgaacgcaggaaaggaacttctgcccagaacggtaagccccagcgggcggtaacctttgatctcgcaaagtattatcccatataccgggaccacctgagcgaggaggagcaggccattgacgatgcggtgacgcgcctttccagttggcagatggttgccgccccccgcagtgcccagggatactacaccaagattactctgcggctggaccacattcaggaaatctatgaatttttagggcggaaaccagcccaggaaacccggcaggagcaactgcagcttctattggatgcccagagacaaaacccggatactctctccagccgcttcgccggagagctgatggccgcactgcaggcaggacgttcaccgggatacggccttcaggggaatgttgagaaactacgggatgttctgctggctctggaaaaaatcgggcagttaaacaaagagacctatgtgcgcaacttttccgaggccgtattccatgactccaagcactttcactctatttccgggattatccgcagtattctctccgatttgacagaccagccggtagaaaagaagcagatcctggaatattacaatcttttggaaaatccaacctacctctatttgaaaggaggctggatattggagtttccggactcatgtatccgtgttactgatcttccaggtggtatcggtttgacctctgacggtttgagtgccatacggtctgtccttttggagccccggacagtcattaccgtagaaaacctcactacctatcacgacattccctcagacgatcgagccgttttatatctgggtggtttcccaaattccgcacgggcaagttttcttcgtatggtttacgcttccaaaccggatgctgtttatctgcattatggagatctggatccatacggtcttttgatactggaaaacctgaaacaaaaaaccggaattccatttgccgcttcaggaatggatcttgctaccctgcaagcttgtttccaggcaggacattaccgtccgctgaccgcagaagatcggaaagtcatgcagtcacctatgctctgtgcctaccgggaaatatttgccttcatgcaggcacataactgtaaagcggagcaggaatctctctctgcaatgaaattataactgccgccctggtatccataggtcggaggcaacttgcaaggcagaccgttctctcttgttgtacggtttattctgatactattatttttttctaatcgcttttaatgagttctagtcccaaagaggtttccggaattttttataggcgtttatattgctttatagtcatttccgcttcaaatcagttactttccatcgctcttgtttccgctgtttccgtgtattccagctctgtctgtggtcttacatgtggtcagcggaaaagtttcggccagaatccatgacccacggtgatactctaggcggtacagtttacctcaaagtttgaaaaaatggtacctctgtcttgaaaaacatacaagagatctggacgcacataaagttccacccgaagagacaaattacagcgtcattgccaaggggccaaggtgacccggcatacggtatccaaaccctatgagatgattcaaaagatgccgggaatccaggaaaccgctttcccttactttgctgaattgccaggcagaaccgcgtatgatatgatggcaacagaaagcgaggaggtgctgtcatgcccgtatggatgtcactcaaatgccctttgcaaagctctatcctctgctggtggcaaaagcggagcggaaaggccgcacgcgagaagaggtggaccaggtcacaacctggctcaccggctacaccgccggagacatcgcccgtctggaacagtccacggtcagttacggtgacttctttctgaacgctccggttctaaaacccaatcgcacaattcaacatccggtcaatggtggaggtgctcctctccgtttttccggtgaccgtcttgatgccgtgagattccagatactttttatcttccggacgccgtttccctggatgtagaggtcaaaaatctttcggatgatctcggcctcctccagtacgatctgcagcactccattcggccccttagtatagctcagaaactgtatgtaattcaaaatggttttcccgctccgcatgcgattctgaatgccaaacttaatgttctcgctgcgagtttggctctccacttgtgcagaggcagcatacagatcgatcacgctgtctggcggcttcatggtaaagatacctcctaactcaatgtaaattcctacgttcatttatttcagctttctgattgtgctaatagcttcccgggcatctcttccaaagcggctgagcgatttgacaaggatcaaatggatcttccctctccggcagcctctcaggatcttccgatagcctgagcggtttttcgtgtgcaatctcgacgcttggtccgcgcaaacagccacgaatcgccacaagggattactctgaatgaaagctgtataatacgcgatctggttttccaggcttgaattttgttcctcctgattcgtgctggtacggcaataggttgccccccgcaactgctgattccaaatagggtggtcctcctgcgtctgcgggatctcaatcacatgttgaaacataagaacccctccatgatacatactgtcgatcagtttatcatggaggggtagaaaatgaaaaagctacatttcagttcaaggaactaaaatatagcttttaacatgtattgtgcgactattatagatgtcgcttgagagcctttattcattagatctaaaaaaatagatctaaaaagtataatggtagcattagttattatttatttcatagagttctatctcttgttcctttacatataccccaatatactgaagccagttggatgagctacctccgatgaccaacaaaattggttctggacatcctaggtcttcgtctttagataaattgaccattgttttcaaatctagtgcagatggcttaggagaagcattgggatgataatgccactcccctaaataatattgctgcttttgccacgctctttttagcttcgtaataatgccccgcgtactccgtacgaatgaacacaaagtttgcttggattctgctggagctcctgttatagtggttatttctgcccatttcaaatcatcagagtatctgccgatgaggattccgcctgtctcataaggatatgaattcatacataaactatgaatatactctagctcctgatccggcaacttaacaccatagcttccattaaagctctcgtaatatttaaaggtctcaattttctcgatattcatattgtttctcaatcaatcgcaggccattaaaaagtccatcttcagtctgtgtttcatagattaatgagatccctttttctgttgaattttgtacaaaagcttctaatgccttgactgtggtacaagcggcaaaccacatatcatctgccctggcaggaaataatggatgccagcagccaatgccatcccgaggaagcgcatctagattaaaatcattggaatctttttgaaaatatggttcgactaaattaagaaaattttcaaagtgaggcagttttgtcctttgaatattaatatacagtcgttttgcaccaagtccaacagaacttgagcagaatacaatttttcgcttccactctgttgcagataataacgccaatacttgatcctcgccagtggaatcaatgataatatcaaaactgctcaagtctggtactaatgccccagtttcatctatatctaaatacctttctgcataagtagtgtgaatgttagggtcaatattcgttaaccttttagctacaagtttacttttggactgataaagatctgtcatacataaagtatgacggcaaagatttcccatttctaaagcatttccatcgatacaggtgagttgtgttgccccagcacgagtcaacagttctgcaatagaagcgcccaagctaccgagcccaatcataactatacgctgattcgcaagcctatttgcaagctttccacgccccttaatcgtgcgtgcgctccagttttcgctgcgaatccatgatagttccatactatccaggaatatctttgctttgtcattcatccaccagcccgcttcactcgggcggtagccttttcttgctccgtaagtctgaggaatgctaagtcgcttgccagaatgaaaaactctatttgtatattttccgcaggatagagcaggaagctctatagcctgccaagtcatctcgtgggaatcttcaccgatatgtgctgggattggaaaaccaaccaaaagcagatgccgcctcccatctctggctttgggggcaaatgatttcaaaatggccagcaaatcaatgccctgattagtgcatatctgcttcaactgacataggttagtgggaacttgccagttattaataactggtacttcttttaatctgatccaaagtgcattttcatagtttttttcccttattgccgttccccaaaccggttgatagattaccttctgagaatcaatggagcgaaagctccgaatcattgctatggattgctctgatgaaagttgcctacgaacgattcttgcaattccacaacgctcatccgtactttcccagatcatcatggaaacacaatcctcttgaaaagcaaagactgtctgtatatgagagactggaaaatctggtaactcaaaggcatccccattttttattaatctctcttctgcagccgcacggagccacaaaacagctctttgcatattccaaaagagccgttcatcaactgtgaacggctctttttcaggaacgcggatgccaagagtctgatcaataagatcaacacagagttttcctttacgccacaaatggttttcttcctcaaaagcattgatcgattgatgtggaaatgtatttgttatactatttttgcagctcggatatatagcaatagttccaaagggataaacagtttccgcagtaacaaaccattctgttactctgggaatatctttgccatcatggtccaaacaaaccctaatgtgaagataaaaacgttttgtaactacatcccaagtccaatctttcagcaaaattatttctggtatttcttcaatccggcgccgcccgcgtcgcaaattctcagttggattctgactcatccaaacctcccaacaggaacgcccttactttcctgtactctcggagtaaatcctccgttttttctataataggatggaaattcatcgcaatctttgaagaaagatttccaaaggttaacactctcttctatatcagcgctatcataagctgctctagcaagtcttgcaccgccgcaaaccgccttatagaaagtgtcataatcctcatctgagagcatctcaaatacgtcatgctcaggaaccccccggtctgggaggaatggctttttaggataacattccgcaatgcactccaaggttccgacgatgccctctgcaacacttgtgattccatctggacaacactctcccacaaaatgttccaacggatagcttttcggatgcttgaggctaggtagttccaatcgtcgccaccatttgatcgctttaactacatttacataattacctttgcaaatttgattttttctcttggtccaacggatctgctctaaaggatgcgttcgataccattgattttcgacattatctggaatcagtaaaggctccgccctccattgttggccagtagaatcactttcgaaaaatctttccagtgaatctaagcggtaattttccaaaagtgactgctgatagcccgagagatcatcgactgtgaatgcggatgaaaggccagcacattcaatggcccttttcacctcttcgctgggagctgcggtaattactagatccatatctacttcgggcaaagaaataccgatcgaacgcttttgctgttcgtagttctgatagtacttctttacaaagggtgtaattatggcaaatgcttcttgggcagaaacggtatcatgatcaatattagtaactacaattacatctacatccaccttttttcctggtgctggtttaatacaagttgacctagcatagctaccctgtaaaaaactttcaacgagtaaatcttttgtaaggtcatcagatttgagttgttctcgaagctcggtgtgtgcggagatcaacgcttttttcaaactgtcaggtagccgaatattagtcaagaaatcctgaaaataagtttgtattgcgctcattcaagtcctcctttcccgtcaaactgaatggacggtatgtaagagcagttgcctcgttgttcaaaatcatattcgtacagaatacactttccaaatggacgggatacttgcccaagatgaaacataaacgcattaggcgcggcagcaaaaatatggagatatgctcgcctttcaacggtgcttcgtcctgccaatgcggcataaacttccattgccagttttgaggagtgggtgccattttgaatagaaaagccagtgctacctgtgtcctctggtgagaaattaataatccgtccaacgtgaaccccctgttctttcaggtatcgctccacatcagagcaaatattgtgcctcacgttgaggataagcgcggtgtcaaatgtatcttcatctcttgctatatgttctaccttccaattctgatattgggttcgatcgcatttgtcaaattcccatatttctggtcccaaaattgttttttgaacaggacaaatatccacaccggatttagtatcaaaaacacgacctgcagcaaaagcgatggaaccatgggcttccagcataatttggtaagcttgctgcacctctgtattttctctcaaaaaatcttgaacaggcttaccgatatcaaccgtccagtcaaaatccggtttcaaaaatctaccttcaaatttgtcttgtaaatctaacagaattgacgtctcttgggtaagtctttcagaacctcttgaaaaacacaaaattccaattgcttttcgtaccttggtgtacttcttgataattaattcgattcgcttgttcaactccaggctgaaaattgttcgatcggtatagccatcttttgttgattgaagaagttcctcctcaaccattgcgtccacaagtaaagatacttggggatgctccaaggaatgtccactatcatatgcatatttccaaagagcctctcgaacaaggctcttcaaactatctggatcgaatggcaacactttaaaatccacattaatatcttttagtaattgagtttcaaatttttctaactgttttttacctgttgcatccaacttacccgtttgaaacttggtaatagcgttcataaaatccacagctgataccgcacaatttccgattaaaaccaagcaataccgctggcagggataatcagtgatgatatcttttaaccacttagaaatatcgccctttgaaaaagagttgaccgtcgatttaacttggatcgcatctgtaattgtatctgcgctctttaaagcaatatctaccttgtcaccttctgttggaaattcaatgtaaatcctatcccaatcatttcgccttaatgcttctagaacagcaacaatcccttgatatagataacctctgccgccttcttttccgcccataatacgcctttctatttattgaaagagtacaaccaactgattacaatatattgtacgaagaggtggtaataaagtcaacatatcaaggaattatttaccaattattaatagtttaaatagaatgtgctatacaacacatcattcaattatcaactgcatgacttttacttaatgtaaaaaattacattagcccgggcggttttgggtgtgctgtcccgatgcctggccggcgtaaacagctgcaaaccgccacttgggattactctgaatgaaagctgtataatacgcaatctgtttttccaggcttgaattttgtttctcctgattcgtgctggtacggcaataggctgcaacccgcagctgctggtctcaaataggatggtccttctgcgtatacgggatcttgatcacatgttgaaacataagaagccctccatgatacatactgtcgaccagtttgtcatgaagggcgggaaaatgaaaaagctgcatttcggttcaaagaaccaaaatgcagcttttaacatagtctgaatgtcattaaaggatctgtggaaatccagtaatatcaatggtttgtaagcagtcggcaaaaggcttcatcttaaattgtacgctcccacactttcacttgcgtgattacatcacgcagacgatcaccaccaaccatatactccagaatttcgtcggcggtatcacaccatttctcagtacgagtgtttacttccacagagccagcctgacaaatcaccattttaggcgctgcatctgccgcaggagaaatacagccaaagcaacagtacagcacgccattccactcgaactggacttcgccgccgcgccgcatacactgtttgaaatcactgattgttttaaacctattatcttcaaggctgtttgtgccgacccatgttgccatgttcgtgttcctcccgtataaaaagctcttggtagtctgttctttgccgaagtgaaagcctgactgatcccatatgatgctatgttggtgtggaacttcatgatacttggggaaaccatggtttgtatggtgaatttccaaatatgcttttccgtcaggaccaatcagcgtttcaataagctctccttttgccgtataggtatattttgtttcgcccggctcaccccagaatcgctcatcctctggttttgacggtttgatttctccgccgtaggcgcttcctccgccttttccaattaggtacggctctattgtatcacgattattactggatgtgccgccaattttaaaggcatccaaatcttcacgatggaaacttcgttcatagttcatataccgccaagaactgcgttcgtaatccacatggataatgttgccctgcatttcgggaaacggtgtattataacagataattttttccggatcaatgcgccgcagcatctcgttgtatcctgccatgaaccattctttctggtcgcagcggttgtcatgctctgaggccatataagtggagacagcaacaacgcttcctttttcaatcccttcaaagcagaaatcaaacgtggattcatctccccagttgacagttggaatgacccggagccctttggatgcccagtaagcgccgcaccagcgattacgaaatacattgtaaagttgcataacaggcgccatctccaggtacatactgaaatccggcgacagcaccgcgcggtagcgggagagtttttcaatgtcattgtccgggttcttccagaccctctcaaagcgatagtcatataggaagaagtgtaccatgcggtctaggtgattctggtcctccaaatgggttttgtcaaaaccgatcaacaaaagatcatcgaagtctccgggactttcttggaacttaggaatgatggggatttttaactttcctttgccgggaaactggttgcgaagcagtttctgactggttcggtagttgtaattttcttcggtcatagatagccctcctgtatgtagtaaggaacaagtccttctgcatacaggttcccaaacaaaaaaagttgcacattcctgtgcaacaacatgagaaaatttacaaattggcagtaaaaaatcggagtaccccaaaggatactccgatggtacgagtggcgatacagaactttttgaaaaacccagt

SEQ ID NO: 4893 - DNA, 91342 bp, Unknown
  gut microbiota DNA sequence
atggtcagaatgcgtttcatggtcaacgctcctctcttttttggtggaagaatttccactgattactgctatcttacgccgggcggagagagccgtcaagagcagggaacatgatttatggaaaaagggctggtatttcccgccggttcccggtataatgtacccaaatggtttctctttccccatttttccaaacagctgtgatcggctggggcgaggcgggaaagcagaatcattgggagaaagcgcgtccggccaaagggctgacacggggcaacggagcaggtgccgtgaatcccggcggcctatgcatggatccggcggagagagcaaaattgcggctcttttgcagcctgcccgctgttctgggcagccgctggacgagctgtttggcaggatggaaaagaggagagaccatgcgcaagctggccgcgttcaccgtgtccttcgctctggggatctgtctggcccagtatctgctgccggagaggcttcttctgcccgtggcggcagttttctttgccgcggcctgcctcgccttgctgctgccgggactttggcggaagcgggtgttgctggtgggcacggggctggccctggccctggggtggaactggctgtacagctatgctgtacgggcgcctcttgcggccctgtccggcagcgagggcaccgcttccatgactcttttggagtacgccgtccccacggactacggcgccaaggtgacagtgaagctggagggggttcccctgggcaaggtggtctgctacggcggggcggacctgctggacctggagccgggccagacggtggcggcacaggtgaaatttcaggattccgcccggcttcgggaggataccattaccaacttcaccgctcagggagtgttcctgctggcctaccagcggggagacgaggccgtctacggtgagggatccgccggctcgccacggtggtggcccgcccatgcggcccgggccatgcagaaccgggtgacggcgctgtttgacggagatgaggccgcgttcctcagcgccatcctcaccggggacacgtccggattgtcggaagaagcccggtccgacctgtcggaggcgggactcagccacatcctggccgtgtccgggttgcactgcggctttctgatgacgctgattctgctgctcacaggacggcaccggcaccgtctggcggcggcgctggcgctgcccgtcctgatgttctatacgctgttgaccggggccagtccctcggtggtccgggcctgcatcatggtggtgttcgtgctggcggcacccctgtttcagcgggacagcgacccgcccaccacgctgtccgccgccctgtttttgatcctgctggcgaacccctttgcggcggcctccatcagtctgcagctgtccttcggagccatggcggggcttctctggctgacgccgaagctccaggacctgctgttgggggagagaccgagtgggaaggtctgccgactgctggtttccagcctgtcggccaccgtgggggccatggcattcacggtgcccttgtgcgctgtctacttcgggtcgctggtactgatctctccggtaagcaacctgctgtgcctgacagcctccagccttgtgttcacgctggggcttggggcagtcctggcgagcttcctctgggtgcctctggggacggtgatcggcttcgtgccggctttgctgacccggtatatcctctggatatccggggttctggcgtctgtcccccaccacgccctgtacttcaccaacccgtatctgaaatactggctggtatttctgtatgtcctcttcgccgcggcctttttcctgcggcccaaggcccggcggaagtatgccgtggccggtgtgctggcggcggtatccctggcggtgacggtgcggctgggcgcgccccactacacccggggcggcctggacgcctatgtgctggacgtggggcagggggagagcgtgctgctgacctccggcgggaaatttgccctggtggactgcggcagccgcaacagctggtacgacgccggcggcatcgcggcggatcacctggccaccatgggctgtgggacgctggactatctgattctgacccactacgactacgatcacatctccggcgtggcggagctgctggcaagagcgcgggtggacactctgctcctgccggacgtgtccgacgatgcaggggcgcggttccgggtggagctggccgcccggaaccacggcgtggacattcaatacgtggaggcggagacggtttacaccctgggggagagcagcctcaccatctacccgccgggggacgtggagggcgacaacgaacaggggctggccgtcctgtgcacctatggcgactacgacctgctgattaccggggaccggaacatggcggcggagcggcagctgatcgccgaccatgatctgcccgacatcgaggccctggtagtaggccaccacggctccaaatcctccacctcgaaggagttgctggaggccctgacgccggagacgggcatcatcagcgtgggggacaacagctacggccaccccacggaggacgccctccgccgcctggtgctggcagacgtggagatctaccggacggacaagcagggtaccgtccatctatctgtgaattgaggagacaccatggcatacgcgaaaaagacatccaaggccaacgaggcctttcagaaactgaaaaacgacctggccgcgggaacggcggggaacgcctacatcttctacggggaggagacgtatctccgggagtactatctcaaagagctgcggaagaagctggtccccgccgggtttgaggagttcaactaccacaccctggaggggaaggacctgacggtccagaccctggcagagacggcggaggccatgcccatgatggcggagcggacgctgatcgtggtgtcggacttcgacctgttcaagctgaacgaggagcagcgggaaaagctgatcgcctttttggaggatgtgccgccctactgctgcgtggtgttcctctacgacacggtggaatacaagcccaaccgcaccatgaagaagctgtacaaggccgtcaccgaccacgtggaagcggtggagttccgtccggcggacaacagcgacctggtggtgtggatcgcccggcggttcaaggccctggggaaggagatcgaccgtcagacggcggagtacctgatcttcacctgcggcggtctgatgacggggctggtgccggagatcgcaaagatcggcgcctacgccaaaggcagggccatcacccagaaggacatcgacgctgtggcggatccggtgctgtcggcggaggtgttccgcctgtccgacgcggtgctccaggggaattacgacggggcggcccgcatcctgggggatctgctgaaaatgcagacagagcccatcatgatcctggcggctttgggcagccagctccggcgcatctataccgcccggatggccattgacagcggcaaggacaagtactggctcatggagctgtgggagatgaagagcgactatccggccaaactcctgctctccgccgccaaaaagaccacggccgcctggtgcgccgacgcggtgcagatgtgccaggtgctggaccggcggatgaagagcgagaagggcgtggacgccgtgggcgagctgaagctgctgctggtgcgtctgggggcgcagcggcgatgaagaaagcgatccgagaggtcattgtggtagagggccgctacgacaaaaacgccctcagtcaggtggtggacgctaccatcatcacactgggcggcttcgccgtgttcaacgaccgggagaagctggcctttctccgccgcctggcggagcagagggggctcatcgtgctgacggacagcgatggggcagggttcgtcatccggaactatctgaagggtgctctcccacgggatcgggtgaagcaggcatatatcccggacatcccaggcaaggagcgccgcaagcggacccccggcaaagagggcaagctgggcgtggagggtatgaggcccgccgtgctgctggaggccctgcgccgggcgggcgccaccttcgccgacgagggggcggcggagtgtccgggagaccctatcaccaaggcggatctgttcgccctgggcctcaccggcggaaccgacagcgccgcgaagcgccgggcgctgctgaagcagctggatctgccggagcacctgacgcccaacggcatgttagaggcgttgaacctgttatacagccgggaggagttcctttcccgaatggtgaaaactcagtaaaaagcgggaggaagccgggccatcgacagggttcgacagcattcccccaaacggcagtgctacaatttttttgttcgtgtgtgacaacagacagaaggaggaaatcgaggtgcgggccttcctggtaggaagaaggccgtgccgcggcgtaccggtggactactttctgctggtggaggagtgggacgccctctgggagtgctacggcatccgcgtggagagcggcggggagcggacggagatcccagggatcaccgcctcgcagtctgggatcctgtcgctgctgtccaagctgatgcgggggagcgtgacgcccgtcgcggcgcgggatgtggtggaggactggttgctggaatagcgtgcagtccggccgtaaaaaggagtccggagaggatgcagggtgtgcattctctccggactctttttacaaatttcagggcgcttttgccaacgccgccagaacggcggacaggagcgggcacaggaccagtcccgccgccagcagccgtccccggcgggaagcgaacgtcacgcccttccgtcccgtccgttccgccagcagccccatggggagggacagcagatagatgcatccccagaaggcccagccgtagtgcccgtgtcccatggccgctcccgccgggtggggccccagaaccagccccatcaaaaatccgatgagaaaataggcgcaggtggtgcaggagagccggtaccgccccagcagcgccgtcagggcggagagggccatggcccaccagaagagaccgctgctgaggagccagccgtagagatagctctccccgccgctgggccgctcccacagcagccagcccagcagggagctgtcctccagggggcaccagaggatgcggcccagcaggtaaaagacaagataccccgcagtcaccgccagagccgccaggacccggggacgccggcggctccgggaccacaggggtggaggtgcctctgccgccggagcgtccgccccctctgatgggagcagcaggtccaccgtggtgccgaagagctccgccaggcggaagaggttctccgtgctgggggcgctctggccggactcccatttggtaaccgcctggcggctgacatccatccggcgggccagagcctcctgggacaagcctgcccgccggcggtgttccctgatccgctgacccagcgtggtcatggacacacctcctttcagactttatgctaccagaattcaactcctttgaccaccaactatccggcaacaatcggttgcggcggcggaaaagggcagctttaccgcttcagcagccgccgtagagaagcggcgtccagcaggttcaccgtctggaaggcaccgccgtaaaacacggcgtagttgttgaacacgcagggaagggccttggccttctccaatgtgtccacaggcaccagagaatacggagccccggcctctccacacacctgccggatgatctccaggctgttggccacataggggcactggtcactgtaatagaccgtcagcgccttttcaccgatggtccccgccctggcttggtccgtaaagcgggggagggtaccgtcgaaggatcgggccagcagggtgtagccatagcccgtttcatccaccgtctcaaagccgtacttccgggcgaaggactggtcggagagccaggccttctgtttttccgcccccagcatgcagatgccggattttccccggtcccgggcgtccgccaggcagtgctccatcagcgcccggccgtaccccttgcccttgtatgcaccggccacccagaggcagtagaggtacagatagttgtccccctctacagggacccaggcggtctccaaaggggcgtactcgataaagaccttttccttgacatccagtttccggaagacgtgcccctccggcaggcggtccaccagccatcggcgtttagcctccacgccggggtggggctttttgctgcggatgatgcagcacaggtgctgatcggcgatgttttccgccgtcagatcgatgaatcccggttccatacagacgctctctttccgccggagacgccggcctttttttcgtatcgtaccagatccggcggaagaacgcaactgtcctgccggttcgccaaaggcgctgccagcggcaggtttatcttaatgatacggtgccggcgcatcccgcttttgggcattgaggacaggtcaatctccgttttgtgaatatgtgatcgcttttgacatattcccgcatacagacaagtttttgctgtccccatgccgccaatggccgtctaaaacaacgtattgcatttccccgtcagattttgtataataaatatcctaacgtgtacgcataccaacgatacactgcgcgagagggaggaatgacagcgcatggcagaggagatcaagctgacgcaggacgaggcgccggagagccggaactttatccacgctttcatcgaggaggacatcggccccggcggccagttcgaggggatgaccgtccacacccggttcccgccggagcccaacggctacctgcacatcgggcactgcaaggcgctgaccatcgacttcggcacggcggagaagttcggcggcctgtgcaacctgcggatggatgacacgaaccccaccaaggaggacgaggaattcgtagacgccattcagcaggacattcactggctgggctttgactggggcgaccggttcttctacggctcggattactttgacgaggattatcgtcaggcggtgggcctcatcaagaagggcctggcttatgtctgcgagctgacgccggagcagttcaaggagtaccggggagataccaccactccggcccgctccccctggcgggaccggcccatcgaggagagcctggacctgttcgagcggatgaagaacggcgagttcccggagggcaagtacaccctgcgggccaagatcgacctggccagcggcaacttcaatatgcgggacccggtgctctaccggatcaactacctgccccatcaccgacaggggaacaagtggtgcatctatcccatgtacgacttcgcccaccccattcaggacgcgctggagggcatcacccactccctctgctccctggagtttgaaaaccaccgccccctatacaactgggtggtagagcactgtgacctgcccagccatccccggcagatcgagttcgcccgcctgggcatcgaccacacggtgctctccaagcgcaagctccgcaagctggtggaggaggggagggtctccggctgggacgatccccggatgcccacgctctgcggcctgcgccgccggggctatacgccccggtctatccggaacttctgtgagcgcatcggtgtggcaaagtctgccaacgtggtggaatacggcttcctggagcactgcctgcgggaggacctgaacgagaccgcccagcggaccatggcggtgatccggcccatcaggctgaccatcaccaactatccggaggggaaaagtgagactgttaccgtggagaacaaccccctggaccccgccgccggcacccgggagatcgccttctcccgcaacctctggatcgagtccgacgatttcctggagaccccggtgcccaagtacaagcggctctaccccaatggaccggagtgccgcctgaaaggggcctatctcatccgctgcaccggctgcgtgaaggacgagaacggcagcgtcaccgaggtgctggcggagtacgacccggagagccggggcggcgaccccgctgacggccggaaggtgaggggtgccaccatccattgggtggatgccgccaccgccatcgacgcggaggtgcggctgtacgacaacctgttcaccgacgcggacccggacgcggccgacaagaacttcctggagtgcctgaaccccaactccctggaggtcctcaccggctgcaaggtggagccttccctggcggatgccgcagctcccgccagcttccagttcatgcgcctgggctacttctgcctggacagcaaggactccaagcccggccatctggtgttcaaccgatctgtgagcttgaaggacagcttcaagaaataagcatacaaaaagaccgccgaagggcggtctttttgtatgcgcttctcacagcgggatctcccggtccagcttgtagaaggtgaaggatccgttccccagcagcgtccccgcctggtcccggatctccacctcgtaaaagcagagagttcggccgggcttggtctcccgggcctctgccaccagatggtcccccagcttggcgctgcggagaaagttgtaggaggcgttcaccgtcacggcataatatccgtgggaggccatggcggagccgcaggccgtgtctgccagggagaagtagcagcccccgtgggcaacccccacagggttggcgtcctccgccgtgatgtcctttaccgcccgggcgtagccggggccgatctcctccacaaagatccccagccgctgggcgaaggggttggagctgttccgggtgtctctgagctttttgtagtccatgtgtgcggtctcctcgtttttgatgacttgctttcagcttactccgaacttgtgaaaaggtcaatttttttcctccttttttcagtggaaattcagaaatccatgatagactgcctccatcttgacggaaaggatttgctgcaatgaaacgaattgcttctctcttgctggggctggcgatggctgcggccgcgctttctggctgcggcgcgcagggccgcgagacggccgcgcaggaatttccggacgctgtttccatcgtcctctcggatgacggcattattgtggacgggaaggcggtctccacagacgagtcagccgccgtccacacggcccatgacattgtctgctatgaatccggccgcgacttcacctacggcgagggcacggaggccgacgaacacaccgccgaagaggcggaggcccacacggtggtccacatcacacaacccggcacctacgccctcagcggcaccctgtccgcaggacagatcgctgtggacctgggggaggacgcggaggacgacccggcggcagtggtgacgctgatcctgaacggcgtggacatcacctgcactgtggccccggcggtgattttctataacgtctatgagtgcggcagcacagacgaggacaccgcctcggagaccgtggacacctccgccgccggtgccaacgtgctgattgctgacggtactatcaacaacgtcaccggctcctatgtggcccggatctacgacccggacagcgtggtgctcagcgaggacggaatgaccgtggaggacagcgagaagctccacaaatacgacggcgcattttactccaagatgtccatgaatgtggacgggggtgaggccggcactggtgtgctgaacatcaccgccgacaatgaggggctggacacggagctgcacctcaccatcaacggcggcaccatcaacatcacctccggcaatgacggcatcaacaccaatgaggacaatgtatccgtcaccactgtcaacggcggttccgtgaacattcaggtcgccggcgagaccggcgaaggcgacggcatcgactccaacggctggctggtaatcaacggcggcgccgtcaccgccgcggcctgctccgacagcggggacgcgggtatcgacgccaccatgggcatcaccatcaacggcggcacagtagcggcctccggcaatatgtatgaccaaatcgacggcggggcccagaactatgtggtgttctcctttgcatcccggcagaacggcggccagacctataccctgcaaaacgccgacggggagactgtgggcacctggacgccggcaaacgacttcacctgtctggtggtgtcctccccggacctgacggcaggggactacaccctgtggcagggagacacccaactggccggcaccatgtccgacggcgtgggcagccccggcggcggtcggcacatgggcggtgaggcgcctcccgcggacttggatccctggcaggcgccggagggcgaggtgccggagaacgctggcagtgaagttccggacgatccccctgagcgcccggatggggaaatggagcctgacggtagggaatctcccgcaggcggccgcggccccggcggcggagagggcggccagagcgccgcgggcctgtccaagacattcactttgtcggatggcgggagcttctttaacgggctctcaccgacggagacaacagaagcctctgagacgtaaagacagcggggccggtttcccggccccgcctgctcatatattttttttgatggtgttgatggcgcccttctccagccggctcacctgagcctgggagatgccgacctccgcgctgacctccatctgggtctttccctcgtagaaccgcagggagaggatgcgccgctcccggtcatccagccgcttcatggcctctttcagggcgatgcggtccgtccaggcctcgtcggtgttccgggtgtcgctgacctggtccatgacgcagatggcgtcgccgccgtcggagtataccggctcgtacagcgacacgggatccacgatggcgtccatggcgaagaccacttcctcccgggggatgcccagctcctgggcgatctgttccaccgtgggctcccgctggttttccgccaggtacttgtcccggacctgcaggactttataggccgtgtcccgcatggagcgggacacccggatggcgctgttgtcccggagatatcggcggatctcgccgatgatcatgggcacgccgtaagtggaaaaccgcactggctgattgatatcaaagttatcgatggccttgatgagccccacgcagcccacctgaaacaggtcgtcggcgttctcgccccggccggcgaagcgctggatgacggagagcaccagccgcagatttccctcgatcagttcccggcgggcctcctggtccccggccttggtgcggcgcaggagttccatggtctcctcgtttttcaacaccttcagctttgccgtgttgacgcccgcgatctccaccttgccctgcatggctgtgccccctcaaaccctgaaacttcatgagttcagtatggccggagggcttttttcctatactggaagcttttgtcgctttctgcccgtctgcataaaacagtgttgggacattccgtccactgcatagtctcaaggcagggggtgagcgcggtgcagtgcaggatccgggatttccggtgcaaggaggtcatcaacgtctgcgacggctgccgcctgggctacgtgtcggacctggacgtgcgggtgccggaggggcaggtggtagccatcatcgtctacggcccgggccgctttttcggcctgttcggcaggggggaggagttctacatcccctgggagtgcatccagcggatcggagacgacatcatcctcatcgacaagccctttcagcggcgggatccccgcctggagcggaagcggcgcaagcgttgctgacaaatgcccccgcggctttcaccgcgggggcatttgcgtatgccggcggagcggtcacggctcctccggatagctgatcttcagcgtcatgccgtcgtgccagacaccggcgctgcgggagatgggcagatactgcccctcggtaaagccgatggtctccccgtcgtggaaggtgacatcctcctccaatacatagctggccagatccaacaggaagctgtgcaggtcacccggggcagcctgggtgtccagaacctctatctcctccttgccgaaggccgcaaggccgtcagtgtagccgcacaggccctcttcccggcggtagaggcccatccacaccagatccagcaggggcagctccccgtcctccatgggttgagacgcgttaagatagaactccggctggtacacggtgccgttggcgtagacacccagcgttccgcgctggcggcaggcggcacacaccagcttcacctggagtatggccgcctctcggacggattcctcccggggcaggacggtcaccaacagctggccccggtggcgggcagcagattccgctgcctccggccacaggtagttgtgggcggcgttttcctccgcctcgccgtggggcacagggaatgggtataggcagaccgccgccagcattccactgacctcaaaggtcagggtgctgccgccgtcttcagattcctccgcctctgtgaggcaggggatgccgtacagatcccgcagatcccggcggaactggtccgggtcccaggcaggcgcttccagtaggacaaaggccaggaaggcgccgccctccggccgggtcagggcgggctgccggtcctcgctgcaaagggagaaatccctgtcgaacaggaccatctgctggtcctgcccccggatgtaacacaggcgcatcgtccggtccggatggaccgcgaaccattccagggatagtccctccgttcccagccccgcctgggcggccaggaaggttcggccccggcggtccagctccggcagccggcgcacaaactcacggacccaggagaggggaaacttggacagcgccgcctcgttcatgaagaaacgccccagcaggctgccgttctgatagggcagccggaaagtgcagtagggggcgtccgcctcccactccgtgggggagagggcggtcttgatggcggcgaggttctccggatcgcagcagatcccggcgatggacagccgcttttccgcctcgttttcgtctccgccggcctgcagaaccgcgtcgcactccggatcgatccagtggaactccatctcctccagagtccggccctcctggatctcccgacggagggtggtgaactcgtagtccccaggcaccagagccagcccccggtccaccgcctccagagcaccggacgcatcgccgaagtgagcccggagcttggcggtctccagccagccccagggatactccgggtccagggacacgccggtctccgcataatgccgggcctcctccaagcggccgcagtacatcagggcgcaggcgtagcgatagtaccagatcccgctcccggccgcctccgccgccggttccgaggcgggcatccactgggcagctttataatagtagtcatagtcgtcgatgttgttgcaggcataggcgtaccacagggcaagatccagatcgccccgggcctgctcctccgtgaactctccctgacgcacaccgtcccggacccgctggtctaggtagtccagcattttgtaaaagtagccggagacgtctccgcacagttcctccagtgccgccacatcctccgccatcaggaccggcggaaccttttcaccgggaaccgttccacccggagatgatttctgcttttcagtgtccatccatgtgctcctttctgatctgccgcgtttttatataaactgaaaatgggattttggtcattatagcagacagacaggcgcggcgcaacaacaaatggggggctgctggggaactcggacaaattcggacaaaaccgggaattttacacggcttttgggaaaaaatacttgcattgcacactggattgtgatactatatttcagcattccgcacggtgcgtcgactttctgtctgtgcccggggcccaaaacggccgggttggcaggggggatgaaaccgccggaggaccaactaaattgaaattggaggaacacacaactatggcaaattctagcgtcgtatccatgaaggccctgctggaggcgggcgtccacttcggtcaccagacccgccgttggaaccccaagatggctccctatatctacacggagcgcaacggcatctatatcgtggacctgcagaagaccgtccgcaagctggaggaggcatacagcttcgtccgtcagctgtctgagagcggccagtccctgctgttcgtgggcaccaagaagcaggcgcaggaggccatccgcgaggaggccacccgttgcggccagttctatgtgaatgcccggtggctgggcggcatgatgaccaacttcaagaccatgcgcacccgtgtggaccggctgaaccagctgaagaccatgcaggaggacggcaccttcgacatgctgcccaagaaggaagtcatgaagcacctgggcgagatcgccaagctggagaagtacctgggcggcgtgaaggaaatgaagaagctgcccggcgccctgttcatcgtggacacccgcaaggagcgcaacgccatcgccgaggcccacaagctgggtattcccgtggtggccatcgccgataccaactgcgatcccgatgagatcgattatgtgatccccggcaacgacgacgccatccgcgccatcaagctgatctcctccatcatggccaacgccgtgctggagggcaagcagggtgagcagaccgctgaggccgcctctgaagaggctgctgccgacgctgagtaatctgcgcctgcatttgcgcgtatataccaaaactgtttggaggaattcaaaatggcttttaccgcagctgatgtaaagaacctgcgcgagatgaccggcgtgggcatgatggattgcaagaaggcgctgaccgcctccgacggcgatatggacaaggccgtggagtggctgcgcgagaagggcatggccgcctccgccaagaaggccggccgcattgccgccgagggtatggcctatgccgccgtcatcgacggcgtgggcgtggtggtcgaggtcaacgccgagaccgacttcgtgggcaagaacgagaagttcgtggacttcgtcaagggcgtggccgccactgtggccaaggaggctcccgccgacctggacgcgctgatggagtgcaagtacgtcggcaccgacctgaccgtcacccagcagcagcaggagatggtgctggtgatcggcgagaacatcaaggtccgccgcttcgcccgcttcgccgagaacgtctccgtgccctatgtgcacgccggcggcaagatcggtgtgctggtgaacctggagtccgacctgcccgctgagaaggtggaggagatcggcaaggacgtggccatgcagattgccgctctgaacccccgcttctgggacaagtctcaggtgggccaggacgtcctggacgaggagaagaagatcatgatggtccagatggagaacgatcccaagatggcctccaagcccgaggccgtgcgggagaagatcgtcatgggcaagctgaacaagttctactccgagaactgcctgctgcagcaggagttcgtgaaggacaactccatgagcgtggagcagtatatcgcctccgccgccaaggccgcaggcggaaaggtgaccttcaaggacgccatccgctttgagaagggcgagggcatcgagaagaagcaggagaacttcgctgaggagatcgcctccatggtgaagggctgattattaagccagctgaatcaggagcgggtgcgaaagcacccgctccgcttgtttccgcctgaaagccctttgaattccggtgattttccttgtattgcggggggaaaactggtataatactcctatcttttgggttatcatcacagggagacgaatatgctgcactatttacagggattgctttccgcgctggacctgacttcactgctggacgcggtgttgcgggtggccgcgatttttctctgcctgacagtccacgagacttgccacggtctggcggccctggctcttggggaccccacggccaaatccatgcaccgcctgagtctgaatcctctgcggcacatcgactggatcggcctgctgatgatgttcgtggcaggattcggctgggccaagccggtgccggtggacccccggtacttccgaaagcccaagcagggcatggcattgaccgccctggcgggacccgtctccaactttgtgctggcggttttggcaatgcttatcagtaaggtgatttacctttacgccccttattctgcggcgatggacgtggtgttcagcttctgcctgtacacgctggcgcctctgtccatcggtctggggttgttcaatttgattcccatcccgccgctggatgggtccaaggtgctggcggcgtttctgccggaccggcagtacatcacgctgatgcggtatgagcggtacggcattgtcgtgctgttggtgttgtcctttgtgggcatcggcagcagtttgatctcccggggcatcctgggcatttacagtgccctgttgtccctgatttttggttgaggtgaacggtttgcaaaaccccgtattcaagctggaaaaggtggtccgcagcaaatccgaggaagagatgcaggactttgagggccctctggacctgattctatatctgctgggcaagaacaaaatggagatccaggacatctccatctccctgatctgcgaccagtacatggcgtggctggcccggcggcaggagatggatctggaggtggccagcgagttcgtcaccatggcctcccaactggtgtacatcaagacccggatgcttctctccattgaagatgaggaggcccagagcgagatggatgccctgatcgcctctctggaggagcggaagcgcaacgagaactacgccaaggtgaagtccatggccgcccggctggagcccatgggagaattcggacggaatatcctcacccgtccgccggagccggtgaagcggggaaagatctacgagtacgaccagacaccggcggacctggtcttggccatggccgagatccagggccgggcggagcggtccctgccgccgccccgctccgccttccagagcatcgtccagcacgagccctatcccgtggagagcaaggcccgggagattctgagccggctaaggactcacggcgtcactcggtttctgctgctgtttcggggcagccgcagccgcagcgaggtggtggccacctttctggcggtgctggagctgtgccgggcccacatcctgcatctggcagggagtgagacggactgcactgtccggcaggagcgggagttgccccaggatctgaaactgtgagagaggaccgttccaagatggagatgaaagagatcgaatcggcagtggagggtatcctgtttgcctctggggagccggtgcagaccgaccggatctgcgtggccctggagatggaccgccccacggtggagcaggtgctccagaagctgatggactactatgcctacgagcgccggggcatccggctgctgcgcatggaggatacctggcagctgtgttccgcgccggactacgcggatgtgatccgaaaagcctttgagatccgcaagcccgccaagctcagccagccggcgctggaggtgctgaccatcatcgcctactaccagcccaccacccgggcctatgtggatcagatccggggtgtggacagcgcctataccatcggcctgctgctggaccggaagctcatcgaggagtgcggccgcctgcaggtacccggaaggccccgcctgtaccggaccaccaaacagtttctccgggccttccatctgaccagcctggatgacctgccggagctgccggaccttggcggcgagggacagatgcggatcggcgaggacggacagatcatggacccggcggacacggcagagatcaccggagccgacacgccggagacggccggcgccatggaggaagaggcgccttgagaatccgctccgccagagcggtcaggggggtgatggacgttgctgggactttggatcacgttggcggtgctgctggcacttgcgatttttctgtggcggctgcggctgggactgtatgtggtcttcggcagggggcaggccgcggcggatttgacgattggtcccttccgggtccggctggtaccgtccaaagagacaaaaaaaacgccgcaggaaaccaaaaaaacgggaaagcctaaaaaggagccgaaggacctggcagaggcggcaaaaaaaatcccgaagcccaaactggaagatcttcaggacgccgcaaggacgctgtggcccgccgccaaaaaggctctgcgccgcacccggcggggtatccgcgtagacccgctgcgcctgtccgccaccctgggcggggcggaggacccggcggcagccgcagagttgtacggtggactccacgccctggtctggaccgggatgccggctctggagaagctggtggtgatccgggatcccgggattcatctcggaattgattttgacgcgcaggagacccgggcggaaggagagcttggcatctccatccggctggggacgctgatcgccgtgggaacgcagctggcggtcccggccatcggctggctccggcggttcatgaagcggcggcggatgccgcccgcatccaaagcagcagacaacaaggcggcagaacaccccgccgcgtgacgagaaaggatggcatccatggacgagacaatggacaagaagagacccctcagcgatttgatgcgttccacgatggacaagatccgggagatggcggacaccaacaccatcgtggggcagcccatcaccacgcctgacggcgtgactctgatccccatttcccgggtcagtatgggcttcggctgcggcggcgccgactacggtaagacccagcccaaggacttcggcggcggcagcggcgcaggcgtgaagattgagcctgtggcgttcctggtgatccgggagggaacgacccgggtgctgccggtggcgatgccgcccatgaccacgctggaccgggtggtggagatgatgccggatctggtggacaaagtggaaaaatatttcgacaagaaggaagaaaaagaacccgtctgaacggggtatactaccatcaccaaacaaatgaggtgatggcatttgcaaaccctgctccggcggcttgccgctttggggatcgctctggcggccctgttcagtctttttccttgtcagacgcacgcggtcagtacgtctgcctcctccgctattttgatggacgtggacagcggccgggtgttgtatgagcagaacgccgacgcgaaaatgctgatcgccagcactaccaagattctgacggccctggtggctatccgggagggagacctgaacgatgtggtcacagtctcccgggaggcggcgtatacagagggctcctccatgtatctgaaggtgggggagaagctgacgctggagacactgctgtatggactgttgctctgctccggcaacgatgcggccgtggccattgccgagcacatcagcggcagccaggaggactttgcaaagctcatgaatgcaacggcccgggagatcggcatggagcactcctccttcgccaaccctaacgggctggaccatgaggaccattactccacggcccgggacatggcgcgtcttgcctgcgcggcggtggaaaatgagactctggtacggatggcctccacccgcagcgtcaccattggcgggcggaccatgaccaaccacaacaagctgttgaaccagatagaggggtgtatcggcctgaagaccggctataccatggcggcaggccggacgctggtgagctgtgtggagcgaaacggccagcggctggtggcggtgactctccaggacggcaacgactgggcggaccacgcggccctgtatgactacggtttttccacctatcccgccaagctgggggcctctctgggccagacaatccagcgggtccaggtggaaaacggcatgagcgccacggtgcccctggtggcggcggacagcttcgcctggccgctggcggagggggagtccctggagctggacgtggagctggccggatctctgcgggcccccatccgggccggccggcgggccggggaggcggttttctcggtcaatggaaaagaggtgggccgggtggcgctgctgtatggcgccgacgtggcgccccggatggagagcgccctgagcattctgaagcaggggttgccgggatagagagaggacaacatggaagaacgactgcagaagctgctgtccgccgcgggggtttgctcccggcggacggcagagacatatttgatcgccggaagggtgacggtgaacggccagaccgcccatctgggccagcgtgcagacccggatcgggacgagatcctggtggacggccgtcccctggcgccccgggcggaggccgtgtacatcctgctgaacaagccgcggggctatgtctctaccctctcggacgagcgggggcggcggacagtggcggagctggtagcggactgcgggagccgggtttatcccgtgggacggctggacctggattccgagggcctgctgctgctgaccaacgacggtgcctgggcccagcacctgctgcatccaaagcacgaggtggaaaagacgtatcacgtctccgtattcggaccggtggccggcgcggcggcccggctggcagccgttaccgacctggagggggagcccatccgccccgcccgggtggaggtgctgcgggaaactcccggaaccgcggtgctggcagtgaccattcatgaggggaagaaccggcaggtccgccggatgtgtgcccagtgcggcctgacggtgaagcggctgcgccgggtccgggagggagctctggagctgggcgatctgccgccgggaaagtggcggtatttgacacaggacgaggctggggcgctgggagtcaccccctgactgaaaagcggaaggcgccgccctgaatggggcggcgtcttttccattccggcggcgagacggaaaaatcccgcaaagcggtttgaattttgaaaaaactgtgctacaatagaccgcggaacgtccggcgggccagcggagctgccgggcaagatcaagaacggccccctgcaggcggccgacggaggaaacagcagtggctaagagcatcctacataccatcgagcgcaatatgcccaccttttccaagggacagaagcggattgccgactacatcctgcagaattacgacaaggccgccttcatgactgccagcaagctggggaagctctccggcgtcagcgagtccacagtggtacgcttcgcatcggagctggggtacgacggctatcccagtatgcagcgggcactgcaggagatgatccgcagccgcctcacttccacccagcgcatccaggcggcggacaatctgttcggcggacaggatgtgctgtccgccgtgatccagtccgatatggacaagctgcggatggtggcggaagaggcggacaggactgagttcaacaaggtggtggacctgatcctgggcgccgggcacctgtacatcctgggggtgcggacctcctcctttgtggcggggtatctgaacttctacctgcacctgctgtccgagaacgtgacgctggtgcagtccaacgccgcaggggagatcttcgagcagctgctgcggatcggccccggggatgtgatgatcgccatcagcttccctcggtactccaaggtcactatgaacacagtgaagtttgcccaggaccggggggctaccatcgtggccattacagacaatgagctgtcccccgtctaccagatggcggaggctgctctgctggctcccagtgagatgatctcctttgtggactccatggtggcgcctctgtccctcatcaacgcgctgctgatcgccgtgggctcccggatgcggtcggacgtgtcccgcacctttgcggagctggaggacatctggaacgcctacggcgtgttcgggaagatggacgatgagtaaggggctggtagtgatcggcgggggagccgccgggatgatggccgctgtctccgcggcggagcggggcgcacgggtgacgctgctggagcccaatgagcggctgggaaagaagctgaacatcaccggcaagggccggtgcaacgtcaccaacaacgccgatgtacagaccttgctggccaacgtgccccggaacggcaagtttttgtacagcgccttttcccggttcgacggccgggacaccatggcgttctttgcgtccatcggcgtgccgctgaagaccgagcgggggaatcgggtgtttcccgtcagtgaccgggcctttgacgtcagcgccgctttggagcggcggctgaaggcgctgaaggtctctctggcccgggaccgggcgacggagctggagatcacctccggcgccgtcacaggtgtccggggagagcgggggacataccctgccggggcggtagtccttgccaccggcggcgtcagttaccccgccaccggctccacaggagaggggcaccgaatggcccgggaagcggggcatacggtgacggaccttcagggctctttggtgccgctgcgggattacggcctgggccgggagctccagggcctgagcctgcggaatgtggggctggcggtgtttgaggaccggaagaagatctacacggacttcggggagatgctgttcacccacttcggtgtcagcgggcccctggtgctgtcggcctccgcccacatgcggcacttcggcaaaaagacctaccggctggagattgacttgaagcccgccctggatgagcaggccctggacaagcggctgctgcgggactttgagaagtacgccaaccacgacttctgcaacgcgctggacgatctgctgccccagaagctgattccggtggcagtggagcggtcgggcatcccgccccatcaaaaggtccatgacctgacgcgagagcagaggcgggaactggtccagggcctcaagcatttttctgtggagattgccggaccctgcccggtaacggacgccatcgtcacttccggcggcataaagatcagtgaaattgacccaaagacaatggaatcaaaacttgtaaagggattatacttttcgggagaaatcatggatgtggacgcctataccggcggattcaacctgcagatcgcctgggccacaggccgggcggcgggacaggctgcggcggaggcgctgagacaaggggaagagaacgcatgagtgagaacattcgcgtggccatcgacgggccctccggcgcggggaagagcaccctggccaggagcgtggccgccagactgaactttttatacgtggacacaggtgccatctaccgcaccatcggctatgccgtgtggcggaaggggatcgatccccgggaccgctccgccgtggtggcggtgctgccggacctggagatttgcctgacctatgggacggacggcctgcagcacatggagctgaatggaatggatgtgacggcggagatccgcctgccggaggtgtcccgctacgcctctctggtatccgcctatccggaggttcgggcgtacctgctggagatgcagcgccagctggcccgggagaacagcgtggtgatggacggccgggatatcggcacggtggtgctgccggatgcggaggtgaaggtgtttctcaccgcttccgcagaggagcgggcccgccgccggatgctggagctggaggagcgggggacgccggagccttatgcggctatcctccgcgccattcaggaacgggactggaacgatacccaccgtgacgccgcacccctgcgtcaggcggaggacgcggtgctgctggacaccacggctctggattttgtccagagcgaggacgcgctgctgcacattatccgggagaggacgggactatgagcgaaaagaggccgctgaatggatttttcgtatgcatctactatctggtaaacttggtggcggggattcttcacccagtcaccatcatcgggcgggagaacctgccggagcacggcgccctgctgtgtcccaaccacaacagcaactgggacccggtgctggtggcgctgaaggttccggtgaattaccggctccacatcatggccaagaaggagctgttctgcaacaaggtctttgactgggtactgcggaagctgggcgccttccctgttgaccggggcgagggggacatcgaggcggtgaaaaccgccctgaaggctatcaagagcggggacaacctgctgatattcccggagggaacccgggtggaacacgagggggctctgcccgccaagggtggtgtggccgtcatcggcatccgttccggggcgcagttcgtgccggtgtacgtggaggggaacaaacgcctctttcgccggacccgcatcatcttcggccaggcataccggccggaggccaccagccgtcggccttcaccggaggaggtccaggccatcgccgacgaggtgctccgccgctcctacgccctggggaaggaggcgcgatgaaggtccttttggccaagagcgccggattctgctacggcgtgaagcgggcggtggagttggcggcaaagaccggggaggagaccggcggatgctggatgctgggagacctgatccacaactcccacgtggtggaggatctggcccgccggggtgtccggaagaccgaggacccggctggcctggcggcgggggacacggtggtgatccgatcccatggagaattgaaatccgtgctggacgatctggaggcccggggcgtccggtgcgtcaatgccacctgtcccaatgtgatccgcatccagcgcctagtggcccaggcggaggcggagggccgtcgtccggtgatcatcggcgaacccctgcacccggaggtgatgggggtggccagctggtgccgccagcccctggtattcgacgggccggaggccgtggaggcctggctggacggggatgagaaaagtcgggaaatccctgttaccgtagtagcgcagaccacctgcatccgaaaactttttgaaacttcttggaaaatcataaaaaaacagtgtacaaacgtaaaaatctttgatacaatatgtaatgctacgcatgaacgtcagtctgaggcggcagaaatcgccggcaaagcagacgtgatggtcgtggtgggagaccgtaaaagcgccaacaccaaacatctgacggaaatttgcctgaggagatgcccccgcgtggtccagattgaacgcgcggacgagctctcgccggattttttcaatggttgtactgttgcgggccttacggctggtgcctccacgcctgcgggcatcattaaggaggtatatgcaacgatgagcgaagaaatcaaggcggccgagggcaaagaggagtccttcgaggaattactgaatcagtcttttaaaactttaaataacggtgaccgggtcaccggcatcgttaccgccatcacccccaccgaagtgcaggtggacgtgggcgccaagcaggcggcctacatcaagctcagcgagctgagcgacgaccccaatgtcaaggcggaggacatcatccacgtgggcgaccagatcgagacctatgtggtccgcgtcaacgacgtggagggctacgcagagctgtccaagaagcgtctggacgctgccaaggtctgggagaacatcgagcaggccgtggaggagaagaccgttctggagggcactgtcaccgaggagaacaagggcggcatcgtggtgtccgtcaagggtgtgcgggtattcgtccccgcctctcagagcggtcagccccgcggcgctgatctgtctgccatggtgaagcagaaggtccagctgcggatcaccgaggtcaaccgcgcccgccggcgcgtggtgggctccatccgctccgtcactgaggaggcccggaaggccgcccaggcggaggtgtgggccaacatcgaagtgggcaagcactacaccggcaccgtcaagtccatgaccagctacggcgtgttcgtggacatcggcggcgtggacggcatggtacatatctccgagctcagctggagccggatcaagacccccgccgaggtctgcaaggtgggcgataccatggacgtgtacgtcatctccttcgatcccgagaagaagaagatctccctgggcgtgaaggatcacagcatcgatccctggcaggtgttcatggacaagtaccaggtgggcgacgtggcctctgtccgcatcgtcaagctgatgaccttcggcgcctttgccgaggtcgtgcccggcgtggacggcctgatccatatttcccagattgctgaccggcgcatcgacaagcctgaggatgtcctctccgagggccagattgtggacgccaagatcacggccatcgacgaggagaagcagaagatctccctgtccatccgcgccctgctgactcccgcggctgatgaggctgaggaggaagaagctcctgtggaggagtaatccgcacggatttccagacctaaaaaagacaggctccggtgaggggcctgcctttttttgaaaattttgtgatttttttcacggtatggattgcttttcaagggctggtatgttatactcttgacaatcaatgtaagacaacaccgatgacatcatacaacaaacgggaattacaggaggaagatcaacatgagctaccaggaagtgtacaaacagaagctgacaacggccgacgaggcggtcaaggccgtcaagtccggcgactgggtggattacggctggagcgtctgctcggcggatgccttggataaggcgctggcccggcggatgggcgagctgaccgacgtgaagatccggggcggtatcctgacccacaagcccgccattttcgatgtgcccaatgcggcggagcatttctgctggaactcctggcacatgggcggcatcgagcgcaaggccgtgagcgagggcttctcctattacatccccctgcggtattctgagctgccggggtattaccgcaactgcatcaagagcttggacgtggccatgttccaggtggcccccatggacgagcacggctggttcaatttcggtcccggcggctcccacctgaaggctgtgtgcgagtgcgcaaagaccgtcatcgtggaggtcaacaagaacatgcccgtgtgcttgggcgggtttgagaactgcatccacatcgacgacgtggacatgatcgtggagggagagaaccctgctttggatgaactgggcggcggcggagccgccagtgaggtggacatggcggtggccaaactggtggtgccggagatctgtgacggtgcctgcctgcagttgggcatcggctctatgcccaacgccatcggcaagatgatcgccgagagcgacttgaaggatttgggcgtgcacaccgagatgtacgtggacgccttcgtggacatgtccatagccggtcgcatcacgggcctgcgcaagccctttgaccggggccggcagacctatgccttcgcggcgggcacacagaagctgtatgacttcatcgacaacaaccctgagtgcatggctgctcccgtcagctatgtgaacgacattgcccgggtgtctcagatcgacaacttcatctccatcaacggcgccgtggatatcgacctgtacggccaggtgtcctctgagtcctctggaattcaccatatctccggtgccggcggccagcaggacttcgtcatgggcgcgtacctgtccaagggtggcaagagcttcatctgctgctcctcctcctacatggacaaaaaaagcggccagctgaagtcccgtatccggcccacgctgctggaggggtccgtggtcaccgccacccgcaccaacctccactatgtagtgacggagtacggcaagttcaacgccaagggcaagtccacttgggagcgggccgagggcctgattgccatcgcccatcctcagttccgcgaggagctgatcgccgaggcggagaagatgcacatctggcgccgttccaacaagagataacaaaatcctccggagccgggcggcatatctgccgtccggctcttttgtacaggggggacctgtgtctggaggagctgatgcccttgcggcgggtggatgattctctgcggaaagtgtaaggcactgtaaaagatagtaaaaaaatttcaaaataagcttgtaaagccgctgaaaagccggtataatgaaatttatgaaaacagaaaagtggaaatagagagagcgggttccagtcaccgcccggcggaaatgggaaggagtttaccatgttcagcgttggggatctggtcgttcatccaatgcatggggccggcgtgatcgacgccatcgttcaggaaaaggtcgcggggagtacacaggactactatgtgttcaaaatgccggtgggtggactgctgttgaagatccccaccgccaacagccagacgattggagtccgctcggtcatccagcggccggaggcggaagccctgattgccgctatcccgtctttggcggtggaggagagcagcaactggaacaagcggtaccgggaaaatctgctgcggatgaagagcggggatctgtacgaggtggcacgtgtgattaaggggctgatgttccgggaacggaagcggggcctctccaatggggagcggaagatgcttcatacggcccgccagatcctgctgtcggagctggtgctggcagaggacagcggctatgaagaggtggagcggcgtgtggagcaggccatgctccagacaccggagatccagagataacgtgttcgcggaccatgtccgcgaacattctgctgtttcaggagaaatttccagggaggtcggatcatggcatttttcaaaaaattccgggatgcccagcgcccttgctgcgccgcgctggtggcggcggcaggcagttcttcccgcatgggcggggtgaacaagctgctgcagcccctggacggcattcctgtactggcccggacactgacggccctgcagatggcccggcggatcgacgagatcgtggtggccgcccgggaggaggactttctggagatctcccagctgtgcaggacctacggcatcaccaaatgcaccaaggtgatccggggcggggagagccgggcccactcggtgcttctggcagcactggaggccggggagggcatggagctgctggcggtgcaggacggcgcccgccccctggtgacgccggagctcatcgacgatgtggcggagcaggccgcccgctgcggggcggcggccccggcggtggcggtgaaggacaccatcaaagccgtccgggacgacggcacggtggcggagacgctggaccgggcggccctgcgggctgtgcagacaccccagatcttcgagagcgcgctgctgaaagccgcgcttcaggcggctgttgaggggggcattcccataacggatgactgctccgccgtggagcggctgggcaagcgggtctatctggtggagggggacgaggaaaacctgaagatcaccactccggtagacctgattttggcggaggctattctgcaggccagggaggatcggatatgacgaatctgcggatcggacatggatatgacgtccaccggctgacggagaggcggcggctggtgctggggggcgtggagattccctgggaccgtgggctgctgggccactccgacgcggacgtgctgacccacgcggtaatggacgccctctgcggcgccgccaagctgggggacatcggcaagctgttcccggacagcgatccccgctacgccggtatttccagcctggagctgctgcggcaggtggcagcgctgctgcaggagagaggatgggccgtggtgaacatcgacgccaccctcatcgcccaggcccccaaggtgggcccctaccgcccggagatggaagcgaacctctccgcagctcttgggacggatgcggaccgggtgaatgtgaaggccaccacagaggagcatctgggctttaccggggacggctccggtatggcggcccatgcggtggcgctgctggaacggctcccctgaaaaaaggacgtgcctcgggcgcgtccttttcgcacgtccgcgcctcccgaccatagaatgggtagagaggaggagtgtctgtggagcactatttgattatcgcccgctcggtgacctatgcccagcggatgcagcgggcgctggcccggtcggggatccgaagccggatcttccgggccccccgggacctgacggaccggggctgcgcctacgccgtgcagatcgcggactccgacctgacggctgccctgacggcccttcacagggaatctttggaccctgttcagatattcttgactcagcgggggacgttccgggaggtgagaccgtgatctattttgacagcgcggccaccaccttccagaagccccggactgtggcggacgccatgcggaacgccatggccaccatgagctctcccggccgcggcggataccccgccgccatgcgtgcggcggaggctgccttcgactgccggacagagctggcggagctgtaccatctggagaacccggagcaggtggccttcaccatgaacgccacccacggcctgaacattgccatcaagagcctggtgccccccggcgggaaagccgtgatctccggatatgagcacaacgctgtcacccggcccctggcggccctgggggcccaggtgtccgtggcggcggcgcccctgtttcagcctgcagcggtgacggcggcctttgaccgcctgatcgtgcccggcacggacgcggtgatctgcaaccacgtgtccaacgtattcggcttcgtccagccggtggaggctatcgccgctatctgccgggagcgggaggtacccttcatcatcgacgcgtcccagtccgccgggatgctgaccctggacatgacggccctgggggcggccttcatcgccatgccgggccacaagggcctgtacggcccccagggaaccggcgtactgctgtgcgggaaggacgtccccgtccgcacactgctggagggcggcaccggcagcatctctatccagcaggagatgccggacttcctgccggatcggctggaggcgggcacccacaatatgcccggcatcgcagggctgctggcgggggtccgattcgtccgccagctggggccggaggccatctgcgccggagagcggcagctgaccttccaggcggcggagggcctgaggcggctccctggactgcaggtgtttgccctgccagacctggcggcccaggcgggggtgctttccattgtcccggagcacatggacgcagaggcattgggcgcggccctggcagaccggggcatcgccgtgcgggcgggccttcactgcgcgcccctggcccaccgcaccgccgggacgctggacaccggcaccgtccggctgagtttttcccactggaacacgcgggaggaagtatcccgtttcctagtggctatgggggagatcctgaggtgactttctgaacagaccgtgaattttagcttggtttgccttgcattctacaggcagattttatataatctagatattcatggcctgaaagggatgatgacgtccaatggaatttgtcacgctctccacactgcccgggatcatcggccggtatctgatgatgctgaaggtcacggacattttggatatagcgattatggtgtttgtgttttacaaggctctgacgctgattcagagcacccgggccgccagcctgctcaagggcgtgctggtgtttctggcggcgctgatgctgtccatggtcctgaatatgaacagcatcaactttatcatgaaccagctggtgaggtggggcgtggtggcgctgatcgtcctcttccagcccgagatccgacgcatcctggaggaggtgggcagccgccgcttcatcgccttcttctcccgggcggaggccggcaccgccgtggaacaggccatcgaccagacggtgctggcctgcaccgagatgtcccagtcccgcaccggcgccctgatcgtgttcgagcgggaaaacctgctggacgacatggtccgcagcggcacggtgctggacgcggcggtctccagcgaattgctgaaaaacatcttctttgtaaaggctcccatgcatgacggcgccgtcatcgtccggaacgggcgggtgcttggcgccggatgcatgctgcctctcagcaagaacgtgaacctctcccgggagctggggatgcgccaccgggccggtatcggcatgagcgagaacgccgacgccgtggtggtcatcgtctccgaggagaccgggtccatctccgtggccatcgggggaatgctcaagcggcacctcaagccggagacgctggccaatatcctgcggaacgagttgcttccgcaggaggccggggaggacaagcccaagttcagcctgatgaatctgctgcgggccggaagcacgggaggcgacaaccatgaaaagtaatcccaagcagaaggcggtgtatctcgccctgtgcatcctggcggccatcgtggtgtggatcttcgtggacaacttcggaaacaacggcggtgcggtgatgcataccaagtggttccgggatgtgcccatcacctacactggggagacggtccttacagagcggggcttcatgctgctggacgaggataccgtcagcaccgtggatttggagatggaagggaccgcgtttgacctggctctgctggacaaagactatatccgggtgacagtggatctctccaacgtgagccggacaggggtgcagacggtgacctcggtgatttacggctatacggaagagtatttccggcagaatattacggtgagcgaccggacgccctccgtcatcaccatcaacgtggcggagctgtaccacaagacggtggatgtccggtgcgagatctccggcaatgtggcagagggttactccgccggagagctgcaggtcagccccacggagatcgaggtccggggcgatcaggaggatgtggatgccgtcagctatgccaaggtgaccctggatctgggagaggacgccacctccacggtcacgggagagctgcccatccagttctatgacgcaaacgaccagctgctggagaacaccagcctccagaccacagaggagaccattcaggtgacgctgccggtatatgtcacccgggagctgcagctgaccatgaacttcgtggagtccgccggcgcccgcatgtacaacgtggactgggggatcgagccgtccaccatcttggtgtccggcccggcagatgtgctgaacagcatggacagcatcgttctggacgatttcaatctggcggagctgggcagcaccaccaattacagctatgccattcccatcccggagggatgcgagaatctcagcggcgtcacacgcgccacgctgcgcatctccttcaaggatatgcagcgcaccacggtgacggccaccaacttcattctggagaacgcgccggaggaccggaccgtagacctgctgacagagcagctggccgtgtccatcttcggcaccagcggggatgtgggggccattacctcggacaacattctggtgacggtggacctggcggacttcggctccgccgtgggcacctacactgtccccgcggaggtgacggtggtggggcacgacgtgggcgtctccggcgggacgtatcaggtgcgtgtcaccatttctgaacagacatccgatcagccggcggagcctgatacgcccgccggggagatcccagatacaggagacgagacaacatgacgcagatcgcaacagttgaacgaattttagatgcggaccacgcggagatttccgtaccccggaaatccgcctgcggacacgactgcgaggagtgcgccggctgcggcgtcaccggcgcggcggtccacgcccgggccagcaaccccatcggcgcccggcccggacagaaggtggttgtggagagcagcaccaagaatatgctgcggatcgtggtactggtgtacctgatcccggtggtgctcttcctggcggggtatgtcatcatgtccctgctgacggacagcgtggcggcgcagtacgcggtggctgcggccggattcgcggcgggcatcgtctttgccatcttctatgaccgcaggctgcgggccaggggcggcctgaccttcaacatcgtccgggtgttctgaggcggtgttcggctatgtacgccccccgctggagatcctgcctcaggaggaggcagagcggttccggcgggcatactgcgggctgtgccacaccctgggggagcggtacggcccggcggcccggatgatcctgaactacgacttcacctatctggccatcctgctgtcggatccggaagaagctgcgccctgccggaggcggtgcgtgtccagccccgtccggctccgggcgtaccagcccgcaaccgcggccctggagctggcagcggatgagagcgtgattctggcctactggcagctgcaggacggcgtggaggaccacggcctctggaaggggttgggctaccgggtctccgccgccgcactgcggggcggctatcgaaaggctgccgcggcccggccggagtttgacggccgggtgcgggaacagctggcggctctgagccgcttggagggggagtgttgtccctccatggatcaggcggcagatacctttgcccagctgctggcggcagcggctgccggggtggaggacccggtgcggcggcgggtgctggagcagatgctctaccacctgggccggtgggtgtatctgatcgacgcggcggacgacctgcaaaaagacgccgtctccgggaattataatcccgtggccctgcgctatggcctgcgggacggcaaatgggacgaggagagccgccgggcctttgccagaacgctggaccactccatccacatgatcgccacggcctttgagctgtgggacttcggcgtctggcgccccctgctggagagtacggtgtacaccgggctttttgccgtgggccgggccgtgctggagggcaccttccacaaaatgccccccagggaacagagaaagaaacacaagaaggctgaggagaccacatgaacgatccctatcagatactgggtgtgtcggagaacgcctccgacgaggagatcaaaaaagcatatcgggagctggcccggaagtaccacccggataactaccacgacaatccgctggcggatctggcgcaggagaagatgaaagagatcaacgccgcctacgagcagatcaccaaggagcgggcctccggcaagcgggggagtggctccggcggggcctcttacggcgcttccggctacggcggatacggcggctatcagggctacggcggatatgggggctcccagagttacagcggtcagagctccgtgctccagcaggcccgcatcgccatcaacaccggcaacatcagccgggcggaggcgctgctggccaattacagcgaccacaatgcggagtggaacttcctgaagggggcggtctgctaccgccggggctggctggacgaggcgctgcggtactaccggaccgcctgccagatggaccccaccaacgccgagtaccggcaggcgctggagtatatggagggcacggacgacacggcataccgccccggcggcgggagtttcggcaccttgtgcggcggaaatccctgtatgagcctgtgctgtctctgggcgctctgcaatggcggcggctattggttctgctgctgagagaccacaagagaggaagtagggatcacatgattaagagcatgaccggctacggccgggcaagacaggagctgcacaagcgggacatcacggtggaggtccgctccgtcaacaaccggtatctggactgcaccgtgaagatgccccggatgtatgcctttgcggaggacgcggtgaaaaagcacgtccagcaggcggtgtcccggggaaaggtggacgtgttcatcaccgtggacgccactgccgcggatgtggtcaaggttgcggtgaaccgggagctggcggcccagtatgccgccgccctgggggagctgtcggacgtctgcggcacagcggactatcggcccgcgccggagacgctggcccggttcccggacgtcctcaccgtcacgaaggcggatgaggacctggagactgtcagcgccgacctctgcgcggtcttggacgaggcgctggccgcgtacaatgacatgcgggccgtagaggggcagaagctggcggaggacatctccaaccggctggacgccattgagcgctacaccggacaggtggagatgcggtcgccggagacggtggcggagtaccgcgccaagctcaccgcccggatggaggaggtgctgcagagcaccaccgtcgacgagcagcggatcctgatggaggccgccatctacgcggataaggtggctgtggacgaggagaccgtccgcctgcggagccacgtggcccagctgcgtaccatgctggcaagcgacgagcccatgggccggaagatggacttcctgatccaggaggtcaaccgggagtccaacaccatcggctccaagtgcaacgatgtggccattgccaatgtggtagtggggctgaaggcggaagtggagaagatgcgggagcaggtccagaatgtggagtgatggaagatgaagctcatcaacatcggattcggcaatctggtctccgccgaccggctggtggctgtggtggggccggactcggcccccatcaagcgcatggtgcaggagtcccgggagcggggaatgctgatcgacgccacctacggccgcaagaccgcgtccatttttatcatggacagtgaccacgtggtactgtcggccctgccgccggagcggttcgcaccgaaggaagagagagagaacgaagaataggagcgtgtgtatatgagaaaggggaggacctttgtggtctccggcccctccggcgtggggaagagcacggtgctcaaggccctgctggagtcccggaagaatctgtatttttctgtgtcggccaccacgcgggacccgcgtcccggagagctggacggcatccactaccacttcatggacgtggagtccttccggaagtggatcgccatggaccagttcctggagtacgcggagtacgtggggaacttctacggcacacccaagaagtttgtggacgatgccatggaggccgggaaggacgtgatcctggatattgagatccagggcgccatccaggtgtgcagcaagcggccggacacggtgcgcatcttcatcgcccctcccagctgggcggagctggagcgccgcctgacagagcggggcaccgacagccccgagaagatccagaagcggctgctgcgggccaaagtggagtttcagacggcccacacctatgattactttgtcatcaacgacaccgtggagaatgcggtgggggagctgaacgccattatcacggcggagcactgcaagccccaggagcgcatggagatcatcagcggacgctgagacgcccgctttgttcataaataaatttacgcctgcaaggcagataggaagttgatccattatgatgctgtatcccgcaatgaacaagctgaccggctatatccccaaccgctatatgctggtggacgtggtggcccgccgggcccggcagatcgccgacgaggcggaggagactggcgagcatctgacggagaagcccgtcaccctggccatccaggaagtggcggacggcaagctggacgccagaaacatggacctgaccattgaggaaccggaggatctacagccggcggaggaagaggcacagtaacaacaggaggggcgaggcatggaaaccgctgagatcgtgaaaatcgcggtgagcgccgcgccctattccattgacaagccgtatgactacctggttcccccggagctgctggaaacggcggtacccggcgtccgggtcaccgtgcccttcggccggggcaaccgcaccagtgagggcattattctggcccggacgccaggtgaaaagatgcaggggctcaagcccctgctgtcggtcctggaccgagggccggtactggacggcgatggcatcgccctggcattgtggctgcggcagcggtacttctgcacgctgtttgaggcggtgaaggccatcctgcccgccggactctggtaccagatccgggaggtctggcatgtggcagagggcatggaccgctgcgcggccgacggcgcggccaccggcatccgacgggccgccccggtgctggacgccttgtttgccgccggaggctccgcagagctgtcagtgctggaggaggcctgcggcagggaggctggcactgtgctgcgggcactgcagaaggccggggtcacggtctgcgagactgcggcccgccggaggatcggcgacaagtcccgtcggatggtggaactggccgtcagcgccgaggaggccgcatctctgacggaaaagcgatcctccccccagcggcgggaggcggtgcgtctcctggcggcagaggggcggatgagcgcggcggaggtatgctacttcacaggcgtctccatggccgccctccgggggatggagaaggcggggatcgtggctttttcagcggaagaggagctgcggctgccggacctgacggcggtggaacccagcggtcctatcgtcctcaatgaggaacaggaggcggcctttcagtgtatccggaccctgacgaagaccgggaagccggaggcggtgctgctccagggcgtcaccggcagcggcaagacccaggtctatctccgtctggttcaggaaatactgagccgggggaggcgggccatggtcctggtgccggagatcgtgctgacgccccagatgatgcggcggttctccgcctgttttggggaccaggtggccatgctccacagctccctgcggatgacggagcgctacgaccagtggaagcgtatccgccggggcgaggtccaggtggtgctgggcacccggtccgccatcttcgccccgctgaaaaacgtgggcctgatcgtcctggacgaggagcaggagagcagctatcagtcggaaaacccgccccggtatcacacccgggacgtggccaaatacctctgcgcccgggacaagtccaccttggtcctggggtctgccactccggcggtggagaccgcctggaacgcggagcatgggatctatcacaaggcgctgctgcgccggcgatataaccggcaggcattgccggaggtgctggtggcggacctgaaacaggaaatccgggcgggcaacgccgggatggtggggcaggtcctccgcactgagctggaggaaaacttgcggcggggagagcagagcatcctgctgctgaaccgccggggcagcaacaggtatctgctgtgcggggagtgcggccatgtgccggagtgtccccgctgcagcgtggcgctgacgtatcactccgccaatggacggctgatgtgccactactgcggccactcggagcgatccagcgacacctgccccgtctgcggcggcatcatgaagcacgtgggcaccggcactcagaaggtggaggaggagctccacgatctgttcccgggtacggaggtgctgcggatggacgcagacaccgccgcgggccgtcatgagcagctgctggacaagtttgagcgggagcagattcccatcctcctgggcacccagatggtggccaaggggctggactttccccaggtgacactggtgggggttctggctgcggatctgtccctgtatgtagacaactaccgggccgccgagcggaccttcagcctgctgacccaggtggtgggccgggcgggccggggcggcagtgccggccgggcggtgatccagacctacaccccggaaaacgatgtgatccagtgcgcggctcggcaggattaccaggggttttatgagcgggagatccggatgcggcgattgcggcggtttccgccatttgcagacctcttcaccttcaccgtctccggtaccgaggagggcgccgtcctccgggccgccgtcgcagtgcgggaagagctgcgccgcctctgcgccctgccggagctggcggccggagaaccggaggtgctgggtcccgcccctgcgccggtgatgaagctgaataaccgctaccgctaccgctgcctgctggtgggaaagaacgacaggcccacccgagaggcggtgagctggctgctgaaggcatttgcaaacgaccgcgccaaccgcgggatgaatctatttgtggactgcaactccatggagtgagcagcgttttgaaggaggtcaaggacttatggctttacggaagatcgtggtgcagggagaggagtgcctgacaaaggtgtgccgccctgtgacggagttcaaccctcacctgcaccagttgctggacgatatgctggaaacactggaggatgccaatggcgctgggctggctgctccccaggtgggagtgctgcgccgggtgtgcgtggtgctggacgaggactctgaggagtatatcgaactggtgaacccggagatcgtggctcagagcggcgagcagaccgggctggagggctgcctcagcgtgcccggcaaatggggcatcgtcacccggccggacgtggtccgggtccgggcccaggaccggtatggcgactggttcgaggtggagggcgagggcctgacggcccgagccttctgccacgagatcgagcatctggacggccatctgtttgtggagcacatcgaccacttcctctctgatgaggagcttcgggactatctggagcaggaagagcgggaggcccgtgaggccgcagaagctcaggaaggggagtgagcccatgcggatcctgttcatgggcacgccggacttcgccgtggcgtccttgcggcggctggtggccgacggccatgaggtctgcggcgtgttcacgcagccggacaagcccaaaaaccggggacataagctggtgccaacgcctgtaaaggaatttgctttgacagaaaatattcccgtctatcagcctttgaagatgcgggacggcacggcgctggagctggtgcagtccctggcaccggagctgacggtggtggcggcctacggccgcatcctgccggaggacattctggaggcgcccagatacggctctatcaacgtccactcgtctctgctgcccaagtatcggggggcggcccccatcaactgggccatcctgaacggggaggagactaccggcgtctccatcatgtatatggcgaaggagctggacgcaggggacgtgatcctgcagaaggagactcccatcggcccggacgaggacgcccaggccctgacggtgcgcctggcggacctgggggcagaggccctcagcgaggcggtggcggccatcggaaacggcacagccgcccggacaccccaggatgagagccgtcagacctacgcctccatgctgacaaaagagatgtcccccatcgactggacccgctccgcccgggagatcgactgtcaggtccggggactgattccctggccctgcgcggcctgcgagctggcagggcagcggttcaaggtctaccgcaccgcccccggcgaacagaccggcgcggcgcccggtacagtgctctccgccgggaagcagggcatccaggtggcctgcggcaggggagagagcctgtatctcacggagatccaggcggagggcggcaagcgcatggctgcggcgtcctatctgctgggccacccgttggaggtctgagctccgccagtttcacaattcgggaggtttttatgccctattacggtcatatctattacggttatggcgactttcttgcaaataatctgtacgtcctgctgctgatcccagtgctgctgctgtccctgtgggcccagttccaggtgtccggcagcttccggcggtacaatgccgtgaacaaccggcgccgcatcaccggtgcccaggcggcggaagcggtgctgcgggctcacggggtattcggtgtgcctgtccggccctgccggggaaatctgacagaccactacgaccctcgggacaataccatctacctgtctgagacagtctacgacgcccccaccatcgcggcggtgggcgtggcggcccacgaggcgggccacgctgtccagtacgcggaaaactacggccctgtgcggctgcgcacggccatcatccccgccacgcggatcggttccagtctgtccttcatcctgttgctggtggggctggtgctgtacaaccagtctctgttcttcatcggcatcgtgctgttttccttcaccacgctgttccagctggtgacgctgccggtggagttcaacgcctccgcccgggccatcgccaccatcgacggggcgggcctgctggatgaggatgagctgcccggcgccaaaaaggtgctgcgggccgcggcgttgacctatgtggcggcgctgctgatgagcctgctgcagctgatgcggtttgtgctgatctttatcggccgcggcggccgcgatcagggaggcagccaatgagggcccctaatgcccgggacaccgccctgcgcgtcctggtgagctgccgcacggccggggcctgggcggatgcggccctgagggcccagctccgccgggacggcctgtccggaccagaggcggcgctgtgcagccgtatcgtctacggcgtgatgcagaaccggctgctgctggacttctacctgggtgcctactgctcccaaaaggtcgaccacttgcagccgccgctgctggaaattctgcggattggggcttatcaaattctgtttctggataaaattccccacagcgccgctgtcaatcaggcggtggagcaggccaaggacaacggccgggccaaggcagccgggctggtgaacgcggtgctgcggcaactctcccggaacaaggtgcacctgccgaggatcccagaccaggatgcactgcacagcctctccatccggtacagccatcccaagtggctggtgaaacgcctccaggccattctggggccggagacggaagcctgccttgcggccgacaacgctccggcgccgctgacgattcaggtgaatccgctgaaagctgctgcggaggagctgacggcggagctggaggcatccggcgtgattgtccggccccatccttgggtgtccggatgcctggagctggaccacgtcggggatctgacggcgctggagcccttccgaatgggaaaattcctggtccaggacccggcggcccggctggtgtcccaaatcgccggggtggagccgggtatgcgggtgctggacgtgtgcgccgcgccgggaggcaagtccttctccgccgcctttgcaatggaggaccagggggagattttggcctgcgacctccacgagaacaagctgaagcgcatccgggagggggcggagcgactgggccttgcgtgcatccagactaccgccgcagacggccgggggttccggccggagtgggaggcgcggttcgatgtggtgctggtagacgccccctgctcgggtttcggcatcatccggaagaagccggatgtccggtacaaaaagcctgacgacctgttcgccctgccggtgatccagcgggcgatcttggacaacgccgcccggtacgtgaggcccggcggcacgctggtgtactccacctgcacgatcctgccggaggagaacgagggtgtatccgacagcttcctggcagagcacccggacttttgccgcacgcccttctccctgtccggaccggtgggggagaccgagggccaggtgactctgtggccccaccgccacggcaccgacggcttttacatctgccgcatgacgcggaattgaggaacgatccatgaccgatttgaaatcactgaccctgccggagatgacggccttcctccagtccctgggggagccggccttccggggcaggcaggtgttcacctggctccaccggggggtgacggacttcgatgggatgaccaatctctccaagtccctgcgggaaaagctgaaggagacctgtttcatcacctccccccaggtggcccgcaagcaggtgtcccggttggacgggaccatcaaatacctctgggagctgtccgacggcaactgcatcgagacagtgctcatgcagtaccaccacggcaacaccgtgtgcatctcctcccaggtggggtgccggatggggtgcgccttctgtgcctccaccatcgccggcaaggtccgggacctgaccccggcggagatgctggaccaggtgctgttcacccaaaaagactccggcctgcccgtctccaacatcgtgctgatgggtatcggcgagccgctggacaacctggacacggtgctgaaattcctggagctggtgaaccaccccgacgggatgaacatcgggatgcggcatatctccctctccacctgcggcatcgtgccgggcatccggcggctggcggagcttgaacttcagctgactctctctgtgtccctccatgcgccggacagcgagacccgatccaagatcatgcccatcaaccgggcctatgacgtggaggagctgttccgggcctgccacgactacttcgacaagaccggccgccgcatctcctttgagtacgccatgatcgacggggtcaacgaccacgactggcaggcggacctgatcgccaggaagctccgggggatgccgggccacgtgaacctgattcccctgaacgacgtggtggagagcccctacaagccctcccgccggatcggggcctttcaaaaacggctggaatcccacggcatcaccgccaccgtgcggcggagcctgggtggagatatcgacgcctcctgcggacagctccgccggaaggccatggaagaagcgcagaaaggggagtgttcccaatgaaccaaatgaacgtctggggcatgaccgacatcggccttgtccggaaggagaaccaggacgcctacgtcacggcgcagcacacggcctccggccgcacggtgggcgtggtgtgcgacggcatgggcggccccgccgggggccgtgtggccagccagatcgccgtctccgtctatctggaggagctggagaagctcctgacggcggatcagacccctcagcagctgctggaggcatccgcccaggcggcagccctggccaatcaggccattcaggcggaggcagagcgccgggaggaatgccggaacatgggcactaccctggtgtccgccatctcctatgacggcggcgtggtggtcaccaacgtgggggacagccgggcttatcacatcacggaggacggcatcacccgcatcaccaaggaccactccctggtggaaagcatggtagaccggggagacatcaccgctgaggaggcccgccgccaccccagccgcaatctcatcacccgggccctgggaccggacatctccgccgactgtgacgggtacatatgcccgatgaacgccggggagtacctgctactgtgttccgacggactggtgaacaccgtcaccgatcaggagatgctcttcgaggtcatccacggggacgggccggacacctgcctggaccggctgctcgccatcgccaagcgccagggcgcgccggacaatgtcacggccgtcctgatgcaaaaacagtaaaggggggagacacatggaacacaaggacccgtatattggaaaaatgctggacaaccgctatgagattctggagcgtatcggcaccgggggcatggcgattgtgtacaaggccaagtgccaccggctgaaccgcctggtggccgtcaagattctcaagagcgacctggcccaggacgaggacttccgccgccggttcaacgcagaatcccaggcagtcgcccaactgtctcaccccaacatcgtatcggtgtacgacgtgtccaagggcggcgatatcgagtatatcgtcatggagctgatcgacggcatcacgctgaagcagtacatggagaagcgggggcagctgaactggcgggagtcgctgcacttcattacacagatcatgcggggcctcagccacgcccacagccggggcatcgtccaccgggatatcaagccccagaacgtgatggtgctgcgggacggcagcgtgaaggtagccgacttcggcatcgcctgcctggagaacgccgcccagaccctgacccaggaggctctgggctccgtccactacatctctccggagcaggcccgcggggaccgcaccgacgcccgcagcgacatctattccgccggcgtggtgctgtatgagatgctcaccggccgcctgccctttgagggggacagcgccgtatccgtggccatccagcacctgagctccgtgcccctggctccccgggaggtgaatccggacatccccgagcagctggagctgatctgcatgaaggccatggcaccggatctggagaagcgctacccctccgcagacgcgatgatcgcagatctggaggcctttcggaagaaccccggcgtgaatctggacttcgagctgtccgacctgcggccggaggagaccgacgagcccactcagaagctccgctccgctgtgccgccccagctccaccggcagggccgggagccctcctatgagcggggacgccggtgggaggaggatcgctacgaggacgaacagccctcccgcctcagcggcggcaagaagatcgcgttgatcggcggcggtgccgtagtggtcgtggtggtcctgttcttcctgttccgggccatcttcgcctcctttgtcccggcggcgccggacacctacaccgtacccaagctggtgggcatgacggaggagcaggccaacgagcaggccagtgtggcggacggcaccttccaggtggtggtggcgggcaccgaggccagcgacgccgccgtgggtgaaatcgtccgccaggacccggagccggacacggagaagaagggtgagctgcccatcaccatcaacgtctgggtcagcgccggtgaggacgtgggcaccatgccggacctgaccaccaagcccatgacctatgaccaggccatgaccatcctgcaggatctggtggcggaatatgaactgaacgtccagccctatgaggagacccagaaggagtacgatgacgagctggccgttgacgtcatcaagtccaccaccccggcggcgaatgaagaactccacaagggggacaccatcacctttgtcctcagccggggaccccagaccgtgccgctgatcgatttcacgaatagggaacgtgcctgggcggaggaccagctgaagaacgtgctgggcctggaggtcgaggtccatgaggaggccaacgacactgtggaagcgggtctggttatccgtcagaacccgacggctaccacgcaggtgcctgccggcagcacagtggagctgtgggtcagcaccggcccggagagcggcggcaatgaagacctgcaaatggaaccgctgattatcgccctgcccacagaccgggagacagcagaagttcagatcgtggtggacggagtgatcaaggtcaacgagtcggtcccctgccgagatggcaactatgtctatgagctgtacggcaccggaacggtctccgtggaggtgtatgtggacggcgtgatggatgtgaacaatacccgtgaggtgaccttcggtgagtgagggacggatccgaaaggccctcagcggcttctactatgtggacaccggcagcgaggtgctcacctgccgggcccggggcaagtttcggaaggagggcatctcccctctggtgggggaccgggtggaggtccgggagctggggaacggcgagggctttgtggaggccatcctgccccggaagaacgcattttcccggccggcggtggccaacatcgaccagctggtggtcatcgcctccggtgccatccccaaaacagacccgttcctcattgaccgggtggcggccatcgcagcactgaaaggatgcagcgtgatggtgctgctgaacaaatgcgatctggactgtgccgatgcgctgtacgccatttacgcagccgccggatttccaactctgcgggtcagcgcggagaccggggaggggatcgaggaattgaagcccctgatcgccgggaagctgtctgcctttacagggaattccggtgtgggaaagtccagcatcctgaatgccctggatccggcgtttcagctccaggtgggggatgtgagccaggcgctgggccggggacgccacaccacccggcacgtggagctgttccacctgagctgcggggcggacgttgtggactccccgggcttctcctcctttgagaccgatgagctgaatctggagctgaagcaccgcctgccggagacctttgtggagttccggccttatctggaccagtgccgcttcgtggggtgcagccacaccaaggagaagggctgcgccgtgctggaggcggtgcgcgctggcaagatccaacggagccgccacgccagctatgtgcgcctgtatgaggagctgaagcccctccaggactggcaggagcggaagaagtgaatcgcgcggaagaggcgggcagatgcccgcctctttttgtgtgccctgccttttgtaccaggacaggcagcggcgtatataatgggagtgagaaaggggcgtggggcgtatgtttcggagaggcggcggatgctggatactgggcgtctgtgcggtggcgctgggggccgggatcctgattgcggcgatctttccggtaggggcgctgatgtttttggtggcggtcctgctgattgcgtgcggctgcgcctgctgcaggcgttagaaaggagcaaatatcatgcgaattgtagtgtggaagtcccccaaagccctcagcggcattctgcggaagctgttcaagatttcggaataagcagtcccggccgggcatacagtgtcagcagagcgagactccgtggacaacatggcggcgcacaggggcgggagagcggccgctggcggcccctcccgccccgtaccgttttccaggcggcgggaaacggctgcgccgtccatcggaggaccaacggccggaaaggaagggcgaaccatggaactggaattgaaaaaggcctgcttcgacgcctatgaggcggcgggagagctgacattgactcaggaggagacagcggagaccatcgtgccggactactgtccggacattgcgcggatcatcgagaccacgggcaaggtgttcctccacagccgggagatgcgggacggcagggcagagatctccggcaccgtccgggtgacggtgctgtacacgccggagggggaggggggcatccggaccctggaatttgccatgcccttcacggtggagaccgacggacgcagtctgccggactgcgcggcgctgctggcggacacggagccggagcttctggagacccggatgctgaacccccgcaaggtcttcacccactgcaagctggtgacgcggctgacgggctatcagcgcagtcccttatgcttctgcacggatgcagaggcggggccggaactgtgcatcgaaaaaaagcaggagcagcagcacgccatcgtgctgacccacattgcggagaaggacttcaccttctccgaacagatggacctgtccccgggcagagagggagcggcggagatcctcaccagccgggtgaacagcactgtgacggagacgaagatcgtgggcagcaagctgctgttcaagggtatcttcaccgtcagcctcctgtaccggacggcggacggccgctgctgcgccgcgtccggagagctgccgttctctcagatcctggaggtggaaggcgccccggagggcgcagagccatcggtgcgcctccagttcaccggcgcggatctgcaggtcgacggcgccgacgccgagggccgggagatcgcggtgacgctatacctccacgccacagctctgctgcgccagacccaggaactgacgctcctcagtgacctctactccactgcctatgatctgacttatgacgccgcgcctctagaactcaccagctttcgggaacagttcacccgccgtcagacggtgcgggaggtgctggagatcggtgtggtggcggattccatcctggccctctccgtcacctgcggagctgtttccgtcagtcgggagggggcgggcgtggtcctgcggaccggggcgtctgtccgggcactgtatctggacgaggggggcgtgcctctggtggcggagcggagcatcgacgtcagctgccagctggagctgccggaggactgccgggtcgctgcccgggccgtctgcccggaagaggtccagggcagcctgacggaccggggcatcgaggtccggttcccggtggacttccgggcggaggcggcccagcgtgtgaaacgggtgtgcgtgtccgcaggaaagatcaatacagacgcgcctaaggagaccaccggcgcgccgtccctggtgctgcgttgcctggggaagcaggagaccgcctgggatctggcgaaacggtacaacaccaccatcggcgtgatcctggcagccaatcaactggagacggaaggagatatctcccgggaccagctgctgctgatcccccggaagcggacctgagtcacccttgacgggtccggcagcccatggtagactggaaaaaacgggtattcggtctgtttcgtctgccctctgggaagtggaggtgcctatgccggactttgcggtgcgtgttcggggagccaaggggaggagctggcggtccccgaggcggctggtagcggtttacctgggactctgggtttttgccctggtggtgttcttgttgatggaccccacggacgccatggggtacgcccttttattccactggctgctcctgcccatcgccgcctttgtgatctccctgcggattggggaactggtccgcagggatgggcgcatgtggctgctgcctctggccctgggacttttgtatatgctggcggactttctcaccttccggctcgccaatatgttggcctttgacaagatcaacctgcctcagtgggacctgtttttcatcggggcggccatctctgccctgggccttctcatcgggcgattgctgggccgccggagatccaaacctgcctgattgacggagtttcccgttgccccgtcttaacaagacggcacaagataacaaaagagcggagcatcagctccgctctttttctgttccgttttatccctcggaatatcgggcgaggaactgacgggtccgttcctccctggggtgctcaatgacttggtgggcgtcaccctgctccacgatgacgccgccgtccatgaagatcacctggtctgccacatcccgggcaaaggccatctcatgggtgacgataatcatggtggtccgctgttccgccagctcccgaatgacccgaagcacctcgccggtgagttccgggtccagggcggaggtgggctcgtcaaagcagaggatgtccgggtgcaaggccagggcccgggcgatggccacccgctgctgctgtccgccggagagctggctggggtagtgatttgcccgctcactgaggcccatcttcgccagcagctcccggccgtccgcttggatctcctccaggatttgctttttgttctgcttgaagtccggctgctcctgggccagcagctcccgggccagggtgacgttcttcagcgccgtgtattgggggaacagattgaaggactgaaacaccagcccgaagtggagccgcttcttccgcacctcgctctcccgctgggtggcgggatcagcggcgtcaaaaatcagattacccgccacagagatggtaccctgctccggcttctccaggaaattcaggcaccgcagcagggtggttttgccggagccggaggagccgatgatggccagggcctggccctgctccagatcaaagctgatgtcctccagcacccgggtggcgccgaaatgcttttcaatgtgatgtacttccagaattgccataaatcggttccctccttactgaaagaagtccagctttttttcaagcttgcccagcagcaccgtgacgatgccgctgaagatcagatagtagacagcggtgaagaacaggggccacaccaggcccgcaatgccggagttgcccttcataaaggactcgcccatccagatgacctcctgcaatgcgatgacccgggccagggaggtgtccttcaccaacgtgatgatctcgttggagatgggggggacgattcgcttgatcatctgcagcagggtgatgtggcggaagatctgggctttggtcatgcccaagacctggcctgcctcctgctggcccttcggcactccctggatgccgccccggtagatctcggagaagtagcaggcgtaattaatgatgaaggccacacacacggccatcatccgcccggactcaccgctgggccagttgaaccacttctggatgccgggcacatagaacagtgcaatgatttgcagcaccagaggcgtgccccggatgacccagaccaccaggcgggtcagccaccgcaggggaggaaagcggctcatggaaccgaagctgataaccaagcccaggggcagtgccccgatcagggtgatgaaaaacagctgaagggtcttgagaaatccgctgttcagggccgacagcacggtccggaatgtgctggaggtaaaaaattcaatcatggtatcgtcctctcaaggtcagtgtggtagagggggaaagccgccgaaaagcagagcgcgcactgcgcactctgcttttggaagatccgcaggggaagaagctcactccaggatcacggcgtcctgcaggccgtaggtggtagccacctccagcacggtgccgtcagccgtcttctccgccaggaaggtgttgaaggcgtccaccaagtcggacccctgccggaagcccacgccatattcctcggagggcaggtcctgggcctcattcaggttcaggctgtagatcagatcggcgtagctggtgccctcgccggtcatctcagcggccatcagcacgtcgatgacggcggcgtcggacgtgccggcggcaacctccatcagggcgttggactgggcctggaccggcacggtggtggcacccaaggccacggcggcatcctcaccggcggagccggactccacagcgatgttcaggccctccagagaggtcaggccctcgaactcagcggcccggtcggcaggatagaccagagtctggtagttggtgcagtatgggttggacgtacccatagcagccagaacgtcgtcggtgagagtcataccattccacacgcagtcgatggcccgggagtccagctcttccaccttgtagtcccaggtgatctcctggaactccacggagacgcccaggctctcggcaaacagcttggccaggtcggcgtcaaagccgatccactcatcgctgccctcttccttgtagtccatgggggcaaagtaggtaatgcccaccaccagggtgcccttatcctggatataggccacgtcgctctcgggagcggtgtcaccggagacttcttcccctgtgggctggtcatcagtggcggcgtcctcgtcagaggttccgccgcaggcggccagagagaaggtcatggccagggccagcagcgctgcccacagcttcttcatgtttttcatcgtcaatcctccaaatctctggacggagataccgtccgtttcattacattagcagtttaccacactaaattatccgtgtaaagccgcaaaatcagccaagaacggagaaggccggctcctgaatttgtgcatcttctccaaaacaagacgggctgtcatacttcgcagcagccggacatagagtggaacaagactatggagcggaaaaaggacgggatgctatgaataccagtatctatcagaatatcgccacccgcaccgctggggatatctacatcggcgtggtgggtcccgtgcgcaccgggaagtccaccttcatcaagcggttcatggagacccaggtgatccccaacatcgacaacgtctaccgcaaggagcgggcccgggatgagctgccccagagcggctctggccggaccatcatgaccgccgagcccaagttcgtcccggaggaggctgcccagatccagctgccggacggggcgagcttttccgtgcggctgatcgactgtgtgggatacatggtgaagggcgccatcggccagatggaggacgacaccccccggatggtcaccaccccctggtacgaccatgagatccccatgaccgaggcggcggagatcggcacccggaaggtgatcgccgagcactccaccatcggcattgtcatcactaccgacggcaccatctccgacatcccccgggaggactacctggaagcggaggagcgggtgatccgggagctgcaggagctggggaagcccttcatcgtcctgctgaactccgcagacccccggggcgaccgggcccaagccattgccaaggacatctcctcccggtatgaggtgaactgcatggccgtcaactgcctggagctggacgaggacgccgtggccgccatcctgaaggcggtgctctacgagttccccatgcaggagctggacctgttcctgcccccctgggtggatgccttgccggcggaccatcctatcaaagcgggcctgtatgacgccatccgtcagaacaccgcccagctccgccacatccgggaggtggagggcgtcatcgccgccctgggggagagcgagcacatcagtgaggccagaatctcagccatcgacctgggcaccggcgtggccgccgcacggctggccttgccccgggagctgttctacaagaccctgtcggagcagtccggctttgaggtgggggatgatggggatctgatgagcctgctgacgaagctggcggcggtgaaggcggagtacgacaaggtagccggcgccctccacgacgtccgagagacgggctacggcatcgtggtccccggcatcgacgagctgaagctggaggagccggagatcatgaagcagggcggccggtacggcgtgcggctgaaggccagcgcccccagcatccacatgatccgggcggacatcgagactgccgtcagccccatcgtgggcaacgagaagcagtccgaggacatggtgaactacctgctgcaggagtttgaaggggataccagcaagatctggcagtccaacatcttcggacgcagcttccacgagctggtgaacgaggatctgcaggcaaagctcaagcggatgccggaggacgcccggcggaagctccaggagaccctgacccgcatcattaatgagggcagcgggggactcatctgcatcattctgtgacgcagacatcatagaaagggcgccggaggaatccggcgccctttcttactattccagcctgtcccggagggagctgggaaaaggccgactcgcccggtatacgtgagaccgaccaccacaaagggaaccaaaagacgccgaacagcgcaaggattgggggattcctgttcagatgtcccaaaggcatccctgaagaagaaatttcctccgatgccctcaccgcttcatccggggatcgcaggtgccgaaccgccggacattttcccgcccctgggacagggtcagcccatgattttcgtcgctgggctcgttgtcggaggaaatgaacacgtcgttctcccaccagcataccgggcaaatgtaagccaccgcctcctccggcgggaccgggagggtgatctgcccacagcagggacagggatagcgcccgggccgatcctgagctgccggaatcggaggctccggcggcccatagccgttgaacgccttgggcgcgtaaaacatcttttttcgtgtgtgcgccatggagaccacctgcgtctcacagcgccgtgccacgagtggggacatacagcccggtcatgtccacgccctccagctccagcaagaactgcttgttggccacgcctccggcgtagcctgtcagacttccgtcgctgcccacaacccggtgacaggggatcagaatggagatggggttgtggcccacggcgccgcccactgcctgggccgcggcagaaatcccctggccccggagcgtccgggccagggcgccgtatgtggtgaccgtgccgtaggggatctccagcagcaggcgccacaccgcctggcggaaggggctgccctggggggccagaggcggcagagccgggaggggagccttggcaaaataggcgtccagccaggcggaggcctgctcaaataccggcaggtcattttcctttacagcatttgggagtccagcaccaaagtatttctgcccatccagccacagccctgtgagggctgtgccgtccgaggagagggtcagcattcccaccggggagggcttatgaaagatcatccacatacaattacacctcaaatcaggatcagagtgatggagcgattgcaaacgaatgtaagtcgttcaacagggaccgcttgatttgtccggcgcggaatgggcgctccggcggtacgccagcggggactgtcctgtgccggaccggaaggcccggtaaaaggcggagaggctgtcaaatccggcctccccggctatttgggcaacgggctggtccgtctcccgcagcaggcggcaggcctcggtcacccgaagcgttcccaggcagccgtggagggtggtgccgtaggctgcctgaaacagggcggccagcctccggcgggagagccccaggccgttcagcgcggctgacaaggccgcctgatcccggaagtggcgatgcagcagcgccatggcctccgcagcaacgtcttggcccggggaaaaatcggtcaggtccgggcggcagcgcttgcaggggcggaaccccgccgccagtgcagcgtccgccgtggggaagaaccgcacccggtcccgccgcggcggtcgggaggggcaggagggacggcagaagatgcctgtggaggctacgccgtagaaaaatgcgccatcataccggcggtcgttgtccaggaccgcctgccagcgctgccggtctgtcatgtgtgccgcccccgttttttgtccggtttccgtccggcgccagggtccgtcagctccggcagggcgccgcaggcgatggcccagaggtacaggctggcagtggtgccgtaggggctgtaccgcttccgcaggcgctggaaggtcctctggtcgatggaccgctttcggtacagcatccgcatcccccggaggatggccaagtcgccccagctgaccacatctggccgccggaggccgaagatcagcagcatctccgctgtccaaggccccacaccccgcagggaggtgaggcgggccagcacctcacggtcctccatttccgccagggcgtctagatcaaaatccccggaggccactttccgggcaaattccaggatgtacagcgcccggcggcgggtcatgcccagggcctggagcgcctcggccggcatggccgcgaccgtctccggcacaagcgtcccggccgctgcctggagccgctgccacactgtccgctgggcagccatggatacctgctggccgatgatgtgatggattacggaggagaagaggtccgggtccacctcccgatggatggggccgatccggtccatggccgcgcccagtttcaggtctctggcacgcagataggcaatctccgtttcaccatagggaaaatccatggcgcctcctcctttcgcgtgtgttcaacaaaagtatagcagatccggcggcagatttcttcccgttttcggacgtttcatcgaaaaattttccctctgtcccggccttgcatccggcggcagggcgtgataccatagaatacgatcaagatcggaagaaaaaaggagagaggcttatgctgctggccattgatgtaggaaactccaacacctctgtggggctgtttgacagggacaagcagctgcggtttctggcatccctggacacggacagccgcaagaccgcagaccagatcagcatcgacctgatgaacctgttcgccctgtatcacttccggtttgaggatgtgacgggggcgatcctgtgcagcgtggtcccccccctgaacttcatgatggagaaggctctgtcccggctgctgggcaagccgcccatggtggtggggcccggtgtgcggacggggctgaacatccggctggcggtccagtcccaggtaggggcggacatcgtggccgacgcggtggcggcgctggagaaattcgagcctcctatcgtcaccatcgacatgggcaccgccaccaccatcggcgtcatctccgagggccggaattacgagggcgggatgctgctgccgggggtcaacgtgtccctggaggccctgagccgccgggcggcccagctgcccgccatctccctccagcaccccaaggtgttgattggcaagacgacggaggactgtatgcgctccggcatcgtctacggcaccgccgggatgctggacggcgtcatcgaccgcatccgggagcagttctcaggacggacactcagcgtggtggccaccggcggcaatgccccggtgatcgtgaaatactgccggaacaagatcgtctacgacaagtacctgctgatggacgggctgtgggcgatctatcagaagaacaagtgagaacaatgacattgggggcaagcagtcctgtggttttcgagacagaacgtctggctttcagagaaatgaatcaggatgattttcttgatttggcggagatgctgcaaaatccgaaggtgatgtatgcctatgaacatgatttttccaactcggatgtccaacaatggcttgaccggcagatcggacgatatcgggactatggatttggcctgtgggcggtcatatcgaaaaccagtggtgtcatggttgggcaggcaggccttactatgcagccatatcgaaataaagacgtgcttgaaatcggatatctgctcaagaaggagttctggcactgcgggtatgcaagagaggcagctgaaggctgtaaacgatatgcgtttgaacaactgaagcgggaccgggtatcgtccatcatcaaatcggataaccttgcgtcaatcagggtggcggagagcatcggcatgcgcaaggaagatacgtttctcacccgatattacagcggagaaatgcttcatttcttgtactctgtctaccgagagacacggtgctgaagaaaaagagatcacccaaagcgggtgatctctttcctgttctggggtttcgctgccgcttacttcaccagcacctttttcagcttggcgaagcggggcagggagtcctccttgggcagcttgggctcgccctggatcaggggcagcacatagtcgatgaagggcttctccacgccgttgtgggcagcgttgatccactcgatgggcaccttcttctcggtgttggccacatcggtcaggggcagcagcttggtcttgcagacgtactggccgtcctcatagctgcgctcgaagcccaccatcttgtcggtgataccattgacggcgttctccacagcggccatgccgctcatgacggcctcctcgatatcggtctcggacgccaggtgggcaccgcaccgctggaggagggagagctcgatgccccggaccttggcgccggtcttctccttgactacctgggccagcagggaggccaggccgcccagctgggcgtggccgaagccgtcggtggcagaggtcttggcctcggagacgaaggagccgtcggcgtagtggatgccctcggagacggccaccatgcagttgcccttctccttgtagatgcgctccacgtcggccaggaactgatccatgtcgaagtccacctcgggcaggtacaccagatcggggccggcgccgtaggcggtggccagggcggcggcgccagccagccagccggcgtggcggcccatgatctcgatgatgcagaccatgccggtgtcatacactcgggcatcctgatagacctccatgcagctggtggcaatatacttggcggcggaggcgaagccggggcagtggtcggttccaaacaggtcgttgtcgatggtcttgggcacgcccatcacgcggcactcatagccgaccttctgcatgtacttgctgatcttgttgcaggtgtccatagagtcgttgccgccgttgtagaagaagtagcggacgtcatacttcttgaagatctccagaatccgcttgtagtcggtgtcatccacatccgggtccgccatcttgtaccggcaggagcccagggcagaggagggggtgtatttcagcagctccagctctgccgggtcctcctggcccatatcaaacagccggtcgttcaaaacgcccttgatgccgtgctccgcgcccaggacgcgggtgatgctggggttcttcaatgccgtggcgatgacgccgtaggcactagcgttgatgacggaagtagggccgccggactggccgaaaatgcaggcgcctttcagttcactcatggaaaaatcctcctcagatttggtttcgggatgctttctttcatcatatcattcaaaaaaagaattgtaaatacttgcattttaaaaatcttgtgatattatcataagggaaaatcgttttcgttcttttgaatcggcgttttttgacaaccgggatcggacctgtcggccgatgtgggagagcgggacaaataaatgaacaggagttgatcttatggcactggttaccacgaccgaaatgttcaaaaaagcctacgacggcggctatgccatcggcgcgttcaacgtcaacaatatggagatcgtccagggcatcaccgaggccgcccgggatctggaggctcccctgattctccaggtgtccaagggcgcccgggcctacgccaaccacacctatctggtgaagctggtggaggcggccgtcatcgagtgccccaacatccccatcgccctgcatctggaccacggccctgactttgagacctgcaagagctgcatcgacggcggctttacctccgtcatgatcgacgcctccagcaagccctttgctgagaacattgaaatcaccaagaaggtggttgagtacgcccacgaccacggcgtggttgtggaggccgagctgggcgctctggccggcatcgaggatgacgtgaaggtctctgccgaggagtcccactacactcatcccgaggaggtccaggagttcgtggagaagaccggctgcgactccctggctatcgccatcggcaccagccacggcgcttacaagttcactgccgcccagtgcacccgcaacgagaagggcgagctggttccgcctcccctgcgctttgatatcctggacgaggtcgtgaagcgcctgcccggattccccattgtgcttcatggctcctcttccgtgccccaggagttcgtccgtatggtcaacgaattcggcggtaagatgcctgatgccgtgggcattcccgaggaacagctgcgcaaggctgcccgtagcgccgtgtgcaagatcaatattgactccgacctgcgtctggccatgaccggcaccatccgcaagttcatggcggagcaccccgataagttcgatccccgcgagtacctgaagcccgcccgcgccgccatcaaggagctggtgtcccacaagatcgtggacgtgctgggctgcgaccacaaggcctgagcctgccccggaccctgtttttgaaaagaaggcggagggagcgcgatgcgctccctccgtttttctgtccggggtcagctactgtttatcagaggcggccatctccgcctcccgctccagcacccgtcgggcgaaggccgccatggtacaatcctccactgtctccccgggtcggatcaccagattgaaaaagcagctggggatctcgcccttgcgcagctctttctgaatgcacaggtcgcacccctggctatggttggagggatggcagcggcaggcggtgttttggcaggtacagaaatgcgtcatggcagttctcctttttcaatcgggcaggactcgctgacggccaggcgtttcaacagggcgtgggccacctgggctgcgatttcagaagcccggcggcagttttcctcaaagcaggcggcggcggatcggtcggccgaatcggtgatggtgcgaatggagaggaatgggatgccgtttgcatggcagacatgggcaacggccgcggattccatatccgcgcaaagggggtgaaatgcggaccgcacggcctctgtcccagggccagagagaaaggcttctccggtcaccatccgcccgaagcggacggggcggccggagtcctgggccgcctgggtggccaaggagagcaggaaggggtcccccgggaaccagatggagtccatccagggatggaactccgtgagaatatcctcagctacatcgtgataggcggtctctgtgctgatgacggtatcaaagatggagatggatgggtcgatgcctcctgctgtgcccgcattgatgatggcttccacccggcagctgtcaatgaggacctgggcagcgatggccgcattgaccttgcagacaccactgtacagagcggcggcaggaacgctggagatccatccctcgtggatcgtgagcatggcctgccggcggacggagcgcctgtccagaagaggcaggaacggcgcgagctcgtcatctccggcgcacaggattccgattttggggagcacgtcccatccctcctctttgcagagcagctgcggttatgggggtattgtaacacgcaacgtctgggagcgcaatcaaagattgcacagaataatgttgtatggtataatataatagttatctcgatataaggaaaaccggccgccatccggcagagatgcctggcagcttgagtatttgaggtggatacaaaatggaaaacgaagtacagaaaaaacgaatcctgagcggcatccagccctccggcgacctgaccctgggttcctatctgggggccatcaagaactgggcggctctggctgacgaatatgactgctactacatgctggcagacatgcacaccatcacagtgcggcaggtgcccgctgagctgcggcggcataccctgacccaggtggcggcctacattgccagcggcctggacccggagaaaaacgtgctgttcgtccagtcccacgtgcctgcccacgcccagctgggctgggtactggactgctacaccatgttcggcgagctcagccgtatgacccagttcaaggacaagtccgccaagaacgccgacaacatcaacgccggcctcttcacctatccggccctgatggccgccgacatcctgctgtaccaggcagacctggtgccggtgggcggcgaccagaagcagcacgtggagatctgccgggacatcgccacccggttcaacgggatctacggtgatacctttaagctgccggatccctatatcccacaggtgggcgccagggtcatgagcctcaccagcccggaaaagaagatgagcaaatccgacaaggaccccaacggctgcgtctacatgctggaaaagccggaggacatcctgcgcaagttcaagaaggccgtgacggactccgaggcctgcgtccgctttgacccggccgacaagcccggtgtgtccaacctgatgcagatctacgccgtggccaccggcaagagctttgagaccatcgagcaggagttcgccggccatggctacggcgacttcaagcaggcggtgggtgagtccgtggtggagctgctgcggcccatccgggaggagacggagcgcctgctggcggacaagagctatctggagagcgtctaccgcgccggtgcggagaaggcggcctatgtagccaaccggaccctgaacaaggtctataaaaaggtgggcttcctgccccggtgatggaggagacatcatgttgatcgaaaaccggctgatcgcctatacgctgctggcgctgctggtggcgctggtcgtcagctttctgatgacgcccatcgtcaagacttttgcttacaaggtgggggccatcgacgtacccaaggacgcccgccggatgcacaagactcccatcccccggctggggggactggccatctttatcggcttcatggtcagcatcctgctgtttgtggagatcacggccgagatgcgcagcatcctgctgggagccgttatcatcgtggtgctgggcgtggtggacgacatcatggccctgccggcgctgctgaaatttgtggtgcagatcgtggccgccctgatccccgccacccacggcgtggtgatccaggcgttttccaaccccaacgtcttttcggacaatccctattgggtgctgggaaatctctccgtgcccctgacggtgctttggattgttgccatcaccaacgcggtgaacctgatcgacggcctggacggcctggccaacggcgtctccgccatctccgccaccacagtgcttgtaattgccctcatcggcgggcagtttcaggtggctgtggtgatggcggccctggtgggggcctgcgtgggcttcatgccctacaacatgaaccccgccaagatgttcatgggcgacaccggcgccaccttcctgggttacatcctggccaccatgtccatccagggcctgttcaagttttatgccatcatctcctttgcggtgccattcctgattctgggactgcccatctttgacaccgcctttgccttcatccgccgcatcgcccacggccagagccccatgcacgccgaccggagccacatccaccaccggctcatcgacatgggcctgaaccagaagcaggcggtggctaccctgtacgtgatctctgccatcctgggcttgagcgccgtggtgctgactaccagtggggagggccgggccatgctgctgttcctggtgctgtgcatcgtggcagtggtggccgcccgggtggtgttccccaaggaggtcaaggaggagctgcacgaagagttggaggagctgaaggagcacggccaccacggccatcatccagcggacaagccggaggatgatggaaagacggaggagaagtaaatggaaaagctgcggatcatgagcgtcttcggcacccggccggaggccatcaagatgtgccccctggtgcaagagctggcgaatcgggaggggatcgagagcctctgctgcgtcaccgcccagcaccggcagatgctggacagcgtgctggaggtctttcaggtgaagccggactgggatctggacatcatgaccccccgacagacgctgtccaccatcaccagcaagtgcctcaccggcatggacgaggccatcgacgccctgaagccggatatgatcctggttcacggggacacctccaccacctttgccggtgccctgtcagccttttaccatcaggtgtccgttgggcacgtggaggcaggattgcgaacctatgacaagtattctccctttccagaggagatgaaccggaagctggtgtccgccattgcggacctgtatttctgtcccaccgccaacaaccgggccaacctggagcgggagggtattaccaaggggctgttcgtcaccggcaacacggtcatcgacgctttgaagaccacagtccggccggactaccgcttttccacagaggagctgaatcagctgccctatggggagaagaagatcgttcttgttacctgccaccggcgggagaattatggcgagccgatgaagaacatcatgctggccctgcggcagatcgccgaggagaaccgggacgtggagctggtgtacccggtgcacctgagcccggtggtgcgggaagcagtggacacctatcttcggggcgcgccccgggtccatctcatcgacccgctgccggcggacgagatgcataaccttatggcccggtcttatctggtgctgacagactccggtggtctccaggaggaggcccctgccctgggcaagccggtgctggtgatgcgccgggagacggagcggccggaggcggtagaggccgggaccgtgaagctctgcggcgtggtacaggatgacatcgtcaccatggcggagcggctgatccgggacaagagcgcctacgacgccatggcccacgcggtgaatccttacggtgacggccatgcctgccgccggattgccgatgccatcgagtggaagttcggcctgcggcgggatcggccggcagaattcggcgtctgacctgccgcggacggcaccctgagagaggagggcggagatggaggaacggaagctgaaccggatcaccgcgggctttattgtcctggtggtgatggtgctgatcctgatgttcagcaacagtctgcgccgctcctcccatatcacgctgccggaggaggggagctcccccggacaggcagaggataccaatgcctccggcggtgacgccctgacagtgatcgcggtgacgccggagacggtgcagaccgccattgagacgctgacccgcccgcggcagtacagccgggtgatccgggtggagcagctgtgggacggcggcagcggttcctttgagaccaccgtcacggtcagcggccgctggacacggacagaccgctccctgtcggacggacaggttcgccacaccatcaccgacggggagatcacttatatctggtatggcagtgagagcagcgtttacagcgcccctgcgggggacatcaccccggatgacgagcaggccatccccacctatgagagcatcctggacctgccggtggaggatatcgccgccgcggattaccgcagcgtctccgatgtgaactgcatttacgtggagacggtccaggatccggagggttacacccaacggtactgggtcagcgtggagacaggcttactggtagcgtcggagcggctgttggagggggagaccatctaccgcatggcatccctgacggcagatctgagcaccccctccacagaccggtttatcctgccggacggcacggtgctgctggacacatgaggcgaacccccaccggagacagccggcgggggttcttttcaacaaggccccggcggaacattccgccggggccgttttaccgacaatatggggtatgtcaacggcggtcgctgcggcaggcaccgccgcagcggtcacagcagccatcacagccgccgcagccctttcctctgcggcggaggcaggaacggagggcaagcgccagccagacgcccagggccgccaggatcaaaacttccagcatggcagcctcctctatcccagcagcaacgccgcgatgtggtagaccaggaaggccaccatccaggcaatcacgcactggctcaacgccacaccggcggccttccagccggagcccagctcccgcttcactgcggagatggcggccacgcagggggtgtacagcagggtgaaggcaaggaacccggcggcagtgacaggggtgaacagcgtccccagggcggcggtgctgacatccgcgccggacccggtaaggattccaagggtggagatgacggactcctttgcgatgaacccggtgatgagggcagtggagacccgccaatcggcaaagcccagaggagcgaagagcggggcgatccaggcacccacggtggccagcagactgtcggcgctgtcatccaccaggttcagccgggtgtcaaaggtctggaggaaccagacgatgatggtggccacgaagatgatggtgaaggctcgggtcagaaaatccttggccttgtcccagcacagctgccacacgcttttggcggaggggaagcggtagttgggcagctccatgacgaagggcacggggttgcccttgtagactgtggtgcccagcaccttggccgccacgatgcccaccaggatacccaggatgtacagcccgatcatcaccagggcggcatgattcgggaaaaaggcggcggaaaacacgccgtagatggggatcttggcagagcagctcatgaagggcgtcagcaggatggtcatccgtcggtcccgctccgaggccagtgtccgggtggacatgatggcgggcactgagcagccgaagcccaccagcatggggacaatgctccggccggagagaccgatcttccgcagcagctggtccatgacgaaggccacacgggccatgtagcccgtgtcctccaaaatggagaggaagaagaacagcaccacgatgatgggcagaaagctcagtacactgcccactcccgcgaacacgccgtcgatcaccagactgtggaccacggggttcaatccataggcggcgaggccgctgtccaccgccgcggtgagggcatcgatccccgcggccagcagatccgacaggaaggcgccgatgacttcaaaggtcaggaagaagatgcccagcatgatggcgaagaacagcggcagggccaggtatttgttggtcaccacccgatcgatggcctcgctgcgggcccgctcccgggactcccggcacttcaccaccgtgccggagcagatggtttcgatgaaggtgtagcgcatatccgccagtgcggcattgcggtccatgccgcactcgtcctccatctccttgacgccgtgctcaatgagctccagctcgttctggtccagggccaggcgggtcacgatgtcctcgtctccctcaatgagcttggtggcggcgaatcggacgggaaggcccgcagcctccgcgtgatcctcgatctggtggaccaccgcgtggatgcaccggtggaccggtccgggggagcagaagtcgtacaccgtaggcagcgtcttgatccgggcagtctggacggcaaccttcacaagctcgtccacgccctggtttttcacagcggagatgggcaccaccgggatgcccaatgcctgggacattcccttcacgtcgatggtgccgccgccggcggtgacctcatccatcatgttcagggccagcaccatgggaatacgcatctccatcagctggagcgtcaggtacaggttccgctcgatattggtggcgtccacgatattaatgaggccgtcgggcttttggttcaggatgaaatcccgggtgacaatctcctccggcgtatagggccggatggagtagatgcccggcaggtcgaccaccgtgcagtccttttccccccggatggcgccagacttctgatccaccgtcacgccggggaaattgcccacgtgctggttggagccggtgagctggttgaacagcgtggtcttgccgcagttttggttgccggccagtgcgaaaatcatgtcccggccacctccacttcgattttcccggcgtcctccttccgcagggacagggagtacccccgcacccgcagctccaacgggtcgcccaggggtgcgaccttctccacccgcacgcgggtcttcgggatcagccccatatccagcaggcggcagcgcagggcgccctcgccgcccacagccgtgatgacggcctcctgccccaggggcagcttgtccagtgtcatcggaacgttcctcctcaaaagttagcattgtctaacaattagaagtttatcatcgtgcactttaggaggcaactataaaacaagccaaaagccgacaaatttttctctggaaattgtataacatggataaaaagaagaagcggcgggcagggtttggaaagggccttgccccggagggggcagaaatgctatactgaacccaaaccaagccggaggcagagggcccccggcgatcaggaggatcttatgctgacattcaatcacttcaatttcaatgtagcggatttggacaaatctcttgcgttctacaaggaggccctgggcctggagccggtgggggagcggaaggcggcggccgacggcagcttcatcatcgtctacctgggggatggaaaaacggacttccgcctggaactgacatggctgcgggaccatccccagaagtatgacctgggggagtgcgaattccatctggccctccgggcagaggactatgaggcggcccacgccaagcatgccgccatgggctgcatctgctttgagaatcctgccatggggatctattttgtgacagatcccgacggatactggatcgagatcatccccacccgataaaggtgcacaaagggaagcccccgcgctgagaaaaatttttttgaacggcagttgcgcccggctgggcgccatggtacactgagattggtcgtggggcgttctgccgggggcggcggaggcccggatctattttttggcaagggagagagtgaaatgaaacagagactgtttgcattggcggcggctgtggtgatggcactggggctgaccgcctgcggcggaagcggctccagcgagggccgcaccggcgacaccatggagacctacttctttgatttcacagtcaacagcgcataccttaccagcgactacgcgggccgtacccctggggaggggaacgtactgctggtggcggacatcaccgtaaagaacaccttcgagcagagcattgagatgtatgacactgatttccaggtccagtgggacgacggcgatgacgcctatgcctatcccatcaccacagacatggagacctatacggaagtggagccggtgggggagaaccagctgcccggtacatatcccatggccgtggacgaggagcgcagcggcgagctggtctatgaggtaccctccggttttacggacttctccatcgcttatctggagcagtttgtggatgactccggggaggagagcaccggcgagactttcttcgtctacttcactgctgaagaccagacaggtgcctccgcctgacaaaaacagaaaaagcgccaccgctcctgcggtggcgcttttgattttgatccgttgctgcgggactgggcggtttcctcaccagaccaatgtgcggaaatagtcctccggcgtctccgcccggcggatcagctccacggagccgtcctccttcagcagcagctcggcggagcggagcttgccattgtagttgtagcccatggagaaaccgtgggcgccggtgtcgtggatcaccagcaggtcccccatgtcgatcttgggcagcatccggtccacggcgaacttgtcattgttctcgcagaggctgccggcgatgtcatacttatggtcgcagggctggtcctccttgcccatcacggtgatatggtggtaggacccgtacatggccggacgcatcaggttgcaggcacaggcatccacaccgatgtactccttatagatgtgcttttcgtggatggcccgggtgaccagatgtccgtacggaccggtcatgaagcggcccagctcggtatacagggccacgtcacccatcccggcgggcaccagcacctcctcataggcccggcggactccctcgccgatgacggcgatatcattggcaggctgctccggacggtaggggatccccacgccgccggagaggttgatgaaggtgatatggacgccggtctccgccttcagctccgctgccagctggaagagaatgcgggcgagggcggggtagtagtcgttagacagggtgttggaggccaggaaggcgtggatgccgaactccttggcgcccatggcggaaaggcgggtaaatgcctccgcgatctgggcgcgggtcatgccgtacttggcgtcgccgggattgtccatcacctggaagccctcccgggtctcgcccagggtgaacacgccgccgggattgtagcggcagcagattttctccggcacatggccgatggaccgctccagatagtccaccagcgtcagatcgtccaggttgatgatggcgcccagccggtccgccatctggaattcctccgccggggtatcattggaggagaacatgatgttctcaccggtgatgccgcaccgctccgagatcatcagctccgtcatggaggaacagtcgcagccgcagccctcctcgtgcagcagcttcagcagggcaggggtgggagcggccttcacggcgaaatactcccggtagccgggattccaggcaaatgctttccgcaggcggcgggcattctcccggatgccctgctcatcatagatgtggaacggggtggggtactgggcggcgatggcctccagctggtcctttgtgacaaagggggtcttcatatcaacagcctcaaatcttcataaactctaccgcgtcgaattttgcggtgccatagatgtgtcctattttacgagcacatccatgtctctgtcaagaaatttgcccaaaaaacggaaaaacagtccttgattttcccaaacagacaggcagagcgatgttcttttcaaaaaacatcccttgcttttacaagaaagagacgatacaatggccgtagagtgccgtcccacctagaaggagcggcaaccgctccgcagcggaactgtccctgccggtccggatgatgattctgtgcgcgcgggcagcgttaggctggtggtcgagcggtatgcggccggaaagatcgcctggggacgggctctaaatcctccgtcctgccgcaggcgaacggataaaacacacagccgccgaggggcggggagaggagaacaagatgaaaactgtgatcgtggacgctgtgggggagccgtgccccattccggtagtgaaggccacgaaagccctgcgggagctgggagagccgggaacgctggaggtccgggtggacaatgagatcgcggtgcagaacctgacccgcatggcggcggggaaccacctgccggtccaggcggagaagaagggagagcacctgtttgtggtgaccatggaagtggcggagccggtgggagatgccccggcggaggaacctgctctgacctgtgttccggacgcccggggcgacttggtggtggccgtggattcagagaccatgggacggggcagcgacgaactggggaagctgctgatgaagagcttcctttttgccgtgagccagttgccccggctgcccaggaccgtcctgttctataacggtggtgccaagctgacggtggagggttccgaatctctggaggacctgcggaatatggaggcccagggagtggagatcctcacctgcggcacctgcctgaacttttacggtctggcggagaagctggctgtgggcggcgtcacgaatatgtacgccattgtggaggccctggccaatgccgggaaggtcatcaagccatgatctacctggacaacgccgccaccacccgccccaagcctcccggtgtggcagaggcggtggccgcggccatgaatgactacggcaacagcggccggggcacccatccggaggccctggaggcggcccggagcatctacggcgtccgtcaggcgctggcggctctcttcggctgttcccgggcggaccgtgtggccttcacgcccaattccaccatggcgctgaacatcgccatctccggcctgctgggggcgggggaccatgtgatctccacagatctggagcataactcggttctgcgtccgctgtacagactgcgggcgcagggaggggcggtggacttcgtcccggcagaccggcaggggcggatcgactatgaggactttgagcggctcctgcggccgaatacaaaggcagtggtgtgcacccacggctccaacctgacgggggatctgatggacatccagcgggtggggaacttctgccagaagcacaagcttctgtttattctggatgcctcccagaccgcaggggtatttcccattgacatggaacggcagcacatcagcgtggtgtgcttcaccggccacaaaagcctgatgggcccccagggcaccggcgggctctgtgtgggagcgggggtggagattcgcccctttgccgtgggcggcaccggcgtccagagctactctgagacccagccggaggcctatcccacccggctggaggcggggaccctcaacagccatggtattgccggcctgggagcatctttggcgtttctgaagcgtaccggttgggacgcagtccgcacgcacgagtccgtcctggcccggcggttctatgaaaccgttagaaccattcctggcgtaaaagtgtatgggaattttgctgtacatctccgggcgcctatcgtgtccctgaatatcgccaatctggactcctcggaggtggcggacgagctggcggagcggtttgagatcgccacccggcccggcgcccactgcgccccccggctccaccgggcgctggggaccgaggaccagggcgcggtgcggttctcctggtcctatttcaatacagaggcagagaccgacgcggctgcagaggcggtctgtatcctggcggcggaggcagtctgaccatgcggaaaaaagaagagcggttcgtggtaactttcgccaccaccaccggggccatggccatggagcgggcctgccaggcggcggggctgccggggcggctgatcccggtgccccggagcatcaccaccggctgcgggatgtgctggtctgcgccgccgtcggcccgggcggatctggaggccctggtgatccgggaaagactggacgtggacggcctgtacgccgtcctgttgtgaggaggagagagcatgtcggcaaattgcgaggagtgtgtctactacgactacgacgaggaactggcggcttacgtctgcgaagcggacctggacgaggacgaaatggagcggtttctccgtggcggcacacgggactgtcccttctaccggcccggcgacgattaccgcacggccagacggcagtgagcacgacgaaccatgacaaaacagcgccttggacatcgtatctgtccaaggcgtcgtttgcatatatacgatggctcactgggcggagagccagtctacgtattcctccaggcacaggtcaagctccgtcatctcccgggcggcttcccggcccacatagcggtagtgccagggctcatagataatgcctgtgatctcgcttttggcgttgggatagcgcaggacaaaaccgtattcccagctgtgctcgatcagccactgctggaccagggtgtcctcctgcccctggtccaaaatctgataggaggcgtctacaatgtccagggccaggcccgtctggtgctcactggtgcccggcacggctaccacagttccagcctccgtgacggcgttttcgtatgaatatccctcttctatcaaacgctggagcttgttttcgtacagctcctgctgcttggcctgtgtccggtaggacgagcagatcaccgggtccaatcccgctgcccggcagtcgtccatcatctcctgcagatccgggtatgctctggaatccaccgagtggccatacttcagctttgtccgttcaaacgtgtatccatcgggcaaagggttccagcggttcaccagcaggatctgccagtcatccggagtaacggcgccggactggggggccggattcagctcgaccggcggcagggcatcgggttcctgcagcgaagactccgggtgctgctccgtcagttgttccgcaggctccaacgcagacatgggggcggaaaaggatctcactgtgcgtatagtcaaaaccacggcagacaataccagacacatgcagaaaagcttcaaaggccagcgcagtctgcgggagcgctttctacgccgcccttttgagctatgtacgtctgcggctctatcatttgtataaaccatgggagtcctcctcgggagcctatgtgatctgttgcttttggttctgctctacctaatagacgccggtttgtcgaaaaaagtttcaaaatggggaaatctttagatggccggtcatggcatgcaatctccggacagctaggtcggcagcggaagagcagggggggactgcgaatcagaagacgcccgccgcaatctgtacaacatggatgctgtgtttgtttccgccggtatattctgaacaataaggccgcacacattgccgagcgggcaatgtgtgcggccagtcacaaacaagccgggggagatgtcggtgaaagtaaaaaaatcgaagcatccaatttggatgcttcgattggtccgagtggcgagacttgaactcacggcctcttgacccccagtcaagcgcgctaccaactgcgccacacccggaaatgtgctgctcgaagtcagctcagttataatagcatactgtttctggaaatgcaacccctaaaatgaaaaaaattaaaaaaataaaaatgggagcagattgttgacaaatcgccaatcgatatagtataataatcaggcgtccgacggatggcgcctttccatgatggagagatgtccgagcggttgaaggaaccggtcttgaaaaccggcgacgcgcaagcgtccgtgggttcgaatcccactctctccgccacatctttaatcagtgaatatcgtatctgcagaagtacccaagaggccgaaggggctcccctgctaagggagtagggtgtctaaaaaacgccgcgagggttcaaatccctccttctgcgccacacgccgcaagcacagaatgcttgcggcgtgttttttctgtcatttacaagatcagcagcaggcccagggccaccagcagctcttcatccgcgccctcccggaagaggaagaagaggatggccaacagcagcaggtccccggaatccacactgctcaggtgaaactggtccagcagatgccggagcaggctgctgaggctgtccggcccattctcgccggaggggggaggatcagggcggggcgggggggcgctgtcccaatggggaggctgctgcccgccgccggatggcgggtgttccggctgaccggaaggggaggtgccgccctgtgtatgccggggctcctcctccgggatacgggtgtaggtgccctggtcgttgcggatgtagcggttatacatgtctcacccctcccatccagccagaaatttccggcccaggtggaacaggcgcgccagctggagagcccgttccaccttctcctgccgctccggcttgagatagggccgcagtgcgtacagcagctgccgggcgttggagtcccgtgctcctcccagctcctggatcaggggcaggaaccgcaggagcagctgcggatccagcccaccggccagggcggagagaggatcgccgccggatggcggcggagtctgcggctgctggccccagccgggagaagaaccgcccggctgggacgggggagggggcggcgcattggcggcgttgtttcctccggtcccaccggagagagactgggccagttgcatgatctgtgccatggcgtccgggttggagagaatgctgttcagtttatcgtcgaattccgccaccgccggtccgccccctttctgtacttgccgttaccggccgttcatggtcttgttgatgcggtcgatcaaagctgcgccgtccgggctctgcatcagctggttcaccatgcggaccatctccgccgggttgcccttggcggcggactgggccgcccgctggagagatgctccacggtctcccccggagagcatctgcatcagcgcctgcccgtcccgggactgcatcagcgcctggagcatggcggggttgcttttcagctgttggatcatacgggccgtctgttcgtccatagtgcctccttgtgccgtctgtcggatggatttcatctcagtatatgagggaagacaaaaaaacgtgcctgcgcattgcgcagacacgtgaagttccagagtgattccaatgctgtcagccccgtctggcggctttggcggtgtcgcagtcctttgccagggggcagccctcgcacttgggggagcgggcggtgcaggtatcccggccgaagagcaccatccggtggcagaagttgttggactccttgggagggatccgctcccgcagctgccgctccacctgaaggggatctttggagccgtcggtgatccccagccgtcccgtgatgcggatgcagtgggtgtcgcagacataggcgggctggccgaacacgtcccccagaatcagattggcggtcttgcgccccacgccgggaaggccggtcagttcttccatggtgccggggactctgccgccgtattcattcaccagcttctgggcacaggccacgatgtcccgggccttgccgttgtaaaagccgcaggagtggatgtattctcccacctccgccggatccgcctcggcaaaactttccagggtagggaagcgggcgtacagcgccggggtcaccttgttcacccgctcgtctgtgcactgggcggacaggcgcaccgcaaacagcaactcgtagtcctttttatattgtaaggagcacagcccgtccgggtaaatgcccttcagtgtctcaatgatgcggttcaccgcagccttggatgtcatgtcgctcacctcggggacaggataccacagatttcgacaaaaagccagagaaaaattgccgcgtccggatgccggcgcatacgccggacgggatacaacttgacattattcccctgaaagagtaaaatctctttattattctattgtgtgaggagaaggagaatatatgacttacattgttgcgatcagcgcctatctggtgctgctcacgatcttcgggctgatcgtggcccggaagaaagtcaagacctcggatgacatggtgaccggcggccaccggatccccttcatcatcctggtgggcacactgcttgctacttggtgcggcggcggcggaatcaccggctccgccagcgtggtgtacaccggcggcccctgggtgggtctcatcacctttgcggcgccgcccatcggcatcatcctgctgtatttcatcgccggcaaggtccgcaagtccaacaaggtcacggtgccggagatcatgggcgcccgttacggcaaggccgccagcatcatcgccgccctgtgcgtcatgctggcctatgtgggcgtgctggccacccagctgaaggctgcggcggacatcatcgtgctgctgtgcgcttccagcgggattgagatctcccacggcttggccctgaccatctgcacagccctgatcgccatcatcaccgtgggcggcggtctggtgtctgtggcctattccgacgccatcagcgccctgctgatgatcggcggcttcttcctggcgattcccttcctgatcggcgtggccaactctcagggcgccactctgcctccggagaagatgaccattaccggcggtatgtccggctgggagctgctgggctacttcctgccctccctggccctgatgctgggcgaccagaacatgctgcagcggttcgcctctgccaaaaacagcgacgaggccaagaagtccaacatcggcatgttcatcggcgagatcctggtcatcatcagcattgtcctggtagtcacccaggcagccaagctgtatcccaccctggacgttccctccaatgtgatcttccaggtagcggtggactacctgcctctggccttcggtgcgctggtgatgtgcgcctgcatggccttcatcgtcaccacggcggacagctatctgctctcctctgccaccaacctgaccaacgacatctatgtaaagtacatccgcaaggatgccaccgacaagcagaagatgctggtcctccggggtaccatcattgtgttcagcttcatcgctgtggcgctgacgctgtatttccccactgtgctgtccctgcagatgacggcctacaccatgtacggcgccgccatcaccccggcgatcctgttcgccctcttctccaagaaggtgacgcccgccggcggcatggccggtatcctggtgggcggtctggtcacgatcatctggacgctgatgggcacgccctacggcatccagtgcgccattgtggcggtgcctgcctcggtgattgccatactgatcgtcagcgccgtgacccgctgcaacgatcccaagcggtctctggaagccctgtaccaggacaactgattccaggcggggcagaagagatgctcttctgccccgttttttctgtgcggtgacgcgcaaggactgaaaggaaagagaggaaccaccatggaagatccccgtatccgcaaattcgcccagttcctgatccgcagcgctgtgggcctggagaagggcgagaagatcctgattgagctccacggcagtgagaccggattgatgaagtccctggtccaggaagcctatgctgtgggcggcaagccctttgtccacatcttcgactacgccgtggagggtgccctggtccagggagccgacgcggagcacatggaggagatcgcctcctacgagctggagcggatgcgggacatggacgcctatatcgacattcgggccaccaccaatatcagcatgtggcacaacgtcagcgacgaggcccagaagcgctaccgccagtattactggggccccatccatctggcggagcggtgcaaccataccaagtggtccgtgctccggtaccccaacgatgccatggcccagctggcgggcgtttccacggaagagtatgaggacttctatttccgggcctgcctggtggactacgacaagatgggccgggccatgcagcccctccaggacctgatggccaggactgacaaggttcgcatcgtcgctcccggcacggacatctccttctccatcaagggcatccccagcttcgggatgcacggcaaccggaacatccccgacggcgagatctacacctcgcccgtgaagaactccgtcaacgggcacatcacctacaacgtgccgtccccctatgacggctttttgttccgggacgtgtatctggagttcaaggacggcaagatcgtcaaggccaccagcaacaacacggactatatgaacgagatcctggacatcgacgagggcgcccggtacatcggcgagttcgccttcggtgtgaacccggagatcaaccaccccatcggggacattctgttcgacgagaagatcgccggcagcttccacctgacccccggcaacagctacgacaatgcctccaacggcaaccattccgccgtccattgggacctgatccagatccagacgccggagtacggcgggggcgagatctggttcgatgacgtgctgatccgcaaggacggcctcttcgtgctggacgaattgaaatgcctgaatccggagaatctgctctccaaggaagaataaggaggaatctagaacatggataccgttgttgaccgcctgatccgctacgccaaggtgtacagcgagagtgactaccacgccggccgcactgtcacccccagcacggaccgccagttcgacatggccaagctgctggtagaggagctccacggccttggcatcgaaaacgcccggtacgatgacaagtgctacgtctacgccaccctggatgccacgccggggtgcgaacagctgcccgccatcggcctgatcgcccacatggacaccaccccggacatgaccggcaaggacgtgaaaccccagatcatccactacaccggcggggacgtggtgctgaaccgggagcagaacatcgtcatggaggccgcccagttcccggagctgcagaaattcgtgggtcaggagctggtctgcaccgatggcaccaccctgctgggggcggatgacaaggcgggcatcgccatcatccttcaggcggtggaggagctgctggcagagaaggctccccacggcaaaatctgcctgggcttcaccccggacgaggagatcggcatgggcgccagcttcttcgatgtatccggcttcggcgcggactttgcctataccctggacggcggcgatatcaccgactatgagtacgagaccttcaacgccgccaagaccgtggtgaccatcaacggcttcagcatccacccgggcacctccaaggacaagatgcgcaacgccctgttgatcgccatggagtacaacgccctgctgccggcgctggagacccccgcccacacggaggggtacgagggcttcttccatctgcaggagatgcacggcaaggcggagaaggccacgatggagtatatcgtccgggaccacgacatgaagcggtttcaggagcgcaaggccatgatggacaaggccgcggagcagatcaaccgccgctggggcgacggcaccgcggtggtggacacccacgaccagtactacaatatgtacgaggtgctgaaggaccacatggagattctggagctggcagagtccgccatgaaggccgccggcattgagcaccccacccattctcccatccggggcggcactgacggcagtgtgctgacctacaagggcctgctgtgccccaacctgcccagcgcgggccacaacgcccacggccggtacgagtatgcgccggtagagtccctgaaaaccggcgtcaagaccgtaaaggctctggtctctccggagctggtggagaccattatcggaaaaaaagaggggtgacatcatgtatcaggagcgaatcagccgcgtactggccgccatggaacggatgggcctggagcagatgctcgtgtccgatccggacagcatctggtatctgacagggtacgatgtgttcccgtttgaacggctgtacgccttttacctgcggaaggacggacagcacaagttatttctgaacaaactgttcccggtgccggaggcaccctatgagcaggtgtggttctccgacacggacgactatctcgccattctggcaaatgccgtggacggggaaaaagacatgggcgtggacaaggactggcccgcccggtttctgctgcccctgatggcccacaatcccagctgcaagtatgtgctggcctccgactgcgtggacgacgcccgggcctgcaaggacgcggtggagcgggacctgatgcgggaggcctcccgcatcaacgacgtggtgatggagcgggctgccgcctacatgaaagagggcatgaccgagcgggaggtggccgactacatcgtggcccagtatgccgccgagggctgtgactccactgcgttcctgcccatcgtctcctacggcgcccacgccgcggacccccaccacgaggcggaccagacccgcctgaaggctggggactgcatcgtcattgacatgggctgccggaagaaccgctactgctccgacatgacccggaccttcttctgcagggcggcggatcccaagtacgccgccatccacgacctggtgcgggaggccaacgagctggcggagtccatgctgcggcccggcgtgcccctgtgcgacctggacaaggccgcacgggaccacatctccgccgccggatacggagaatacttcacccaccggctgggccacttcatcggccagacggagcatgagaagggcgacgtcagcgccaccaacaccaccctggccaagccgggtatgatcttctccattgagcccggcgtgtatctgcccggcgaattcggtgtccgggtggaggacctagtgctggtgacggaggacggctgcgagattttgaaccacgtggacaagcactggaagaccgttggctgagtttacaggccgaaagccgggaggacggactgtcttcccggctttttggcgttttcccggtggaaatttccaatgggccatgctataatgaatgttccgagatcaacagggaagggggtgccgccatgcagcggcctcttgcggatgagatccgccccaaaacattggacgaggtggtgggccagcggcatctgctctcccccggcgccgtgctccggcggctgatcgacagcggcacggaggcgaatatggtgttctacggcccctccggcaccggaaagaccaccatcgccaacatcatcgcccggcagaccaataagaccctccaccggctcaacgccaccaccgcatccttgcaggacgtgaaggacatcattgccgacgtggggacgctgctggccccagggggcattctgctgtacctggacgagattcagtacttcaataagaagcagcagcagagcctgctggaattcatggagaacggctctttgaccctcatcgcctccaccacggagaacccgtacttttatgtgtacggagccctgctgtcccgcagcacggtgtttgagttcaaggccgtgtcgccggaggaggtggaacccgctgtcctgcgggcactgaagatcgagcaggaccgttcgcctctgcccctggactgggagcaggatgtgccccggcagatcgccaccgcttgcggcggcgacgtccgcaaggccatcaatgcggtggaacttctgtgccgggcagccatgcccagagatgggaagctgatgctgaccctggacgacgtggagcaggtggcccagcgcagcgccatgcggtacgacagaggcggcgacgccatgtacgacgccgcctccgccctgatgaagtccctccggggcagcgacccggatgcggcgctccactacctggcccgctttctggaggcgggggacctcatcaccccctgccggcggctgctgtgctccgccagcgaggatgtggggatggcgtacccccaggcggtctccattgtgaaggcatgtgtggatactgccatgcagctggggctgccggaggcccagctgcccctggcccaggcggctatcctgctggccacggcccccaagtccaacagcgtgacagccggtatcggcagggcctgggcagacgtgagggcaggccgcaccggggacgtgccccgggaactgcagaacgttcacgcggactccgccggtatggagcgggagcagggctacctgtacccccacgactttccccgccactgggtacagcagcagtatctgcccgatgccctgaagggtgtccattactacgaatacggcgataacaagacggagcaggccgccaagcactactgggacgagatcaagggtcctcagccgtgaacaccgtctccacggccggcttctcatacccggcaggggagtagacccaccggtccagtaccccgtcggtgatctgatagcgcagcggctccggctctgccaagggcggcagcttttcgatcacctggagcttgatcttcatccgctccggacggatggacttgatgtagacagagacgccgtcccccgggcgcaggtcctcccgggcgtctgccaggccggagaggttgggggccagctcgatgaagctgccgtactccttcacgctgcggacctcgccccggactgtctcgccgggatgaaaccagctggcattctccatccaggtgcccagcagctccttgtgagtcatggtgatccggcgcttctcccggtctatggaccggacggctgccagaatcttctgcccgggccggaaccgctccttcggatgggaaatgcgggagacggagatgtgctcgatgggcagcatagccacgatgccgcagccgatatccaaaaaagcgccgaaggactccagatgcgtcaccaccgcagtgaccacggagcctgggcgcaggtgctccaggaagaagtccatggcccgctcctgaacggcccggcgggagagcagtgccgtgggcgcgcccttttcatcggcccggagggccgtcacgagaaaacaggcgggctttcccacccgggagaggacggcgatgtcccgctgggccccgctgatccagggggagaggacctcctcccggggaatgcgggcctggatgcctcccagggagagaagcaggttgtgtccggcatcacaccggaggacccgatcctccagcaccgtgttctgctccatggcctcccgcaggctctggagcgtgaaagaagagggagggcgcaggccctccggcggatacagcttgttttccggcatattgtaatcgcatcctatctgccgcaacggcggcgtgttgttccataccgttactatatgcagcccgggaggctgctttgacaaggaggccaatatggacctgcatctgcatgacaaagtggagctgaagaaagcccatccctgcggcagcacccagtgggagattctgcgggtgggcatggacatcaagctcaagtgcctgggctgcgggcatgagctgatgctgccccgcagcaaggcggaaaagagcatccgcaagatcctgacggaggagggaaacaagtgagcaacaagcacagactgtttgccgcgatcctggtggtcattctggtgatttccatgctggcatcgctgattgttccgtatttatcattgctgtaaagttatttcccatcacagtatttccatgccgccggagccgcagcatttgtgctgcggccccaatcggctgccggggggacgcacctttttacagggcgcgtcccccttttgcgaccgtatttctctgcggtctgccctataatagtcccacggaacggaagggaggcggatcgcttgaccgtggtgtatgtggacagcgtgtttgtgctgaacgcgctgatggactatctgctggtgctctgcgccgcgcgtctggcgggcattcccctccggcggagacgctaccttctggcgggcctgctggggggcgcctatgccgtggcggtatttctgccggggctgggctttctctccgcaacgccggtgaagctggcggcaggcatactgctggcgctggcggcctatggaggagaggcaaagctgctgcggctgacgctgctactgttcgccgtctcctgtgccatggccgggtgcgtgctggccctgggcctggtggcggggggcggcgtgccgatggtgaacggcgtgttctacacggacgtggatgcaaaggtgctgctgaccgctgcggccgcggcctatctggttctgacagtggtgtttcgtgcggcggcgggaaagggcgtccggggcgagctggtgcgggcacaggtgtgtctggccgggcggaccacggcgtttaccgctttctgcgacacgggaaacgccctgcgggatccggtctccggagcgccggtgctggtggtgtctccggggcggctggacggtgcgcttccaagagaggtccgctctctgctggaccgcggagcgctggagcgtcccgcagagctgctggagcccatgatgcgggcggcgccggagctgcggttccgtctgatcccctaccacgcggtgggagtggcgggcggactgctgctggcggtgcgcagcgactggacggaggtggcgggggagcggtatgccggactgccggttgccttttcccccacagagctggggacgggatacagcgccctgtggggcggcacggctggaaggagaagaaaccatgaaggactggatgaaacaatggcggcggctgctggtgcgggtggggctgctgccgccggcggagctgcactacatcgggggcagcgacaccctgccaccgcccctgagccgggagcgggaggcggagctgctggagcgcatcggggaggaggacgcccgcaaggagctgatcgaacataatctgcggctggtggtgtacattgcccggcggttcgagaacacgggagtggggatcgaggacctgatttccatcggcaccatcgggctcatcaaggcggtgggcacctaccggacggacaagaacatcaagctggccacctatgcctcccggtgcatcgagaacgagattttgatgtacctgcgcaaaaatgccgggcggaagggggaggtgtccttcgacgagccgctgaacaccgactgggacggcaatgagctgctgctctccgacgtgctggggactgaggcggacgtggtgatgcgccccatcgaagaggatgtggagcgggacctgctggcggcggccatcaacgttctctcgccccgggaaaagcagatcatcacgctgcggttcggcctggggggcggaaaagagcagacccagaaagaggtggcggaccagctgggcatctcgcagagctacatctcccggctggaaaagcgcatcatctcccggctgaagaaggagatcctgcggctgagctgacgcttgacaatcgaaccggggtatactatactaaaataaaatatggtaaactgcgaggaagggaagcagtatccggtgggcagcggccaagagagagaacggctggtgtgagttctcccaaagccgccggagaagtcgtcccggagcaccggagccgaagcatcagtaagccccggcggaggcccaccgttgacagggcaggcgcaaatgcgccgcagagtgcgggttttcccgaatccaggtggtaccacggacatttgttcgccctgagccgaaaggcccagggcgttttgctgtgtaagcgcgcataaagcattctgctggagctgagctgcgatctggtgaacggcagggcggtgcggaccggcgccccagtcatgacaaaaaggacgaaagttcagagaataggagagatcgaacgtatgatgaaagaactgcccaaggtgtatgaaccccaacaggtggagtcccgcatctaccagatgtgggaggacaacgactgctttaacggggatccggatcccaagaagaagcccttctccatcgtcatgccgccccccaacgtcacgggccagctccacatgggccacgccctggactgcacattgcaggacatcctgacccgcttcaagcggatgcagggctactccacgctgtgggtccccggcaccgaccatgccggcatcgccactcagatcaaggtggaggaggaactgcgcgtcaaggagggcctgacccgctatgatctgggccgggagaagttcctccagcgggtgtggaagtggaaggaggagtatggcaaccgcatcgtggagcagcagaagaagatgggcgtctcctgcgactggagccgctcccgcttcaccatggatgagggctgctccaaggctgtgcgggagaccttctgtgagctgtatgacaagggcctgatctacaagggaagccgcatcatcaactggtgcccccactgcatcaccgccctgtccgacgccgaggtggagtatgtggacaagcccggccacctgtggtatatccgctatcccctggccgacggcagcggcgatctggtggtggccaccacccgtcccgagaccatgatgggcgacaccggcgtggctgtgaatccggaggacgagcggttccgtgatctggtgggcaagacctgcatcctgcccatcatgaaccgggagatccccattgtggcggacgactacgtggagctgggcttcggcaccggcgctgtgaagatgactcccgcccatgaccccaacgacttcgaggtgggcctgcgccataacctggaggtcatccgctgcatcggcgacgacggcaggatcaacgagaacggcggcccctacaatgggatggaccggtacgagtgccgcaagcagatcgtcaaggacctggaggagcagggctatctcgtcaagaccgagccctacaaccacaatgtgggcacctgctaccgctgtcacaatgacgtggagcccctgatctccgcccagtggttcgtgaagatggagcccctggccaaggaggccctgcgggtggtccgggagggcgaggtgaagttcgtgcccgagcggttcgccaagacctacaccaactggatggagaacgtccatgactggtgcatctcccgccagctgtggtggggccaccagatccccgcctggacctgcgacgactgcggccacatcaacgtctcccgggaggaccccaccaagtgcgaaaagtgcggcttcacccatctgacccgggacccggacgtgctggacacctggttctccagcgccctgtggccgttctccactctgggctggccggaaaagaccgctgatctggacttctactatcccaccagcgtcatggtcaccggttacgacatcatcttcttctgggtggcccggatgatcttctccggctgtgagcagatgcaccagatccccttccacaccgtgctgatccacggtctggtgcgggacgacaagggccgcaagatgtccaagtccctgggcaacggcatcgatccgctggagatggcggagaagtatggcgccgacgcgctgcgcttcaacctcatcaccggcaactccccgggcaacgacacccggttctacaccgagaagtgcgaggctatgcggaacttcgccaacaagatctggaacgccagccggttcgtgatgatgaacctcaccatcgacaagtgtgaactccctgcggcggacgccctggcgccggaggacaagtgggtcctctccaagctgaacaccctggtgaaggaggtcacggagaacctggacgcctacgagatcggcgtggcctccgccaaggtctacgacttcctgtgggatacctactgcgactggtatatcgagctcaccaagacccgcctccagggagaggacgagggggccaagctggcggcccagaatgtgctctgctttgtgctgacggagcttttgaagctgctgcaccccttcatgcctttcatcacggaggagatctatcaggccctgccccacgaggaacaattcatcatgacctcccggtggcctgagtaccgggcggacctggccttcccggaggaagaagccgcaatggaggccgtcatggacaccatcaaggccatccgggcccgccgggcggagatgaacgtgcccccttcccggaaggcggaggtgctgatcgtcaccgccaccccggacgtctacgcccagggcaggcacttcatccagcggctggcttatgccagtgaggtgaagttcgcggacgccgccccggcggatgtgtccggcatggtgaccgccgtcacccacaacgccacggcctatctgcccctcagcgagctggtggacatcgccgcggagctggagcggatccgcaaggagatcgagaaagcccagaacggcctgcggggcgtcgagcagaagctctccaacgagaagttcgtctcccgggccccggaggcggtggtgaacgccgagcgggagaaggccgccaagtacaaagagctgatcgccaagctggaggaatccgccaaggccatgcaggcgtaagtcccggctgaaggagaacgtaaccccccacgttccaaaacagaatgcaggggcggcggtcagagcccggaccaaaggcccggctctgacc

SEQ ID NO: 4894 - DNA, 53047 bp, Unknown
  gut microbiota DNA sequence
gcgggcaacgaggctcgaactcgctacctccaccttggcaaggtggcgctctaccagatgagctatgcccgcggaacaaggggtattctaccagagaaacacccgcttgtcaagactcttctgcaagattttccgaattttcttccgcagcagccgcggcgtctccgcccatcacaaactcgatcagccccaccggaccctgtgccggataataggagatcgtccagggcggcgtctctgccagacctcgcgcctcccggagctgtgccaccgtctcctccacccgggcctggccgtcctctccccaatagccgacccggaccgccagctccgtgcggccctcgtccagcgccgcctccagcagggcggacagcgcctccgtactggtggcgttcaccaccgcctggatctgctccgccgtccggcggtagctgacctggatgctgatctcatagtacccccgctgggaccggctggaggcggtgatatactccacggcataggcgcccataggcgtctcctgctggacctccgtagtggcctgctccagtgtgtccgccaccgtcagatcgtcctcgtagttgtagaggcggaccgtggcgctctccgtgtgctggccgatgaggatcagcaggtcgttcacgatgtcctggtagttctccgcccggagagtcccggcggcctcgctctcccagaacttgctgctgtggggctccacggtggcatagttccgctccagcagggcgctgcaccccgtcagggacaggctgacgcacaggagcagggtgagatggcgcatcttcacggctcggcgcctcctttccggtcagaatggcccagggacgggcaggggcgcgcttacagccccaggtcctcgtccaccagcaggacctccgtctccatgcccagcataggcccccagagagtcaccaaggcgcggcagacccgctcaggactccggcagtcgtagcagcggtccgccttcacggcgcagggcgtcttcttccccagctgccgggcgcgctggggtgcagccacgttccgggcccggtacaccgccgcctcgtaggtgggggccagcttgttccggccgatgacaaagtacaccttctcatggccgaacagcgtagcggacacccggttgccggtgccgtcgatgttgacgatctcccccgactccgccaggccattggcagaggacaggtacacctgggtctgcatggccgccttccgggcggcgttcgcctcctgcttccagtgccagatgacggtgttgtgggccgccagcttgtcgtacacccccagagcgtccagggtggcggagccgccgaagcccacggtcttgccgtcgatggcgccgtccaggtaggccgcggcctccgccgccgccgcaaaggtgcgtacggtgtagccccggcgctccagggcctgctgaaccttcgtgaaatctgtcatgtcaaatttcctccttctgataatccccaaatccctcgcccaggatctcatgggcgtcgcacacgatgaaaaaagccttcgggtcgatctcccgcagcatccgcttgatgggcacgatctcccgctgcctgaaggccaccagcagtacctgcttctccgcgccggtgtatgcgccttttccctgaagcagcgtcacgccccggttcatatccagcagtccctggaccgtctcctcccaccggtcggtgatgatgtaggccacacgagaggtatcccacccgtacaggatcatatccatgaccttggacagcagatacatctgaatcaagccataaagtgccgcgttgacggtgccgaacaccactgcagccaggatcaccaccaccatgtccgggatcatcaccagcttaccgatgggcagccaggggaatttcagcttcagcagcttgccgatgatatccgtgccgcccgtcgtggccccctgggagaataccaatcccagccctacccccatcccggcgccgccgtacagggtcgccaggatcgggtccatcggggggaaggtatgcatccatgcaatcacgtcaatggccaaggaactgactgccatggcgtacaggctgctcaccagcaggcggcctcccagcagccgccagcccgccagaaacagcggcacattgacaaggatggacagcactcccaccggcaggaccggcaccagggcgttcacgatctgggccagacccgtcacgccgcccatggcgatctggttgggggctacgaaccagtcaaatgccagggcgtagatcactgcccccagcgtgatgataccgcagctcctcaccttctgcgccatagatctactccttttctatctgattcagtccagcagatccatctgccgctcctcggagtcctcctcccgcagcagggcgcccgccgccgggagactgcgcacccggtagcggctctggttggtgatgggcgtgtcctccagcgccttcaccgtctccagctggtactttggcttcagggtcatcaccgccaccccctgggtggtgcgggtggtcttgggagccagcagagcggtgtggaaaatcagcgcccggggctccgtggagtacaccgccagctcgcagtctgtatccagcctgcggatacaggccaggggcgccttgtcggagtaggcccccgtcagcttgcggcggttggaggtggtcttgtaggcggtcaggtccacccgggccgccttgccgtttgcaaagaagaacagcagggccccggcgtagtccggtcccggcaggacggcgcagatcacattctcgccgctgtccatggagagtttcgcgggcagatagtcccccaaggcgctggccttggtgtcttcaaactcgctgaggcgggtcttgtacacctggcaccggtccgtgaagaacatgatctccgcgccgttggtggtctcaaaggtctgggacaatccgtccccgtccttgtacttctggtccgccgccattcgcaaagaggcgggggtgatcttcttgaagtacccctccctggagaggaacacatggacggagtagtcctccacctgagcctcctccacataggtctcgatctcgtggctgtacacgatggaggttcggcggggctcgccgtatttcctggccgcctccgtcagctcgtccaccaggatctgcttcagccgccggggggagttcagggtgtcctccaggtcggcgatctcgtcctggagggcgtcggtctcgttgacacgcttgaggatatactccttgttgatgttgcggagcttgatctccgccacgtactccgcctggatctggtcgatgccgaagccgatcatcaggttggggatgacctcggcctcctcctctgtctcccggatgatttggatggccttatcgatgtccagcaggatccgcttgaggccctttaagaggtgcagcttgtcctgtttcttcttcatcacgaagtagacccgccgccggacggacccggtccgccaggcagtccactcctccaggatctgccgcacccccagcaccttgggagtaccggcgatcagcacgttgaagttgcaggcaaaggcgtcctccaggggtgtcagcttgtagagcttggtcatcagcttgtccgggtccacgccccgcttcaggtcgatggccagtttcaggccggagaggtccgtctcgtcccgcatgtcggcgatctctttcgcccggcccgccttgatgagctccgccaccttgtccaggatggcctccacggtggtggagtaggggatctcgtagatctcgatgagattctcctctttgacgtagcggtacttggcccggacccggacgctgccccggccggtctcatagatctcccggatggtgttccggtcgaagatcagctctccgccggtggggaaatccggcgccagcagggtctccatcaggtcgcagtccgggttcttcagataggcgatggtggtgtcgcagacctccttcagattgaacccacagaactgggaggccatgcccacggcgatgccgctgttggcggacaccagaatgttggggaaggtggtgggcagcagggccggctccttcatggtgttgtcgtagttgtccacaaagtccacggtgtcgctgtcgatatcccggaacagctcggcgcagatgggcgtcagcttggcctctgtgtaccggggggcggcccaggccatgtcccgggagtagaccttgccgaagttgcctttggaatccacaaaaggcgtcagcagggcgccgtagccccgggagaggcgcaccatggtgtcgtagatggcggcgtcgccgtgggggttgaggcgcatggtctggcccacgatgttggcggacttggtccgggctcccgtcagcagacccatcttgtacatggtgtacagcagcttgcggtgggagggcttgaacccgtcgatctccggaatggcccgggagacaatgacgctcatggcgtagggcatgtagttggtctccagcgtgtcggtgatgggctgttccaccaccgccgcgtgaaggccgatgacgttggacgcgtctaccttatgcttgttgtcgtcggtttttttctttttgggcaagtgtaatcagtccttatcttgtatccatttcaaggggttgttgcggatgtactggcgaacattggctaggtcctcgtcattgcggatcacatggtcataaaagcccttctgccaaagagaaatgcccgcttacttgctggtgatccgcttcatctgctggatgacgttcgacagcggcgtaggggcggcaatctgccgctcgtccggcccgatgtgccggagtgccaaaatcaaatgcacatggtccggcatgatgatatattgatctaccgatatgccggggtagtgatccgggatcgctcggatggtttcatccacgatccgccccagaggtgtcagggagattcgaggcgggcgattgataatcgcccctacggcgggttcgatggaacacaggacctcctgattccgctccctggtgcagatggtgatgaaataagatcccggctggctgtaatcataggactccagccgcaggcgcttccgctgggggcgttccatggcatcctctccgctatccgttgattgggagtgtattttccgttgtcgaaacagagggtgctttctgtcccaacggctacgcatttattaacccaaacagccaaaatacttgaaataattcacgtattgcgcattttccgaaactctagtatgctgtattcataaaattcaaaggaggctgctccatgaatgagacctataaatggctgtatgactactacgccctgccgttgatgaaagtcggcaaacaggcggatgcgctcaaagagcggatcgtctcccacggcagccctgcggacgcgctgttcctgtgggaccggctggaagacctgtgcctgctgtggggcacggagtcctttgccatcgggctccaactgggcctgcggctcatggcgggccagcgggcggacgggctgctgatctcataaaactctcacgaaatatccgccatctccaggtacttgtacccgttctccgcaatatggtccttccggccctggaggttgtcccccagcagcaggtcgaacaccgccgccgtctgctccacgtcctccggcatcacccggatcagccgccgggtctccgggttcatggtggtcagccacatcatgtccgggtcgttctcgcccaggcccttggaccggtcgatcttgtacttcttcccctccagggatttcacgatgtcgttcttctccttgtcggagtaggcgaaccacgtcttgtcgccgctgttgatctcaaacaggggcgtctccgcgatatacacgtacccctcccggatcagggtgggggtcagccggtacagcatggtgaggatcagcgtccggatctggaagccgtccacgtcgccgtcggtgcagatgaccaccttgctccaccgcaggttgcccaagtcaaagggcgccacgttcttcacgtgcttgttctggacctccacgccgcagcccaggaccttgatgaggtccgtgatgatctcgctcttgaaaatccgggcatagtccgccttcaggcagttcaggatcttgccccgcaccggcatgatgccctgatactcggagtcccgggccagcttcacgctgcccagggcgctgtcgccctccacgatgtagatctcccgcttgtccacgtccttggtgcggcagtccacgaacttctggacccggttggcgatgtccaccgagccggagagcttcttcttcacgttcaggcgggtctcctccgccttctcccggctgcgcttgttcagcagcacctgctcgccgatcttctctgcgtcaaaggggttttcaatgaagtagatctccaggttgctgcggaggaactccgtcatggcctcctggacgaatttgttggtgatggccttcttggtctggttctcgtagctggtctgggtggagaagttgttgctgaccagcaccaggcagtcctcgatatccgcccaggtgatcttgccctcgctcttctggtacttcccctggtcccgcaggtacttgtcgatggcggagacaaaggcggacttggccgccttctccggagagccgccgtgctccagccaggaggagttgtggtagtgctcgatgacgttcaccttattggaaaagcagcaggccacgctgagcttcaccttgtactccggcttgtccgcccggtcccggcccttcttctccgtctgccagaacaccggcgccgtcaggctcccctctcccgcaagctccgtcacatagtccatgatgccgttttcgtagaggaactccgcctcttcgaaccgacccggctctgtctcgttccggaaccggaaggtgaccccggcgttcaccaccgcctggcgcttcatcacgtcggtgaagtactccgccgggatggcgatgtccgtgaacacgtccaagtcgggaagccagcgggtgcgggtgccggtttttctggcctggctcttgggcaggggcgtcttccccagttcccccacgatctcgccccgctgaaagtgcagggtgtattcaaagccgtcccgccagacggtgacgtccatgtaccgggaggcgtactgggtggcgcaggcacccaatccgttgagccctaaggaatattcgtagttgtcgccggagacgttgtcgtacttgccgccggcgtacagctcgcagtacaccagctcccagttgtaccgctgctccttctcattccagtccaccgggcagccccggcccgcgtcctccacctggatggaccggtctgcaaaccgggtgacagtgatggtccggccgtggccctcccgggcctcatcgatggagttggagagaatctcgaacaccgcgtgctcgcagccctccagtccgtcagagccgaaaatgacgccgggccgcttccggacccggtctgcgccctttaatgccgaaatgctgtcgttgccatagtcctgcttcttggttgccattaagttcctccaaaggcagtgtctgccgtaaaattcataaatttattgtagcacacccggcgctgtccttcaagtgctcccccaaaagacgccgtgatcccgcccgcttcccgactcttcacacaaattttacaaaaatgttattgcgtaaaatttctcataacctggccgtcacccagctcaatgcccttttcatcggggttttgcacattctccacagagttttccacaccgttatgtcaacttttgaaatacgaaaaaaataccgcgccgcgcacaccccggccggacgctccgtttttcggatcagatgcttttacagagcgccttttcagccagccggatacccggaatttttttgtagttgcaaatgcaatatatgcgcacatttggatatgctaatatattgccagaagaaatccctctccccttgaaagtatttcaaaaaacggaaaaaggagaattctatatgaagttctatatctgcaaacattgcggcaatgtcatcaccaagctcacctccgcccaggtgcccgtgaagtgctgcggcgaggagatgcatgtgctggaggccggtgtcaccgacgccgcccaggagaagcacgtgcctgccgtcacggtggagggcagtctggtgaaggtggacgtgggctctgtcacccatcccatgaccgccgagcactttatccagtgggtggtggtggagactgagcgggacgccctgatccactggttccacccggaggaggcgccggaggccgtgttcaccctggcggagggccagactgccaaggccgtttatgcctactgcaacctccacggtctttggaagaaggacctgtaagctgcgagacaccagaccgccccggcgctgcacagcgccggggcggtcttctgacttttgagatcggatatatttaggatataggaagcctctgtgggtgcagcatccccaaagcgggacggcatggcattcccgcttcagccgagcagcaccaggaccacgccgtaaatcaccgaggccagggtgccgaacacgatcaccggcccggcgatcaggaacatcttggccgccatgccagtgacgaatccctcgctgcggaagtcgatggccggtgagaccaccgcgttggcaaagccggtgatgggcaccagcgtcccggcgccgccaaagcgggccagcttgttgtacaggttcagccccgtcagcagggcggagagaaacaccagcgtgcaggaggtggcggtgcccgccgtcttttcctccaggccggcggcagtccagccgttcaggatcagctggcccaccacgcagatggccccgcccactacaaaggccaggaccgtatccttcagcagcggcgacttgggggccttctgcttcacatactgctggtattcctgcggcgtcatattcattgaaaatcccctccaggccattttcccatagggtctcctgcttgttcggaaactatacgcacttgcaaacctgcgcggaagggagtacactgttgcccgaagatttgtgtgtttggaggaatccccatgagacccatgcccgccccgctgggcctgtatatccacattcccttctgcaagagcaagtgcgtctactgcgacttctactccctgccccggtccgagagccggatggacgactacacagatgccctgtgcgcccatctggcggagaccgcccccttcgcggcgggccatctggtcgacaccgtgtacttcggcggcggcacccccagctatctggggaccaagcgactggtgaagatcctgaagaccattctgaaaaaatacaaggtggacaagcaggcggagatcaccctggaggccaatcccgactccgccggggactggaaagagctgcgcaccctgcgccggtgcgggttcaaccgcctctccctgggaatgcagtccgccgatgacgaagagctctcggagatcggccgggtgcacaccatggctcagacggaagccgccgtggaggccgcccggaaggccaagttccagaatctctccctggatttaatttacggcctgccccatcagacgctggaggggtggcagaaaaacctttccgctgccttggacctgacgccggagcatctctcctgctatgggttgaaggtagaggagggtacgcccctttttgcccggcgggggaccgcgggtctgccgggggacgacgcccaggcggacatgtatctctacacggtggagttcctgaaggcccagggctatgagcagtatgagatctccaacttcgcaaagccgggctgcgcctcccggcacaatctgaaatactggaccctgggggagtacgccggcttcggccccggcgcccactcggacttcggcggcgtgcggtacgcctacacaaaggatctggagggctatatccggggcgtgcgggaccacgcccccatgctgtcggagagcgaccgcatcccacccctggaccgggacaccgaatgggtaatgctgggcctgcggaccacgacgggtttggaccccaaggcatttgagcgccgcttccgccgccggttcacctgctttctgcccttcctggaccagtgcgccaaggccggctatgcggtggaggaggacggccgctggcacctgacgccccggggctttctggtgtccaaccagatcatcggtgggatgctggatgccctggccgcggacaaacagcggcaggccgatgccgccgcccggggagatttccgggtgaacctggattgaatgaaaaaagccgcccgctggaatgctccggcgggcggttctttctcatgccttccgggcccggatggcattgaccgggcagccgttggccgcgtcgaaggcccccgcctcctccgccggggtccggggctgggcctgcaccacggacacccgcccctggatctgaaacacggccggcaccgccgccgcgcacatcccgcagccgatacaccgggaggcgtccacattgactgtcatgcgcttcctccttttccgcgggctgcgcccgctgttcccttttattgtaatacaccgcgccggtttctccaagtcttttctgcggcgggcggaacttttttcccgcagacgccgtcttgtatttgggagactctgtgcaatctggtggattttgttgccccattcccatttacttttccgcctgtttatgctattctgaagaggattatgtagaccatctcagctgcagcttatggaggtatgacatgaaaaacaccctgcgcaaaaccctgtccctgtttttggcgttcacgcttctttgctccctgggcctcaccgccgccgcgtccgaggccatgggcgaggacctgacctccaagggcactcttttgaaccagaagacccagctctctaccaatgtgttttggagtactgcgtactccgacctgcggacggagaacgtcgtcacatacgagcccaatgcagatgtgacgcccatcgtcaccttcggggactccctgaccacccgcaccacggtcacctctgcggcccgggcactggagagccagggctaccgggtggcggcgggcatcaacggcgacttcttcaacacctccaacggcctgcccatcggcatcctggtgtcggagggagaggtcctcagcagcgacggcggctactacgccatgggtttccggaaggatggctctgctgtcatcggcaagcccggactctccatctccgccaacctgggctatcagggttcggacagcagcgggtacttcacggacatcatccgcacggtggccggcatcaacaaggcccgggtctccaccggcggcatctacctctatacatacgacttcaacaacaggcacaccaccggcaataccgaggccggcgtggacgtgctgtgcaccatcgtggacggctccctctccatcggcggcaccatgacgctggtggtggaccaggtgatcgaggccacctccgcaacggccatcgggccggaccagattgtcctctccgccaacgccctctccaacacctactacaccgacgccctgcggaacatccctgtgggcgccacggtgaccgtcaccgtctccgccgccaatgaggcgtggaacgatgtgcagtacgccgtgggtgccttatactccctggtgcaggacggcgccgtggtctccggtctgccctccggggtgaacccccgcacggcggtaggtgtgacagctgacggcaccgtggtgttctataccatcgacggccgccggtccggccactccatcggcgccagcctgagccaggtggcccagcggatgatcgagctgggctgcgtggccgccatcggcctggacggcggcggctccaccaccatcaccgtgacgcagcccgacgacaccaccgccgctaccatcaaccgcccctccgacggcagtgagcgggcggtggccaaccacctgttcctggtggccaccaatgagcccaccggcgaactgggccacttctacgtccaggcggacaacgcctacgttctggcgggcagcaaggtagagatctccgccgccgccgtggacaccaactacatccccatggacgaggactatgactacgacctggaggcctccgacggggagctggacggcaatatcctcaccaccccgaaacggggtggtgagatcaccatcaccgcctccagcggccgcagagaaggctctaccaccgtctacgccatcgaggatcccacggacgtggtgatccgggacagcagcggcaccgcgctcaccaccctgaatgccgccaccggcaccaccacccagctggccgccaccgccgcctacaaccacatctccctgaaggcagatccggaagccttcacctgggaggtcaccggcgacatcggcacggtggatgagcacggcctctttactgccgccgcgcccggcaccggcaccatcacggtctccgccggccgggccagagtctccatccccgtcaccgtctccagctccggcacggtctccgccggcggcgtcatggaggtagagtcctttgagggcagcaccaccatcttccgcggaaacggcggcggactggacttcagcctgaaccacagcgccgacactgtccggctgggccggggttccgcccgggtggactacaccctcaccgaggccgacggcggcttcggcgccggggcctatacctcccagtggcgggcggtcaagagcaccgtcatcgaccgctccacgtacaatgccctgcacatgtgggtctacggcgacggctccggcaacatcctctccctgctgtgcagcaacggcacgaagggctatctgacgggcggcagcgtgacgctggacttcaccggctggaaacaggtgaccttcgcgaacctgggcgactggtatgagatcttgggcctgcaggtcagtgtccccgccaccgccgccggggagggtctggtgtacgccgacacgccccggaccggcaccatctatatcgaccacatcaccgccaccgcctccggcacgccggacaacgcggcgcctgtggtctctgcctccctcgacaattccctctggcaggtgaccgcctcggtcgccgacgcggtggatggcatcctgccggcgggcagcgtcaccgtcacctacaacggcgccccctacggcagctatgatcccgccaccggtcttgtgaccgtggccctgcccggccccggggagagccacgaggccatgcggatcaccatcaccgcccgggacctctccggcaacatcggccgggcctccgtggatgtggagccctacggcgtggaccacaagttcacggacatcaacgactactgggcggccacctatgtggacttcctgtacaacgccaatatcaccaccggctatgccgacggcaccttccggcccaacgacaacatctcccgccagcagttcgcggtgatgctgtatcgctacctggggctggacggcacccagtatgagagcgtgacgctgcccttcgcggacaacgcctccatcggggattacgccctgacggcggtgaaggccctgtacaccgagggcatcatcaacggctccaccggcagcgacggacggctgtacttcaatcccggcgggtccctgacccgggcccaggccgccgccatgatcggccgtacccaggagaagggctacgccattgtcgagctgaccttctccgacactgcctccatccctgcctacgccacctactacatccagaccatggcggcccagggcgtcatcagcggctatgcggacggcacgttccagcccggagccaacatcacccggggtcagatggccaagatcctctacaacctgatgtgagtttcgcctttcagaggccggcgcatccgcgccggcctctccttatggagagcgtcttttcggaatctgccgggtgctgcaaagcgctatcgactccaatcccctgtgatttcaggaaagggtctcccccggggcccgtccaggcaaatgccgccgggcacagcccttcccggtcggcctctattcaggcggccagggctgtccggtgaagccggaagatggaaacggtgcctgttgacagctcctgccccagggtgtaaagtaatcatattccacatcctgtccgcggacaggatgtctctttgcgaggaggccccccatgaagctgagacgttccgcctgcattgacacgctgtacctggagctgcccttcctggaccggttccaggcggcaaaggaggacggctttgacgccgtggagttctggagctgggcggaccgggacctctctgccgtcaaatcggcatcagatcgggccgggatccctgtctgcggcttcaacggggacgcggacctctctctgatcgaccctgcccagcgggaggcgtatctggcctttctgcaccgctctctggaggcggcccggttcctgggcgcctccggcgtcaccgtccactccaacggtctggggctggggggcgtggtgctggcgccccgggaggacctctcccacacggtgaagctctgctccctgtacgcgggccttgccgccagcgcccgcctggcggaggaggcaggcgtcaccctctatctggaaccgctgaacatctccacagaccaccccggtaattttctgcgggacacgcagacggcggcggagctggtacgcctgatcggctctccccgcctgaaggtcctgtatgacatctaccacatgcagctgaacgagggccgcctctgcgacaccatccggcagtacgccgataccttcggccatgtccacgcggcagacgcccctggccgccgtgagcccggtaccggggagatcgccttcccccgggtctacaaggcgctggaggccgccggctacacagggctggtgggctatgagctgtttcccgcccgctccacccgggaggctgtaaaggccattctggacgccggctgacacgttgaccggtaccccctgtattctgcgaaaaaggacggatccaacaagatgcactccataaaaatcgctctctcccgctatggctggttcactgccggggtcctgctgaacgccttcggcgtggccctgattaccaaggccgcgctggggacctcccccatctccagcctgccctatgtgctgagcctccgctttcccgtcacgctgggacagttcacttttttgatgaatatgctgttcattctggcgcaggtcctgctgctgcggaaggacttccgtcccgttcagctcctacaggttgctgtgaatgtggtgttcagcctgttcattgatgtgagcatgggactcctctcctggatggaggtcggtgtgctgcccatgcggctgctggcgctggccgtgggctgcgccgtgctgggcttcggcatcagcgtcgaggtggcgccccgggtgctgatggtccccggcgaggggatcgtccaggccatcgcagtcgtcaccggccgacagttcggcaatgtaaagacggctttcgacgccacgctggtgtccacagccctgctcctctccctgctcttcttccatcagctccagggcctggagatcggcaccattttttccgcactggcggttggccggttcgtgaacctctataaccggagactgccgctgatctcccgcatctccgccctgggtgcaagaacctgaaaaatcagtgttgcatcccttccgttgttatggtatattagcagataagtaagttggcctgccggccaggaaggatctgtgaacccgcgtggacgaacctccgttgcccacccatacataccgaggtgtctttcagaaggacagtctgccccaaggggtgagactgcccttttcgcgttttgggcctcagggatccgctgatttttttgaggagtgatgatttttcccatggacagttccactatatcaatgaccgtggccatcgtcctgctggtgatgatgtcggcctatttctccgccacggagaccgccttctcctgcctgaacaagatccggatgaagagccgggcggagtccggcgaccaccgggctgctcttgccatggacctggtggaggactatgaccggctgatctccaccatcctcatcggcaacaacatcgtgaacatcaccgcctccactgtgggcacagtgctgttcaccaagctgtatgcggcttacggccccaccgtctctacggtggtgttgacgctggtggtgctgatcttcggcgagatttcccccaagagcctggccaaggagcacgcggagagcttcgccatgttctccgcgcccatcctgcgggtgtttctgctggtcctgcggccactgaacttcctgttctcccagtggaagcggctgctgaacatgatcttccacccctccgaggaccagggcatcacggaagaggaactaatcaccatggtatccgaggcggagaacgagggaggtctggaccagcacgagagccagctgatccgctccgccatcgagttcggcgacctggaggccggggacatcctgacgccccgggtggacatcgtggcggtggaggactctgcctccatggaggagatcgccgccgtgttcgctgagagcggctactcccgcctgccggtgtaccacaaggacgtggatgacatcgtgggcgtgatccatgagaaggacttcaacgccgcccgctaccggggccagggcaacatctccggctgcatcacgccggtccactataccaccgccaatgcggacctgggcctgctgctgcggacgctgcagaaaaaaaagacccacatggccatcgtggtggatgagtacggcggcaccgagggcctgctgaccatggaggacatcctggaggagctggtgggcgagatctgggacgagcacgatgaagtggtggagtccttccgcaagcagagcgacggcagcttcctggtggccgccggcgccgacctctccgacttgtacgatctgttctccatcaagggggactgcgacgccagcaccgtctccggctgggtgatcgaccagctgggccgcctgcccctggtgggggaccacttccaggcggagggcctggacgtcactgtgaccatggtggaccaccgccgggtgctggaggttcgggtggccgtggcggcggaggcgccggagaccgcggagggcgcggcacagcactgaccggacgaacccgccgcccgtcccgccagagccccggcgggacgggcggctccctcatttgaaaccggaggtcttatgtacgtctattccctgggacagtggctgctgttcttctttctctactgctttctcggctgggtgtgggaatcctgctacgtctccgccaagcggcgccagtgggtgaaccgtggctttcttcacggccccatgctgcccatctatggcaccggcgccgtcatcatcctgctggccaccatccccgtgcgggacagcctgtggctggttttcctgctgggcatgctggccgccacggcgctggagtatgtcaccggtgccgccatggaggccctcttcaaagtccgttactgggattactccaagcagcccttcaacctcaacggctatatctgcctcaccagctccctggcctggggcgccttctccatcctgctggtgcggtttctgcacccgcctgtggaggatctggtgctgcggctgcccgccttcctggtggatcctctggcgttcctgctgaccatcgccgtcaccgtagacgcagtccggtccttccaggccgccatggacctgcgggaggtcctcacccgcctcacggaggagaacgaggacctgcgccgccttgccaagcgggtggaggtgatctccgcctttgcggaggaggacctgcgccgcttccgggagcgcacggaggtggagcggctgctccggcaggagcgctgggaggacacccgccgccagattcaggaggcctatgccaagggcgcccgacgccgccaggcccagctggaggagtccctgcgccgccggaccgatgccaagctgacggcccttgccaacatccaggaggctctggaggcctaccgggaccggctggcagttgccagggacctgacagaggagtctctggaggcccgccgggcggaagtccagcagcttttggaccgactccgggaccgggaagcttccatccgcgcccgcaccgccaggcgttatcgccagtccctgcgcatcctgcggggcaacccctccgccagcgccaaagcctttgccgaggccctggagtccctgcggaagctgggggatcgccgggagggggaggacggcgaatgaggaaagccggcgcagcagcccctgctctgcagagcggtcgttggttccatacggagcggacgtcccttcttttcgtgtccccttatagcaattctccatctctgtctgaaccgacgatcttatacaaacaaagcggcacagccttcggctgtgccgctttgtcgatcaggatggcagcgtggacttgttctccgcagcgggcgggtccgcggggaaatccagaatccgccggatgcacagggcatagactgcgatgctcaccaccggccccgcgatgtcggagatgggttccgcatagaatgcggcccgggcgccgaataccgccggcagggcaaacagggcgataaagtacaccgccttccggaaggcggacaggggcagggccagctgtacctttcccatgccggtgaatccgtccacaatggcgtactgcagccccagggggatcagggccagggtgcagatgtggatggcggagagggcctccgctgccagctccggctccgtggtgaagaggcgcacgaagagagctccccccagacgggccagcagaaacagggccgtcacataggccacgcacagtccggcgatgaatgcctgggccttcaggatccggtcccgccgccgggcgccgtagttgtacgccaggatggtgcctgtgccggcggaaatgcctcccaggggcatggtcaccaccagcatgaagctctgggcgatggtggcgcaggtcaccagacggtctcccagctccgccccgccataggactggaggatggcgttcatggagataatcatgatgttgtccacgccgatgatgaggaagggcgtcatgcccaccgccaggatgcggagcatcagccgcccgtcgtaaccgccgaaagtgatggcgatgggcacagacttgccgaagaggaaccgcagtacatagaggcagctaaccagctgagagaggaccgtggccacggcagccccagccacccccatgtcaaagagaaagatgaacaccgggtccagcacgatgttcagtgccgcccccagcatgacggagatcatgcccttccgggcgtagccctggcagatgatgaactggttcagccccagagccagcaggttgaacaccgtcccgcagagatagacggtgaaataggtattggcgtagccgtaggtggcatcgcttgcgccgaaggccatcagcatgggctggcgcagggggaacacccccgccatcagcgccacggagcagacacacagcatcagaaagctgttggagaggatccgccgggcctcctccgttttacccgcccccatgcggatgctcatgagcggcgcgccgcccacgccgataagagaggcgaatgcgccgatcagcgtcaccaccggcccgcagacccccacgcccgcgagagcggtctcccccaccaaggggatgttgctgatgtagatgcggtccacgatgctgtacagcacgctgacgaactgggccagcatactgggtatggcgatccgcagcaccaggggccggatggcgtccgtgcccagattgttctccagcttcatagcaggtctctcccaaaacacacaaaaatcgggctgtccgcaccggacagccctctcattataaagacacgggattcagtttgcaacccccgattcgccccggaggatagcggagagctgttcgcacagtgcggcggcctgcccactgccaaaatagccgatacggaccacccggccgttgaccctggctttgccggtgccgttggagacggaaagcttccgctcaaggtccccgctggcatccagatccacgatgatgtcgccgatctccgaaataacgtctgcgactgtcagtgtatcccagcagaaatgataggtgtactgatccaacagctccaggattgcctctgcctgttcgctgtccgcagagacagtatagctctcagagtctgtctggctctgcccgtctcgcacatcgagggtgaccaaaaagccgtaaaaatcctcgccctccagatccaccgcatccccgatggagcggggccacagcatccaggctgcaaaggccaggacggccgccgccagtaggaccagtaccactcgcttcacgcttcgggccatgaaatccctcctctgcaaatagggccgccggggctcagccgcacttgcggacgctgcccagcagggtctccaaagccatcagccccaccagcacagccagcgccgccagcaggatcaacagccacttccacttgccgcggatcatctctccgccccctcggtcttgttttttccaacataacataggccatggaatttgtccataccgcgtctgaaggcaggcactcaaattccccgcaggtcaaaggccggggtgtactcctccctggccgacgtccgctcctgggtgtagccgtcggtgatcccgcagttttccatgtactccactgccgcccggtactccgccttggtcacgtggcgggccagtttcccttctgcccctggctggggcgtatactggctcatgagggaaaacagcacctccccggggcggaagctctccgccacccagtcgatgactcttcgggtgttctccagttctcccggcaacagaagatgtcggatcaacacaccctgctttaaaaggccgttttccatccggtaaggcccggtctggcggaacatctccagaatggcccgcttggcccagtcaaagtagtccgccgcgccagagtatttgcgggcaggttcggagaggccatacttcaagtccggcagatacacctgtaccttcccctccagacggcggagggtctccggtttctcatagccgccgcagttccacaccaccggcacgggccattcctcgtcccccagggcctccagaaccgcgtcggtgaagtgggtgggggtcaccaggtccaggcaggcggcctcctgtccgatcagctcgtgaaagatctcccgcagccgctccgccgtcaggacctttcccacctccccctgggagatgggcttgttctggcagaagcagcaccggagattgcagccggagaagaacacgcacccggcgccgcgctcccccaccaggcacggctcctcccagaggtggagcatggcccgggccgccacgggcacgctgggcatcccgcacacgccgccccgcctcgtctccgtccgctcctcgccgcagtttctggggcacaggcggcagatcacagcaggtcctcggggcggaagtccgggcccaggtccccggccatccagtgcttgcggcacagcccgatgtactggtcgttggcccccagcaccacctgctcaccctccttcagcaccttgccggcagcatcgaaccgggcgttgaaggtggctttcttgccgcaccagcagatggtcttgacctcctcgatcttgtcggccatcaccagcagggcctcgctgccggggaacaggtcccccttgaagtccgcccgcaggccgtagcagatgacggggatgcccaggtcatccaccagacccaccaggtacatgacctcctcccgggtcaaaaactgggcctcgtccacgatgacgcaggcgttctgctgcagttccatgacagagagctgctgcatctcgtcaaagtagatgcagggataggtgaggccgatgcgggaaaccaccatgtggtccccgtcccgggtgtccagccggggcttgaccagcagggtcttctgcccccgctcttcgtagttgaaccgggtcatcagggcgtttgcggtcttgctggaacccatggccccgtatttgaaatagagctgtgccatttgtctgttttctccctctctatgtatcttcttatgcggcactccgccgccttctctttggtgccggtcccctccgccgggagggatcctcagccctgcagcccacggtcgatcttccgctgggcctcccgccgccgctgttcctccagctgctccgccgctttctccgacgtcaggggcttggggatctcctcctccggaatttccatcaccatcctgcggcagccgcggcagagccaggcggtcttgtacctgttgaaaaggctcccctcatggaggatatcgatctccgggccgctggcaccaaagaaccggttgggccagccgggccaccactggacactgtcccgtcccccagtgatcgtccccacctccatctcctgcccgcaccaaggacagatcatgggcgggggcggggtctcccgcagggccttcttctccttccgctcctcgttccagtcccggagctcgtccatcaggctgggagcgcagtccttctcctcctgccccggctccgccggacgggacggcttttccggctcatagtcccagggatcctcgcttttcttccagaagggcacggtcactcctcctctcggctttcggataaatgctctgcatcagccccgtagatgatgcggcggttgatctcctcggaggtcagatgctccgcccgggtgcagttggccgtgtcaaggaccagcttgcggcacgccccgcagtgccaggccagcttgtaatcgctccagaaggaaccgtccccccggaggtagagggttccgtcggcatccgccaggcgaaacgcgccgggacgctcccacaccaggcggacagcgtcccttccgcccaccagataccccatccgcatctcctgcccgcaccaggggcaggtcatggcagacggcgtctgctcctccgctgtctccttctcccctgggaccttccacgcctccccgtcggcggccgggggctggggctcccccgctgtccaggtgcgccgtttctccggctccatatcccagggatcctcgcttttcctccagaagggcatcacgaatcctcctcgttttgctctctcgcctgccggatgcgttcctcaaaggtctcccccgtccgccggggcaggaaggagacgggctccggcgtctccttcccatggtaatagcaccacagccaccggaggcaccagaccagcttgcggatcagcagggccagcagggcgatgcccgccaggttgatgagttccattcagttgccctcgtccttcttctggtcctcggagtccgggacctcctcataatccaccgtatacacagggccgtgaaatttcggctcctgcctgtcctcgtcctccgcccggtaccgggcggaccgcctccgcacatgccgcaccaccaagatcaccgccacgagaatgagaatgggcaccgcaaaccgcagcgccaccagcaaaatactccccagcagccgaaacagccccaggggcagtcccaccagccagcccattcgtcactcctccttcaagcgtgctgccgcttccgtgtaataccgcccaaaggcggagggcaccgcccggtccgacagggctccggcatctgcccagacgaagtccgccgggccgtctcccgccacctccagggtgtaaccggtcatgtgccactccacatgggtaaagatgtgcttcgccgtcagtcggctctcccaccgcctgggctccaggccccagacggacaccgccgctccggcggcagcctcgtccagggctccctccacgttgggaaactcccacaggcccgccagcaacccggtccccggccgcttccgcagggcgatctttccgtcccgcaccagcaggaacaccgtcttctcctccacccggcggggctttttggcccccttcactggcagatcctctgccgtgccccgaaggcggcccttgcagaaggccatggccggacactccagacaccggggcgggccgttgggtgcgcagaccgtggcccccagctccatggtggcctgattgaagacgcggatatccgcctcagcctccggcatgacggcctggatctgtgcccgcacggccttttttaccttgggatcggcaatatcgtcccggcagtccgtcagccgcatgaccacccgcagcacgttgccgtccaccgccgcttcccgtcggccgaaggcggcggaggcaatggcgctggcggtgtagtcccccacccccggcagggccagcaggtcctggtaggtgtccggaaaccggccgccctgctccgccacgatcctggcggccttctgcaggttcctggcccggctgtaatagcccaggccctcccacagcttcatcagccgctcctccggggcggctgccaaagcctccaccgtggggaatgtctccagaaagcgggcataataccccagcaccgccgctacccgggtctgctgcagcatgatctccgagacccagatctgatacgggtctgtggtccgccgccagggcaggtcccgggcattggcccgataccacgccaacagcggccccggcaaatcttgtaaaacagttttggttgtcaaattctcaccgcacatggtatgattgtaccatatccgcagaatggatatggcaccctttccgaacttgcgccgctgtatcagcctgtccagccgcacaatcgccgcattgcggttattgtaccacatccggcgccaacttcccaccccctgtacaaaaattttgaaagtctcttgactttcccccgggtggaaggtgtaccctgtccccagagatgaggtgtaatcccttgaaaatcaatgaagtggaagccctggtgggcatcacgcggaagaacatccgcttttatgaggcggagggactgctctccccccggcggaacagccagaacggttaccgggactatggggagactgaggtggaggtcctgcggcggatcaagctgcttcggaagctgggccttccgctggaggagatccggcagatgcagcacggcgcctacaccgtgggggacggtatgcgccgccatctggtgtccctggagcgggagcggcagaatctggaagcggccatccgcttctgcgggacgctcacagaccgcagggagcggctggaggagctggacgcccagtccctgctggatcggatggcccagatggaacaggagggaacgacctttatgaacaagcagaagcaggacaccaggcgccgccgcttcgtggcgcccatcgtggtcgccatcgtcatgtcagtcctgatggcggggctgatctggctcttcctctgggctttcgaggtggatccggccggtgcgccgcccctgccggtgctggcgctctttgtggccatcccggcggcagtggtggtcggtgtggtcatcgccctggtccagcgggtccgggagattgagcggggagaggaagacgatgcgcggaactactgagcggcgggattgtcgacaagcagcggtgtccgccgcagggacggccgtatggctgctggctgcggccgcggtgttgctgtgggtgcggcaggcctttttccccagcggtgcggcatccgttctgctggcggttctggccgctgtccaggcagcagggctgatcccgctggggctggccctgcgggaccgcttgaaagagatcaaaggaggagaattatatgaagctcgtcagtattgagaccattcccggccaggaatttgaggccctggacatcgtgcggggcacggtggtgtacagcaaaaacttcggccgcgatttcatggccggtatgaagaccctggtgggcggagagatcaccggctacaccgagatgctggtggaggcccggcagatcgccaccaagcgcatggtggacgcggcagaggctctgggagccgacgcagtggtgggcctgcggtacgcctctgcctccgtgatgcagggggcggcggaggtcattgcctacggaacggctgtaaagttcaaatgatgcacgtcacctttctggaccacagcggctttctggtggagctgcccggtctcacgctgctctttgactggtggaagggggacctgccccccctgccatcaggccccctgctggtctttgccagccatcgccatccagaccactttgatccccggatttttgctctggatgacgggcagcgggatgtccgattccttcttggcaagggcatccatctgacagaccggaaccggaagaaatggggactctcggaaaaagccgccgcggactgccgggtgctttccggcggggagagcgcctctcccctgcccggcgtcaccgtggaggcactgccctccaccgacgagggcgtggcctttctggtgacggcggaaggccggacggtctttcatgccggggatctgaactggtggcactgggagggcgaggaccccgtctggaaccggaacatggaagcggacttccggcggtatgcggaacctctccggggccggaagatcgatctggccatgctgcctctggatccccgtctgggggaggacggcttccgtggcccccggtacttcctggagctggcggatatccgccgctttctgcccatgcaccagtggggaaattttaactttacaaatcaattcctgtcatgctatacttctttcacatcccgaactgtgtacgttaacagagtcggtcaagtctttacatttgaggaggaagcggacacatgaagatcgatggcaatgaacttgcaattgagcaaaacgagctggaccgggagggccgccatgcggaagccatggccatcaagcgggaatttctgaagcaggtgcgggagagcggtgaccactgcccctgcaagcaggcctgccctcaccacggcaactgctttgagtgcgtgacgctgcaccgtggtcaccgggatcacttgcccatgtgtatgtgggatatggtgaatgaacggctccataagctctcccgattgacagaggggaccctgcggtcctatgaggaggcgcaccgctgaggaagctccagaaaagcgcccgtgccaatcggcacgggcgctctcctcttcatctgtcttcaatctgcaaggatcaggcagctgccggtcacatcagggctgtggcccgttagctccgccacgaagtccgtgtcctcaccggcggcactgaccgccgcttccagcgcggggatctggtcaaccgtggtgacggcgtagactcggtccaccagcggggcgatatccgagagtaccaggccggcagtgtcgtcggcgccggaggtgatgacctccggcggcagctcaatggagacagccacaccatactcacccagagcgctgcgcagctcctccaggaacagccggatgctggccgcccggtcggcgccgttgtagtcgatcttgtccagcttccctactgtgggatagcccacatccgttagcaggatttcatcaaaaccctgttgtgccagctccgccgccagggtgcacaggtactgccgggccgccggcttgctgggatccagccagtttccgttgttcccgtcgtagaagatatagccgccggtgttcttcagtcccatgccctccacgtccgcgcgggcggcaatggggtccaggaagcagctcatccgggcgatggagtggtaactgctttccgtcacctccgccagagccgccgccgtgtcctccgccgtgctcacggtgccggccgcggcgccagtggcagcaaagtagatgtgtccggtgctgtctttcagcgtgacggcagcagcgttataggcgggagcagacatcacagaggctcccagccaggcatctttccagcccgcctgggtcagcggcgcggcggaagcagagaaggcagccagagccttcggcttctccggctcctgaatggtaatctctacgtcctctgggggcacttcctcttccgcggggggcgtctccgtcttccatggcaactccaggtggaagctgccgtccctatcgtagacgatatactcctgcagccatagaaagcccaccgccgccaggatgatgagcaccagcagcactgccagcgcgatcttccccttggaggtcctgccccggtagctccggtagcccttggtgcctcccatgtccgtcacctcttctccaggagattgcccctgcccgtcagggctggatggcgttgagcttgttcacgcgccgctcatgccggccaccctcaaagtccgtggagaggaacacctccaccatccgctccgccaggttcttgccggtgaaccccgcgccgatggccagcatattggcgtcgttgtggcggcgggtcatctccgcctccagggagtcggcacagtgggcgcagcggataccctgcaccttgttggcggcaatggagatgccgatgccggtggtgcagatgacgatgccccgatcatactcgccggaggccacagcccgggccgccgcctcgccgaagtcggggtagtcgcagctctccgtcgagtagcagccgaagtccttgtattcatggcccagcttctccagaagctggatgatgtcgcatttcagcgcgtagccgccgtgatcagaacccagagcgattttcatggtgatcgttctccttttcaaatcaagtcatcccattcggagaggaatggggctggaatggatttattatagccagttttcccctgaaaagcaaatcacaattcatgccacaccggtttcccctgccggaaggcggcaaaacggcggaatccgcaggcccgcagcagcgcctgcccctcccggacggcacagcccacaaaccccggcgtgtgggcatccgtccccagggtgacgatctcgccgcccagggagcggtacagccgcagccacttttcgtccggcagcggggtgttgccccggttggtgttgagctcgatcccgatgcccttggggatgatgaggcggaagatctccgcgatctcctcctcgaacccgtcgaagctgacatgcatcccccggttctcgttcaaataccgcaggggcagcgtcagatggcccagtacctggaatcgcccccactccgcgagcttccgcacctggcccaggtagtcggcaaggcagtcccgcgcttcctgttcatcccgcggggtaaggaaatacaggtcccggccctccatcttctccgacagggtgtggatggagccgatgagaaagtccagcggcggggcctccgccagcatggactccatccgcctgatgccccacacggcgtctcccagctccgcgcccaggcgcaacgtgatccggtcccccaccgccgtccgggcggcgcggaactccgcaatcatgggatcccagtcataggccccccggggttcggtggtgccgaaccggatgggctccacatggtctgtgaagcagatctcctggaaccccagccggatggccgcctccgccatctcctgcatggaggcggaggcgtccggtgagatgcgggagtggacgtggtagtcggctaaatacatacgtgcctcactttttgaacttcttgaagaacttcttctgctcctcgtaattgctctcgcccatggtctcggcgaacttcttcagcgcttccttctgctccttgttcagatttttgggggtttcaatgtagacggtgacatactggtcgccccgcccccggccgttgatggaggggatgcccttgcccttcaggcggaaggtggtgccggactgggtgccctccggcagggtatacttcactttgccgtcgatggtggggatctccagctccgcacccagcaccgcctgggtgaaggtgatgggcgcctcgcacaggacggaggtgccctcccgccggaacagctcgtgaggccggaccgtaatggtaatcagcaggtcgcctgccgggccgccgttcttgccggcgttgccctgtccacggatggagatggtctgcccgttgtcgatgccggcgggaatgctggcctgaatggtctttttcttgcgcaccataccactgccccggcagtccttgcagggctggtggataatccgccccttgccgccgcacttggggcagggggaggaggtggcgaacacgcccatgggcgtctgccgccggacctggaccgtcccggtgccgtggcagtccgggcacacctccggcgacgtgccgggggcacagccgttgccgtggcaggtgtcgcaggtctcataccgctccacggtgactgccttctcacagccgaaggccgcctcctcgaagctgatggcgatggacatgcggatgctctcgccccgctggggggcgttgggattggtgcgccgcccgccgccgaagccgccgccgaaaaagctgccgaagatgtcccccaggtcgccgaagtcgaagctcccgtcgaatccgccgccgaagcccccggcgccgaagttggggtcaacgcccgcatggccgtactggtcgtaccgggccttcttgtccgcgtcggagaggacctcataggcctcgttgacctccttgaacttctcctccgccgtcttgtcccccggattcaggtccgggtgatacttccgggccatttttttataggcctttttgatctcatcctcagaggctccccgggaaacccccaggacctcgtaataatcgcgtttctgttctgccatagaatcaccaacttttcaattaggaatggggagttaggaattaggaattgtggaatccgctcccggcggatgaattgaaatccgtccggctccgccggacacctcaattccttattcctgatttctaattcctaattcatgagagcgtgccgcgcaggcgggggtgtcccccgcccgcgcggccgcatggcatctgatcacttcttgttattctcgtcatcgtcgaccaccttgtagtcggcgtcataatactggccctgctgggcgccggcgtcggggccggcctgctgctgggcgccgccctgggccccctggggattggcctgctgatacagcttctcgctgacggcgtagaaggcctgggtcaactcgtcggtagcggtcttgatggcagcggtatccgtgcctttcagaacctccttcagtttgtcgattccggcctggaccttgctcttgtcatcggcagggatcttgtcgcccatctcggagagggtcttctcgctctggtagaccatctggtcggcctggttgcggacctcgacctcctccttcagcttcttgtcctgggcagcatactgctcggcctccttgacggccttctcaatgtcctccttgctcatgttggaggaggaagtgatggtgatatgctgctccttgccggtgcccaggtccttggcggagacgttgacgatgccgttggcgtcgatgtcgaaagtcacctcgatctggggcacgccgcggcgggccggagcgatgccgtccaggtggaagcggcccagagacttgttggccgcggccatctcccgctcgccctggaggacgttgacctccacgctggtctggttgtcagcggcggtggagaagatctggctcttcttcacggggatggtggtgttccggtcgatcagcttggtgaacacgccgcccatggtctcaatgcccagggacaggggtgtgacatccagcagcagcagccccttcacgtcgccggtgaggacgcccgcctgcagggcggcgcccatggccacgcactcgtcggggttgatgcccttgaagggctcgttgccggtgaagttcttcacggcctcctgcacggcggggatccggctggagccgcccaccagcaggaccttgctcaggtcactgggcttcaggcccgcgtcggacatggcctggcgcacggggcccatggtggcgtccaccagatgggcggtcagctcgttgaacttggcccgggacagggtcacgtccaggtgcttggggccgttggcgtcggcggtgatatagggcaggttgatgttgctggtggtgacgccggagagctcgatcttggccttctcggcggcctccttcagccgctgcatagccactcggtcggtggacaggtccacgccgtcggtgcgcttgaactcgctgaccagccacttcatgatgcactcgtcgaagtcatcgccgcccaggcggttgttaccggcggtggccaggacctcgatcacgccgtcgtcgatgtccaggatggacacatcgaacgtgccgccgcccaggtcgtacaccatgatcttctggctctgttccttatccacgccgtaggccagggccgcggcggtaggttcgttgatgatgcgtttcacgtccaggccggcgatcctgccggcgtccttggtggcctggcgctgggagtcagtgaagtaggcgggaaccgtgatgaccgcctcggtgactgtgctacccagataggcctcagcgtccgccttcagcttctggaggatcatggcgctgatctcctggggggtgtagctcttgctgtcaatggtcactttataatcgctgcccatctcccgcttgatggaagagatggtgcggtccggattggtaatggcctggcgtttagccacttgacccaccatgcgctcgccggtcttggagaaagccaccacggacggggtggtccggttgccctccgcattggggatgaccacagcctcgccgccctccatgacggccacacagctatttgtcgtacctaagtcgataccgataaccttagacataatgattgcctccaatttatgatcaaataattctatctcaacaaataaaaatttgcgattgttgttttcattcacgccaggcgaatccattgcaatgatttgtcaggatatatgcctgacaaaaacacgttggctcgtgcgccttgggcgcacacgccagtggccgatgtccctggtgcgggggaaggtcgaggggggacacagtccccctctcgaattcgctcagtttgccacctgcacaatagcgtgtcggatcaccttgtcacccagcaggaaccccgcctggaacacctgggataccacgttctccccaaggttctcatcatcgatgtgcataacggcgttgtgcttttccgggtcaaatggctggccctgggcctcgatctccgtgactcccagcttcttcaggatctcctggtactggtggaagatcatctccagccccttcttgtggggagagtcctcatcgccctcagtggccacagcccgctccaggttgtcgtacaccgccaggaactccttgatggtgtccgccttggcgtcctggtagagattgtctttctccttagcggtgcgcttgcggtagttgtcgtactctgccgtcagccggacgaactgatccttcacggactccagctgccgggcggccagctccgccgcctccatctgctcccgggtcagggtgtaggtcttttcctttttcttcttgcccctggcggccttctccgccttctcatcgggcaccttctcctccgcggggggagcctcttcctgaggagcctcctgcggctcttccggcgtctcctccgccggctgcttcgtctcttcgctcattcttttgcatcctccttcgggggtaattcctgtttgccgaacagccgcgtcaatccctccgcaaagccggagagccgggcggccacggttccgtaatccattcgtgtgggtcccaccacgccgatcaggccccgcatgtcgttgccgatgtcatagctggccaccaccacactggtgtcctgcagggcctcgctgacattctccggaccgatcaggatcttcatgggcccctcgtccggcacagggagattctccttgctgtcggacaaaaagctcatcagctggtgggccttgtctgcgtcccggaactccggcagcttcagcagttggctggtgcccacggtaaacacctctttctgccccgcctcctgcagcacatccgccgcgtaggcgatggtctggctcaacagcaggaacatctggggcgtcacctgttcggacacatccatcagccgccggttcatctcgtctgcggagatcccggtgaagttgctgttcagcaggttcaccagggtgggcatctgctcggtgtccaccttcagctgcatccgcagcagctggctcttcacccggttgtcgcccatcatcatgaccacgatgcagctgtgctcatccacgggcagcagctcaaaccgccgggcggtcatctgcttcttgccggtggcggccacataggcggggtagttcatcagagaactcaccgcccggcccgcctgggagatcacccggtccagctcctccatccgcatctggagggactggttgatccgctccgtctctgcgatggagagccgctggcgctccatcagttcgttgacatacagccggtaacccttgggagagggcacccgcccggcggaggtgtggggctgttccagatagcccagctccgtcagatccgacagctcgttgcgaatggtggcggagctgacgccgcccatctccgcggcaatggccttggaacccaccggctctgcagtacggacatagtcctccaccaccactttcagtatttgctttttccggtccgtgagttccacaaaaagcacctctggtccaagctgtctcacgctggttttagcactcctttctccggagtgctaaaacgagtttaccaccacgcgccttcattgtcaacggatggatataaacaaattgtaaacaaatgccatcggatttttgaacattttccgcggctccgcaaatcaaaaaccggccgcctgccgcggccggtttttcgtctcacatggtccccctgtccgctcagtccggcctggcccccgccccctgccggggcagcatccccgtccgctgaagggccggctgcagcgcccgcagcagaagcaccagcagcaccgtctgcaccggcagcatgatgaggtttttcaccgcgctgagagacgcgctggcataccaggcctccaggctgaagcggccgttgctgttgagaatggcgatccacagcgcccccagcaccacgttctgcacattggtgaccagcttggcgcagaagatccgccagacccgcaggggcgcccggtacaggaacagagcgtaggtcagcacacccagcatagtggtcagagtatagccggggaaaaagggatagccgcctcctccagtgaggaagaagctgaggatgtcctccgcaaaggcgaacagcaggcccagcaccgggccgcagacccaggcacagacggaccgggccaggaagccccaggtgaccttggccccgccgaacagcggcaccgagggcacttgggccagcacaatgcacagggcgatcatcagggcggagaacagcagcttccgaaggtcccggacctcccgggacgcgtcccgccagtagtcggcggaaaagggatgtgcgtacataaaaaacctccttctgttttggcagtccgaaattcggagatgccgcacagaggaaggccgaaagggtccctgtatgcggcagcgggatgcgggacacacactgcggactcgcggtcctttcgtccgaagagcaactccccgtctctccagcactggatgtacacgtatgtccctactctgcctgttagatattgtccattataggactttcgcggaaaaaagcaagggtttccgccgtttttccagcacaccttgcggcaatccggtccatgtgttaagatgaccgcaacccgaataggagaggaggcgatccgcagatggttcttttgattaccggcgcctcgcacacaggcaaaaccctgctggcccagagacttcttcagacataccgctgtccctgtctctccatggatcttctgaaaatgggacttatccgaagcggcaacacccgcctcacgccggaggatgaccaggagctggagtcctatctgtggccgattgtgcgggagatcatcaaaaccgccattgaaaaccgccaggatctgatcgtggagggctgttatgtccccccacgctggagtcaggactttacgccgtcctatctccgggaaatccgcttttgctgccttgtgatgaccaaggcatatatcgagacccattttgcagacatacaaaaatatgcctgtgcggcagagcggcgcattgacgattccacctgtacgaaagagactctcctcctggataacgcgcactatcagcagatgtgcgagacctgggggtatccctgtattctgatcgatcaggcgtacgaggtggatatccccctgtgaaaaaacgatcccggccctttcggccgggatcgttttttcacttactctacgttactgggcagcgccagcggtctccgcagccttcgcggcagcggccttctccgcctgggccttcttgatggccttgtacttctccttctcctccgcggtggcgatgggaaggatggcgtcccgcgggcagaccttggtgcagagcttgcagcccacgcacttgtcgtagtcgatgacagccacgccgttcaccacatgaatggcgtccttcttgcactccttctggcacaggccgcagccgatgcaggagtgagtgcagacgctcatggcagccttgcccttgtcctggttggcgcaggccacgtggaccttcttggacacagggacctccgtgatcagatggcgggggcaggccttggcgcaggccatgcagtcggtgcacttgtccgggtccaccacggcggcgccgttgggaccgatggacatggcgccgaactggcaggcggacacgcaggagccgaagcccagacagccgaactggcactccaggggaccaccggccaccttggtggcggacaggcagtccttcacaccgacgtactcataacgcttggcggcgttggtgccgccgttgcagcggacaaaagccaccttccgctcaccggagggagcctcctggcccatgatctttgcgatggcggcagcattctccgcgccggcaggggcgcacgcattcaccggagccgtgcccgccaggatggcggcggcacagccggcgcagccggggaagccgcagccgccgcagttggcgccggccagatggctgaggatttcctcttcccgggggtccttctttacctcaaagaccttggaggctactgccaagatgaagccgaacacggcgccgaggacagccagcaccacaacggcagcaatgacatttccgatatccattttcctcttgcctcctcttaccagaccttcaaaccggagaagcccataaacgccagggccatcagaccagcggtgaccagggcgatgggaaagccctcaaacgccttgggatagtccgcaaacaccagccgctcccgaatgctggcgaacagcacgatggccagcaggaagcccaggccgccggtgatgccgtaaactacggaggagatgaagttatagttgttctgcacgttcagcagcaccacacccagtacggcgcagttggtggtaatcaggggcagatacacacccagagccgtgtacagagacggcatggatttctgtaaaaacatctccacgaactggaccagggatgcgatgaccagaatgaaggtcacggtctgcatatactccagtccaaagcgaaccaggacgaactcgttgaccgcatagcacacggcggaagccagtcccatgacgaacgtcacagcgatgcccatgcccacagcggtgtccaccttcttggaaacacccaggaaggggcagatgcctaagaactgggagaagatgaagttgtttgccagaatggcacccagcgtaattgccaggagttcatagatttgatccattatttgctctcctccttatttttcttaggtctggacagcgcccactgcatcagggcaatgaggcagcccagcaccaggaagccgccgacgggcagggtcagcatgccgatggggaactgctccggcaggatctgaataccatcgccgccgttgaggataccgccgccgaaggtgccggcgcccagaaactcacggatgatgcacataaccatcagcaccacagtgtagccaaagccctggaagataccgtcccagaaggaagcggccacaccgttcttgtaggagaaggactccgcccggcccaggatgatgcagttcaccacgatcagggggatgaacacgcccagcgactcggacagggccggaacgaatgcctggatcagcagatccacgcaggtcacgaagccagcgatcaccacaatgaacatggcgatacggatcttgtccggcacgatcttgcggatagccgcgatgatgacattggaaagggtcaggatgacggtgaccgccacgcccatgcccaggccgttgaagaacgaggtggtgatggccatggtggaacacatgcccagcacctgcaccagcacagggttgttggtgatcagtccctctttgaactgtttgcctaaattcatgaattgctcctcccttctcagcccatggcagccacggcagccagcgccgcattcacgccggcagtcacacccttggtggagacggtggcgccggtgatggcgtccacgttagtgcccaccgtcagagtgccgtccgccgcgctcttgccgataaactggtccagcacacccacgccggaggcggtgggttcgttgcccacgaccttcgtgccgatgccggaggtctcagagtggttgacgacagaaacgccagtgacggcgccttccgcgtccacgcccaccatcatttcaatgctgccctgggagccggaggcggtgacctttacggcatagccggcggcctcgccgttcacctggacctcgtacatctcgttcagggtgccgccggcagctgtggccgcagcggtcatgtcgccagacagttccagcgcgtcggagaaggtggtgttgtccggatcggacaccacggccagcatggccgcttcagtcttctgctggttgatctcagcgatggggccggccgtcacaccgttgaccagacccagcagcagtgccacgatcaggcaggtccccagcagggtcacagtcagctttacgatgtacttggggtccatatcaatcttttctttggtcttgacttcgttgctcatttcgcagccgcctccttgttagcggatttcacaacgccgaagcgagagggcttcacagccttgtcgatcagcgccactaccaggttcataatcatgatggagtagcacacgccctcgggataggagccgaagtagcggatgaacaccgtcagcaggccgcagcccaggccgaagatcagctggccggtcttggtgacgggggaggtggtgtagtcagtggccatgaagaaggcacccagcatcaggccgccgccgaagatgctgtacagcatgaactgcagattgtcggcgccgcccttggggaacaggaaggtcagcacggccacggtggcgatgtaggccgcgggggtctgccagctgatgaccttgcgccagatcagatacgctccgcccacgatcagcagcagggcggagatctcgcccagggagccgccgatattgcccaggaacatatccgtcacgctgtactggctggtgaggccggccatgtcgccggtcttcatataggccagaggcgtggcagcggtaaccacgtcggcagtgccggccaggggcacccagccggcctggggatccgcccaggcgccgctcatggtgccggcatagctggccaccagggcggcacggcccgccagcgcggggttgacgaagttcttgccgatgccgccgaacagctgcttgaccaccacgatggcgaagaagtcgcccaccaggatcatccagtagggcatgttcaccgggcacacgaacgccagcaggatgccggtaaccgcggcggagagatcgttcacggactggggcttcttcatgagcttgcgatagccccactcaaagaacatgcagcccaccacggacacggcagtcagagtcagggcccggaagccgaacttcacaatggcccagatcagggcgggcatcatggcgatgataacatccagcatgatggagcgggtgttctccgccgcccggatgtggggagaagaagtggcaatcagtttgagattcttgtagtcagtcatttcgcagcggcctcctttgcttcttcggcctttttctttgcctcggcggcagcccggtcagcggccgccttgtccttcaccagctgcttgccggttttgaacatatgggtcaggtgcatccgggccgggcagatgtaggagcaggcgccgcactccatgcagtccatgatgtgggcgtcattcagctcctccaccatgcccttggaggcatactggtacatgaacaggggctccaggtgcatcgggcagacggacacgcacttgccgcagcggatgcactggggattctccacggtcttctcctcgttctcgcagaaggccaggatggcgccggtgcccttggccacggagatgtccgcggtgtactgggccatgcccatcatggggccgccggcgatcagtttgtatgtaccgtccttcaggccgccgcaggcgtccaacaggctggagacgggggtgccgatggggcactccaagttcttgggctccaccacgccggagccggagacggtgacgatcttgcgcaccacgggcataccggtggtcagggcccggtagatggcgcatgtggtgttgatgttgaatacggcgcagccgatatcggcgggcagtccgccggggggcacctggcggccggtgatggcctggcagagctgtttctcaccgccctgggggtagcggcagcgcaggggctccaccaccacgggggccttctgctcggcaatgaccttgttcatggcgtcgatgccgttgcgcttgttgtcctccacgccgatgacgaccttgtccacgccgaacatcttggccaggaacttggcgccgccaatgatctcctcgggccgctccagcatggtgcggtggtcgcccgtgatgtagggctcgcactccgcgccattgatgatgacggtgttcaccttgccgatgccgctggtgatcttcacgtgggtggggaacgtagcgccgcccatgccgacgatgccggcgttcttgacgatctccaccatctcctccacgctgagggcattgggatccgcgggggcctggacctcttcgctcacctcgtcctgcatgtcgttttcaatgaccacagacgtgatgttgccgcccatggaataggggcggggttccactgccttcaccgtgccggaaacgctggcgtggatcggggcgcccaatccgtggaattcgccgatcttctggcccaccttcacgtggtccccggccttgaccaggggcgtgcagggcgcgccaaagtgcatcgacatggggatgaccacaacagccggcggagccagctgctcgatggccttttcattggttgcggccttcatatcatggggatgaacgccgccaaagaaagcttgtgccattgtcttcacctcatttttactccttgatagtcggcccgggcaggagggcacggcccctccccttcccaagagagggggtctccaggcaggcgacactatcacatactgcgcctcattctacacctatttttgaaaaatgtccagactgtgaacgacaacttttgaaaaaaatatgcttctttatacagaatctttgcaacttttcacacgttttatccagttctgtcattccctcccatttttacgccgtctcttgttatttcagaagaaacatgatatgcttggtgatacgggtccggctccggccgccccattttcaaattatctggaggccaagacatattatgatggcacaactgatcgaccgaaagcatctgaagcaggagatgaaggagctgctgcgctccgcccaggtcagcccccgcgggatgacctgcctgtacctggccctggtgctggtgctgaacctggcggacagcttcatgggtcttatgaatccgggcctgctgggcaccttcatctccatcctcaccggcctgatgagcatggtcctggcctccggcttcgtgatgtactgcatggccatccgccggggcgagcgggcggaatacctgacgctgttcgacgggttctcctttgtgggcaaggtcatcctgctgaacatcgtgatctacctcttcacgttcttctggtcactgctgttcgtcattccaggcatcatcgccgcctaccgctaccgcttcgccctgtacaacctctatgagaaccccggcatcggggtgatggaggccctgaacatgagcaagcagcagactcttggctacaaggggcagctgttcatgctggatctgagctatatcggctggctcctcctggcgtccctcacctccgtcgtgcagacgggctatatctacgcctgcattttccaggaccccggctactatttggcgaaccccgcccaggtctatgccatcaccctgcccatgcccgtaggattgcaggtggtgctgggctgtgtctggccgctgctggtggcgttgttctacctaccggtctaccagtgcacggagcttggctattttgacaccgccaagcacacttccggcgtgggagagggcgcggcccccaaggatcccggcagctttgacagcggctggggaggcttctgagcgccccattaagcctacaagcccccggcgggttttagaacccgctgggggcctctctttcaggagacctcgcctgcgggccgggccgggggctctgcgccatccggcctccttccggggtccgcctccgcgccaagggcccccctccacaagcatctttcagattctccctcagacgcaaagctcccccggcgggccaaaggcccgccgggggagctttcttccatgttgcggggatcacagccgggggaactcccgccggacgtaggcgctgcggcccagagccgccgccagcagtgtggaggcggcgatgccgaaggcagcctgcaccagattgctggggatacctgccgcggcaccagccgcgctccccagcagcagggcgtcgtacagccagtagcccaccaccatgggcagctctcccatgatgccgcaggccgcaaggcccaggggaccccgtccctttccgaacgcctgatggcacgcggccgccaaagccgccatccctgccttgatgaccagggtagcgggtgcgtagatgggcgagcccagcagcacatccgccagggccgggccgatgctgcccgccagggcgccccaggctggccccagcagatatccgcccagcagcaccaccgtgtcccccaggttcatgtagccgccggtgggggacggcaccttcaccaccatagtggccacgcaggccagcgccgcaaaggccgccgccatcacgaccatccgtgtccgctggaaggtcttggccgtctcctgctccgctgtcttctccatatcctcttctccttccggcggggccgtctcgcgccccatttgctgttgccatcatagaacaaatatgatatgattaaaagcgtcaatttctgaattttttatcaggtcagatggaggaagcccatgcgtacctacgccctggaaaaccgcggcagagcgccgctgtatgaatacctgtaccgctgcatccggggggacatcctggacggcaccctgacggccggggagcggctgccctccaagcgggccctggcggagcacctgcacatctccgtcatgacggtggagggggcctaccagcagctggaggcggagggctatgtgtacacccagcccaaacggggcttttttgtggcggaggtggagcggccccggcctgccgtccccgctcctccggctcctgaggcgccgccggaggccccggtctggcggctggatctgaagagcaaccaggtggacgccagccgcttccccgcggcggcctgggcccgtctgacccggcaggtgctgtccgaggacggggaagccctgctgcgcccagtgccccaccaggggctgcccgccctgcggcaggccatcgcccgggacctgcgggagtataagggcatggctgtgccgccggagcagatcgtggtgggggccggggcggagtacctgtatctgctgctggctcagctgctgggacgggaggccgtctttgccgtggaggatccgggctatcccaaaatccgccaggtgtacggcaagtgcggcgcggcttgccgcccggtgcccctggacggccagggcgttcccccggaggccctggaggcggcgggagccagtgtggtccatctctctcccgcccaccactatcccaccggactggtgacacccatcggccggcggcaggccctgctccgctgggctgagaaggctggaggcatcatcatcgaggatgactatgacagcgagttccgctttacaggccgtcccattcccaccctccagagtatcgacaccgccgggcgggtggtatacatgaacaccttctcccagaccatctccccctccatgcgggtgggattcatggtgctgccgccccgcctgctggagcagtaccgccgggagctggatttttattcctgcacggtgcccgccctggaccagcacgtgctggcccggttcctggaccagggccactacgagcagcacctggctcggatgcgcaaggagtaccgcacccgtcacgacgcggttctggcctccttccggtccagccccttccggaaccggatcacgatctcggagcagggggcggggctccactttctcctgcggctggacacccgggagagcgacggggccctgcgggaccgggctgcggccctgggcgtccggctgggctttctctcggagtacgccgccatcccctcccctgcctacgcccacacgctggtggtgaactatgccggcctcagcccggcggcgctgccagaggccatggacctgctggcggagatcttcggggcctgatgcctgccgtccactcccccgcgcaaaaaagccggccgccccaagggcggccggctctctgcatcgggttttcagttcacacgccgggctttccctccagcgcggtcatgctctttttgaaatggacagcgaacatggtggctgtggtacacaccgccaggaaatccgccaccggctccgccagaaagaccgcaaaagccttatccgcaaaaaagttgggcagaatataaatgaagggaatcagcaggatgatcttccgcagcactgccaggaacaaggagatcttggcgttgcccagggccacgaaagtctgctgacaggcgatctggatgccgaagatcccggtggccgccatgtagatccgcagggcccaggaggcatagctcaccagctcgctgtccgaggtgaacatcagggcgaacagctgggggaacagctgcaccagcgcccacagcagcagggagtaggccaggcaggccatcagcagcacctggaaggcacgccgtacccgccccggattccgggcgccgtagttgtagctgatgatgggctgggccccttgggtcaggccctggaggggcatcatggcgaactgcatgatgctggagagcacggtcatagcacccacagcgatgtccccgccgtatttcagcagtgaggagttgaagcacacggtaatgaggctctccgtagactgcatgatgaagggggaagcgcccagggccagggccggcagcaccaccttggcttggggccgcaggtgctcccgccgcaggtgccacttggtcttgctgcccgtaaggaacttcagcacccacaccgcggagaccgcttgggatagaatggtggccaaggccgcgccccggacccccatgccgaaggcgaagatgaagatggggtccagcaccgtattgaggatcgcgccgatcagcacagtcttcatgcccaccaccgtgaagccctgggcggtgatataggcgttcatgcccagggtcacctggacgaagatggtgcccagggcataaatgcgcatatagttcagggcgtagccgatggtgttgtcgctggcgccgaagatgcggagcatgggctccgcaaacaccagaaagaccacagtcagcaccacggacaccgccaccagcatggtgaagctgttgcccatgatccgctccgactctttcaggtctccccgcccttcggcgatggaggcccggggtgcgccgccgaaggccatcagggccgcgaaggcggagatcaccatgatgatgggcaggcacacccccacgccggtgagggccagcttgcccacagtctccaccggctgcatgtggccgatgtacacccggtccaccagattgtacagcatgttgacgatctgggaggtgatggtaggaacggccagggaaaacagcagctttcccacgctcccgctgcccaggtccacatttcgacggctcatgtattgcctccttccttcaaccgcacttccgcgctggtcagaaccttttccagcagttcctgaaatcgctccgcctccgactgtgtcagaccggcaaacagcgcgtccaggcaggtactctggagcttctgcccctcccgggccagggccgcgcccgcatctgtcagcgccagatggatcacccggcggtctgccttgtccggctgacggcggagcagctcccgcgccgccagcaggtccaccgcggcggacacctggctcttggccagtccccggagctctgtcacgtcccgggcagtgtcatgtgccggatgattggccagaaacagcaccacatgaatctcccgcatggagagcccggtgcgggacagaagctctgagaaatgcctatcgtaataccggcggaactgctggataacccgcagcagctgcgtactgctcactgccacagcgcccgccccctttcattttatttaaaacagttcttataagaactgttccagcatagcactattttttccgcctgtcaagatttccgaatccatccttgacaattctcccttcctccagtatgatggtggcagaagatatcgtttttaaaatcagatttcggggtgttctttatgacatggaatattgtgagcgacagcagctgcgacctgcggacatcttccttccacagcagctgcgtccggtttgagaccgtgcccctgcgcatccaggtgggcggccgggaatttgtggacgatgacgccctgtcggttcccgccctgctctccgccatggcggtggagaaggctgcctcctcgtccgcctgcccctcccccgccgactttgccggggcctttgagcggggggaccgtaccgtctgcttcacgctttcctcccagctctccggcacgtatcacgcggcctgcatcgcccgggagatggtgctggaggagcacccggaaaagcagatctgcgtcatcgactcccgcgccgccgccggggccatggtgctgctgatccgccgggcccaggccctgatggaggcagcgggggatgatggggacttcgacgctctctgccagcagctccaccgctatcaggccaccttgcggacctgcttcaccctggagaatttcgacaacctcatcaaaaatggccggatgcggcccattgtgggcacgttgctccgctccctgggcatccacatcattgcggacgccacagccgagggcaccattcatgtggcggataaggcccggggcgtgggtaagacctaccgggccatcaccgccctgatgaaggccagcaaggactgcaccgacgcagaggtggtaatctcccactgtgagaacctggagggtgctatggccctgaagcggcagatcctggcagacctgccggtgaaacaggtggacctgctgtcctgccggggactcaccagcttctatgccatggaaaagggcctcatcgtggggtactgaggtacgtccttccccatcaggcgcctccgcggaaggccgcttccggaacagcagtcagccgccggaaccgccatcttccggcatttggatatggcaaaaaagcgcgcacggaaaaccgtgcgcgctttgctttttctatcccagcagcacacccgccaccaggaacgccagggccagcagcaaaaaccagagtatcagcttccacacatacttcacccagcggtcgtagggcacatggcccagggccagggcgcccatcaccaccgccgcagtaggggtgatgatgttcaccaggccggaggcggactggaacgctgtcaccaccagatcgccgcccaccccggcgaatttgcccaggggcgccacaatggggatggacagtgtcgccaggcccgacgaggacgggatcaggatggtgaggggcaggtacagggcgaacaccagcagcgtgaagctgatggccccggcgccggaaagggcctgctctccccagtggaggaccgtgtcggtgatggcgccgtcgttcatcagcacagtgatgccccggctgatgccgatgataaaggccacgcctaaaaggtccgcgcagccggccacgtaggtctctaccagctcctcctcactcatccggtcaatgaggccgatgacgacacctgccaccaggaacagggcggagagctccggaaaccaccagcctagagcgggcagggacaggcccatctcgtcaaagggcaccacagcatagaccatgataaggaatgtcagcgtaaagagggccatgatgaccttccgcttggcggtaaagggcacctgctggtccatgcttacctggatcttgcccgcgcccacgcccaccacggatttggaggggttcttcttgacctttgcggcgtaggccatcacaaaccagatggccgccgcctcaaaggccacccactccagcagccgcagcacgataccctctcccagagagaccccggcaaagcccgcggcgatgccggtggcaaaggggttcaccgtggaggcgatgacgccggccccggcccccagcaggatcacgctgatgcccactaccgcgtcgtacccagccgccaggaacaccgggatcagcaggggataaaaggccatggtctcctcccacatgccgtaggtggtgccgcccaggccgaacagcagcatcagaatggggatcagccacttctcccggccgcccagcaggcggatgacgttgcccacgccggcgtccacggcaccggtcttcatcaccacgcccagaaagccgcccaccatcaggatgaagatgcacacgtccaccgcgtcgtaaaagccagaaaaagctgccttcagaacgtcgcccactccctggggattctgctccaccgtgtggtacgtccccgccaccggcacgccgtccacgtagtcatagctgcccgccgggatgatccaggtggcggcagccaccaggatcagcagcaggaacaggatcgtataggctgtgggcatgtggaattttttttgattcaagatatctaccccgcttctgttttgacgccgcggcgtcaacatcatttccatcatgtttgccggcagcacgcgtgtcggcaaacatccttcccagctatcaagtgtgcaagcgaagcgagtacatgcagatagctgtaaacgctctcacgaaaaaggcggcgccttttccatgaattatcttccgatggtggccaccagcacagctttgatggagtgcatccggttctccgcctcgtcgaataccacgctgtggcggctgcggaacacctcgtcggtgacctcccggatgtccacgcccttgtcctgccactccttggccagcttggtctcaaagtcatggaaggagggcaggcagtgcagatacagcacgttggagttgccggtggccttcagtgtctcctccgtcacccggtagggcgtcagcagcttggcccgctcggggatcaggtcctcctcgcccatggaagcccagatgtcgccgtagatcacgtccgcatccttcagggagttcatgtcgtcggtgatctcgatgaggccgccgttctcccgtgcggtggcgaatacccgcttcaccagtgtgccgtccatctccttggccagctcctggggccccaggcccacaaaatgcatacccatcttggcggcgccgatcatccaggcgtagcacatattgttccgcacgtcgccggggaacaccaccttcacctggttcaggggcttgtggcagtgctcctcaatggtcatcatgtccgccaggatctgggtggggtggtctgcgtcggtgagaccgttccagacgggcacaccggcgtacttcgccagatcctccaccaccttctggtcgtagccccggtactcgatgccgtcgaaaaaccggcccagcactttggcggtgtcctccagagactccttcttgcccatctggctgctgccggcgtccagataggtgacgtggcccccctcctgggtagcagccacctcgaaggagcagcgggtgcgggtggaggtcttttcaaacagcagcacgatgtgcttgccctgaagggttgggtcgcagatgccggcccggcgcttggccttcaggtcgtggcccaggtccaggagataacggatctccgcgggagtgaagtcttccagagtcagaaaactccggcctttcaaattgattgccataaaatgcactcctttttatcttgttcatgatgaggactttttgaggggacagatgtggaccgccgaacaggggctgtgggggatactgctcccggcggaaaagaaaacatgtttcggcgggggaaggttggcgatcccttgcggcggtcagagagggaaacgtccggcccttgtgaacccctccagcccggggaagtccgggatacacgctgcgctgattttcgctgccgctggccggtggttaatgagagtttcagcatagggccaagctgcagcttctatgaccgccagggcagtgcgtagcgaagccgaacgcgcggaaggaggaaccagtggaacactgatgacggaaatccccggagcgccgtagcgcgagacaggaaaagcgaagcagttcaaatgcgtccttgcatcccggcaacttccgcaccatccgccacgggacggcagtcgagggaattgcagaagggcctagcgtgcccgaaggcaaggccaaatcggagcaggcaccgattcgccgcccccccttcagcgcggagggccactgcaccagagcgcatccaggcgcctttctctttggaccgtgcacggcccgtttctcttttggcaagaccgataaggggtcccgccgcgccccgcacggtggggagaggaggagcgcccaagcccacggagtgggcgcggaagtgcccttggggtgcaagggagcgggcgcagttttcgccgtacacggaaacggggctgagcggactttgcgacgacgacatgggggtgcatcccgctggacaagccctccctggccggggcggcccattcacgctccgcgaatgcttacggatcctcccgccacagcggcatggacatgcaccggggtccgccccgcccgcgggagagttctgcgctgggaatggtgtggagccggatgcccgcctcctccagggcccggttggtgacatagttccgggagtacaccaccacctcgccggggccgatggccagggtattggagccgtcgctccactgctcccgggcggcgtcgatctcgctgccctggccgcaggggatcagtgtcaccttatccagctccaggtgctccttcaggatgtcctccagccggccgtcctcctgacggattttcatcttccggttttcgtccagctccatgacgaacaccgtaatctgctggaggatgttgggatggacggtgaacttgtcccggtccaccatggtgaacaccgtatccaggtgcatgaaggaccggctcttgggaatgtcaaaggccagcagcttgcggaaggtcttgctctcggagagcaccgtctccgccaaggcgtcgatggagtcctcctccgtccgctgagagatgcccaccgccaacacctgaggggacaggatcaggatatcgcccccctccagggaggaggtctcgccccggtcgtaccacctgggggcgttgcggtagtccgggtggtgctcgaaaatgaacttgccgaacagggtctcccggtttctcgtggcggtgtgcattttgtggatggacacgccggtaccgatggtggcgaaggggtcccgggtaaaatagaggttgggcaggggatctacggcgaaggggtaatcatccccggcggcagagagatagtcccccagccgggcgctgtttgcccggagctgggacttgcggacgcccgccatcatggcagacaccatctccttgtccggcagggcagagaggaagtcctccaggctctcccggagccggtcgtccttgacgccggactcctccaggaactggcggatcaagtcggcccgcacgtcggcgtccgtgatggactccgccaccagatcccgcaggtagaccacctccactccttgctgccggaggcagtcggcaaaggcgtcgtgctcccgctgggcctccttcagataggggatgtcatcaaagagcagccgctccaaatactccggcatcagattttccagctcaccgccagggcggtggagaaggacctttttcagccgcccgatctcggaggtattgtgaattccggtttccaaaaagctcactcctttgttcatcggaaaggtacagggaaatcgctctggtttagggtctctggattttggcatttcatgcgccgttccgaaaaatccgcgcaaaaaaagaacggacgaatcgtccgttctccccacatgttctccgcaaaggccgcccgtccctccttcgggccgcggcgtctccccgccgcctccggggtcccgcggcatcggcagtggaaacgcaaaaacaggagagaggcttccgcctctctcctgctgttatctgtgcttgccgagatacgcctctttgatcttctcattggccagcagctccgcgccggtgccggacat

SEQ ID NO: 4895 - DNA, 317 bp, Unknown
  gut microbiota DNA sequence
aagttggtaacatcactttcaatgacacctaaataaacaaaatcgtctttcaattcgttgaacgatgtttgcaaagtagactgtttatacaaggtgtcattaacataaatcatcggtgctgcgtctgatatacccggagtagtaacactatcgttgttgtggggaaaaagggaaattgccgcaacgcatactaaagccaaacaagcggcaacaactccccatttaacccaaatcggctttttggttttctttttgtagctgatagcctcatcaacatacttggtgtcaagctcgctcatggcttcggaaaacttctt

SEQ ID NO: 4896 - DNA, 303 bp, Unknown
  gut microbiota DNA sequence
tttctttttgtagctgatagcctcatcaacatacttggtgtcaagctcgctcatggcttcggaaaacttctttgagttcatacgaatacctctctttctgctaaatagcttttcattttctgacggatacgggtcagccggacggagatatttttctccgaaagccctacaaactcggctatgtccttgcaactatcggaaaaccaatagcggcgcatgaagataacgcggttttcgaccgtcagcgtgttcaaaaagacctcaatgatacgggctaactctctggtctcaatctctgcttct

SEQ ID NO: 4897 - DNA, 123269 bp, Unknown
  gut microbiota DNA sequence
agagcccggaccaaaggcccggctctgaccgccgcccctttcttgcagtcgggggttgcagttatctgcggataaacgcctcatcctgagaggttgttggcgtctcatcggacagatatcgctccacccgcatgtgcaggtcgtactgctcccgaagccgggcgatctgcgccatcatgggggaggcgtggtgggtgtccaaagcctgctgatctcgccagctgtcgatcagcagcacagtctccgggtcctccatggggaagaaataggcataccgcaggttccctgcctctgcccggatcgcatccacgacgccgctgacggtcatctcctctgcgaatttccgggcagctccgcggttgcccgtgtaatagatattgacagtgattgccatcgcagaatcctccctgtatggttttttcaattttatcatagagcaagggtgctgtccagacggccgtcaggcccggcagcacaatccgtttcaagaaagggctgatcttgtgaagctgaaaaatcccctgctggcagtccgggacatggagcggtccaagaccttttaccgggaggtcctggggcttcatgtggtgatggatttcggtgccaacgtgaccctcaccggcggcctgtgcctccaaacactggatacctggacggatttccttggaaaagaggcggaggagatccgctttggtgcaaatgacagcgaggtctactttgaggaggacgacttcgacggcttcctggcgcacctggttgggtgcgcggatgtggtgtacgtccgcccgcccctggagcatcgctgggggcagcgggtggtgcggctctatgacccggaccgccacatcattgaggtgggtgagaatatgaagtccgtctgccgtcggttccgggaccagggcatgacgccggagcagatcgccgcgcggatggaggtgcccttgaagttcgtcaccggctgtctgcgctgagatgtctgagaggctgagaaaggggaagtccccgccgatgaaaggagagacgggatgtttaccgacggaaggagcaggcgtgtggtgtttctggcccactgcctgctgaatcagaacgccatttccgacggcacggcggaggtgcctgccgcccaccgggagattttgcggctgattctggatgctcaggtaagcgtggctcaaatgccgtgcccggagctgtgctgtctggggctggaccggggagatcccaaaggaggggaacgaccagtggaggcagagaacacccgcatccgccgggccatgggccagccggaggcatctgcccggctgcgggagctgacggatcaggtggtttggcagattcgggagtaccagaagcacggatttgccgtgctgggcatcgtaggtatggaccgctccccctgctgcggggtgaacaccacctcggaccaggaccgggaactgcccggccggggcgtgtttatcgcatctctccgggcggcactggagtcggcagggctgaccgtacccgtgatcggcatcaagccgtcggcgccggaggcgctggaccgggtacggtcccttctgggggaatgaggtgtgcgatggagattcgacgcatacagggtggcgagcttccggcggccatggacctgtgctggcgggtgttccttgaatttgaggcgccggagtatccgccggagggcgtggaggcatttcgtgcttatctttcagatattgaacaggtaaatcacttgacactatttggcgcttgggaggggcaggagctcctgggagtcctggcggcggaggggagccacatcgccctgtttttcgtagacccggcgtttcaccgccagggcatcggccgcctcctgttccaggcatatctggcggagggcggccgcgggcggatcacggttcacagctccccctatgcagtggaggtctaccgccatctgggcttttctcccacggcagaggaacagctgtccccggacggcatccgatacacgcccatggtgtgggagcaaacatgaaagagccctaaatacagcaaagcccccggagggaaatcccctccgggggctttcgcgcttcagcggatgaagttggtccgggcctcgctctccgcctggggcggctggagtccagcggcctttcccgcctggatgcactggaccatccagagcaggtttcgggccaaattccgcatggtctgcattccctccgcgtcctggcgcacctcctccggcgtgttgccgtggaccatgttccagtaggtagaggaaactaccggcatctgggcgatggtgaaatatttgtccagcacatctacagaggccgtagtgcccgccctgcgggcggaggcaacagccgcgccgggcttgtgggcgaaggcgtcttttccggcgtagaacacccggtccagcacggagaggatgcgaccggaggggtgggcgtaatagaccggcgtaccgaacacgaagccgtccgcctcccgggccttctcaatgattgggttcaccatatcgtcatcgaacacgcagcggcccggcgtcttctgacaggtccggcaggcggtgcagtcccggacggggccgctgcccagaaagaggatttccgtctccgcgccgccggattccagcgtatcagcgatctcccgcagggctgtgtaggtgcagccgttgggccgggagctgccattaatcagcaaaattttcatgtatatgcctgcctttcccttgagataccttcatgataccccgccgcaggtgccgatgcaagcggagaaatgggaagattttgcggcggggtgtgattccgacaaaaaagaatgggccgtttccttataatgggaggaaaaacggggtaccctgtatcttggtacacaaacgacaaggaagaagggaactttatggagatcgaagccacaagcgcggaccggaatctgctgctggagatgaagggggagctggaccaccacggggcccggaacgccctccgggagctggagctgtccatcgacgcggcgctgccgaaaaaactggtgctggacctggcgggcgtgacgttcatggacagctccggcatcgcgctgatcctgcgggcccagcagcggatgcagctgctggacgggagcctgctggtgcggaacgtgcctcagcaggcacggcgggtcctggatgccgccggcatcggccggctggtgacgatacgataaaagggggagtacataccatgaagaccaaggccaacaacgaagtcacgctggcatttcccagccgcagcagcaacgaggggttcgcccgggcagccgtgtcctgtttcgccgcccagatggatcccaccctcaacgagctggaggacatcaagaccgccgtcagcgaggcggtgaccaacgccatcgtccacgcctatccggattccatcggccaggtggtggtgaaagtccgcatctgcccggaccaggtgctggaggtgacggtgcgggaccacggcaggggcatcccggacatcgagaaggcccgccagcccatgttcaccaccggcggggaggagcgcagcggtatgggcttcaccattatggagagctttatggacaggctggtggtccgctccacgccgagccggggcactaccgtggtgatgcgcaagcggctggcaccccggatgcagggcacaaaatgagcgccacgctggagctgctgcgggcggcccaggagggggaccgggatgcctgcgagcaggcggtgattgagaacaacggcctgatctggagcgtggtgcggcggtattacggccggggcgtggacccggaggacctgtaccagctggggtgcctggggtttctgaaggcggtgcagggattcgactttgactacggcacctgcttctccacctacgccgtgcccaaaatcgccggggagattcgtcgctttctccgggacgacggcgcggtaaaagttgggcgcaccatgcgggagcaagctcaaacactttacaccattcgggagcggctgcggcaggagctgggccgggagccggtgctcagcgagctctccgaggcctccggcctgacgccggaggagatcgcccaggtggagatcgccacggacacgccggagtccctccagcgggagaccgcagacggcctcaccctggaggggatgctgggcacggacgccccggaggagggcatggtggagcggatcgccctgcgggagtccatcgatcagctgccggagaaggagcggatgaccattcttctccgctacttcaagggactgacccaggaacagactgcccggatcctgggggtgtctcaggtgcaggtatcccggctggagcgccggggcctgaaacggctgcgggagttcctctcgctctgaaatgcgcttccccctggaattccgtcatggtgccccagtaccgcttgggcatgtgggtcatgcggcagcgggggttttcccgctcccggatggcgatggtgtcgtagaatcgcttccacagcaggcggtagcgggcctccgcctcgtctggcggggccatctggaagtgctccaggggccggacggcagagcggccctcggcgtagaacagggcctcctggtgggtacggtcgtagaggaagaaccgttcgttccggtagcggtcgcagaagtgacggcgcagcaggggcaggacccggtttttcggctcgatttcgccccccagtacgccccccaggtcggagaagcggacgaagcccttgtactggtggacctcaccgttcaggtggcgcaccgcccgcagaatgggatacagcgtctcatcggacagatcccggaggaaccggggcccctcctccagcagcttcaccaccagacggtacaggtgcatttcccggtccggcaggcaggtgagaaagccgcggcgcagcaggtccgccgcctccggcgacagcttgaccaccttccgatatacccgtgcggcgtggtcccggtccgtcaggacggtccgcacagggaacaacgtgaatggaatgtcctcaccgcagctgatggcggtgaggacttctttttgggcgtagctctcaaagatgcaggtgaggaatccctcaaagctgccgtcgtattcataaatcatctcggtcatggggaacctccctcacacaggggcaaacagggacatctgctccagctccggttggggcagggagggccgctccgccgcgatcagattccgcagcaggctgtccggtgtgaaccgcaggccgtctgccatgcggccggaggcggtgagaaaatactgggcccgcttcatcaccacccccagcttgggcagatcctcgatccgcagcttccgggcccggcgggacaccagaatgcgcttggcggagaccacgcccacgccggggatccgcagcagggcctcgtagtccgcccggttcacctccaccgggaagaagtccaggtgccggagggcccaactgcacttgggatccacctgggggttgaagtccggatggcttgcatccagcagctcctccgcccggaagccgtaaaaccgcagcagccagtccgcctgatacagccggtgctcccgcagcaggggcggcttcgtgtccttggcgggcaacagggcgtgctccaccaccggcacgtaggcggagtagaacacccgtttgagttggtagcggtcatacagcccctgggtcagccgcaggatgtggaagtccgtgtccgccgtggcccccacgatcagctgggtgctctgcccggcaggggcgaacctgggggcgtggcggtacttcaccagctcctcccggctctgctgtccccgcacccgaatctgccccatgggagccaggatggcctgcttcgtcttgtccggggccagggtccgaagtcccgcctctgacggcagctcgatattgacgctgagccggtccgccaggaaccccatctgctccaccagctccggagccgtgccggggatggccttggcgtggatgtagccgttgaagcggtactcttcccgcaagatccgcagcgcccggatcatcagttccgtggtatagtccggggagcggtacacgccggaggagaggaacagcccctcgatgtagttccggcggtagaactggatggtgaggtccgccagctcctccggggtgaacatggcccgcttcgcctcattgctgcggcggttgacgcagtatttgcagtcatacacgcaccggttggtcatcagcaccttcaaaagggtcacgcatcgcccgtcggcggagaaggagtggcagcacccggcgatagaggaggtggtattgccgatataccccgccttggccctccggttcccaccgctggaggtgcaggccgcatcgtatttggccgcgtccgtcaggatggtgagcttttccagaacgtccatctcaccgcagggctgtccgccgccggtcatgccgccggttgggacgctcgatggcgtcgatgacccggaagagctgagaggtcagaaagaccacgcctaccagaataaaaaagaaagtccagccgctcatggaaaaaacctccttgatcgaacttttgttctaattgcattgtaactcgaacaaacgtttctgtcaagcagaaatcgaacaaaagcacgagagagtttgacagctcccatgggccagcagagcgggaagcaccacacaaaaagggaccgcctgtttggcggtcccttggatgttcagcacccggccaggtccctgaggaagtcctccaccgccgtctccggcgtggcccagctggtcaccagacggatgcaggtgtggttcgcatccaccgggtggtcggtctcaaattcatagcccatctcctggagctttgccaccgtctcattgggcagtaccgggaactgctgattggagggggaggccaccgggaagggatatcccagggccgcgacgccgtcccggagccggaaggccagctcgttggcgcggcgggccaggtcgaagtagagcccgtcctccagcagggcctggaactggagtcccagcagccggcccttggccagcacggcgccccgctgcttcatgtgccagcggaagtgaggcatgggacgggtgagcaccagcgcctccccgaagagggcgccgtttttcgtgccgccgatggtgaaggcgtgggtgagggcggccaggtccggcaatgtcaggtcgttgtcgggggaggtgagggcggagcccagccgggcgccgtccagatagaggaacaggccgtgaacatcgcagcactgccgcagggcggccagctccgcccgggtgtagaccgtgccgatctccgtggtgtcggagatgtacaccattcggggcagcaccatgtgctccgtgccgttgtggcccgccagaacggactcgaccagggctggggtcagcttgccgtcgggactctccacggtgcagaccttgtgtccggtggcctcgatggcgccggtctcatgggtgctgacgtggccggtctgggcggcaaccaccgcctcataggactgcagaaacgcgtcgatggtaacgaggttcacctgcgtcccgcccaccaggaagtgaaccgccgcatccggcgcggcgcagaggcggcggatggtatccgccgcggcttggcagcagggatccatgccgtagcccacggtctgccggaggttggtgtccgccagggcctggaggaccttgggatgggcgccctcgctgtaatcgtttcggaaactgtacattgtgatctcccgcctttttccttgtgatagagccatgataccgcctccggcggagaattgcaagggcagggcggatgggatggtaaaagaaaaaaaattggaaatactggcggtgagagggaacttttcagcggagaggtccgtctgtattccccgagaacattcagaaaggaaatcaatacaccatgaagaaatttttgaccctggcgctgtcggcgctgctgacgatgggcctgctgaccgcctgcggcggcaagactacggacaagactgtggatctgacggccttttacaacaccctggcggaggagtacggctgggcggaggacgccgcctccagcggcgaagaggacatcatgatgatgaacttggagggcgacatgctggagggctcctatcccggcctggccgatgtggccaccaagcagctgatcgccaaagcccctatgatcagcgccgtggtgaatgagatcgtgctggcggagtgcgggacggaggaggacgctgccaccgccgcctccatcctgcaggaccgggtggacgcccaggcagagggcggcgcctggtacccggagtccatggagacctggtccaacgcacaggtagtccagaatggaacctatgtggccatgattgccacggcagaccatcaggaggagatcgcggagcagttcaatgcgctctttgcgtaaggaggcagccagccgcggcaccgccgcggctggctgtgtgaaacggagaagaggggaggggcgccggtggtcttcagcagcctgacatttttatttctctacctgccgctgacgctgctggtgtactttctctcgccgctgaggtggcggaacttcgtgctgctggtggtgagcctgctcttctacggctggggagaaccggtgtacattgtcatcatgttcctctccatcatcatcgactacacccacggtctgctggtggagaagttccgcagcgacgacaaaaaggcccggtggttcgtggcccagtcggtgatcttcaacctggctctgctgggctttttcaagtactgggacttcatcgcagccaatctgtccctgatcccgggcattgatctgccccagctgggcatcccgctgcccatcggcatctctttctataccttccagaccatgagctataccatcgacgtgtaccggaaggacgcaccggtccagcgcaacatggtggacttcggcgccttcgtcaccatgttcccccagctgatcgccggacccatcgtccagtacaaaacggtggcagcggacctgcggcaccggctccacacgtcggagaacttcgctctgggggcccggcggttctgcgtgggacttgccaagaaggtgctgctggccaactccatcggcgccctgtgggaggactgcctcgccgctcagggggccgggacgctgacggtgctggggggctggctgggcctcgccgcctatggcttccagatctacttcgatttctccggctactccgacatggccatcggcctggggcggatcttcggcttccggttcaacgagaactttgaccacccctactgcgccgactccgtgggcaccttctggcggcggtggcacatgtccctgacctcctggttccgggactatttgtatatccccctgggaggcaaccggggcggcaccgccaggaccatccggaacctcctgatcgtctggttctgcacgggcttctggcacggggccagctggaatttcatcctgtggggactgtacttcgccgcctggctgatcttggagcggtacgtccttcggggcgtactggagaagaccccggcgatcctcaagcacctctacaccctcatcgtggtgttcgtgggctggggcctctttgccatggtggacctgggcgtgtgcggggactaccttgccgcctgtttcggcggtgcgccgctctggagcggggcggacctgttccggctgcggagctacgccgtgacactggcggtactggtgctggcttccaccgctctgggccagcggctgtgggcgaagctgccccggcaggcagaacagctggccaccccggtgctcatgggcctttccctggtggtctgcacggcctatctggtggacggcagctacaaccccttcctgtatttccggttctgagaggaggcagagaccttgtccaaacgatacgcaagatttctcacagcggtgttctgcctctttctgggggggctgatggtgtggcagatgctcctgccggaccgggagcggtccgacgtggagaaccgcaccctccagcagcggccggcactgactctgtccagcgtgctggacggcagctatatggaggacgtggaggcctacgtccaggaccagtttcccctgcgggaccagtggacgggcctgaaggcccggacggagcagctgatcggcaaacggctgttcaacaacatctatctctgtgaaggcgaaacattgatctccaaggtggacgcccctgcggacggcctggagaaggcgaacctgaattacgtctcccagctggcggagaagtcggacatccccatgtatctggggctgatcccctccgcggcggaggtgtggcgggacaaactgccggagggcgcggagtcctgggaccagaacgcttacctctcccaggcggcgggcctggggctgcccatgatcgacttctccgccgccctgaccgctcacgccgacgagcccatcttctaccgcacagaccaccactggacgtccctcggggccttctatggggccaatgctctgctggaagtcctgggaagagaatcattaaagcaggaaagctttacaccagagattgccagtaccagcttcaatggcacgctgtactcccagtccggcatccactggctgacgccggacaccatggaattctgggtcaaagaggacggcctcatggtcacctcctggcgcaccggctctccggaacccggcatactgtacgaccggagctatttgaccgagaaggacaaatacgcctccttcctgggcggcaaccaacccctgtgcgtcatccagaatgagaacgcccgagacggcggcaagctcctgctgatccgggattcctactccgacgccctggcacccttcctggcccagagctttgccgaggtccacctgctggacccgcggtattaccggatgccccccgcccagtacgcggcggagaacggcatcgacgccatctgcgtcgtgtatagtatccccaacttcatcacggaccggaacctggtgttcctggcccagtgagcgcagaaaagagcggccggagtttcggccgctctcttttttgatccgaattcacgggccggtgccggtgccgtcgcaccgccagccctcatccgtcaggtagaggacccccacctggaaattctcataggcgccctccggggcctcgccgtacctgccgtcgtactccacggtgttgccggccatctgccagctgcgggccgcctcattctccggtacaaagatgcgccggtaggagaaccagaaccgctcgtgcccctccgattgctccggataggaggtctccggcatatctgcccagctatccacatcggccacagtccgcacataggtgcaggcgaagatgctgccgtctgtgacctccagggcgggctgcgtatccgcatcggcccaggcctgggcgatctccagatggctctgtccccggtccgggatgatgatgccctcccgcagggcctcccattctacttcgtcataaatctggcgcaaggctgcaaagaccgtgccgttgaagactgcgtccgccgtcaccggcggggcgtagaaccactgtgtcacgccgctccgggtgcagcggaccagggagctgccctcccagcactggagggcggcgctgccgtcctctgcggtgagggtcagggaggccaggcccgccgggggcgagcccgcctccgcggggtaccagaggaaattctccggcatccgggagatggccgccgccatatccagcggcagtatatagcttccgccgccggacccaccaggggcgggggagagggtcagggagaaggcaccgggggccaaaatcccgtccatcgccgcctgaacagcagccttggccgcctcgttcacctccggccgccccgaagcttcggggcccacatagcacccgtcggcgtccgggcagtccgggttgggggtgataccgttgcggaagaagaagccctcgattaccgtctgggactgattccgcagcagctcatactgggccatactggtggggtcctccaccaggaactgcacgtccgtgggggtggagagcagatagatgtaggcgtcgtcagagccgatcacatagctggaagcccctaaaatctccgaccagtccgcgtccccaaaggcggcctggaactgggcacgggtgagggcccggacattccagaccagacctgtatcgggatttgatatgtgggcaagtcgctcatagacgtcgaaccccggcacagattctccgaaccagacagcgtcctcagcggtgaccgccgccatgtctgcccagccctccggcacccacagggagaggccgccgctctcatagaccgtgccatctcccgccgctgtccagatggacagggcagactggagcgcctgccacgcggcccgaccgccgtctgtcagatcatcggagaagatttccatataatgggcaatgctgtcatagatctcctgagtgccgggatcgtctccggcggcgacacaggccgccatggcggcaagggcctgggactgctccgagaggttcgtctccgacagcgtgttgaagaagtggactggctgactgcagctgatatccagcagctcccgccccgtcaggtcatagaaggacagcagccccatctcccggagctggtaggccatgcctgagaaaaacagctctgttccggggacgcagtcgttctccatgcggtgatacagataggtgcgggttccgccctcgtccagttggaagtagaagtagtcacacccggggtaaccggggctgacccagcagtcctcggtcatgtacgttccgccggccaaaatgacgctctccggcgtggtggtgtgcagttcatagttcatgctccagatggcaaaatccaggccgcccacggatacataggaggggccctcgatggactcaatccgccagtcgtcatattccagcggggcggggacaaagtcgccgccctccacgaacagcaacccctcatggtcgccggtgtactgctcctgcacgtagtcccgcaggaccgccattacgtcctccggcgcttccgcgccctccatcaagtggtccgccgtggcacggccgtcccggtacaccagcaggttttctccatcaaagtacagccaccggtcggcggtgccgtcctggggactgtcgggaatggggacgaatgcccacagggccagattccggcggctcacgtcccaacggttgaagctcaagtactccgcgtccggccaagcctgtttcaaatcctcgtcgatgtccgcctcatagatccgcccatcccgctggaaaaagatctgtgcggtgtttgccgaagaggcacacaactcgtctgcgccgttgccatccaggtcgaactgggcggtgtcaccgtagacccgggccaggaggacgggatttccctcggtgtcgaaatagtaatagtcgtggaaggtggcgcctgtatgttcgtccagctcgccggagtaacggatgaccagcccatcatggccgaacagatcggagaaggagtccatggagacggcgtagccgccggaatcgctgtaactcagcgtgttatgctccgggaaggtgaagaagcagcccacatcccatgtgcgcatcccgtcccggcccgccgcctcgtcataaatcacggcggcgtagagattgccgtcggtggagagataggtgcggacagagagttcatcgccgtcctcggtgtgcatgatatagccagtgccacgctcggcgcagtcattccggtgccgaatggcctccatggtctccggctcatagggtgtgaggtctgtcagcggaatggtcagcaccggctccccctccgggtacacggtagggatggcgggccgctcactgggctggttggagacaaaccagtaggagccgtcggcctgttcttccagtgtcacgcacttccagccgtcaacatggaacgtgtcgtcgtagtagagccggatggtatcgcccacccgctccccggcagtgatgttgacgcccgagaagtagttggtatccccgtggctgtgatagtaggcatcatactccgggaggtactggaagtagtccatcccgatccgccccgtctcctccagcgtgaggccggtgttctccagcagcacctggttgatggcctccacggacatcttgtccacagggcagatcagctcccctgcggtgtcaaagctgcccacctgccgcagctcctcatcggtcataggcgcgtcgatccccgtgccgcaatagaacagctcaaagaggtcgatgtcctccggcttctcgtacagggagttcaaaaattggttgcggatgctgtaagtaccctcctgattgaagaactcctcattaaaatacgccagctcgtcgccggtgagggagcggacaccgccggtttccccatccgccttggccccggtgaaggtgacggcgcagacgcccgctgccagcgccagaaccagaaacaaagccgctgcccgggtctgttgtccctgggcgatgcgggtgatccggtccttcagctgccgcttatctgccgtcatggtggtggcggacagcaggggagagccgggacccgtccgcaccggaatcagggacagcagcgttttgccgtaggggatgcgttcgccctctcccagggcctggatggcggcctcgtcgcaggccagctccccgtcggccttggagacggcggcggcgatccacaccagagggtcgaaccagtacaccgcgaggcacacgctccgcagcagcgaccacaacgggtccagatggcgggcgtgggcggtctcatgggccagcacatgccgcagccgctccggagaggtgacaacggcgggggtaagataaatggcgggccggaacagcccgaacaggcagggggaggggagacctgcctccaccagatagacgggatacctgcagttctccgcggcatagggcgccctcgtcctccggagcttttgccagaagcgcaggttggtcaccagaaaccacaccgccatggcggcgatgccgatcagccagaggaccgtcagcaggtccgccgccgtcaccacccgctcccggatgaccgggtaagaaaaggcttcctccccgccggagggcgcggccgcctcccccgagggggagccgcctccctctatctgaggtgcgggggatgtgacctggggcgctgtccccatgggagagggggccagcggcactctgtaaatttcccgctgttccagccgttccgtcactgtccggcccaccggctccgccgccgacaggacggagaagtccgctcccggcaggctcaccggcaccagcagccgcaccagcaccagcgcccacaggacatactgggcccggcgggaaatccggtcccggaaggcccgccgcaacagcaggaccgccaggatcagcacggaagatgtcaacaggatctcacgcatgttcctcgcctcccgctcgttccaaaatagcggacagctccgcgatgtccgcctccgtcagctggcggctctccaccatggcgctcatcatcaggcccaggctgccgccgtagacccgggagaggaagctctccgtctccgccgccgcggcgtcctcgcggtccaccgcggggaagtaccgcttggcccggccgccctcctcgtgccggacggcccccttggcttccagccgggcgagcatggtgatcaccgtgttcttgctccagcctgtgtcctccttcagggaggccgtcagatccatgatggtccggggggactgctcccacagccggttcatcagcttccactcgctgtcggacaggttcacctgcatagtctcacctccatggtatacgagtgtctacctggtcttctgattggaccatatcaaataggtagacatttgtcaacctcaaattggtaacaaaagcggcaaaccggcaacagccgtttcccgccttgaccggaaggggattttgccgtaaaataggggccgagacttttgagacggatggagaacggtggacttatggaagacttcaaacaacgctacattgccgcccgccgggcggtcatcgcccaggacttatccaggctgaaccccatgcagcgccaggctgccatgaccacggagggtccgctgctgctgctggcgggcgccggcagcggcaagaccacggtgctgatccagcgggtgtacaacctgctgacctacggccggggaagcgattcggaagaggtgccggcctgggccacggaagaggatcttcaatttctggagagcttccccgcccggcccacggaggaggacgtccgccgggcccggcggctctgcgccctggacgcgcccaagccctgggagatcatcgccatcaccttcaccaacaaggcggcaggggagctgaaggaccggctggccgcccggctggggccggaggccaacgacatctgggcctccaccttccactccgcctgtgtgcgcatcctgcggcgggacatcgaccggctgggattcgacaaggacttcaccatctacgacaccgacgactccaagcgggtcatcaaggacattctgaaggagctgaacctggaggagaagaccttcccgccccggagcgtcctggccgccatcagccactccaaggaccagtatgagacgccggaggactttgccaagcggtacgaggcggcgggggactggaagatgacccgcatcgccaagatctatgccgcctatgcgaagaagctccgcaccgccaatgccctggactttgacgacatcatctttcacacggtaacgctgctgcagcaggagcggtcggtgctggactactaccagcgcaagttccgctacgtgctggtggacgagtaccaggacaccaaccacttacagtatctgctgacaagcctcctggcgggggggtacaaaaacctctgtgtggtgggcgatgatgaccagtctatctaccgcttccggggggccaacatcgaaaacatcctgaacttcgaggagcagtaccccaccgcccggaccattcgcctggagcagaactaccgctctacccagaacattctggatgcggccaacgccgtcatccagaacaaccagggccgcaagggcaagaccctctggaccgacaacggcgggggcgatgtggtgacggtcaagaccaccttcaacgagagcgacgaggccaactacgtggccggggacatcctgatgggggtgaaccggggcaggaacttccgggacacggcggtcctctaccggatgaacgcccagtccaacgccctggaatacgccatgaagcgcaacggcatcccctataaagtagtggggggcatgaagttcttcgaccgggcggaggtcaaggacatgctggcctatctgtgcgtgctgaacaaccccctggatgacctgcggctgcggcggatcatcaacaacccgccccggggcatcggcgccactacattggacaaggtgggcgccttggcggagagccagggggcgtcgctgtatgagatcatccgcaacgcggacctgttcccggagctgaaagcgtcttccgccaagctgctgaagttcgcggacctgatcgacggcctgcggcgggcgggcacggagctggccctgccggagttctatgacgccgtctgcgaccagaccggctatgtaaaggccctggaggagaagaacgacatggagagccggggccgcatcgagaacgttcaggagctgaaatccaacatcctgggcttcctggagcagcagccggaggacgccaccctctccggcttcctgaacgagattgccctgtacacagatctggacagcgtggaggccagcgacgactgcgtcaccatgatgaccattcactccgccaaggggctggagttcccggtggtgtacgtggtggggatggaggaggggatcttccccggcgcctccgcccagtacgaccaggaggagctggaggaggagcggcggctctgctacgtggccatgacccgggccaaggagaagctgaccctcaccaactgccggcagcggatgctgtacggccgtaccagcgccaaccgggcctcccggttcctggaagagatcccggaggagaacatgcgctgggagagcaagccggagccccgtttcggcggtatggagcacgacggcaccttcggcggcgaccggtacgaggacggctggggcagctcccccgcccgcgccggcggctcctggagcagcggcggcgtccacagctaccgggccccggcccaggcgccccagcggcccctggcctctgtccggcaggcgtcctccgcccggaagaacgccgccccggcggcgcccctgctgcaattacagcagggggacatggtagagcacaccgccttcgggaagggcatggtgctctctgtccggcccatgggcggcgacgccctgacggaggtggcctttgacaccgtgggcaaaaagaagctgatgctgaaatccgcgggagcccacatgaggaaactgtgatgatggagatcgaaaactggatgaagcaatactgcggggccgtccgggccgcctttggggaccgggtgcggtacatcggcctccagggcagccggggcaggggagaagccggaccggacagcgacatcgacgtggtgtgcattctggacagctgctctctgcaagacctggagacctaccgggcagccgtgaaggacctgccggaccgggacaagctgtgcggcttcgtctccggtacggcggagctggcggcctgggaccggggggagctgttccagttccgccgggacaccaccgactggtgcggacgccttgcggacctgctgccgccggaggagccaggggacgcccgccgggccctccatcagggggcctgcggactgtatcacctgtgctgccacaactttctccacggcagaagccgggaggcggtggcggaggcctgcaaggccgccgtgttcctgctgcaggccaagctgtatgcagagcaggggctctactgccgccggagatcagacctggaacagcacctgaccgggcaggacctggagattctgcaaactgcccaggccctgaaagcaggggagtgccgggaggacctgacagccctcacggaccggctgtttgcctggtgccgggacgtgatcggccagcagaaagcaatctgaacaccagggcccgccgttttcggcgggccctggtgttttgtgtgtgatcgggggtgggagatccggtccattgcacggggatcagccatgcctgcggctggacagatgccccccctacggctccacccggatgcccagaatccgggccaccaccgcggcctgggcggcgttgatgacggcgcccttcagctcccggcaggtctccgacagcacgatccggtccagggtgcaggccgtcaggtccatgccggcaaggctggtgcgaaacagctccgccccggtcagatccgtcttctccatggcagcttttttcagccgcatctccgagagcgtagactctgtgaagtcacattccttcacggaaatacgctcccagacgccgccggaaaagttgacataacgaagcagagtctcctccagaacgctgtccttccaccgggagcggcgcaggtccgcgccgtcccatttgcagccggagaggcggcagtccttccaataggtggcggagaggcggcagttctccaggagacatccggtgaaggtgcagccgtaaaaggctgcgccggtgaaatcgcagttccgcaggcggcaggactggaaccggcagtcccggaagtccaggccggagccgtccagcccctcggcgttttcctgggaaaggaccgcggcggagagcacctctccggcctcccgcgccgtctccagggcctcaggcaggccgctcatgggcggagtgcctgccggggcgggagcagcagctcctcaaagctccggatatacacgtcgcaaaatccccgcatggccgcctcgtcctgggcgaagaaaccgtcgtaaacgcccaccacccgcatctttgcagccctggcgcccttgcaggcggagaggctgtcatcgaacaccgtgcagtcctccggtgccacgccgtagtgctctgcggcggcacgccacagggccgggtcctttttctccaaccccaggtcgtgggccagagtgacaccctcaaagtacttcatcaggtccaggtgggtcagggcggtgcggcagtgctccggcacgctggaggtcaccaccgccatccggcggccctctgcccggcactgctttaaatacgcccggacgccgggcttcaccgtgacatgggcataggcgtccctggccatctccatccactcggcaatgatctcctcgcaggactccgtgaggcggcagtactccttggtgaacttggcggccaggggaaggatggtatgggctacgccctcgtaataggcgtgggtgtacgcaatgccccgccgggccagaaattcccggtccacgtttttccagacgccgttggagtcgatcagcgtcccgtccatgtcaaacagcagcatgggccgcctccttttctcggggaggaaccgggtcttgccatttccgccccgttgtgttaaaatttttatttgttcgcggcttttgatcccggacatcaaatctacgggagtttgcaaaagtatagcatagatcctggtgaggagcaagtctgatgaaagtcaaccacatccgtcaaaatgtattccccgtgctggcggctctgatctggggcaccgccttcgtggcccagagcgtggccgccgatcatgtgggtcccttcaccttcaccgccgccagaagcgcggtggcctttgtgtttctgctggtgctgtgtctggtgttccgctgcctgcggcggcgggattttcaggaggaggcccaggcccggcccggttcctggcgggatctggccatcggcggtatctgctgcggcgtggtcctgacaatgggcaccaacctccagcagatggggctggagaccaccacctccggcaaggcggggttcatcacggccctctatattgtcatcgtgcccattgcggggattttcctccggcaaaaggcgccccgggcgatctggctcagtgtggcgctggcggtggtgggattgtatctgctgtgcgtgcaggagtccttttccatcacggagggggactggtacgtgctgctgtgctccttctgcttcgccggacacatcctgctgatcgaccactttacccggaaggtggacggggtggccctgtcctgcgtacagttcctggtgatggcggtgctctctgccggactgatgctggtgatggagacgcctgactgggcggggctgctggcctgtatcgggcctgtcctgtatgtgggcatcttctccagcggcgtgggatacaccctccagatcctggcgcagaaggactccaaccccacggtggtgtccctgctgctgagtctggagtccgtgttcgccaccgtcgccggggcgctgatcctaggggaccggatgagtgggaaggagtacctgggctgcgtgctgatgctggcggcggtggtgctggcccagctgccggacttccggaaaaagcaggcggtaccggcgccggaaaactgaatcgttcagcagggacgccggtttttggcgtccctgttgatttttggttggacaaacgcggcggcttgtggtatactgctatcctgtatgagtatgtagcgaggtgatttcatgcgcatcgacgtgctgggcgtcggctttgacaacctgaccatgacagaggccgtggagcgggggatggagctggtccgcagtccgggcccccactatgtggtgacccccaatccggagatcgtggaggtctgccgggaggacagcggggccagggccgcggtgaacggcgcggatctggtgctgccggacggcatcggcgtcatcaagggcgcggccatgctggggacgcctctgaaggaaaggacgccgggcgttgaattcgcgacccatttgatggataaactggcggaggaagggaagtccctctacctcctgggcgccaagcccggtgttgcggagcaggcgggagcgaagctggccgcggcccatccggggctgcggatcgccggcacccacgacggctatttcaaggaggacggcccggtggtagcggccatccgccaaagcggcgcggacgtggtgttcgtctgcctgggcgcccccaagcaggagaagtggatggcgaagaacggcaccgccacaggcgcccggctgttgtgcggcctggggggcagtctggacgtattcgccggcgtggtggagcgggccccaaaattctggaccgaccacgggctggagtggttctaccgcctgtgcaaggagccccgccgcatcggccggatgatgaagctgccgctgtttttaatccatgtcaagcaggagaagagacacagatgagcggaaaactgattgtattcgagggcacggacggctccggcaaggccacccaggcaaagctcctgtgcgagaccctggcccagcggggcatcgcatatcgggagatcgactttccccggtatggcaacccctttgccgaaccggcgaacctctacctccacggagccctgggcaacaggcccggggacgtgaacgcctacgccgcgtcggtgctgtacgccgtggaccgcttcgcctcctacaaggaggactggggcgggttctatgaggaaggcggcatcgtggtggccaaccggtacaccacctccaacgccgtccaccaggcatccaagctcccggaaggggagcggcaggcatttctggactggctcttcgacctggaatacggccgcatgggcctgcccgcgccggacctggtgctgtacctggatctgcccacagaggtgtctgagaagatgctccggcatcgggagcaggcgaccgccaccgctgcggacattcacgagcaggacggggcttatctccgccgctgccgggagggcgcccgcgagattgcccgggatctgggctggtcggtgatcgactgcgccgccggggacgcgccccggacaatggaggacatccgccgggaggtgctctctcgggtggagccgctgctgaactaggggctgtccccgacgggagcaaagaaaatgggacgaacacgccccattttctccgcagccgtcagcagcagccgttgttgcagccgtcgttgccgcacccgcagccgcagccacagccgcagctattgccgccgagggcgttcccgctgccacagcagcagcagatcagcacgacgatgatgatgagccacaggcaggaacaattgttgtttccgttgttgaagcacatgattgtcacctcgctttgagacattctatgcgcccggcttccaaagggagcctggccgctgaaaaaaattgcagggaggggaagatttcttccccatcccgggacgtttccggcggcgcaccgccggggcgagaaaatggaggttcctatgtctgattacaaaaacggcgataccgccagctgggacgcgtcccaggtgcgccgcagccaggcgggccatacggggaggagccagggcaatccgtcccagcagccgcagcggcggcggcgcaagcgccgccggatcaacccggtcctgtatatcctgtgcgtgctggtggcctcggccatcctggctggcgtgggctggctgctggccagcgacctgtgtgctttcagccgggacatcccctccaccaccaagatcaccattgagatcaccgcggatgacgacatgggcagcatcgcggaaaagctgcaggacgccggactgatccgctacaagtggttcttccgcctgttcgcggccgtcaccggcgccagcgaagaggtgggcatcggcacctatgagctgaacaccgacatggactaccacgccctgatcgctgggatgcgcagctcctccggcaacctgagcgcggagacggtgaccgtcaccattccggagggctacaccgtccgccagaccatcgccctgctggcggaaaagggcgtcaacacggaggaggccctgaccgaggccgcccagaccggcgattttgactacgacttcatcgacaacgaatccgaggacctgagccgactggagggcttcctcttcccggacacctatgagttctatgtgggccataacgccgaggacgccctggaccggctgatccgcaactttgtcagccgcatggacgaggagcggatgacccaggtggaggagtccagctactccctgcaggagatcatcaccatcgcctccctgatcgaggaggagaccgacggcacggatcaggccaacatcgcctctgtcatttacaaccggctggagggctccggcaacaagcaggggacctacggcctgctgcagatcgacgcctctctgctctatgcgctgccggaccacaccggccccatcaccagcgcggacatgcagaccgactccccctacaacctgtaccagaacgcgggcctgccccccacgcccatctccaacccgggcctggcctccatcgacgcggcgctgaaccccaacagcacggactactattactacgccctgggcacggacggcaagcaccacttctccaccacgctggcggaacacaacgcgttcgtcaacagcagctcctatggcggttaagcgggacaagccggagctgctggccccggcgggggacatggagcggctgaaaatggccgtgctctatggcgcggacgcagtgtatctggcgggcaccagctttgggatgcgggcctttgcggggaacttctccgacgaggagctgccccaggcggtggcctttgcccacagccacggcgtccgggtccactgcaccatcaataccatgccccggaacgacgaggcggcccgcctgccggagcacctggaacggctggcggacgccggggtggacgccctgatcgtggcggacctgggggcctttaccatggcggggaagtacgccccccggtgtgagcggcacatctccacccaggccagcatctgcaactacgagaccgcccgggcctggcacgacctgggggccagccgggtgatcctggcccgggagctgagtctggaggaaatccgcaccatccgggacaagaccccggcggacctggagatcgaggccttcgtccacggcgccatgtgcgtcagctactcggggcggtgcctgctctccaactatatgaccggccgggactccagccggggcgcctgtgcccagccctgccggtaccagtacgccctggtggaggagaagcgtccgggagagtatttcccggtgtttgaggacgagcagggcacctatatcctgaactcccgggacatgtgcatgatcgaccacctgggggacctgtgcggcgcgggcctctccagtttgaagatcgagggccgggccaagtccgcctactacgcggccatcgtcaccggggcctaccgccactgtttggacgccgcggcggcaggggagtccgtcgatcccgtgtggcgggacgaggtggaacacgtgagccaccggccctactccaccggcttctactacggcccgccgggccagtattacgccacctcccgctatgtccgggaatggcaggtggcggcggtggtgacggactgcgacagcgccgggcacgccgtgctgtcccttcggaacaagttccgcgccggggacacggtggagatcgtgggcccggatctgcggcccttctccataaccgtgccggagatgcgggacgaggcgggggcgcccctggtggaaccccgcaccccacagatgaaattctatatggaccttcccaaggcggtgccgccgtattccctggtgcgccgcggggtggacctgtcagccaaatgaggaaaaacgaggagagaagactatgaacgcagatgttgtcattgttggcgccggccccgccggtatcttcaccgctttggagatgattaagaagggcagccgccagaagatcgtcatggtggaaaagggacagccggtggaaaagcgccactgccccaaggacaagaccaagaagtgcgtgaactgcaagccctactgccacatcaccaccggcttctccggcgccggcgccttctccgacggcaagctctccctcagctatgaggtgggcggcgacctgcccaccctgatcggggcggacctggctcaggagaccatcgactatgccgaccagatctacctggagttcggcgcggatgagcacatcgagggcctgggccacgaggaggagcggaaggagatccgccgccgggccatccaggcggggctgaagctggtggactgccccatccgccacatgggcaccgagaaggcccagggcatttacctcgccatcgagcggtacttacaggagaacggggtggagatgtacttcggctatgagtgcagcaacctgatcctggagaacgaggtctgcaagggcgtggccatctccgacggcaagacggacctggagatctacgccaagcataccgtggtggccaccggccgccggggcgccgactggctggagaagctctgcgccgagcacaacatcgcccacgcccccggcactgtggacatcggcgtccgggtggaggtccgcaacgaggtcatggagatggtgaaccgggtgctgtacgagtccaagctggtgggctatcccaagcccttcaagaacaaggtccgcaccttctgccagaaccccggcggcttcgtcagccaggagaactacgacaacaacctggcagtggtgaacggccactcctacaaggacctgaagagcgacaacaccaacctctccatcctgtgctcccacaatttctccatccccttcaaccagcccatcgcctatgcccagaaggtgggcgagctgaccaacatgctggccaacggccagatcctggtccagcggttcggggacattctggacggcaagcgcacctggcagaaggagctggcccagtccaacatccggcccaccctgccggacgccgtggccggtgacatcaccgccgccatgccctaccgggccatgaccaacatcatcaacttcatccaggccatggactacgtggtgccgggcttcgccgcctatgagacgctgctgtactccccggaactgaagttctattccaaccgggtgaagatggacaccgacttcaacaccagcctccagggcctccactgcctgggcgacagctccggctggacccggggattgatgatggcctctgtcatgggcaccctcatgggccgcaagatcgcggaagagggctaatcggatcacagagcggcagcaggcgcggaaaacgcgcctactgccgcgatgaaatacgcagatatgaaaaaggatacaagctatgatcacagtcaatgacgtcagtctcaatttcagcggacagaccctgttcaagcacgtggacctgaagttcacccccggcaactgctacggcatcatcggcgccaacggcgcgggaaagaccaccttcctgcggatcctctccggggatctggagcctaccaccggcgaggtggtgatctccaaggatcagcggatgagcgttttgaagcaggaccacttccagtacgaccagtacacggtgctggacacggtcatcatgggcaaccagcggctctacgatatcatgaaggagaaggacgccctctacgccaaggaggacttcaccgacgccgacggcgtgaaggccagcgagctggaggcggagtttgccgacatggacggctgggaggcggagagcgacgtgagccgcctgatccagggcctgggattgtccgaggacattctgtacagcgagatgagcacgctgaccgccaaggagaaggtgaaggtgctgctggcccaggccctcttcggcaagccggacatcatcctgctggacgagcccaccaaccacctggacatccacgccgtggagtggctggaggacttcatcctggagtgcgagagccttattatcgtggtgagccacgaccgccacttcctgaatactgtgtgcaccaatatcgtggacgtggactacggcgggatcaagatgtatgtgggcaactacgagttctggtacgagtccagccagatgatgcagcggctgatccgggaccagaacaagaagaaggaagagaagatcaaggagctccaggagttcgtctcccgcttctctgccaacaagtccaagagcaagcaggccaccgcccgccggaagctgctggacaagctgacggtggaggagatgcccgcctcctcccggcgctatcccttcgtgggcttcaagatggaccgggagccgggcaaggagattctggcggtggagggccttaccaagaccgtagacggccggaaggtgctggacaacgtcagcttccgggtgaacaagggcgacaagatcgccttcgtgggggaggacgagatcgccaccaccacgctgttcaagatcttgatggaggagctggagccggatgcgggcaccttcaagtggggcaccaccatcaccaccagctacttccccctggacaactccgccttcttcaacgactgcgacctgaatctggtggactggctgggccagtacaccgccgacaacgcggaggagggcaccgagtccttcaagcggtccttcctggggcggatgctgttctccggcgacgacgtgtacaagcccgttaaggtcctctccggcggcgagaaggtccggtgcatgttgtcccggatgatgctgttcggttccaatgccctggtgctggaccagcccaccaaccacctggacctggagtccatcaccgccgtcaacaacggcctgatcgacttcaagggcgtggtcctcttcgccagccacgaccatgagtttgtccagaccatcgccaaccgggtcatggagttcgtggacgggaagctcatcgacaagatgtgcacctacgatgcgtatatcgccggggcccgggaggagatgcttgcccggctgaacggctgagctgttactggattgtagttgacatcaggcaaaaccaccctgtaaactgtttgcaaaacagcttgcggggtggtttttcatggacaaacggcggatttttggcgtgttggcactggcagttatcacggcggtcacagcgggggtggcgtccccccaaatggcggcacagcggcaggagacggcggagtaccaagcgcctctggaggccgcaccggtagcccaggtggagggagagaccctgtcccccaacgggcggttccaggtccggacagcgggaaagagtgagatgtatgtcagcggatacgtggtgccggaattcctgcagatcgtggacacggagaccggtgaacttctctggcaggaccaaggggcgctctggcagtcggcgcggtggtctccggcaaataatctggtggctatcgcctatggcggccggacctggacccaggtgaaggtcatctccaccgcctgctggatcagcttggacttcaccctgccggacggcagccccatcccggagtacgaatttctcccggaggactggggcacatggccggacatggacaccctgttgctgacggtcggccggggtggggacgcaggggagccccacacctaccgctgcaccgtgcgtatgaaccaggacggaacgctgtctggctccgctttggaacagaccacagaggtactgtcggaggactacgacttcgaccacgacggcatgccggagaccacggagctggtgacggtgctcaccccggagacagattactatcccgcttggtatatcctgcaggtcatccggcaggacggcgtggagttgtggtccgccggagcccatccgtcccatgccggctggaccagcgtatttgcctgcaagatcgatggcgaggactacctgctgcaatacgagccggagatgtaccagggctgggcggaatacgcctatgaattgtgggcctttgatgggaacgggcaggcatacacatcggacaacaggtcggtaacctttgacatcaactttggccgggaggaacaccagtttgacccggaggccatcgccgggtttttctgggagctgcgaggtctcctccaggacagcatccttttggccagcacggaaaacggggagttccagactggtattccggggctggagctgcagaattatatattcagcgatctgctgtccctggacagcctggaggccatggaggcctcggtccggcagcaggaggcggagctgggcgctgcatagcagaacaggcgggagtactcccgcctgttttcatgaattttcaaatccggccgtcagatttgcgcccgctccagcgtcatagagagcagagggacaggagggaacgccatgctggaatatctggcaaccatggagacagcggatgatcggaccaggtttgaatcgctgtacctggcctaccggggcctcatgtaccatgtggcctatcacatcctgaaaaatccacaagacgcagaggacgcggtgcaccagtccttcgtgaagctggcggagcacatggcgactatccccgacggcccctgtccccggacgcggaatctggtggtgacggtggcggagcggaaggccatcgatctatatcgctcccgccagcgccatccggagacggagctggatgaacagaccgtctggtccgcaccgccggagggcggcggtctggccgatgccatggcatccctgccgccccggtaccgggaggtgcttctgctaaaatactacaacggctattccgcccgggagatcgcgggatttctctccgccacccctgatgccgtgacccagaccttgcaccgggcccggaagaagctggcggaaattctggatgagaggggggagacgccatgatgatctcagaggaggccctgtacgcggcggcgccggaggcggcggagaaattcctctccgctctgccggaccgggaggactgcgtccatgacttctccccggacttcgaggcccggatggcgacgctgctccgccgtcagcggagacggcggcactggcgggccctgctggcggcggccgccgtgctgggcgccctggcggcgggactctccgtgggggcgggggaccggacggactgccagatctactggtcccagacggacggggaactgcggtacgttatccgcctggagcacaccaccacccggcctttccaggacgcccaactgcgctgtgtgccggagggcttcatcctggtccgcggcagcaccagtgagatccgcggggagcgaagtctggcgtaccgaaggggggaggatgcctccttcaccctgatgcagacccagggagaggacttggtgggttccaaggggaccgcctgccagggctctgaggtggaggtcaacggccgcctgggcctgctggtggaagaggagacggacagcacagaaaaagacctgctgtggacggacgggccctacatcttcgccctccatgggaagggcctgtccgccgaagagctgctggagattgccaggaatgtgacctggtgacaggaaaggaaggaatctgatgaaacgcaattacattccctttatcgcgggcatgagcaccatgctgctgttggtagggctggtgggggcctccctggcgggggagaccaggccgcccgctgtccctcagagcggaacgctgaacggacaggtggcctacggcgaggcgggtgtggctctgttcggcaaggaacaggtacctgccggcgctgcctggactacggaggacggagcgcagatccccactgtgctgacctacactgatgaaaacggggaggaccactacttcatcagcgccgagaccgcggcggaggtgctggacatggtctacggcgcggtgtaccgggaggacctgaactgcattgatttcggcactgaggcggccgtagatgcggagggcaatccccgtctggacgggaacggccagcccatctactggacgggggctgagttcttctccagaaggaccacgcagaacgaagacggcacggagcgcatcgtcgccatcggcgaccagaaggcggagattcaggtgggggacggcacctccgtcatcgtcggacacgggctggaagaggactcgcccatccgggaggaactcatccagcggcagatggagacacccaccgtgccggagtatggcgtcagctgcggggtgttcaccgaggtggacccggcggtgctggatccagccgcctatctggggcggttcgtggacggcgtggccctccagggggcggatctgacgtacaccttccacttcatgccggagctgccctatgccgccctggtgatcgagaaccagggggaccaggacatcctggtgcgtgtcttccgcccctggaccgtgggccatatcaaccaggagctgttctccatggttcgcatccccgccggggagacgctggtccgggctttccaggtccaggaaggggagagcgccgacctgcggaacaagctgacggtggaaatcaccggcatcggtgatggagaggcccaggtgcgcctgtcctcggagcagtacggcggcagtacccggaaataaaccgaacagcagccgcccggcgaaagccgggcggctgtggcttatactctggaggtcagcccgtgcttttccagggccgccctgattttctccagcccggcctcggtggggtcgcacaacggcaggcgcagggggcccacgtcccagcccagcaggttcagcgccgttttgacggggatggggttcacgtcgcagaacatggcgtcgcagaagtccttcagctccagctgcagctttccggcggcggcgaagtcgttccgcaggcacagctccgtcagccggtgcatctccgccggcaggacgttggccactacggagatgacgcccttgccgcccagcatacagatggccgctgtctcgtcatcgttgccggaccagatggagaagtcctccgggcacaggttccgggtcttctgaatgttggagaaattgccccccgcctccttgacgccgttgatgttggggtgcttggcaagctccgcatacgtctccggcgcgatggtgacgccggtgcgggagggtacgtcgtacaggatcagcggcacatccacgccgtcggcgatcacctggaagtggcggatgagcccggcttggctggccttgttgtagtagggcgtcaccagcagcaatccgtcggccccggcccgctccgcgtcccgggacagggccagggcgttctctgtggagttggagccggtgccggcgatcaccggcagccgcccgtccacgtggtccacacagaactcgatggtccgcatccgctcccggtagctcatggtgctggcctcgccggtggtgccgcagacgatgatggcgtcggtgccgtttttcatttgaaagtccagcagcttccccagggtggggagatccacggtctctttggtaaagggcgtgacaatggccacaccggacccggtgaagagaggctttttcaatgtacacacgctccttttcagctggaaatggggaattagaaattttggtgcccggtggagcttggaaatttaaaatcgttccgcctgcggcggaacacctccatttcaaatttccaattcctaaatttgatgcaggtctgaggataaaagaggcggcctgccaactccggcaagccgtctcttttgtggatgtatgagatggaatcagtccatgtatcccttggcgcacagcagctccgccaggagcaccgcgccgcccgcagcgccccgcagggtgttgtgggagaggcacacgaacttgtagtcgtactgggtgtccggccgcaggcggcccacggacacggccatgccgtgctccaggttccggtccagccgggtctggggccggtcaggctcctcaaagtagtggaggaactgcttgggggcggaggggagttccagctcctggggtacgccccggaaggcggcccagtcggccttgatctgctctatggagggggccttgccgtccgcgaatttcataaacaccgcggccatgtgaccgtcctggcaggccacccggaagcactgggcggtgatggaggggccgtcggccctgacgatcttcccgtcctccacgcggccccacagcttcaacggctcctgctcgctcttctcctcctcgccgccgatgtagggaatgcagttatccaccatctccggccagcgctggaaggtcttgccggcgccggagatggcctgataggtgcagaccaggattttgtccaggccgtacttcttcagggggtgcagggccgggacgtagctctggagcgaacagttgctcttcacggcgatgaagccccggcgggtgcccaggcgcttgcgctgggcctcgatcaccgccagatggtccgcgttgatctccgggactaccatgggtacatcgtcggtccaccggtgggcggagttgttggagacgatgggacactccagtctcgcgtatttctcctccagggcccggatctcctctttcttcatgtccacggcgcagaagcagaaatccaccatggaggccagccgctccgcgtcctgctccgcgtccaggaccaccagatttttggcctcctccggcatggggacgtccagggcccagcggcccgccaccgcctcggcgtaaggtttgccggcgctgcgtgcgctggcggcgatggccgtcagctgaaaccaggggtgatgctccatcagcgtgatgaagcgctggcccaccatgccggtgccgccgatgattccgactttgtactgtttcatagtatgtgcctcctgctcccatgttgcggcggaaaaacgcgatgccttccgtcgattttggttgaatatggcgccggaatgtactataatgatccatattgatgtagaaagcctgtacttccagcacggacatttgtacatatattagcatacttctgcgattccgtcaaggtgcatggcttggggaggttccatgaaaaaaggcttgttcctgctgtcgctgattgtgacattttacgccctgggtactgtcagcgcctccgccgtcaccaatgatacggtgaaggtggggctgcggtacggctcctccgtcatgtcctccgccaacctggaaaacgatgagggcagcggttacgagttcgggtacttcgaggacgaccggaccttcgtgtccctgggtgagacggacgagaccgccatcaccatggagccggcaggccgggacggcatccaggtgaccatcaccggcacagaccgggtcctctatgagagcagggaggacaccctggccgtgatgccccagggccgggaccccgtcacctggttccgggggaaccgctaccggggcgggttcgagtacaccgtcagcggcggcgggctgcaggtggtgaacgtggtggacctggaggactatgtgaagggcgttctgccctctgaaatgccggggaactgggagctggaggccttgaaggcccaggccgtgtgcgcccggacctttgcctgcctcaccaccaagcacctgtccgcctacggattcgacgtgtgcagctccacagactgccaagcgtacagcggcatcggtgaggccacctccgccacggaccgggcggtggaggagacggagggggagtgcctctattatgacggcgagctggcccaggcctactaccactcctccgacggcggcgccaccgaggacgcggagaacgtctggggcaccgacgtgccctatctccggggaaaggaagacccctacgaggcgcagatctccattcctgattacaggtggacggtcacctatacctgggaggagctgacctgggtgctgcagaacagcggctacgacatcggggacgtggtggacgcctatgtatcggaagtcaccgatctgggcaacgtgtattccgtgacctttgtggacagccggggaaagaccctggtccgcacgggggacgatgcccggatggccttttacagcaccaccctgggcaagaacgtccccagcctgcggttcaccatcaccggcggcaccgggggcggcagcagctacgcggtgaacagcgcctccggcaccctgtcggctctggacggtgcgtccgtcatctccggcagcggcaccgtcagccgcctggagggggaggaccacgccgccatctccgcctccggaacggcggacctcaccggcggcagctccggcgggcggggctccgcctcccggggcggcatcaccatcaccggcaccggaaacggccataacgtgggcatgagccagtacggcgccagggccatggcggagcagggccacgactacatcgacattttggaattttatttcaccggcatccgtgtccggtaatgagaaggaagcaacatgaagaccagtgatttttactacgacctgccccaggagctgatcgcccagacccccattgagaagcgggacacctcccgcctgatgaccctggatcgggtgagcggcgccacgggacaccaccatttctacgacctgccggactacctgaaccccggcgactgcctgattttgaacaactcccgggtgctgcccgcccgtctggtgggacagcggctgcccggcggcggcatctgcgaggtgctgctgctgaacgacaggggagacaaggtgtgggagtgtctggtccgcccgggccggaagctccgcaagggcaccagactgtccttcggcaacggggagctgaccgccgagatcgtggagcagctggaggagggcggccgcctgatccgcttcgactacgagggcatctttctggagacgctggagcggctgggcaagatgcccctgcccccctacatcaaggaggagctccaggaccaggagcggtatcagaccgtgtactccaaggtcctgggcagcgccgccgcccccacggcggggctccacttcaccccggagctgctggagaagatccgggccaagggcgtaaagatcgggtatgtgacgctccatgtgggcctgggcaccttccggcccgtgaaagaggacaccattgaggaccaccccatgcacagcgagtattgcaccatcccccaggagacggcggacctcatcaacgagacccgggcaaacgggggccggtgcatctgcgttggcaccacctcctgtcggacattggagtcctgggccgccgaggacggacacatggaggccaagtccggctggacggacatctatatctaccccggctaccgattcaaggtgatggacggcctggtgaccaacttccacctgccggagagcaccctcatcatgctggtgtccgctttcgccgggcgggagcacgtgctggccgcctatgaggaggcggtgcgggagaaataccgcttcttctcctttggcgacgccatgttcatcagctgatattgccgcgcccggcggacctgccgggcgctttttcagaggaggagtcccatgctggagcttctgcacattgagaatatcgcggtcatccaggaggcggacatccaattccgccccggcttcaacgcccttaccggcgagaccggcgccggcaagtccattgtcatcgacgccatgggcgcggtactgggcgggcgcacctcccgagacctggtccgcaccggcgcggaccgggcctttgtcagcgccgaattttcccaggtgcccggtgatctggccgggttggcggagaccggagctgccccggacgaggacggccacctgctgctccagcgggagctgacgggggacggcaagaacctctgccgggtcaacggccgccctgtcaccgtggcccagctgcgcaggatcggagaagagctgctgaacatccacggccagcacgacggccagcagctgctggacgaggagcagcacctgagctatctggaccgctttggccggacggaggcacccctggggcggtatcaggcggcctatgaagccatggccgacttacaggcgaagattcgggccctccagatggacgaggcggagaaggcccggcggatggacagcctccgctttcagatcgacgagctggagcgggcccagctggtacccggcgaggaggagagcctcacagagcggcgggacctgctgcggaacggggagaagtacctctccgccctgtcgggggcggactactgcctgaacggtggggaggagggaggcggcgccgtctccgccctccgggacgcggaggaggcccttgccggtgtccgcacgctctccggagacatgggggagctgtaccagcgcctggaacagctgcggtgtgaagcctatgaccttgccgagatcattcgggacaagcgggaggcgttcgacttctccccggcggagctggacgcggtggagagccggtccgacctgctgtaccggctgaaaaagaagtacggcgccacggtggaggagatgctggcctacctggacaagtgccgccgggagctggacgatatggagacggcggacgacaccctggcccggctggaacagcagctggagaaggcccggaaggccgtcctggcagcgggggcggagctgaccgccgcccggaaagaggccgccgccgtcctggagcagcgcatccagtccgagctccgggacctggacatgcacaaggtccggttcgccatcgacttcggggagaaggagccgggccccgacggctgtgacgccgtccggtttctgatgtctgccaacaccggggaggacttgaagcccatcgcccggatcgcctccggcggtgagctggcccggatcatgctggctctgaaaaatgtgctggcggagcaggagtccatcggcacgctggtgttcgacgaggtggacaccggcgtctccggccgtgcggcccagaaggtggcggagaagctggcccaggtcagccgccgcaagcaggtgctgtgcgtgacccacctcccgcagctggccgccatggcggacacccacttctccgtggagaagggggagcgagacggccgcacctatacccgtgtggtgctgctggaccgggagcagcggaaggcggagctggcccggatcaccggcggcagccgcgtgacagaggccctgctggcaagcgccggagagctgctggaccaggcggagcgctatcggagcgaattaggaatgaggaatcatgcggaatgagcaatttctgggtccggctttgccggacccattccaattgttccgcctgcagcagaacacatgaattccgaactcccaactgaccaaacgtccctctttcgcatacaatggcgggaagaggaggggagcccatgcgcttttttgcagactacgaccgcagtgccgccgtgctgtatgcccaccagtgggcctatggccggaacccggccttttacgactacgagaacgtggggggagactgcaccaacttcgcgtctcagtgtgtgttcgccggcagcggtgtgatgaacttcaccccggatttcggctggtactacatcgacgccaaccagaagtccccctcctggaccggggtgccctatttctggaatttcatgaccaggcaggcgccctccgtagggccggtggcccagccctgcgccctggaggacctgcagcccggggacctggtgcagctgagcttcaacggccaggagttccagcatacgccggtggtggtgcgggtgacggcgcccatcaccctggagacggtactgatcgccgcccacagctacgacgccgacaaccggcccctgtccacctacacgttccaggacatccggtttctgcacgtactgggcaccatccggccttaggcaatcgtttgcgcaaaatgaacagggaaaaccggctgggagggagcgcctctcagccggtttccttttgctttttccttgattttttcacgtgcgacaagggatttgcctttgcagctatccgcagggattcgttgtcgatgtgggtgtagatttccgtggtgttcaaatggtcgtggcccagcacctcctggacggcccggacgtccacgccgttctgcagcatcagcgtggcggcggtgtgccgcagcttgtgggagctgtactccgccgggtcgatgcccgcctgacccagccgctttttcaccatggcgtggaccgtggagcggctgatccgctcgttctgagaggagaggaagagggcgtttgcgtcccggccggtgatgggccgccgcactgccagatatttggcgatggcgtcctggcaggcgtcgttcaggtaaatgatccggaccttgttgcccttgccaagaacccgcagggcatcttcctggatgtcggagaggttcagacccaccagctcgctgatccgcagcccgcagttgaggaacagcgtcaggatacagtaatcccgctcctgatttttgccgtccacggagtccaaaagctggatgctctcgtccaaggtcaggtatttgggcagggttttcttcaatttcggagaatccatatctttgacaggattttcacgaagtaagtgcatcttattggtgaggtaattgtaaaacgaccggatcgtggcgatctttcgggcccgggatgcggcgttcaggccgtagccggaattccggctgttctggtgctggacccggtcccggctgaggtacgtcatgtagccgtaaatgtccgtcagggtcacggaggccacgaagtccagatccacgtccatgatgtcgatctcatccagagaccggtcacacagggacgggtcccgggtctgcttgagatagcggaagaaattccgcaggtccagaaagtattcgtccacggtccgcttggagtgggctttgatggtctcgtggtacgagagaaagtcccgcagaatctgcggcgcttcggtgcggtaatcagccataacggtgtcaacttgcgggcagatactccgcgcagccgccggagcggctgccgggggggtaggtcgtgccggggggcctgaaacgggccccggagcggtttggctctcccctaaattgaacaaaatttttattttgttcaattttctatctccccgcaaaacctccttccctgacaggtcttttgaaaatttcccggccggaccgcagccgcagcgccggcggcacacgccggaacgcgcggcgcatctccggaccggacataaaaaccgccgctttcggcaaagctagtcccaaatccatggagatgggatgatgtgtatgagtttgattccctgtaccagccaatgtgtgtatcagcaggacggcgtctgcacgctggacagcgccgccgcggcgggcctccccgccctgggcggcgcctgcgtccacttcattccgacggacgaagggcggctcggatcgcctcaccgatattccgcaccgggatcagacgaagccccgcaggcgcggccagctccccggtccggcgggacggaatcaggcactgggtaaagcccagccgccggacctcgctgacccgctggcccagctggctgacggaccgcagctctccggtgaggcccacctccccgatggccaccaaatccgccggcaccggccggtccagatagctggaggccagggcgatcaccgccgccagatccgcggcgggctcgtccaggctcaagccgccgatgatgttcaggtacgcgtcgcaggcggagaccttcaggccgccccgcttctccagcaccgccagcagcatggcgaagcggttgtagtcaaagccgttgctggtgcggcgggggttgcccgccggagacgacaccgccagcgcctgaatctccgccagcaccggccttgccccctccatcacacaggtgacgcaggtcccgggggcgtcctccggccgaccggacagcagcatctccgacgggttctccacctccacgaggccgctgtcccgcatctcgaagacgccgatctcattggtggcgccgaagcggttcttggccgcccgcaggatgcggtaggcggtgtgctggtctccctcaaagtacagcacgcagtccaccatgtgctccagaaccttggggccggcgatggacccctccttgttcacatggccgatgacgaacaccgtgatcccctgccccttggccagctgcatcagggccatggtgcagtccttcacttggctgacgctgcccgccggggactccagcgcgtcattgtacagggtctggatggagtccacgatcagcacgtccggcgcctccgccgccacggactccaacaggtcccccaggctggtctcggagatcacgaacagccgttcgctctgcacgtccagccgcttggcccggagcttcagctggtgctccgactcctcgccggatacatacaggaccttattctcccggcagaggctctcgcagatctgaagcatcagcgtggacttgccgattcccggcgcgccgcccaccagcaccagcgagcccttgacggcaccgccgcccaggacccggtccagctctcccatgccagtggagaaccggatttccgcatccgcctccagctccgtcaccggccgggccctgtggacgctcccccctcctgccgggcgggaggcccccttccctgccgcccgggcggcctggggctgctccacgatggtattccacgccccgcaggccgggcacttccccgcccacttgggcgtctcattgccgcactccgtgcagtagaacagagtctttggcttcattgcaacctcccatagaaagagaaaggaacagactgtctgatcttttctctttcaacgcttatctgaattcagcacgcccgccgcgatggccgccgccagctttgtctggtaggccgggtccttcagctgttctgtctccgcggcgttggagagaaatccgcactccaccagcacgccgggggcggtgatctccttcatcaggtacaccgaggacggcacctgggcggccttcttctcatgtccggcgttgacggcgccgttcagggactcctgaatggacgacgccagttcctccgccccctcctggcggttccagaacacctgggccccccgggtggagggcgacgacggcaggctgttctggtggatgctcaacagcaccgcgccgggcagctcattcaccagagccacccggttgtggaggtcggagaccttcttctcccgcagagtggcgctgccggggtcgtaaatggcggcgtccccctcccgggtgacggtggtgggcacccccgcaaaggtcagcaggtcccggacccgccgggcgatggcgaggttcaggccgctctccaccgtgccgtcggcggccacagcgccgccgtcctccccgccgtggccggcgtccaccaccacaacgggagacgcgccctcctcccccggggcgaacgccgccgtgaaggcggcgttcccatgccacagcacggcggagagcccggcgacaaaacaacacagcagcacaacatacgccacatggcgctttcggatcagaataatcacaggcggcaccccctggggaaagcctattcccgcctgcttatcccatattcccgattatagcggctcggacggcggaaatcaagggcaggctcctcccggaccatctccgcataggatggcatgggcgcatggttcccatgcgcaccctaccccagaaggaggcatccatgcagatggagaaacccaacaccaatacgccgcccacgccgtccgtgccttccatgccgccgtccggctcctgccagccgaaccagggcactctgcccggcacctgtgcacccatggtgtttccctttgtagccatgcaggaggagaaccctgtccggtacagccggatggaggccctgcaaaccggcaccctgttcccggggcttgacctgcctttcaaggcggccatccaggccaagacgaaaatggccaacaccgccctggtggagctgatggccctggactttgccattgacgagctgggcctgtatctcaccacccacgcccaggatcaggaggcgctgcagctgtactggtcctatatcaagctggcgaaagagggccgtgagaagtaccagaagatgtacggccccctgctgcagacggacctgacgccggaggacggcttcgcctggctgaaggacccgtggccctgggaggaaggaggcaatgactgatgttcatttatgagaagaagctccagtacccggtgaagatcaagaacaccaatcccaagctggcctccgtcatcatctcccagtacggcgggcccgacggtgagctgggcgcgtccctgcgctacctgagccagcggtactccatgccctatgcggagctgaagggcctgctgaccgacatcggcactgaggagctgggccatttggagatgatcggcgccatcgtccaccagctgaccagggacctcaccgaggagcagatccggaccgcgggctttgacacgtattttgtggaccggaccgccggcgtgtaccccaccgccgcctccggcttcccttacagcgccgccagcatggcggtgaagggcgacctgatcgccgacctgacggaggatctggccgccgagcagaaggcccgtgtcacctacgacaacatcctgcgcctctccgacgatccggacgtcaacgacgtcatcaagttcctccgggcccgggagatcgtccacttccagcgcttcggcgagggactgcggctggccaaggacaagatgaacgagaagaatctctactttgtgaacccgtcctttgacaagtgacccactgaatggaaagcgcccgccccgatctcccggggcgggcgctttttgcggggactcagtccccgttcttcatcaggtcttccaccaggggcatgagccgggcctggtcttccttccggtcggcaaagagctccagggtatcgccctgctcctcgatgaggcggccgatggcgatataccgggacatggaggatttcaaattaaaaatgtctccctccgggctcttcaggtacacgtcgccgccgcactggctgacggcgtccaggaactcctgcacgtccgcttcggaacgcagtcgcatgggaaacacatcctttctgtatcagactcccagccttcccggctggtgcttaacaaagataccacgcggagccgccggtgtctatggccgaactggataatgtttcggagtgactcgctccagaatattgatgaactgcacaaaaaaacaattattttttatgcagttaatacaatttcaaaaattgcagcccgcagcgtcatgaaataccgttgcgcggtcataaagaaagaaattcatgcttacggtctgcccgtttatctggaaaagatgctctctctggccgcggcggcacatgccctggtgttcataaaagccgtagttgcagctggtatctgtaaacaggtagaattcatccaatccctgctgcttcaaataggcaagcgcggaatgaaacagctttttgccgatgccctttccctgacaggatgaacggacagcaaacagagccaattccgccggataggtctttttgcagccgcgcagcaattgctcatcgatctcattgacgttttggaagatttgagagactgcccttccctctttggacgcatacagcttcacaatggacaggatttgctgaaatctggcagagagggcgcatctgtgatccttgatgttctttaccaaaatgatccctgccgcagttccgtcaagtacggccacctgtgaaaaggtgtaatttgtcaggcaactgcgcagaaaaacctccgccagcctggaagccgtttcgggactgctgaactcatcatagtgccacgtgcttcggatgatttcctttaagggctgaaagtcctgtttctgatattctctgatttgcatctccatgatattccccctggtattggtctcggataccccgtataatagtccttacagcagctgtaatgtcaataccggaaaaggagctattttgtgatgaggcaaaacactgtaaaaatgaccaccgcccagtttgcggaactgcacggtgtcaatcggagaacgctgcattattatgacgacatcggcctgttttccccctgccaaaagggggaaaacggttaccgctattacgacgcatcacagagcattgtttttgagtatatccgtatgctgaaagagttgaatatgagcatcgcggaaattgcggactactgtaagcatcctgctccggaaaagtttttgcagatcgcagatcggaaagaggcggaaatcgatctggagatacgaaggctgaagcgcgcgcggaacatactgaagaccaaaaaagcgcaggtgcgtctttgcgagggcctgccggatgaggaaatcagggtcgaggagtgcggcgcggtcaaaatttctgttttgccgtatgatttttccggagacgatttatcccggctttttaccgatttgaaaagtcaatggggcattgagcagatacgcatgggaatcgggagcttcctctccctggacaaagtcaccgccgggtcctttgaaacatacgacgggctgtttacctattcgtccggcagcgcatccggtccgcatacgttcgtcaggccggcggggcggtatctttgcggctatcagaagggaccttgggacaaggcgcccgccatgtaccaaaaaatgatcgactatgcccgccggcagcatctgacactgacgggctttgcctacgagcttggattgaacgaatttgcgatctccagcccggaggaatacgtcacaaaattcatgatccagatcgatgacccctgctgacagtacgcccgccgggcacgcatcgcagcgcagcctgcacacaagccgaaagagcgggggcgtgagcccccgcttccctgtttattccgcttcttttgccgcctcgtcccggcccagcagggccaggatttccgccttgtcgccggggacctcgtccaccagcacccggtactgctcctcgctgagaaccggcacccccagctcctgggccttgcggagcttgctgcccgcggcctctccggccaccacggcgccggtctttttggacacggacccggacaccttggcccccaaagcctccagcttctccccggcctccttgcgggaggcggactccagctcgccggtcaggacgaaggtcaatcccgccagcaggtccccggtgggctgggcggtgctctccatattcacccccgtctctttcaggcggcggatcaggtccttcgcctggtcgccccggaagtagtccgcgatgcaccgggcggtgatgccgcccacgtcgggaatctccgtcagcgcctcctctgtggcggccatcagcgcgtccatggagccgaagtgggcggcgagggtcttggcggccttctcccccacctgccggatgcccaggccgtacagcaggcggctcaggtcgttggccttggagttctcaatggcccggatcaggttctccgcggacttctcccccatccggtccagcttggccacgtccgcggcgtggaggctgtacaggtccgcggcgttggagatcagcccggagtcgatcagctgctggatcaccgccggaccgcagccgtcgatgtccatggcgtcccggctggcgaagtgggtgaggttccgcagcagctgggccgggcactccgcgccggtgcagcgcagggccgcgccgtcctcgtcccggaccaccggggcgccgcacaccgggcaggcgtccggcagcgtgtagggcaccgtgccctccgggcgtttgtcgaagtccacgctcaaaatctccgggatgatctcccccgccttctgcaccagcacagtgtccccgatgcggatgtccttctcggtgatgaagtcctggttgtggagggtggcgttggtgacggtggtgcccgccagccgcaccggggacagcaccgccttgggcgtcagcacgccggtgcggcccacctgcaccacgatgtcctggaccacggagaacttcttctccggcgggtacttgaaggccaccgcccacttggggaacttggcggtggagcccagccgctcccggtccgccaggtggtcgctcttgatgaccgccccgtcgatgtcgaaggggtagtccatccgctcctcgttgatccggtcgatctccgcctgaatctccgccgggtcggagagggtcttgtgggggatcaccttgaagtgctgggaggccatgtagtccagggtctccgagtggttctggaaggtcttgccctccgccagctggaggttgaacacctggatatccaacttccgctccgcgcagatcttggggtccagctgccgcagggacccggcggcggcgttccggggattggccatgaggggcttgccctccagctcccggcgggcattgatctccgcgaacaccgcccgggacatatagacctcgccccggacgatgagccggggcagcttctccggcagctgcatggggatggcgcggatggtcttgaggttctccgtcacgtcctcccccacccggccgtcgccccgggtggcgccccggacgaacacgccgtcccgatactccagggccacggacaggccgtccaccttgggctccacggagtaggcggcgccgtcccccagggcctcccgcatccgatccaggaactccgagacctcctctgcgttgaacacgtcctggaggctctccaggggtaccgggtgctcgtaggtctcaaagccctccaggatcttgtcgcccacccgctgggtgggggagtccggggtgatctcctccgggtgctccgcctccagctcctccaggcgccggttcagccggtcgtactcgtagtccgggatcaccggcgcgtccagaacatagtacagatagctctgctggttcaaaaagtcccgcagctgcttcatttcctcgcggtagtccatagggtgtgctcccttctcagctgttgttcagaatgtagtctttcagatcctcctcgtacgtatccggatctgtggagaaataagtgtaggtgtccggcaccgtgcccacgatcaccgtctccgccacgatgaaggaattggacaccttggtggcggtgcggaaccccggcagcagaacgctgacggagacatccaccgtcaggatgatctgatgcttggtctggttgatgccggcggaggtgaaggcgttgcggaagttcgcctccgacgaccccacggattccatccgcacggtgatgcggggcccccgtcccgccagcagcgtcgaacccgtcaggctgccgatggggatggacaggtccccggtgggcacctggctgatgcgggtcaggaccgtgtccagaatctccgcctgcaggtggttgaaggccgccatgttgctctgcacagcggtgatgtggccctccgtgtccttctcgaaggacaccaggccgtcgtactgcagctcgcccttctcgatggcctcatacacggcctcgctgacgatgcgggtaacggtgttggacacccgggtggtggccatgctctccagcagaggccgcatctgggtggcggcgatgaagagcaccgtcagcgccagagccatcagcagaaacgccagggcccgcagcacccgccggcggtccatccgccggcggtagaagtaaaatccgcgccagatcatggccatcacgcccccttcccgccattgtatgcgggggcggcctggccttatttcagagcgttcaccagatccttgaagacccggccccgctccatgaagttggcgaaccggtcaaaggaggtgctggccggggacagcagcaccacatcccccggccgcgccgtctcacgggccagcgccacggcggactggtagctgtccacctccgtgatgggcaggccggtgaagttggcggccttctccacggcggcccggatcaccccggcggttgcgccgcagaggatcagggctttcacatgctcgttgatctccgggccgatggcgtcataggagatgcccttgtccttgcccccggcgatcaaaaggaccttttccggaaaggaccggagcccggcgatggtgcggctggggctggaggcgatggagtcgttgtaccaccggacgccgtccagctcccggaccagctcgatccggtgctccacgccgccgaaggtgcgggcgaaggcccggatggcctcgtctgggaccatcccgtccacggcggcgacggcggccatgtagttctcgatgttgtggacgccggggagcttgatgtcggcggtgtccagcactacccgctcgccctgcggcccccggcagacgatagaggtgccccggaggaacacgccgtccgccacctccttccggcgggagaaccaccgcacccggcccggggccttttcagcgcagcggaccgtggtctcgttgtcggcattaaagacggcaatatcccggactgtctggtgtgtaaagatattttccttggcagcgatatactccccgtagctcttgtggacgtccaggtggttgggagacaggttggtcataacggcgatgcgggggctccggtccatggtcatcagctggaaggagctgagctccagcaccgccagatccgttggcgcgatgtccggcgtgtcgcacagcagcgggcggccgatgttgccccccaggtggacggtgcgcccggcggcctccaggagctttgcgatgatcgtggtggtcgtggtcttgccgtcggacccggtgacggcgatctcggggcaggggcagacctcaaaaaagacctccatctcggaagtcagcaggctgccccgcgccaccgccgccgccagctccggcacgtcgggccgcaggccgggggtccggaagatcacgtcctccgtcaggtccttcaggtagtcctcccccagctgcaggcggcagccgtgctgctccagctcgtcccccaggggccccagggcctcccgggattttttgtcgcaggcggtgacgcgaatgccccgctccagcagcagccggatcaggggccggttgctgacgccgatgccgatgacggccacggacttgttccgcagagagtccagatattcctcaaacttcatgggtacgctcctaacgccgcgctgggcggcagagattgacagacaagaaaattataccgcagatcggaaaaaaatacaaccacgcccctctccttcccagactttttctcccagggctgcggggccatgaagccgggacctagctgcgctctgcgggccatccggtattttcagcggaaggccctggcgacttccgccgatgtggaggccgcattgcggccaggcgttgacaatcccgtcggattccgctaaaatagacaggcgagtaagacagacagtcgcgcggccaggccgaaaggccggtcgtgaggaaagtccgggctccacagggcaaggataacgggtaacgcccgccgaaggcgacttcaggaaaagtgcaacagagatataccgccgacagagttactctgtatcggtcagggaaccagcgacggctgaacgcgatgccccgcggagcggggcgagggaaacttccccgaacagcgcaatcgcttccgcgcggaacggcgcaggggtgttgtgtgaagaggggcgaagggtccctcttcctaattgcaatcagcccgccgcagcggccgctcccgcggggagcggcaagccacccttaccgacagagagtagctctgtcggtaagggtggaaaggcgaggtaagagctcacccatcggctggagactgtccgatgctgtaaactctatccggagcaacaccggtatgggagcagggggtccgacccccaaggctggcccggccgctcccggggtggctggagcgtaccggcgacggtacgtcgagatagatgactgtttgatacagaacccggcttacagtcttgctcgtacaagaagaggtcctggcgaaagccagggcctctttttgtaccgattgatgccggtactgccgcgcggtgtactggtcgatgcagcggaggacccgctcccggctgtgaaaggccagatgctggctccccgcctccgggcggaaggagaccccacccgccgctctcagagggggggcgcaggagattccataggcagcacctctcatagcccttcccacggggcccacatctgttccaaaatctcctccggcagggtgtccggccatgactccacaatctctccatccacatagtcgtagacggtgtacggcttctccggccagcgggtgcggacggccacctccagcgctccgtccccatccacgtccagcgcctcggcgttgatgcagtcctccacttccaggattgcccgggtgttgatgccggtggggtccggctcctccggatgatagggccaaaaccggacgtcacataaaaacaccagattttcggactctgcgtaggggtccgggtaatacccgtcccggagatactggacgctggtatcgccgaagagaagcggcacgctgccggaatccccctcataggtgacatccatgacacctcccagaacggtgacgccggtgtcctcacaggcagacaccgtaccagtgcgggtcagccggttccattgaaagtccatctgataggaaatggtatctccccgctcgtcccgcagcgtgagggcatcaaagtccacatcctccccgcacttcagccggatcaggtgtccacggtcctccacatagacacagttcctgccattcacagtctctttcagaacgatgctgtaatacccctcctccgtcaccacgatctgcgtatacgccaccacggctgcagttacggccagcagcaccagcaccgccgccagccgctgccaggagcgccgccgctcctgccgcacgctgtcacgggagatatccaacaagctctgcatggtctcctccgctcctttcgccgcctgcctccggcaggccatcagctcctccaccgtcaagtccagggctgccgccaggggctccagcagcgtcacatccgggtagctcagtccccgctcccacttgctgacggccttgtccgtcacatgcagccgcgccgccagatcccgctgggtcaggcccagatttttccgctcgctgccgatgaaatcgcccagccgctccttgttcacgtgtatcacctcgccctcagtctaccctatgggtccgattttggcaaccgaccagcggtagagacgtcccgtaggtacttccggatgtcgctgtaatccttgggcgcggcctgttccagggcctgccgggagatcgccccatccccctgccgccgcgccgccgcctcttggtagcgccgctgcttttccttccacttctctgtatcccgccgaatggtctccgccagaaaccggtaggccatgcgggtctcctccctcaagcccgggtgctgccgcaaaacctcctccggatccgtgggagccttgtccgccgccatggcatagcggtacagcagaagcagcagttccccccgctgctccgcgtccagggccgccacacagggaaaattatcgaaatacagcataaaactcttcttgtgttcctctgccaacgaaaaaccactcctctcaagaaaaggcgtcccctccccatctgatgcacggctctatgcaatctccgggaggattttgtaaaattctcccgctatggtaagggtcagcgtaaggggaatggtgatggtgatggttatgcttatggtaagggggaccggtcaggcccgcctctccggcgttttttgcacaaaagaaaagttttgttgaatattccagaggacgaaaagaggacgggtctccccgtcctctctctatccagcgatgctcagtcgttgtcccagttgtgccagacgttctgcacgtcgtcgttgtcctccagcatgtcgatgagcttctccatgttcttcacgtctccctcgccggtgagggtgatgtagttctggggcaccatctcgatctccgcgctggcgaaggcgtagcccttcccctccagggccttcaccacatcgttgaaagcgtcggggtcgcaggtgatctccagggcgggaccgtcggcctcaaagtcggcggcaccggcctccagagcgtccatcatgacggtgtcttcgtccagctcgccctcctcgttgtcaatgacgatgacgcccttcttgtcaaaggaccagctgacgcagccctgggcacccaggttgccgttgcacttgtcgaacgcgtggcggacctccggcgcggtgcgctggcggttgtcggtcagggcctccacaatgacggccacgccgccggggccgtagccctcgtaggtgacggcctcgtagttgtcggtgctgccggagcccagggcccggtcgatggtgcgcttgatgttgtcgttgggcatgttgacggccttggccttggcgataaccgtggccagacgggagttgttgttggggtcgccggagccgccgccctctttcacggccacgatgatctccttggcgatcttggtgaaggcggcggagcgcttggcgtcggccgcgcccttggtcttttggatattatgccatttggaatgtccggacatggtacattactctccttctacgtaatactggatgacctcccggtgggaggcggatttggtgacggtgaggcccgggaaccggccgcgcaggtactctgccagcacggtgcacaccggattctctgtggggaagtggcccgcgtcgatcagacggatgcccttccctgccgcgtctaaaaactggtggtagctgaggtccgaggtcacgaacacgtcgcaccctgcggcgatggccgcatcctcatagtcgccgcaggcgccgccgcccaccgcgaccttccgcaccgggccgctgtccccggcgtagcggacgccgttggcctggagcgcccggcagacgtgctttgcaaattcctgtaaaggcataggacttgccagtgttcccatccggcacagcccctccgggtcccccagcggcccagggtcctccagccccagcgcggcggccagcgcgtcgttgacgccgccgggggccacatccaggttcgtgtgcatacagatggcggacaggccgctcctcaggattttcagcagcaggtgcccctggggcgtgtcctgccggacggtctgcaccggcagccatttgcagttcatcaccggatggtggctgacaatcagctggcagttttccgcgatggcctcgtccgccacggcctccgtgatgtccagggccaccaggacccgccggacctccgcctccgggtcccccagcagctggcccacgttgtcccagtccatggtgccctccttcggggccagtcggaacagggcctgttcaatttcccggacagttggcatggcgccactcctccctcatttgcagaagctccgtgatgacggccctggcgtaatcgccccgttcccgggcctctggcgccgacgcccggttggccccggccgccgccgcctggagctggatgatcttctcgatgatgtagcggtcccccagggggtcgtagagcaggtccgccccggcccactgccggcccagcgtgagatgcatctcccctgccccggcctcgatcacgggatagagaaagccccggtcccgcaccagcgcctcccgcgctatggcgtagccgtgctccgccatgaagcggcgcagcgcctccgcccggctctggggctggagcagcagggtgtggcggccgtcggcagtccagggtgccccggccagaatctgggcgatgttctcgccccccatgccggcgatgacgatggtgtcgcactcctccggcgccacggcggccagaccgttacccaggcggaaggtgatccggtcccccacaccgtagcgccggccggtctcctgcgcccggtccagggggccgcgccgcagatcgctggcaatggcagaggccacgcggccctgcagcgtcagccacacgggcagataggcgtgatccgtgccaacatcagcgaggtgcgcaccctggcggacccaggcggcgatctgccgcaggcgcggcgtcagttccagatgttttcccatggcgccctcctgttccggctgtcggaggaggacgcatacggtctcccgtatgcgtcccgttccggtcattccgctttcttgttggcttcctcgttcaccagggccagcagcttgtcgcagtccacgccgtggaccatacaggcctcctccacagtctcgccccgggaagaggggcagcccaggcagtgcatgccgatggacaggaagatgggcgcggtctgaggcgccacgtccagaatgtcaccgatgatggtgtccttcttgatctcgatcatcagaggttcctccaattctaatctgaaattcagcaggggtattatactctagttttcgatgtttttcaagagaaaatctttgaaaagcctggaaatgtggagattcggcgtccgcaccggcacatttttccggaatgcctcccgtttccccggcgcggggcgcggcggccggctcccacggcaaaagaagaagcggcgcccaccgggcgccgcctctgcaagagaccaaaacggattgattcgtttatctctgctggtcccgcatcttggcgaagcactcgctgcagtacacgggacggtcagacttcggctcgaagggcacgcgggcttcgccgccgcaggcggcgcagacagcggtgaaatactcccggggaccgcgggacgcgttcttgcgggcgtcacggcaggccttgcaccgctggggctcgttctggaagccgcgctcggcatagaactcctgctcgccggcggtgaacacgaactcctggccgcactccttgcaaactaaggtcttgtcttcgtacatgatgttaccctctctttgaaaagaaaaatatattgcgttcagcttccgctgagatcgccggaaagaagctgccgtgccaccttgcgccgaatgcgctgcacggcgttgtccacggactttgggggcttgcctaccgtctcggcaatttccctgcatgaaagaccgtctaaatagtaccccaaaatctttgcttcaaactcggacaactgtttccggacaccggataagagggcagcggtatgttccctgtcgatgagatacgcttcgggatcgcgctgagtcagatcgctggtaccagaggtgtaggaattggcgtcaaagaagggtgtatccaaggggaccgactgattgagagccatgtgcttatcccgcgccgcggcgcggaggacggaatacagccggttacgaatgcagatttctgcgaaggtccggaaggatgcctccttggaggcgtcatactcccgaacggctttgaggaggcccaccatgccctcctgggtcagatcctcgctgtcgccgcccaccagaaagaaggggcgggcgcaggtccggaccagccggttgtaccgcgtcacaagagcttcctccgcttcgcggctgccgccggcaaccagttggcacagcgtttcatcgctgcactggtccaggggctggggtgtcttctcgctaaatttgtacatatcgtattatacctgtctatccagtgaaatgtcaagcaatttgtaaaaaaatccgagaaacagatttttattttttttgcgatttgatgaaatctgccagccggtccgccaccgcctgggcgatctgcgtggttttggcctccaccatcacccggatcagggcctccgtgccggaggggcgcaccagcacccggccagcgccggcgagggcctcctcctcccgcttcacggcctccgccagcgcgggggacgccataatggcctccttcacgccgccgctgtggggcacctccacgttcaccagcacctgggggtagacggcgcagcagctgacaagggaacttgctttctccccggaccgggccagcacctgcaggaactggagggccgtcacctcaccatcgccggtggtctccacatcggtgaagatggtgtggccggactgctccccgccgatgcggtagtcccgctccagcatcttctccagcacgttccggtcgcccacatccgtgcagagcaggtcgatgccgttgttccggcagaactcgtggaggcccaggttgctcatcaccgtggccaccagggcgttgccgttgagctttccccggcgcttcatgtccagggcgcacaccgccaggaccttgtcgccgtcgatgacgccgccggtctcgtccaccagcaggcagcggtccgcgtccccgtcaaaggccacgccgatgtcatagccgccccgcaccacggcggcggccaggtcctccaggtgggtggagccgcagtggctgttgatgttcaccccgtccgggtcccggtggatgaagtccgtccgggccttgaagcggccgaacagctccggcgcggtggcgctggcagcgccgttggcgcagtccgccaggattttcagccccgccagatcggactcgatggtggaggccacgaagtcgatatagtcccgcttcagctggcgcataccgtggtggcggcggccgatctccccccgggtgcggagcttcatgggctcctgggagaggatcttctcctcgatccgggcctccacgctgtcggagagcttgtagccctgtccgctgaagaccttgatgccgttgtgctcataggggttgtgactggcggagatcacgatgcccgcgtccgccttttcctgcacggtgagataggccaccgccggggtgggaatggtgcccaccggcttcacgtcgctgcccacggagcagagccccgccatcagggcggactccagcatgtcggaggagatgcgggtgtccttgccgatcaccacggtggggcggctgcccttgtcctccatcagaacagtgcccacggcctgccccacgcggaaggccatgtcggcagtgaggttctcccccaccacgccgcggatgccgtcggttccaaatagtttgcccattgatattacctcgtttgtttcttatgatgtgaccgtccccatgggacggggattcagccatgctgatggctgggcggatgcaccccccatttctcttttgtcgtgccaaaagagaaacgggccgtgcacggtccaaagagaaaagcgttggcgcgctccggtgcagtggccctccgcgcgacggggggcggcggatcggtgcaagcgccgatttggcccggccttcgggcacgctatactcttctgcgatttctccaactgccgtcccgtggcggatcgtgcggaggtcgtcggggtggtcatcgcatggagctgcttctcttttcgctgccgctagctgtcccgcgcgggagctgccgataaaggcatcggcccctacgaccgccagggcagcgcgtagcgaagcggaacgcgcggaaagaggagctggtcaaatgcgtccttgcaccccgttgacctccgcatccacgccgcgggaatcagcgttcaagcctgtaccgcaccccgccgcgcccgttggccagtcctcgcaaacacgcaggcaccatctcacgccaacccccgtacagcaactttgcacgcccgtgcagagttgcggccaaaagcgttcttttcttttggaccgtgcacggcccgttttcttttcgggcaagaccgaaaagaaaatggggggtgcatcccgctggacaagccccttgcgggagcaaagattcccgaggccgccggacggcggccttttacaactcccgccggtccgaccggccggccagataatccagcgacacgccgaagtggtccgccagggcgatcaacgtgtccaggctgggccggtgctcgccggactccaagtattggtagggccgctccccaatcccgatggcggcggccacctgcttttgggtttcgccctgttccttgcggagttcccgcaatcgctcgtttagttccataaatcccccttaacacgcttcgcagagcgtgttatatttttctcacgctttatgaagcgtgagaaaggagtattcgcaatgtctgactccaaaaacgggccgcacgcccctgcaggagcgggttcctctgaacggcgggaaacccacctctacatctccctccggtccgaccgcccggccagataatccagcgacacgccgaagtggtccgccagggcaagcagactgtcaaaccccggcttttgtttgcctgtttcaaaccgctgatactgccggtctgtcattccggcggctgcggccacctgcgcttgggtctcgccgtgctctttgcggagttcccgcattcgctcataaaactccatatatgatctccttggcacaacctaaaagtcgtgatatatcctttctgcaaacagcttaaaagttgtttgcagaaaggagcattcgcaatgtccggctttgtaaaaaggctgtacgccccctgcaggagcaggttcctctgaacggcgggaaacccgcctctacatttccctccggtccgaccggccggccagataatccagcgatacgccgaagtggtccgcaatgcccacgagattttcaaatccaggcagattgaccccggtctcaaaccgctggtactgccgatccgtcacaccgatggcgtcggccacctgtctctgggtctccttccgctctttgcggagttcccgcattcgctcttgcaatgtcatatcgtcacctcttgacacgatgtatccgttgtattatactgcagctaagcacaacgcatccattgtattttgaaaggagcattcgcaatgtccgacttcatgaaatggctgtacgcccactacatccgcccccagctggacgctgccccaccggatgactacgagatgcccctctcccttctggagggagagctcacctctgagatggcggcggattacgaaaaggcccgggaattcaccgccatccatgcctttctgctgggcctgcgcaccggccggggcctgcccctgtgacgcctcagacgcccgccatcctggacagctccggcagccaggcgcagaaggtctccagatacacgccccgcagggggtcctcccctgcctccgcaggcgccgccagcgcgcgggcgatcacttcctccgcgtccggccgggtcaccagctccgccagggcgtcgttgcccgccagggccgcccgctttccgaacatcccctccaggtcgctggacacatacatggaggcgttgaacggatagtccagcgccgtctccagcagggcctcggaggtcatctgctctgccagccccgccggcaggcggcaggcggcacgacgggcgttggcggacagctccacccactccggcgtgccgggctggacgggaaactgatagggcgccgtcacggagcaggcagcccggcctgtgacggcccaggctccgacggccagcgccgccgacagcatcagaaatgcgacgcgctccgccagggtccgcttcatgaaaaccgcctcctcacagcgtcagctggtccatgtccggcggatccgccgtcatgccgccagggatgggcttatgcaggtgctggtatgccttcgccgtcacgcaccggccccggggcgtccgggtcaggaagcccagctgcatcaggtatggctcgtacacgtcctccagggtcacggcctcctcgccgatggtggcggccagggtctccaggcccacaggaccgccgccgtagttctcgatgacggcccccagcatccgccggtcgatggggtccagccccaggtggtcgatctccagcgcgcacagggcctggtccgccacgtccttggtgatgacgccgtcggccttcacctgggcgaagtcccggacccggcgcagcatccggttggcgatccggggcgtgccccggctgcggcgggcgatctcataggcgccctccggcacgatgtccacgttcaaaatggcggcggaccgggtgatgatctgagagagctcctccggcgtgtacagctccagccgcagcgtcacgccgaaccggtcccgcaggggcgcggacagctgccccgcccgggtggtggcgccgatcagggtgaacctgggcaggtccagccggatggagttggcgctggggcccttgcccacgatgatgtccagggcgtagtcctccatggccgggtacaggatctcctccacggaccggttcagccggtggatctcgtccacaaagaggatgtccccctcgttgaggttcgtcagcagcgccgccagatccccgggcttctcgatggccgggcccgaggtgatgcggatgcccgcccccatctcctgggcgatgatcccggccagcgtggtcttgcccaggccgggcgggccgtggagcagcacgtggtccagggcctctccccgcttctgggcggcctggatgaacacggccaggttgtccttcgccttctcctggccgatatactcccgcagggtcttgggccggagggacccctcctgggcgtcctcctgcaggaaggtcttggccacgatgggctcttcatagatgtcgtttccaaagtcgatgctcatgggttcacttcctcatgtgctctgaatgtgctccaaaattccggccggggcggtcagcccgcctggaacagatgcaccgccagccaggccaggccgaacaccgcgcacaggcacagggcgaacaccgcgccgctgcggttgcgctgccgccgctctttttccggcaggccgtggcgctgctggcccttattgagcagggccgcaaagcgggttccgaatatcatggccagaaaggccatggccagcgcggccaggagcagaatcacggacaggatcttcatactcacttcaccatctttttcaggcactggcggatgatctcctccagagacagagtttccacgtccacgcccttcagcgcctgggccacctcggcgctggtgtagcccaacaccgccagggcttgggccgcctctgtggccttatttgtaaaggccgggacgctcacagcggctccgccggagaagtccagccccgtggcggcgctctcccgggccatcttgtccttcagctccaggatgatccgctgggcgatcttcttgcccacgcccggcgccgccgtcaggctcttctcgtccccggtgacgatggccatggccagggactccggcgtggcggcggagaggatagccagcgccgccttgggccccacgccgctgacgccgatcagcagcttgaagctgttcagctcgttggccgtggcgaagccgtacaggccgaaggcgttctcccccacgtccagataggtgtagagcttcccccgctggccctttttcagctgggccagggtggtgttggtggtcttgcaggcgtagcccacgccgccgcagtcgatgaccgccagatagggcagaatctctgccacggtgccgtccagatagtaaaacatggataatcacactttcttgggagttcggaattccggcgtccggcggagcggtccggtccctgactgttcagatggtctccttgaccctgctgtcctgcaggggcaggcgggacgtggcactccgggcatggcacagggccagggccagggcgtccgcggcgtcgtcgggccgggggacggctttcaggtgcagcaggcggcgggtcatgtccatcacctggcgcttttccgccttgccgtagcccaccaccgccatcttcacctgggagggggtgtactcgtggagcgggatcccgcacttttccgccgtgtacagcagcacgccgcgggcgtgggccacggcgatgccggtggtcaggttcgtgttgaagaacagctcctcgatggagatgacatccggcttcagctggccgatcaggtcctccatatcggtgccgatctggtacagccgccgggagagcggcagccccgccggggtggtgatggcgccgtaggtaagcatgttcacttgtgcccgctccgccgtgatgaggccgaagccgatggtggcgtagccggggtcgatgcccaggatccgcatggcgctttccctccagtatacatactgtaacagtataacaaattttccagggaagcgcaacagggaaaacgcgcgggcttctccccggcaggatcaccccagccgccgttcggcgggcaaaaaagcacccgccttgcggcgggcgctctctcgttcgcatggaaggcgggggatttgactccccctcgcctattggatgggaaccgccgcatcaacggcggccatccggttgtagcaggggtccagataggccgtgtcgcccgccagtcccgccagggggaagtcctcggtataccaccggtcctcccctacgcgctcctgcgccgtctcgtcccagtagccgtaggaggagccgaactgccagatctcataatagttcccgtcctcgtcccaggcccctctggagaacacgctccccatggtccggttctccatcagcggggacaccaggtacacgatccatccctccggcaggcgctctgcgccctggaaccaggtgccctccggcaggttttcggcggtgccctccgccagattcagcttcaccggcggcgcgtccttgtccttccaccggacgccggtgatgtggagggtcaggtgctccccctggctgaagaaggggctgtccagccagaaggtgcccatgccctccccctccgggtccccggatgcggtgatgccgcccaggctcttttcaaaccgctcgccgtgctcgttctccaggtacaggtccaggcccgccagccaggcggtgttgtccgggtccgccgtcagggtcagccgcagatgggtggggtagatttccgcctcttgcagcgtgaaggtctggccgtccagggcaaaggtccggttcagctccagcagcgtcccctgggcggtgaaataggggtcgaattccaggtggaacgtcatctccgccagatacgccggctggtcatcgaccggctggtcaaagtagccgtcgccggtgttctccgcaggcggcccgcccccgtcctgctctgccgggtagaccgacagggtcagatccaggattccgggcacgtcccggtccacaaagtcccgcttgatctccaccagctcccccggcttctccgtccggccgccggcgtctcccgcgctgccgtcgccgggggtgatccggcagtccgcccacatgggccccaggtccggggcatagtccagggtgtagaagatgttcagctgtttgcggtccacgatcacatactccaccgtggcggtgacgccgttcaccgtctgggactggccgatgggctggacgtagtcgttctccaccgcggcggataggctgggcgaccaggccaccgcctgggccagctcccgcagcaccggcactgagccgcaggcccgcgcgaagggcgggaacaggttcaccagcagcacaaaggcggcgaagcaggccgccaggctccccgccgggacgccgaagagccgcaggcggcggtcccgtttccggcggcgcagcgcccgctccacagcgccgtccagggccgccggtgtggtctccagctcctggagcagggcctgatattcctcgtttcgggtcatgcgtctccctcctctcccagttccaggcgcagcagctgcaatgcccgccgctggcgggtggccgcggtgccctggggaatgttcaatgcccgggcggtctccgcctgggtgtatcctgcgaagtaccgcaggatcaccaccgcccgcaattcctccggcaggcggcggacggcctccttcaggggcagggcgtcataggcatccggaccggcgctctccggcagagcctcctccccggccaggcgccgccggcgccgcagctcccggtggcacgcgttcagcacaatccgggtgagccaggtctcgaaaaagtccggctgacgcagctgccgcaaagcccgcagggcctggtatacgccctcgtccaccgcctccagggcgtcggcctcgctgcccaggtacaggtacgccgtccggtacagccgggcccggagagcctccgcccggcgggcgaattcgtcgtgatccatggcggtcctcctttctcttctcttcacctatttgagtcccaggcagccggttttgtttgcggcggcggaaaattttttcacaggcaggcagaacgccgctgcgcatttccgtggtctgccgtgcgtttgcgcagaaaaaagtcccggccagggcatgtgcctggacgggacgcctctgcccctggccgcagtcggccgggggccgtctttgccgtgcaaaggcgaggggatcggcagaggcgggctctgcccgccggagcgtcggcgggaggcgccggtgctccccttggaattacgcccggggatgggctttctgatacacatccttcagctggtgcttcaccacatgggtgtagatctgggtggaggagatgtccgcatggcccagcatctcctggatggaccgcaggtccgcgccgttttccagcaggtggacggcaaaggagtggcgcagggtgtggggggtgatgtccttttcgatccccgccttctcctgatagtacttgatgatcttccagaacccctggcggctcatgcgctcgccgttcatgttcacgaacagggcctgctcgccgccgtcggcgatcaactggggccggatatcccgcacatagtcctgcagcgccttcacggccgtgtggtacagggggatgatccgctccttgccccggctggcacatcggatgaagcccgcggagagattcaggtccttcaggtccagggagatcagctcgctgacccggatgccggtggcgtacagcagctccagcatggcatggtcccggtatcccttggcgtccacgcaccggggctgctccagaaacagctccacctctttgctggtgaggatctccggatacttccgctctgcccggtccgcgctgatgctcttggcggggttggcctttacggcgccggcggagagcagaaagttgtaaaacgacttgacggaggccaggaaccgggtcaccgaggcggcggacttcccccgcccccgcatccagctcatgtagtcctgaatcatctctccgccggcctgccgcagcgtgcagctctggtgctcccgcaaatacgcggagaactgggtcacgtcccgcagataggagcagatggtgttctgggaggcgtgacgctcctccgccagataagtcccaaagtccgcaatgtcgtctcttgccaagggtgctctcctccctctctctttctctctaccccaggatgcgctccagcatcagccgcagcagcaccggggacaaaaacagctccgcacacacacccgccagcagcgccagacagcaggcgccgaaccggacccagcaggcccggccgtagaccacaggggcagtccgccgtcctctcccaaaggacacggccgccagtcccgcggacgtcccccaggaggccgccgccagcaggaaatagcagggcagggtcaccatgcaccgcaggccgaacaccgccagggccagcagcacgccgtccacgccgaaggccgccgtgaagcagcacacggaaaaggacagaaaaaagccgtaagccgccgtcacacagggcagcagcaccaccccgatggaggcgaaccccagcagaaatgcaaacagcggatagcggaaatagatcaccagggccgacagagccgtctggacagtgggcgctccctcgccccccaggcggacgtagtcctccagataccgccgcagctcgtcccccgtggtgtccggcacccggcccgacaggacctgtcccaaaaggacgccggccaggaagaacagcgccagcagaagcaggcggggcagcgtgggcagctggaccgtgggccgcttcgtcaatgttctcgtgttcaatccgcctcacctcaccgcatcctatgcgggggcaggcggatttatgtagcggttgacgtaagaccttgcttgttctaatatagttgaattcgccggattttgcaaggaatttacgggaattttccgttttttgtgagttatggcaaaatattatgtaaacaatattatgttaacttcgtaaaatcggcgtgagagatcacctcccccgccccgaaaaacgacaatatcttgtagacataaaagcggcggcgccccacatttgccgccgccgtctcccctgccgcgggagacctcccgactgtggccgcagtctccgcggcagggctcagatctgtatttttggtgaaattcacaagcggcttttcaggccttgcggcccctgcggaccggacggcgcttccgcttcctccggcgcccgcccagcaggcccgccagaagtcccccgcctgcgccgcacagcagcagcacgcccccgcggcccagccaggtgatctgctgccagcacagcagcgccacagccaccaccgccagcagaaagcctgcggcgctcaccatggcgctggccaggctgccccaggaggagcggcggacactgagcatggccccggcgaaggacgccagacagcacgacgccgccacagcgggaaagctcccctcctccggcagcaccgccttcaccaccagcgcggacagcagcaccgtcagcagcagatagatccccagagacagcgccgcgccctctacgaacaccagccacagggctgtctgtttccgcccgttacccataaaaattcctcccctgtcatcgctctatccgagcttatgacaagggagggtggttttatgatgggttagtccttcttttcctcttcagaggatgcatcggtctcctcggcgggaacctcggggatctcctcggtcttcttgacctcgtcctctttcttctcctccttggaggacttctcctcgccggaggactgaacgccggtggtggagacggcccacttggtcagctccatacggacccggtcgtcgctggtctcgatgacgatggtgtccggcttgaccatgacgatcttgcccacgatgccgccgatggtggtgatggtgtcgcccttcttcaggctgtcccgcatctcctgggcctttttcttccgcttgttctccgggcggatcagcatgaagtagaacaccgcaatgagaacaaccagcatgatgatagaggaggaagcgccttccataacaacaaaactccttttcgttccaaagtcagaatgacaatattatagcagatataccagcttttgcaagggggtcatgcgcgtttttccaaatttccgctgtaacgggcccgaaaatccgcgaacgtcccttcgtccagggcccggcggatgcgggcggccagctcattgtagaagtacaggttgtgcagcaccgccagccgcagggccagcacctcatccgccttgaacaggtgccggatgtacgcccgggagaagcggcggcaggcggggcagccgcagctctcgctgatgggccgggggtcggtggcgtacttctcgttgaggatgttcaccgtgccctcccaggtgaagagcttgccatggcggccgttgcgggagggcatcacgcagtcgaagaagtccacgccccgggccacgccctcgatgatgttgctgggagtgcccacgcccatgaggtaccggggcttgtccttgggcatgtggggctccaccgcgtcgatgatctcgtacatcacctccgcgggctcccccaccgcgagacccccgatggcgtagccgtcgcagtcgatcttggcgatctgctccatgtgccacacccgcaggtccgcaaacgtggcgccctggttgatgccgaagagcatctgccccgggttcaccgtgtccggcagggcgttgaggcggtcgtgctcggccttgcaccgctccagccagcgggcggtgcgctcacagctggccttggcgtattcgtaggtcgcggggttctccacgcactcgtcaaaggccatggcgatgtcgctgcccaggttggactggatctgcatggactcctccggccccatgaagatcctgtgcccgtcgatgtgggaggcgaaggtgaccccctcctcccggatcttccgcaaagaggccagggagaacacctggaacccgccggagtccgtcaggatggggccgtcccagtccatgaacttgtggagcccccccatctgccggacgatatggtcgcccggccgcaggtgcaggtggtaggtgttgctgagctcgatctggcagcccacctccttcagatcatgggcggagacgccgcccttgatggccccctgtgtgcctacgttcatgaacaccggcgtctggaccacgccgccgtgggcgcaggagaattcgccgcgccgggcgcggccctcggttttcagcactttgaacatccagtgatctccttaatatcgaatctgttccatattttgtagggcgcatcccgttggacgggaggaaccggctcccgccggggatgcctcacagcatctccttgatctcctcgcagaagctggccgcggactccgtgtcccgcatcaccagaaaggccgtgtcgtctcccgccagggaccccaccatgtaggcgacgcccatgtcgtccagcgcggcgcaggcggcgctggccaggcccggcatggtcttgatgaccacgatgttctgtgcgctgtcgatgctggtgatgctctcccggaagatggtccgcagcttctccgcgaagttcagccgggtccggttgccggacacggcgtatttgtacactccatggcccaccggctccttgatgaggtgcatctgcttgatgtcccgggagatggtggcctgggtgctggtgatcccccgctcctggagacggacgagcagctgctcctgggtctcgatattctcctggctgatgatctccaggatcatgctctgccggtcatttttcatcttcaaatcctcctggcagcattttttgtgcaaagatctcacagaagctccgctccgacagccgcaccagccgcacggtgtgcttggaccggcggacctggatcttgtcgtcggccttcagggagaaggcccggctctcgtccacgaacagatacaccggcttgcggccgttgcgctccagctcgatggtcagcgtgtgctccggcgagaggacataggacgaaaagcgcatgttgtgggtgcagatgggacagaccaccatggtctgggccaccggctccaccaccggccccccggcggacagggagtaggccgtggacccggtgggcgtggccacgatgacgccgtctccggcgatatccgccaggtgccgcccgtcggaggagatcttcagatggatcacatgggagatgggaccctcccggatcaccgcgtcgttcaggcccagattcgtgtagatctggcggccctcccgctggacggtcacgtccagcatcatccgctgttccgtctggaagtcccagtccttcagcttccgcagggcctccagctccccggcctccagctccgcgatgaagcccaggccccccatgttgatgcccagcaccggaatcttgttcagggccaccagcttggcgagatgcaggatggtgccgtccccgccgaaggtaatcagcaggtcggcgcttttcagctccgccgtcaggggccgggtcttgtagtccccataggccccgtccttctggtccttgaaggggggacacaccaccgtctggaagcccatctgccgcagaatggcgtctgccctgcgggtggtctccatgccccggtcccggttggggttggggcagaggatgatctttttcatgggttgcctccctctccgtgctccttcagggtctggtgagactcgtccaccagggccttcaaatcaaatgtacgctcctgccggggacccttttccagatatcccaggtactcgatgttcccctccgggccccggatgggggaataggtcagtcccagcactgtgaagcccgcgtccccggcgtggtccagaaagtgctccagcacctccaggtggaccgccgggtcccggaccacacccttcttccccaccttctcgcgcccggcctcgaactggggtttcaccaggcaggcggcgtggccgccgtccttcagcaggccgttcaggggcggcaggatcagcttcagggagatgaagctcacgtccacggaggcgaagtccagctcgtccggcacctgctcgtgggtgagataccgggcgttggtccgctccaggcacaccaccctggggtcgctgcggagcttccaggccagctggccgtagcccacgtccacggcgtagaccttctccgcgccgttttgcagcatacagtcggtgaagccgccggtggaggcgccgatgtcggcgcagacggcgccgttcaggtcgatggggaaggcggccatggccttctccagcttcagcccgccccggctgacgtatgccagcgtgccgccccggacctcgatctgggcgtcctccgccacggcggtgccgggcttgtccacccgctggccgttcacaaagacctcgccgctcatgatgaccgcctgggcccgctggcggctctcctgaaggccccgctccgtcagcaggacgtccagccgttttttttcactcatgtacgcgcctcctgtaccgcccgggcgatgcccgcggcgtcgatgcctgcctgatgctccagctggggcacggccccctccggcaggaaggtcttgcccaggttgatgagcaccagcttctccggcgcctggccgtgctgggccaggatggccgccgtccgctggcccacgcacccggcgccgaaggcatcctccgccactgccagcagcttcttccccgccagccagggcgccagcgtctcatactccaggggggagatctgattcagcttcagcacctcggtcctgacgccctgccgttccagcaggtccgccgccgccagggcctgattcaccagcacgccgtaggtgaggagcgtgacgtcctccccctcccggagccggaccaccggcgcaccggaccggtcctcccggtaatcgccctcgccgccccggggataccggaccgccacaggcccgtcgatctcaaacaatgcctgccgcagcatccgccgcagttccgcaaagctggcggggcacagcaccgtaaacccggggatctccgacaggaacagcgcgtcgaagcagccgtggtgagtctcgccgtcggcccccaccagacccgcccggtccacccccagcaccacatggagccgctggagggccacgtcatggatcagcatgtcgtagccccgctggaggaacgaggagtacacggcaaacaccgggagcatcccctgcttggccaggcccgcggccatggcgacgccatgcccctcagcgatggccacatcgaagaaccggtccgggaactctttggcaaagggggccaggccggtgccgtccgccatggcggcggtgatggcgcagacgcgcccgtcctccgcggcgcaggcggccagcgtcctgccgaacacagcagagaagtcgtctcccccgctcttcttcacaaggcccgtctccggatcgaatggccccacgccgtggaacttgtccgggttctgctccgcgaaggagtagcccctgcccttcacggtcttcacgtggaccaccaccgggcactggagctcccgggcccaggccagcacgtggaccagccggtccaggtcgtggccgtcgatgggccccaggtaggtgaagcccatgtcctcaaacagggtgctgccgggccacagggcctttttcagggacgtcttgaccttgtggttgaaccggtacagcgggttctccatggggtgctgtccgaacaggccccggtaccacttcttgaaatggtagtaggcaggcttggagcggatctggctcagatggctgtccaccgcccccacgttggggttgatggacatgccgttgtcgttgagaaggacgatcaggggctcgccggaggcaccggcgttgttgaggccctcataggccagtcccccggtcagggcgccgtccccgatcagcgccagaacactgtaatccaagtgctgtaaagttcttgctcttgccatcccaagggccacggagacggagttggaggcatgtccggcgatgaaggcgtcgtgttcgctctcccggggcttggggaagccggagaggccgccgaactgccgcagggtgtcaaacagcgcctgccggccggtgagggccttgtggacgtagcactggtgccccacgtcgaacaccagccggtccttcgatgtgtcgaagacccggtggatggccaccgtcagctccaccgctcccaggttggaggccagatggccgccggttttggacacatgctccaccaggaactgccgcagctcccggcacaggggctccagctgttcccggtccagggccttcacgtccgccggggtatggatattctctaagatcaaatgacccagcctcctctcagcggtggaacaggtgcagaaaccttcccacccagtagaccacgctggtgcttttgttcagggccactgtcttgcccagggccttgccgccgatggtgaggccggacaccagggccgtcaccgccacgctcagcagcacgctctccggcagggcaaaggccgtctggagccgcaccacgatcacggcggtggtggtcccgctgacgatgccgcagatgtcccccaccacgtcgttgcagacgctggacacccgcccggcgttccgcagcaggaccagcgcctccttggcgccgggctccttgtgggcggccatggagtgaaagggcctggggtccgccgccgtgaccgccacgccgatgatgtcgaacaggatgcccaggccgatgaacaccgccagcaccagcgcggcagccgccgcgcccgcgccgctgagactggtctccgacgcaaggctcaatgccgcggacaggacgatggcaagaaaaaagacctgcacggcccaccggtaggggcccggcctctcccgctcccgtccgcgctttcgctttggggtatcgctcaaaaaaagtccctccacttgggaatgaattccagttggctaagtcggcggcggcggaaaaggtaaatcttacggcttaggtacgggttggatttccccgcggcacacctctcgttgccgatggaggcggttcccccttcggtgccgcggcacagtgtcgccagccatgccacccgatcgccacttagtccgcactgcaatcccttttcagcccggtcaggacagcctaggtgatttccaccccagtcgatccgtccctttagcctcttttgcaaaccgggtttcagggggcgatcaaacgggccctctggccagagggccccgcctgttgttcccccatccacccgcctcacgcaaggcaggctacgtctgcacacagcgttacggccccgcagggccgatgcaccgcgctgcaggttcatcagctgcttcgtacgcggcccggaataccacactgggagtacgtccgcgcacaagaacaggtctccacggaaacagggtcgtcatcaccatgccattggaaagcgccctgagtccgcaagcgcaggcaaagccaggcttccccccagcacccacccgaaactgggcgtatcaagcaggcaccagaggtttcatcggtgtgcccttcagaggatttttagcccctccttcggagacggatgatctgactagaatactgcgccgccgcttagcgccatacagtatatcacaaatctaataaatatacaacatattccgtatatgcgtccgtaaattttttgtgaccggccgggctgtcctcctgatgcggacagtccccggcgccggacagaaaaggggccgccggacggcggccccgctcttcacttgttccgctccgccagggagtccgccagggcggccaggaagccgtccgtgtcccagtccgccaccgcggccttggccgcctccgtatgggcgcggaccgcccggccgcagccctccagccccagcaggtccatgaaggtgaccttcccctcctctttgtcggagccgatgggcttgccgaactccgccgcgtcgccgcacacgtccagcatgtcgtcccggatctggaaggccagccccagctcctgggcgtacgtttcggcggcggccatcagcccgccgcttccgcccgccgcggccacgcccaggcggcaggccccggcgatcatggccccggtcttgagccggtggacctccgtcacctccgcctcggtcttcggggcgtggagggtgtccagcacctggcccgccaccatgccgtccgcgccggagacctccgccaggatgcggccgcaggcggcccggcggctctcgtccagccccggcgccgtcaggatcaagcggtaggcctccggctggagggcgtcccccgccagcacggccagcgtctcgccgtagaccttgtggttggtgggcttgccccggcgcaggtcgtcgttgtccatgcagggcaggtcgtcgtggatcagggagtaggtgtggaccagctccagggcgcaggccatgggcagggccgtcttccagtccgcaaggcccgccagccgggcaaactccagggtcagcaccggccggatgcgcttgccccccgccagcaggctgtaccgcatggactcatacaggtcccgccagtccggcctcccggcaaagagggtctccagatacgactccaccgccgtgcggtaggtctcataccgggtctgaaacacctgttcgctcatccctgctcctcctccccgaagggcagctccaccggcgcgccgtcagggcccttcatcagcttgaccaccttctgctccgccgcgtccagctcctgggagcaggcggcgatcagcttcgtcccctcctcaaacaacgccagagagtccgccaggggggcatcccccttctccagtgccgccacgatctcctccagccgggcgatctcctgctcgaacgtctgtttcttcgcgctcatggctgttcctccttcgtatagggcttgtccaccacggcggtgaagccgccctctcccaacgtgacggacacccggctgcccggcgccgtctcccgccagcttttcaagatcttcccttgttcatcccgggccacggcgtagccccggcccagcaccgccagggggctcatggcgtccagcgacgccgccagggccgcgaatttctgccggtgccgccccagcaccgcgccggtcacgtcccccagccgctgctgtaagtggtccaggtccagccgcttgtcctggacgtaggccattccgtccgtcatcacccgcttggccgccagggcggtgagccgctgccgggcggcctccagccgcgccgtctcgcttcttgccatccgctcccctgcgccccggagccaccgcagcagctccacctggtccggcacggcgatctccgccgcgttggagggggtggacgcccgcgcatccgccacaaagtcggcgatggtcacgtccggctcgtggcccacggcggagatgatgggcgtctcacagtcgtagatggcccgggccacccgctcgtcgttgaaagcccacaggtcctccatggacccgccgccccggccggtgatgatgacgtccccgatcttccacctgtccgcgtaccggatggcccccacgatctccggcggggcctcggccccctggacccgcaccggcagcaggatcaccctggcgatgggataccggcggcggaggatgcggatcatgtcgtggaccgccgccccggcgccggaggtgacgatggcgattttctccggatagggcggcaggggctttttgtgggcggggtcaaacaggccctccttccacagcttttcttttaactgctggaaggccaccgccaggtcccccaccccctctgggatcagggaatcgcagtagagctgataggccccgtcccgggggaacacggtgatgcggccggaggccacggccttcatgccgttctccggccggaaccggaggcgggaggcctgtccccggaacatgacgcaccggagggccccctcctgatctttcagggtgaaatagtggtggccggaggggtagatcttgtagttggacagctctccccggacggcgacgccctgtaaagccggagcactgtccagcaggcccttcaccagctgattcacctctgtgacaccatagatatgtggttccatacgcgtttgctccttggtccctgcgggcagaaaacgaggagccggacggcggcgtcacgcccccgtcccgctccgcaggactgcccttattccgctgtctcccggcgcacgaaggtgcccaggatgccgttgatgaacttcaccgtctccggcgtctcatacttcttggcgatctccaccgcctcgttgatggaggcgccgtgggggatgtccggcatgtacaaaatctcatacatggccacccgcatgatggcggaggccaccagggggatccgggcaaaattccaccccttggcgtatttggcgatatacccgtccagctccggagcgtggtcggccacgccccgcaccaggcggcggatgtagtccgcctgcttggcgttgggcgtctcctgatacagcgggtcctcctccgccagggcggcgaaggactccggtgtcaggcgctcgtccagcagctcctccaccggcttgtcggtgaagctcagctcgtaggacagatgaatggcgatctctcgcgcggtgttccgtaccataacctcaactacgtccttttctctctcattcccatccgggactcaggccagcgtcacgccgcccacgtggatgttgaccgcctccacagagcagccggtcatggcctccaccgcgccgatgacggccttttgggcattttccgccaccgtggggatggggtggccgtactccaccgtcagatagatgtccagcaccagggcggcgccggtcatgtcgatcttcacacccttggcgcccttctgggcgttcttcttgttgtggaccaggtccgtgacgctgccgcccatggcagtcaccatgccggacacgccctccacatcccggacggcgcccacggcgatggcggcaatcacttcctcggaaatgttgatgctcccgttctcctccggcagcgtcatatactctttgctctcgcccatcgtaagcctctcctcactgtttgatccttggtagaggcgggggtcgcccgccgcgtcccagaagaatggttccagggtgttattttaccatgtttcccgggaaaatacaacagctaatttgaggccatgatcttgatgccgctggctgggtatccggtctccgtcatggcgatgtcggtgatcttggccacgtcctcggccgtcagctcgccggtgccggtgtccaccaccacgctgatgctgtcctcccccatgaaggccacgcagtcagtatagcccttggcggtcaccaggttttcgatctgggcctccttcatggtgtagcccgctagcacctggatgccctccgacgcctcgttggccaccgccgcgtcggccccggactggtccgccgcctcctgcagcagggagatggcgttgtccctggcctgctggcgggtcagccgggcggaggcgaagtagtccccgccggtgtagaccgcctcctcatccgtcccggcctcgccgccgtcctcctcaccgctgaccagcgtggcttcccccaggatcttggtgccggtctcctccacggcgtccgccgcctgctcgccggtgtacttccagttcagggccactgctgcgcacaccagcagcaccatcgtggccaccacggtattccgcttccatctcgcgctcatgggctgtctcctcctccaaatcatcactgcgattttgccacggtgatgcggtctgcggaaaggccggtcagggccgccaccgcctccgtcaccgccagcttcacgtccgcccggtccccgccctggcacaccaccagggccccccgataggtgggatacaccgtccgggtcaccaccggcgcctcggcgctcccgtcgtccaccagcacggtctgggaggaacgggagtagtcctccggcgccgcggtggagccgctgtaagagagctccgagtcctgtgccagctgccgctcgccgtccgattccacggtcagcagcacctgcacctcccccacgccctggatgcggcccagaatgtcctccatctcctgctggagctccgcctccaccagggcggccgcctggggcgaggcgcgctccgccgtcttcccgtccccgccgggccacagcagcagcacggctcccgccagcgccaccagcgccacgaatttgtacttgtcccatatccttcgcactccttcagttttctgcttcccgctcatgccaaacctgcctctccgccgggatgcccagttccgtctccagcgccgacgccagcgcctgcgaccagctgcccgtcagctccgcggaccagggcaccgggatgccgtttccctccgtccgcgtctccacccggacggtcacctccagccccagctcgcccgctttgtccaatatatatgcttctgtctgctccgctatgatagaagccatggcctcggtctgtgtgtcggccagctcctcctgccgttcctccaccgccgcctggtagtggtcgaaatccagctccagatgctccaggtctgcccccagcaccggccgcagcagcaccagcagcaggatgagcccgccggtgaagcccgccgccttccgcacggtgcccggcgggatcaggctctgggccgccgacagcagcaccgacaccagtaccacggaggtcagccacgcccgcaccgcctccatcatggcatcaccgcccccacggaggccagcacggagatgagcagcagcagcgcgcagccgccggtcatgcccagaatcaggccgaaggcgcctcccagcccgtcgatgagcttgcacagccccggcgcccccaccacggaggccagatacgccgtcagcttgtacagcaggtactggacccccagctgcaggaaaggataggcgcaggccgccaggatggccagcatcccgaagacgccgatggtgttcttcagcatcccggccccggccagcaccgtctccgacgcgtcggcgatgatgcctcccaccaccggcaccacgccggagatggcggcctttgccaccttcaccgtggcgctgtcggcggagccggagatgatccgcacgatggagaggtagatggtgaacaccagcagcgccgtggtgaggatccaggtcaccagctttttcagcgcctcggcaatggcccccagccggttttccggcaggcaggccgccgccgtcagcaatccgatgtacaggtacaccagcggcagcagcagctgccggatcagccgcagcagcagatccacgaagaacaccgtggacacctgctgcaccgtggcggtggtgacggccccgctggccgccgtggccgccgccagggtgggcagcagcgcctgggagaagtccgccagctccccgatggtccggctgcccagccccatcagggagtccaggctcccggcggaggccagggtgatggacagcgcccccgccatgggcaggaacgccgcccccttccccccggtcccctgggcgaagccctccaccacgccgcacagcaccaccaccagcagcaccgccgccgcgccccgggtgcgctcccggaccacgtcccccacctggtccgccagccggtctaaaatgttccccaccccctgggcaaagcctgtcccgccggagaggtccccgcccgtgagatcctccgccgcctccggggcggcccgctccagctccgccggcaggtccgccgccgcggcggaggtggtcagcgccagcaccagcgccgtcaaacagatccaccatttcatcccatcagctccaacagcatgtccagcaccgcccgcagcagcggcagggccgccagcagggcgcagagggtccccgccgtctccaccacggaggccagggcgctctcccccgcgtcccggcagaggttgcctcccacctgcaccaccagggcgatgccgatggtcttgtacaggggcacaaacaggtccgcggacacgccgctggccgaccccagctcccccaggaaggccagcagctccttcaccacgcccgccagggccagggccaccaccacggcggcccccaccgccagcagcagcgccgtctccggactgccccgcttcaccaccagggccagcagcgcccccaccacgcacagccccgtcacctggatgacctgctccatgtcagaaatcgaacagggacttgatgaggtcgaacaggtcgctgatctctcggaccatcagcatcagcacgcacaccagccctgccagcaccaccatcagcccctgctcctcccggcccgagcggatcagcagctggttcagcaccgccaccaggatgccgatggcggcgatcttgaaaatcaaatccacttccatgcgtctatcctcaaatcagtaaaatcaccagcagcgccgcgctggaaagccacagcgccgcggaccgcttctccgtctcctgcctgtggtcccgggccgccgccaggtttttttccaggatctttccggcaagggttaatgctttacatacgctctcctcatccccctggagggaatctcccagggcggtcagggcggtccggctctctggaccgaggggcagcgcctccgcggcggaccgccagctctgccccaggggcgcgccccgcgccagcgacgccgccaccgatgtacaaaagtcccggacaggtcccgtccggtcccggcccagggaccccagcagccggggcaggctggtccggcggagccggatctcctcccccatgcggtccagcagggcggtcaggtccgccagcgtgtccaactcccgcctgcgctccgccgccgaccgccgccaggcccaggtcccggcccccaggatacacaccgcgcccaccagcttcaccatggcagttcctccacttcgtatgtccttccggcctcatcccggcggatgcgcaccgccagccggaacaccttctccgccagcagctgccggtacagcggccgctgggtcagctctgcggcatcggcggcgtggatggtggccagcagccccacgccgcacccggcggcctgcatggcggcccggaggtccgcctccgccgtgatctcgtccacggcgatgacctgggggttcatggcccgcagggccatggggatgcccagggccttggggcaggcgtccagcacgtccgtccggggccccacgtccatctggggcctcccccggaccatcactgccacctccccccgctcatcgataagggagacccgcagacccggcctgccggtgccgccggaggagaggcaccgcaccagatcccgcagcagcgtggtcttgccgccgccggggggcgacagcagcagggtgttctgataccgcccgtcccgaaacagccggggcgccaccgcctccccgatccccctctgctcccgggcgatgcggacagcggcggaggacaggtcccgcagggcggtgctctcaccgtccttcatcaccgccgtgccgcacagccccacccggaagccgccccgcacggagagatacccctcccgcagggtctcctccgccgcatagcgggagtagtcggtggcaaggtcgcagagagtctccagatcctccggcgtcacggcggcccccagggaccgctccccctccggcagcagcaccgccagcggctgccccgcccgaaggcggaactcctccgccagctgccggacctccggcggctgggccagagcctgttcccgcaggcggcccggcaacacccgggccgcctcctcatagcggtgttcttcctccttcacgggccgcgccccctttcgtaacacgctatactctatgaggggttgtccccggatatgactccctcagcggaaaaatgggacaagcccggaaaaatggaaagcgtacttgacatggtaccggaagtgtgctaagttgaagacggaaagcaaactttccatccgtcagaagcggatggggcgtatgaaagggggaatcgcccttgaaaaaccgcctggaggcgctgcgcaaggccagggggatcaagcaggaggagctggcggaggcgctggaggtgtcccgccagaccatcgggtcgttggaaaacgggcggtacaacccctccatcctgctggccttcaagctggcccggtacttcggcaccaccattgaggacattttcatctatgaggaggatggcacatgaagaagcaggtcatattgatgtccctggcaatcgcggggctgctctgctgcatcccgatgttcgtcctgaatgcgccgggtgcgcccggtctctccggcggcgcggcctccctgctgggtatggccggggcggtgctgttcggcacctgcgccgggacgttgctccagctgaaacggctctcccgggacccggactaccggcagaggcagaaggcccaatgcgacgagcggaaccaggccatccgggaccgggccggctgcatcgccggattttggaccgtcggactgctggtggtctccggcctgattttccagagctttgaacggttcggcattcccgactgggtgggctgggtgttcatcggcatctatctgttttacactttggcgttcctggggctttacaaatggctccagcggaagatgtgaggaggcgctgtcatgaagcggaacacacgctggtatctctcggccgccgcggcgggggcgctgctagcgggggccgccctctgggcggcgcggacgtttcccgccgctcccgccgctgtgccggggttttttggccttgcaggcggcctcctgttcttctgcgccatggcggagctgctgtccacccgagacctggaccccgcccggcgggagcgggaccgggaggaccacgacgagcggggcgccatgatccgggccatggccagggcccgggccggggacgtgctgctgtggctgctgctgttcggcgctgcctacctgtacttcttcggcgtgcccaagtgggtcagcctcatcctgctgactctggcctgcgtaaaactgcttctggactggatgttcaccgtctggtaccgccgtcagtattgaaggagggactctgtatgaaccgcacacaaaaaaagcgcctgttccagggacttctggccatgggcatcgtcctgctggtcctgtccctgctgctggacggccgggtgcccgattccctgggcgggatgctctgcggcataggctccggcctgctggccatggcggggtccaccctgctgaacctccgccacgaggcgaagcacccggagatggcccggcagcacgacatcgaacaaaaagacgagcggaatgtggctatccggaaccgggccaaggccgtgtccggcgaggtcctccagtggagcgttctggcggcggcatggctctccatcggcctggatgcacccctgtgggtccccctggctgccaccggtgtcttcgtagccaaatccgtgctggagctgtatctcatgatccgctacgagcgggagatgtaaggggtgcgccgggatgaaaaagcgctggtatctgctgttgatcgcggcggggcttctgctgtgcgcggtcccgctccaattcccccagcatctccccaagcccgtctttgctctgctggctgcgggtgggtccgtactggtgggcggttccctcggctccctgctgtgtcgggtcattcggattcgcgacccggtactcgttcaggcttacaaagaacagcacgacgagcggaacaccatgatctgcgaaaaggcggcggcccgggccgcccgggtcatgcagggcgcggtcctgtatttcggcgcggcctatgcccgctttctggagctgcccatgtggatcacctgggggctggttgggttctgcctcgcctgggggcttctggaatggggcctcaccctctggtaccggcacaggatgtagcaaaacaggaccccggcaagcagccggggtcctgttggtctgccgctcacttgcagcagctcttgatgtcgtcgcagctctccggccgcttgacggtgttgggcgggaagaactcgcccaccgggaaggagatgttccggaacagagcgcaggggtcctcgcagccgtcgccgcaggcgcactccttgtcgggcatacagtagtcgtagacgggcaccagcagctgggtgtcccgctccagccggacgatggagaactggcccagggtcacatagatccgtcggctgtcgtccccgctggacagctccccgccgaagcagtcgcccacgaaggtggggatttcacacaggtcgcagtcgcagtcccgcttgcagcagcagtccatgatgcgggcgtccagcacgatggggtccacggcctccaccacggcgatgggcgtgttggaccgctgcatcatctggggatccggctctccggcccgcatctcggaggagaagatcttggcgttcccctcgctgccgaacaggatggcccgcttgtcaaagacgcacaggccctccaccgtcaccggcaccgggcagctgagataggcctggagcgtcacatggtagaagaagcgcatatccacggtgtagaagccccggttgaagctgacgggctccacatccacatagacgtacagcagcttggcgctgccgcccttcacggacagggcgcggttgatgatgtccacacactgcagcttggggtaaaaccgcaggtcctcgatgcagtccttatcgcggcaggaatcaaaaatcttcctggtatggatgcaaaccgcctcccggatgccgcaggagtcctccacgggaccgggcataactttctcgggcattgcaatacctcctaataagtagctggatgaaagagaagctctttcaatccagtgtatgcgcccggctcccattggtgcggcggcggggaaattcggactatacaaacccggcggtcctgcggtataatacaattgtatccaatcccattccaaggaggtgacgcggatgcccggctttatccatgacaagctggagatcaagtttctgattctgtatatcaccgcccgggtgatcgagccaattccctttgataccgtgtgggatctggccatgtgcgacgagggcgtggactatttcgactttgccgagtgcctctccgatctggtgcggactgagcatctgacgctgtctgcggacgggctgtacgccatcaccgacaagggcctgcggaacagccggatctgcgagtccagcctcccctactccgtgcggctgcggtgcgacaagaacctggcggcctgcaaccgccacctgcggcgcaagagccaggtgaaggcctccacggagaagcggcccaacggcacctacacggtgcggctggagctgtcggacgacatgggcagcgtgatggacctgcggctggccatcccccgggaggacatggccgccatgctgacggagcggttccagaaatccccggagcggctgtatggcgagatcatgcggaccctgatgtcctccgagccggaggacgaggccccgtaaggaggggcggcgagggggctccttctcctggccgccgggtccccgctccacggcctgtcggcccgttttgggagataaggagggattctcttgcttcagattgtatggaactggatgctcgtcgcggtcttcccccttctggccggtctgctgttccgctggctgctgcgccgctggcggcgcggctggctgctgacagcgggagcggcagctttggccctgatccttttcctctgggccagcacaatccccatccccggcagtgaagggccgggactccgggccatccaggccgcctgcctgaccctgggcgccggggttgtggagctggtcttgaagctaaaacggcgcttgtgaatgaaaaacgcccgtgtccttttggacacgggcgttccgttctatttcaccaccacattggcctctcccaacgtctcccgggcctcctgcagcagggcctcgtggaggcttgcatgggtgccgtagaccttgcgggtgtccgccatcaccatcttcacagcggcgttgccgggaaacatctggaacaccagcttcatgtgacgcacgctggggtggtccaggctggggaacttcaggtacagcacctgatccggcgctttcgcggcctgcccttccgccgccggagcgcctgcggcagagagcggatacgcgctgtcgcagaggatctggggcgctttctcctcccggacggagagccgccccttcaccaccactgcctggttctccttcaggtacggcccgcaggactccagcacccgggcgaagcacagcagctcgatggaggcggtgtcgtcctccaccgtcacataggccatcagggagttgttgcgggtggtcttcgtcttgctggaggtgacgatgccgcagatggtgatccgctggtcgtcggcgaaccgtgtggggccgccctcctgggcgaagtcccccagaatggagccgatagtgggcgcccccagccgccgcaccgcctcccggtactggtccatggggtggccggagagatagaggcccgtggtctccttctccatcagcatccgttcctcgggggtgtactcgtcgatgtccggcaaggggatttccttcacattctttctcccgccgctgccgccgtccgccagggagaagaaatccatctgcccctccaagttctggcggcggctgtccgccaccgcgtccatgacggactcgtacacctggatcagctgggaccgcctggcccccagggcatcgaaggcgccggagcggatcaggttctccaccgcccgcttgttgatgtcgctgcccgccattcggtcgcagaagtcgtagagggacgtgaagggcgcctgctcccgctcccgcatcaccgcctggataaagccccggccgatgttcttgatggccaccagcccgaagcggatgcccccctcctccacagtaaagcggtcggcggagcggttgatgtccggcggcagcagggcgatgccgcagtcccggcactcgctgatgtagcccgccaccttgtcggagttgtccagcacgctggtcagcagcgccgccatgtactcccgggtgtagtggcacttgaaccaggcggtctgataggccaccaccgcgtaggacacggcgtgggccttgttgaacgcgtagttggcaaagtcgtagatatcctgatagatggcctgggccgtctcctccgggatgccgtttgccacgcagcccgcaatgttccgctccggatcgccgtggaggaatgcctcccgctccttctcgatctgggcggcctttttcttggagatggcccggcgcaccatgtccgcctgccccagagagtatcccgccagctgctggaagatctggatcacctgctcctggtagacgatgcacccgtaggtgacggagaggatcggctccagggacgggtggaggtacttgatcttgctggagtcatgcttgcaggcgatgaaccgggggatggagtccatggggccggggcggtagagcgcgatgatggcggtgatgtcctcgatgttctggggccgcaggcccacgcacacgccggtcatgcccgcggactccatctggaacacgccggaggtcttgccggcagagatcatctcaaaggtctccgggtcgtcctccgggatgtccgagagcttgaagtccggcaggcgctcctggaccatcttcaccgcgtcatccagcaccgtcaggttccgcagccccaggaagtccatcttcaggaggcccaactcctccagggtggtcatgacgtactggcacaccacggcgtcgtcgttcttcgccaggggcacgtactcgtacaccggccgcttggtgatgaccacgccggcggcgtgggtggaggcgtggcggggcatcccctccagggccttggcggtgtcgatgagctttttcacctgctcatcggtctcgtactgctcccgcaggggcttggacaggcgcagggcgtcgtccagggtgatgtggagggcgccgggcccggcgggcacctgcttggcgatcacgtccacgtcggcatagggcatgttcatcacccggcccacgtcccggatcacgccccgggcggccatggtgccgaaggtgacgatctgggccacgtggtcatccccgtacttccggcggacgtagtccaccacctcgccccggcgggtgtcgccgaagtccatgtcgatatccggcatgctgacccgctccgggttcaggaaccgctcgaagtacaggttgtacttcatggggtcgatgtccgtgatgtggaggcagtagctgaccatgctgcccgcggcgctgccccggccgggacccacggggatgcctgcgcttctggcatagcggacgaagtcggagacgatcaggaagtagtcggtgaagcccatcttctcgatcatgtcctgctcgtaccggagctggtcccggtactggtcgtccgttccataccgctcccgatagccctcgtcgcagagctttttcagataggagaagctgtcgtacccctccggcagccggaattccggcaggtggtacttgccgaaggaaaagtccagattgcacatgtcggcgatcttcgacgtgttctccagcgcgccctcgtagcccgcgaacagggccgccatctcctcctcgctgcggaggtagaagttccggggctcatagcgcatccggttctcgtcgtcgatggtcttgccggtctggatgcacagcagtacatcgtgggcctccgcgtcctccttccggaggtagtgcgcgtcgttggtgcacaccataggcagccccgtctcccggtggatgcggaggatgccctggttcacgatggcctggtcccggatgccgtggtcctggagctccagatagaaacggtccgggccgaagatgtgggagagctccagggcataggccttggcgttctcgtactccccgttccgcagccgccgggggatctccccggcgaggcaggccgacagggcgatcagtcccccgctgtactgccgcagcagctccaggtcgatccggggcttgatatagaagccctctgtccagcccatggacaccaggtaggacaggttccggtagccctcctcgttctcgcagagcagcaccagatggcggctctccgcgtccagctcgtggaccttgtcgaaccgggtccggccctggggggtgacgtacacctcgcagccgatgataggcttgaccccctccgccttgcaggcgcggtaaaagtccacggcaccgtacatgacgccgtggtccgtgacagcgcaggcggtctggcccatggccttcacgatgccgggcaggtcccggatgcggcaggcgccgtccaataagctgaattccgtatgaacgtggagatggacaaaagacatagcatgttcctttccaaaatcgcacgcgccgtccttgcaaagggcggggtgctcactctgcgggcttgacccgcacggccagcagagctttcacatcctccagcatctccggtgacgtgatgtccagcatgagccagcggcccattttggatgcagcggaccgatggtagaccgcctgtgtctctgccgtgcaggtgagcaggaccatctgggcggcctcctcatccttgggcgcgacagaaaccatggccgtcacaaacccaggccgcaggtagaccgtgcagagagacttgctgcccctgcggaacttcacattccatcccggctccagaccgcaccggctgtactccagccgcggtcccgccccataggccgccgccagatacgcgcgcagctgcggccaaaggggcgtatgcgcataggcgtcgatttcctccagcgtgggccgcgcagcctctgaatacagctctgcccaggtcatgcgggctcctcctgcagcatctgctccaggatctccacagccgtgacgatcatgttgtcgcagtgggcggtgactcccagccgctgggaggccgggttcctctctgtgacgccgggccgggcccgcagcaggtctccgcaccgggtcaggccgaacacctcctggaaccggcggcggaactccttggcctgggcgtagaggcgcacctttccggccctgtcctctccgtccgtatgggggtgcagcagactcagcaccagcacgccgccgctgacggcgccgcacagctcctcatggctgccgcccacgccgccgccgaagccgcccatggcggccatcagctgctccggcgccgtgcccgtcaggtccgcaaaggccccggccacagactgggcacagttatacccctgtttgtgatatgcataggctgccgcacagcgatccattgtatattcctccaacttttctttgataaattgtaaagcgcatttactttacagcccttttgccagctgggtgatcttccgcagccggtggttcaggcaggacttggtcaccggcgggtcaaactcctccgccagctcactgagggtcagctccggattctccagccgcagggccgccgtcagctggagcttgtccggcagctggtccaggaggcccgcccgctggagcttccggatcgattccagctgttcctgggccgcctccaccgccttgtccagattggcgctgtcgcagttgaggcggcggttaacgctgttgcgcaggtccttttccagcttggcggacatgacgctcatggcggccacgggcgcaccgatcagcgtcaggaagtcctcgatctggtcgctctgcttgaagtaggtgatgaagctgccgttgcgggccacgctcttggggggatagccgcactcccgcagcagcacctccagctcccggctcacctgcaggtgggaggtcgccagctccaggtggtaccgcttggccgggtccgtgacgctgcccccggcgaagaacaccccccgcaggaaggacgcccggcagcactcctcctccagcagtccgaagttgatgtgcagggccaggttctgctccgggctgaagcccagcaggtccacgatccggcggagcttgccgccgtctgtgatctggaacaccagcttgccgctctccccctcctccggcagccggtcgaaccgcaggccgaaggcccggtgaaacagcttgggaagccgggcagccagagcggggttcccggtgatgatccgcacctcgcttgcgctgaaggtgttgcagtacagcaggatgccgtaggcctccgcccgggcgcagcacagcttctgcaccggcaggcggcacagctcgtttttggcttcaaaggaaaaggacatgggtgggtctcctccaactctgggtaattgtggggctcatttctgctcctccatctggtaggagtcctcccgggggcggaatcgggcaccggcgatccggacgctccgctccgcatggagcaggatcagctcccgggccagggccgcggagctgtggcggacaaagccgctctccaccgtggccaccggccgctccacgacctccacgcccagggccgcgcaggcggacttgtcgcatcggatgcgctcggccccctcctccgcgtaccgggcggccaccgccttggggatgggcgaggagttggtgaggcacaggcggaacaggccctgcgccgaatgggcgaagatggcggcgatgtggtcggatacggtgtagccctccgtctccccctcctgggtcatgacgttgcagacatagaccttcagggcgtcggactcccggatcgccttcacgatgccatccaccagcagattggggatgatgctggtgtacaggctgccgggccccaggacgatcatatccgcgtcggcgatggcggagaccgcctccggcagggccttgggccgggaggggatcagacgcacctggcggatgcggcagtcctcctgctttttgcagtaaaagatcttggactcccccaccaccgtggcgccgttctcaaattccgcctccagctgcacgtccgccgtggtcaccggcagcacccgtccggtgatggccaggacctggctcatgcggcgcaccgccgcgtcaaaggacggggagatgccgttcagcgccgccagaaacaggttgccgaagctctgccccgccaggctcccctcggtgaagcggtagtggagcagctcccgcatcaccggctccgtgtttgccagggcctccatacagctgcggatgtcccccggcggaggcatccccaggtcctggcgcagcatgccggagccgccgccatcatccgccaccgtgacgatggcggagatattctccgtatattgcttcagtccccgcagcatgttggacaggccgtggccgccgccgatgacggccaccttggggccatgggcccgggggacgcggtattcctgctccctcacggctcagcctccccgggtcatgtcccggtggttctccagcacctgatagcccaggccgtggatgaagcccgccagggcatgggtcaccgccacggagcggtggtgcccccccgtgcagcccacggcgatggtgagagaggtctttccctcctccgcgtacaggggcagggagaaggccagcaggtcctccaaacggcgcatgtagtcctgggtctgtgggaagtggaacacatagtccgccaccgcctggtccagccccgtccggggacgcaggtcctccatatagaagggattcggcatgaaccgcacgtcaaacaccagatccgcctccagaggcaggccgtacttgaagccgaaggaggtgacgctcaccgtcatcccccccttctccccctcctggccgaagaggcgcagcagctctccccgcagttgggcggtggaggtgcgggaggtgtcgataacaaagtccgcccgctccttgacgggggccatcatggccctctccttcttcaccgcctcctccagggagtcggtgtctgccgccaggggatggcggcggcgggtctccttgtaccgcttgatgatgacctccggcgcggcctccagaaacagcatccggcactgggcctccatgtccttcagcttatccagcacgtcgaacagctccgtgaaggagctggccgtccgcacgtcgtacaccagggccacccggtcgtagcggccgttgcccccggcgcagaactccgcaaatttcaggatcatggcggcgggcatattgtccacgatataaaagcccatgtcctccaaaaaggaggccgccttgctcttcccggccccggagaggccggagatgatgaggatttccatgtccgcaccgcccctttctcagtcgatgatccggacctccggctccagccggacgccggcctgcgcaaagacccgctcctggatctggcggatcagctccttcacgtcggcgcaggtggcgccgccccggttgatgacaaagcccgcatgcttctcgctgacctgggcgccgcccaccgtcagccccttcaggccgcattggtcgatcagcgtcccggcgtaatagccctccggccgcttgaaggtgctgcccgcgctggggaactccagcggctggctggccctgcgcttttccagcagctccttcatccggccccggattgccgccgggtcgccgggcgtcaggcagaactccgcccgcagcaccaccgcatccgggtgatccgtcagaaagctgcggcggtagccgaaggccatctccgccccggtgagggtccggatgccctcctccggcagcagcagggttgcctcccgcaccacctgggccatctccccgccgtaggcgccggcattcatgcacaccgcgccgcccaccgtgcccgggatgccgtgggcgaattccaggcccgccagcccctgccggcaggcgaaatccgccacccgggccagggaggcccccgcctccgccagaatggtccccggtgtcccgccggcctccactcggctcaggccggcggaggtgtcgatcaccagccggtccagcccctcgtccggggccagcaggttggttccgttgcccatcaccaggggacgggcgccgcagcgggcggccatgtccagcagcagcaccagctgctctccccgctccggaaaagccatgcgccgggccggccccccgatgcggaaggaggtgtgccggtccatgggctcctccttctcgatccgcaggtccggcagataatccgccgcctgctggtcaaatgtgatccaccagtccatttctggacctcctcatacttcagattacccggcccagcagggccgcaccgatgacgccggcgtcgttgcccagctccgcccggaggatgcgggtggcccgcccgccgtggcgggagaagcacagcgccccgacccggcggcgcaggggctccagcagcagctgctccggcgccccggccacgccgccgccgaaggccaccgcctccggccgcaggagattgatgaggctggcggtgccctccgccagctcctccacatattggcggcagacggccagggccgtctcgtcccccgcctccgccgcctggaagggggtcctgccgtccacggtgccccgctccgccgccagacggcagagcaggctctcgggatgttccgccatggcggcccgggtctggcggatcagggctgtggcggaggcgtactgctcccagcagccccgccgtccgcagggacagggcaggccccccacgtgggtcaccagatgccccgcctcgctggaggtctcgccgccccgcaggcggccgtccagaatgatgccgccccccaggccggtgcccagggtcagcaccacaaagtcccggcagccccgtccggcgccccggaggaactcccccgccgcggcgcagtccgcgtcgttgcccagcagcaccggcaggtccagacggcggcggaacaggtccgccaggggcacgtgctccatggggatgttggtggtgtacagcacctccccgccggagaccgctcccggcaggccgatgcccacccccagggcgtcctccggaccggcgccggcggcggagaaggccgcctccgccaggtccgccagatcggcggcgaaggcctccgggtcccggaaggccagggggcggcgctccacggccagcaggcggcccgccgcgtccaccgcgccggccttcagattggtgccgcccacgtcgatgccgatgtacaggcccctcatttcgctttccggctgcccaggtccgcccgcaggtccacccgctgggccagctcctgggcggcgttgaagccgtaccgccggtggcggttgttcatggccgccacctccacgatgctggccaggttccggcccggccgcacggggatggtgacgcaggggacctccacccccatgatctcgatgtggtggtcctccagacccaggcggtcgtagatcttggtctcgtcccactgctcgaactgcaccaccaggtcgatctggcactcctccatgatggcgctcatgccgaagagctggcgcacgtcgatgacgccgatgccccgcagctcgatatagtggcggatgacctccggggcggtgccgatcagctggttggagatccggcggatctccaccgcgtcgtccgccaccagccggtggccccgcatgatgagctcgatggcggactcgctcttgccgatgccggagtcgccggtgatcatcacgccctcgccggagatgtccagcagcacgccgtggcgggtgacgcagggggccagcacccggttgagatattcaatggtgtggctggtgaagtccaccgtggtctcctcggtccgcagcagggtccgctcgtggacctgggcgctctccaggcactccggcaggcagtccagcccccgggagatcaccagggccgggatgtcatagaggaacaggtcgtcaaagcacttgcggcgctgctccgaggtgagccccttcagataggtgatctccgccttgcccagcacctggaggcggcgggggtcaaagtagtcgtagaagctatgaaactggaggccgggacggttcacgtccgtgatagtgagcagcgccgtgtcatagtcgctgcccctgttcagcacctccagattgaagagtgtgaccagctccgagatcttcaggccatgttcttgcatcgtgtcctccccttttcttgcggcgcccgggactgggacgccggttttctcccaggccgggcccacgcccggcgcggtggatggatcgccgcacccgcgctccggtgtgcggaagtaactctattatatatgaatctcaccgcttgcgcaatacccagctgccggtttcccggtcgggccctgtgcccgcggccgaatccggccggtctgtcggagcggggcgggctcttgcctccggccgccggttgtgttaccataggtgcggccggtggtatttccacagatgacatgaaaaggagcgtggcgtccatgctgaactgtattgccgtggggcttaggggattcctggggtccgtgtgccgttatctggctgggcagattccactgggaagggactggggctttcccgtccggacgcttgccatcaacctgatcggctcctttctcatcggcgccgtcacggcgctggccctgaagcgggccgcccccgaccccaggctggtgctcttcctgaaggcaggggtgtgcgggggcttcaccaccttctcctcttttgccctggaaaccggagatcttctgcaaagcgggcgcacggcggcggccctgctctatgcggcggcaagcctgatcctcggcgttgcggcggtatttgccggggaagcggcggtgcgctgacgcccccttggcgtacagttgaaaaaagcttgtgtttttttgaaaattttacttgcattttcaaaacttttctgttatgataccagttgtgcctgcagatggcatggaagtacgcaacagcaaggaggtgcaacggatggctaagtgcgagttctgcgataagggcgttacgttcggcatcaaggtctctcactctcatcggcgttccaatcggatgtggaagcccaatgtgaagcgtgtgaaggcaattgtcgacggctctccccgccatgtgtatgtttgtacccggtgtatgcgttccggcaaggtcaccagagcggtctgacatggacaaacgaaatcccgaaccacccggttcgggattttttgctgtatattcgcagtctcagaaaggagccgtatggaacagcccattctccccctgcgggacgcgcccgtcctggcggacgcggccgccgtctggttcagccgccgctggggaatcccggcggagtcctaccgggagagcatggagcagtgcctccgccggaaggcgccggttccccagtggtacgtggtccgggacggcgggcgcctgctggccggggccggcgtcatcgcaaacgacttccacgaccggaaggacctgacgcccaatctctgcgccctgtttgtggagcccccctggcggggccgcgggaccgccgggcgcctgctggacttcatccggcgggacctgggcgccatggggatcccccggctctacctggtgacggaccacaccgccttttacgagcggtacggctggacgtttctgaccatggtcaccggggacgaccatctcccggagcggatgtataccgcccccaccctgccccccgcgtccggcgcccgtgtgccgccggacacaatcagcccttgacattccaagggtttcaggggataatgtacgttgttattttttgtaatttacccgatatggaggtatttgcatggcattggatcagagctttttccaggagatggaggcccgcatccccaaggggaaggtccgcacccggttcgccccctctcccaccggctatatgcacgtgggcaatctgcggacggccctgtacacctggctcatcgcccggcacgccggcggcacgttcatcctgcggatcgaggacaccgaccagggccgcctggtggagggcgccacggacgtaatttaccgcaccatggcggagtgcggcctgacccatgacgagggccccgacgtaggcggccccgtgggcccctatatccagtcggagcgccgggacctgtatcagccctacgcccacctgctggtggaaaagggcgccgcctactactgcttctgcgagaaggccgcatccgaggaggacgccggtgactttgaccgcgccgacgatccctgccgggatctgtccccggaggaggcccgacagcgtgtggaggccggcgagccctatgtgatccgccagcggatcccccacgagggcaccaccaccttccacgacgtgtccttcggcgacatcaccgtggagaacaagaccctggacgaccaggtgctgctgaagcgggacggcctgcccacctacaacttcgccaatgtggtggacgaccacctgatgggcatcacccacgtggtacggggcagcgagtacctcagctccgcccccaagtacaatctgctgtacgaggccttcggctgggacatccccacctacgtccactgctcccccgttatgcgggaccagcacaacaagatgtccaagcgccacggggacccctcctacgaggacctgaaggcccagggctatctgacggaggccattttgaactatgtggctctgctgggctgggcccccaagggcgagcgcagcgagcaggagatcttctccctcagcgagctggtggaggccttcgatatcgccggtatctccaagtcccccgccatttttgacatcgacaagctcacgtacttcaacgccacgtatctccgcgccatggcgccggaggacttcgccaaagcggcggagccctatatccgtgaggccgtgaagaaccccgccattgatgtgtccgccgtggccgccctgctccaggcccgctgtgagaagctgaccgagatcccggagaaggtggatttcttcgaccagctgccggactacggcgtggagtgcttcaccaacaagaaatccaagacgaatcccgaggtctcccaggccatgctggaggccgccatccccgccctggagggcatcggcgactggacggcggacgcagtccacgacaccctgatcgccctggcggaacacctgggcgtgaagaacgccaccctcatgtggccggtgcggatcgccgcggccggcaagctggtgacccccggcggcgccgtggaaatctgccacatccttggtaaggatgagaccctgcgccgcctgcggctgggcctggacaagctccgggcatgaggcggtttctggcggcccagttcgccccggtgctccgggcctggcggaacggatatgaggccgaggtccggcgcgccgccatcgcctttttcctgctggtcttcctggccttcggcgtgtgtctggcggtgccggagctgcggctcggcttttccgcctatctccagcacctgttccagggcatggacctgacggacggggccgggaacctctccccgcttctgctgctggccaacaatctgcgggcctgtgccgtcaccatgctctatgggctgatcccttttgtgcgtctcccggccctggcgctgggcgtgaacgcggtgctgctgggcggccttgccgcctgctatgccgccacggacaccaccatgctgctgtatgccgccagcctgctgccccacgggattttcgagctgcccgccttgatcctggccttttccatggggctgtacatctgcgggcacctgacccgccgctgccgccgcgatccggccgctcttcctctgggcgcgtgcctggggctggcggcccggctgctggtcttccttctgctgccgctgctgatcctggcggcgctgacggaggcctacgtgacgcccctcgccgcggggctgttcctctgaatcacaatccacagaaaggatgcatttccgactatgagtaaaaccaccatcccctccggctaccggatgcccctcagcaacaacgagctccagcgggccatcgagctgatccaccaggagtttcagcacagcctttgtgtgcgcctgaacctgcaccgggtctccgcccccctgttcgtggacggccgcaccggcctgaacgatgacctgaacggcgtggagcgccctgtctcctttgacatccccgatgtgggcaccgacggccaggtggtccactccctggccaaatggaagcgcctggccctgaagcggtacgagttccccgagggaacgggcctctacaccaacatgaacgccatccggcgggacgaggaggtggacaacctccactccatctatgtggaccagtgggactgggagaagcatatctctcccaaagaccggaacgtgctgtacctgaaggagacggtgcgcgacatcgtgggcgccatctgcgacacctccgctgccctgcgcaacgccttccctgccctgaccttcaagccggaccgggacgtgtacttcatcaccacccaggagctggaggaccgctatcccgacctgacgcccaacgagcgggaggtggagatctgccgcaagcatcacaccgtgtttctgatgcagatcggcaagaccctggcctccggcaagcgccatgacggccgcgctcccgactacgacgattgggagctgaacggcgatatcctcatgtggaaccccattctggagcggagcttcgaactgtcctccatgggcatccgggtggacgccgcggctctggaccgccagctgaccgccgcgaactgcaaccagcgccgggagctgcccttccacaagatgctgctgaacggccagctgccccagtccatcggcggcggcattggccagtcccggctgtgcatgctgctgatcggcacctgccacattggcgaggttcaggtgagcctgtgggatgctgacaccacgaaaacatgtgaagatgctggtatcacgctgttgtaaagtaaagttaccatacagaaaagccgcccgccgcagatcacggcgggcggctttttccgcccctttcgggcctttgaaacggaaaatgcccccaccggaactccggcaggggtattttctcatcctctcagtggagcagctcgtcggcaatggcgtccgccaaggactccagcccccggcgctgggcctccttgacagaggacttcagcgtcacggtcccctccatcacccgcatctctttcatctcctccaggagcttggtcatcagcatcccggagcgggcggcccaggtgccgttctcgatcagggccacggaacggccccggagaccgtggcaggccagatcccgcaggaagttctccataggggtgtagatctccccgttatatgtagcggaagccagcaccagatggctgcaccggaaggcctcgctgacaaggtaggacacgtccgtatgggacacgtcgtacagggcgatgttctttacgcccctctctgccaggcgggcggccaggatctccgcggcgttctccgtgtggccgtagatggagccgcagaagatggccacgccccgatcttcgggggtgtaggtgctccagcgctggtatttctccaggaaccactccagattctcccgccagatgggaccgtggaggggacagatcatctggatctccatcccggcggcccgcttcagcagggactggacctgggcaccgtacttgcccacgatgttggtgtagtagcggcgggcatcgtccagccaatcccgctcaaagtccacctgatcggcaaagatgttgccgttcagggcgccgaaggtgccgaaggcgtcggcggagaacagcaccttgtcggcggcgtcataggtcaccatcacctccggccagtggaccatgggggccatcaggaaggtgaaggtgtggcggccggtgcagagggtatccccctccttcaccaccacagcccggttggagatatcacagtcaaaaaactggctgaccatggggacagtcttggcgttggccaccacctgggcgcccggccagcggcgcagcagctcgcccagggtggcgcagtggtccggctccatgtgattcaccaccacatagtccaggggccggccggccagggcaaactccaggttctcgaagaaccgctcccccacggccttgtccaccgtgtccagcaggacggtcttctcatccagcaccagataggcgttatagctgacgccccggggaatgggaaacacattctcaaacttcgccagctgccggtcagagcctcccagccagtacaggtcctcgtggatgtttgtcacgcaatgcatagttgcttttcttcctttctaacgcgttaaacgcagcaaagcggtgtagcgttattatcctacaccgctttgcgtatttcgtcaagcctcccggaaccgctccagcacttccgcgtcccgctgccgctgttcctcgatggactgctgcagcagcatatccttcaccttcatcaaacgggtggtggtggcccggtcgttctcgtccagcttcatggtgatataccggatggcgtcctgggtgtttgggatcaccacgtactccagagcgttcacccggcggcgggtcttttcgatctcctccgccatcaactgggcggatttctccacttccgccagcttcagcatcttccggaacacctttcccagggcgtccacggccgtgtccagctcgccggaggtggccgcgaacccgtaagggtagatgtccgcgtcagaccgggtctgcgtctggaaatcatacaccggcacgttaaccgacatgatatttttggtggtctgcgtcagcttcacactctgcttggggtccagcagcgcctgttccagcgcctgggaactcatgagcgcggaggccacggtgaaggcgccgtggactgtcatcagctcctcctccacctcctgccgcagagcgcggacctcccgcaccgtgtccagaaactgcttcatcagctcgtcgcgcttgtctttcagcagcttgtggccccgctgggcagtgcggagcttgcccttgaggcgggtgagctccatccgggtggggttgaccgtgatattgggcatctgtcaatcgccttctttccatcctggcctgggggcccgcggtcagcggcccggcgcctccgcgccgcagcagacgcgcggcaaatcctcatcatgggccgcagccaagagagggcggccgccaaaatcccggggtccccggaaggggctcacagctccttcttgggccagtacttttcgatatactccggcttgatccgcttcagctcgctcttgggcaggatactcagcagctcccagcccagatccagcgtctcctggatggaacggttctcctcgtagccctggttcacataccgcttctcaaactcgtcggcgaatttggcgtacagcaggtccgtgggcgtcagagccgcctcgcccagaatggacatcaattccttgttgtccttgccggtggagtaggccgcgaacagctggttcatggtgccggagtggtcttcccgggtcttgccctcgccgatgcccttgtccttcagacggctcagagacggcaacacgtccaccggcgggtggatgcccttgcggtacagctcccggctgaggatgatctgcccctcggtgatataacccgtcaggtcggggatcgggtgggtcttgtcatcctccggcatggtcagaatggggatcagcgtgatggagcccttcttccccagctggcggccggcccgctcgtagatggtggccaggttcgtgtacagatacccggggaagccgcggcggccggggacctccttcttggcggcggagacctcccgcaatgcctcggcgtagttggtgatgtcagtcatgatgaccagcacgtgcatatccttctcaaaggccagatactccgcggcggtcagggccatccggggggtggcgatgcgctccaccgccgggtcgttggccaggttcgaaaacatgaccgtccggtcgatggcgccggtgcgcttgaactcgctgacgaagaactccgactcctcaaaggtgatgccgatggcggcgaacaccacggcaaacttggaggtgtcgtctccgatcaccttggcctgccgggcgatctgggccgccagattggcgtggggcagaccggagccggagaagatgggcagcttctgcccgcggaccagggtgttcagcccgtcgatggtgctgacgccggtctggatgaactcgttggggtagtcccgggccgccgggttcatgggcaggccgttgatgtcccggtactcctccgccaggatctccggcccgccgtcgatgggccggcccatgccgttgaacacccgtcccagcatatcggcggacacgcccagctgcagcggatggcccaggaagcggaccttggcgtccgccagattgatgccggcggcggactcgaacagctgcaccaccgcggtgtcgccgttgacctccagcacctggccccggcggacggagccgtcgtggagctccacctccaccagctcgtcataggtgacgccgtccaccatgcggacgatcatcagaggactagcgatctcctctaccgttctgtattcccggatcatgcgtcctctcctccttcctccgcaatggcggtgatctcctgctccatctccgcggagatctgctggtagacctgctggtactcctcagccggcacgctcttggcccggccgatcttctcacgggacggaacggcgaagagcttcgccaccggcgcgcccttggagatggcctcccggcacagccggtcgtaccgcaggaccatggccagcagcttttcctgccggtcgtagctggagaagctgtccacatccgcaaaggcgttctgctgcaggaagtcctcccgcaccatccgcgccacctccagcgtcagctggtccgccggggacagggcgtccttgcccaccagctggacgatctcgttcaggctggcctcactctggaggatgctcatggcgctggcccggtcctccaggaactccggtcccaggttctcgtcaaaccaaggcttcagggagtccagatacagggagtaggagttcagccagttgatggccgggaaatggcgcttgtaggccagggacgaatccagggcccagaagaccttgacaatccgcatggtggcctgcgccacgggctcggacaggtcgccgcccggcggcgacacggcgcccacggcggtgaggctgccccggcggtcatcggagccgatgcaggccacgctgccggcccgctcgtagaactgggccaggcgggaggcaaggtacgcggggtacccctcctcgccgggcatctcctccagccggccggacatctcgcgcagggcctccgcccagcgggaggtggagtcagcgatgaccgccacgtcgtagcccatgtcccggaagtactccgcgatggtgatgcccgtgtagaccgacgcctcacgggcggccacgggcatgtcggaggtgttggcgatcagcaccgtccgcttcatcagggactccccggtgcgggggtccttcagctccgggaactcccggagcacgtcggtcatctcgttgccccgctcgccgcagccgatgtagaccacgatgtccacatccgcccacttggccagctggtgctgcaccacagtcttgccggagccgaagggcccgggcacggcggcggtgccgcccttggcaatggggaacagggtgtcaatgacccgctggccggagcacagcggccgcttggggggatatttgtgcttgtagggccgcccgatccggaccggccacttctgcaccatggtcaggggcacgtcctcccccttgtcagtgcgcagggtggccacggtctcctccacggtgaaggagccgctcctgatgtccgtaatggtgccgctcatgttgggaggcaccatgatcttgtggagcaccaccggcgtctccggcacggtgccaatcacgtcgccgccctccacctttgtgccgggggtgaccacggcggtgaagtcccacttcttctcccggtccagggcggggacctccacgccccgggtgatgttggcacccaccttctccacgatcttctccagcggccgctggataccgtcatagatgccctcgatcatgccggggcccagctccacgctcatgggagcgccggtggtgaccacctccgcccccggtcccaggccggaggtctcctcgtacacctggatggaggcggagtcccccttcatcgtcaaaatctcgccgatcagccgctgggggccgacgcggaccacgtcggacatattggcgtccgccaggcccgtggccaccaccagcggtccggataccttcacaatcttaccgctcaaactcgctcaaccttctttcacaccagtttcgccggaaggacctccggcgcgaaccgccggagccaagaaatagtgcccggaaaaacccgcggtttttccagttctcccaccgtaaggcaaaagaaaaatattcatcatgtccgccgcagcgtgtatgcggtgaacaatccccgactcagccgcctggggcggcgtccaccagtccgcgcccaagccgctggaagcggcgcggaaatccccttgggtgcagaccggcgcgggaattcagcgcaggcgggttcgcccgccggcacatctcagggaaaacagccgaaacgccgccagaggcggaaaagcggggctgtttcgaggaaggcccccggtcggcaggtgcggcaacacctgctgaccggcttggcccgacggtgtgcacacgaggcgcgattgcggcccaaacagggtcgaaaatcgcaatgccatagcggcgtcagcctgttctcctcagaggatatccgcgcccaccgctctctgaatggactgctggatgttgttcataccgatgccgagagagccctcccggccggggatcaggatgatggcgggccgcagctcgtccttataccggtccagcacgtccggcaggtcctttgccagctgctccgtcagatagatgatgccgcagtcgccgctctttgccagctcccggatggtctcccgggcctcctcgggggcggtgacgggatacgtctccagtcccagggcccgaaagcccatgacggactcccagctgccgatcacggcgatccgatacgttgtggccatggcgccgcctccttacacatagcttgcccgcaggcgggtgcggatcaccgccgggtcgatgccggcggcgcggcccatcagcaggatccgcaggttcgtgtactccgtctcccgtgcggccagatagcttaccagaggggcctcgccgaaaggcacggactgagcgcccgccagatagtcccccaccgcgtcgtcacagagcttttcaaacgccgtcagggggccgcccttcagggcctctgcccctgcctccgcggcgtcgcggaaacgggtggcgccgtagagctcccgcaggcccgcggccccgctggaggcggcctttgccaccgcatccggagcgaggtctcccccctccagcagcgcgcccaggaggaagtccgccccctttcccatgcgcagcgtccgcaccgccgtccgcaggttcactgcgtcaacctgcaccgccacatagccccggaggaacgcgctgccggtctcctctgccagggccgccatatcccggtagcaccaccggtccagcacgatgtcgctgagctggggatctcgggtggtgtccagcacctcccgggcctccaccacggccgcggccagcgtctccggcaagccatccagctcccgggatcggaccgcctctgccagttcggcggtgcttacccggcccatgtccatcagcatacggtccggggcggtgcccacagcctccgccttcagcagggccttcacattatgatagtcgtatttcactttgaagagatcgatataccgggcgtccggcgttccctccgccaagtcggccaaggtggcctcccgcacggcggacaatgccgcgtccatggcctccggccgccggggatccagctggggatacccccactcctgcaagagcttccccgcgtcctcgccgcttttggcatccaggatctgctccatccgctccgccgtcagaagccctgtctccagggccttcacccgggcggagatcaccaggtaatcggtgtccttgatggtctttgccaaaccgacgcctccttcctcacgcctccgggaacagcagcttcgccacctcgccggcggtctgctcccgctccgcgcgcaccagggcgtcaaaggtgcagttgacctcgatgcgcccatccttcaggatgaagccgcccgagatgtcgcgggtctcctccgacacggccagcatggccgtgccctgcgcgaaggcgctgacgccggcggccaccttgttcagaagattggctaccacgccgtccccgaggggcagctccggcgcggcctccttggccagcagctcgttggcccgggccacagccgccttgccggcgccctcccgatcctccgtggagaagacaacctcctcccgtccggtggaggacgcccgcaccagcagcgccgccagcagctccacatactgttcctgcggcagggaacggagcttttccagcgcccgctggtaagcccgttccaccatctcctgcttggcggtcagaagcgtcttccgggcctccatctgggcggcgctgacaaggcgctcctcccgctccgccgcggtcctctcgctctttgccagcaggtcccggtcctcggcctccgcctgggtgcggaacttgtcggccgcggcctccgcctgggcggcggcgtccgccaggatgcggtcgatctccgcctgggtgtccgcgccgatccgctgtgtgatcttgtcgataccgttcatactctgtcccctttctccagggtcagccgctgatgttgataatcatgagcatggaggccagcagggacaggatcgcgtagaactccaccgtgatgcacagcaccatgcccttggaccagtcgtcgggcttcttggccagcaggttgatggacccggcggccacgcggccctgggcgatggcagagaacaggccgcccaacgccatgggcaggcaggccacgaaataccgcagcccctcctgcacggtcatatcaaaggcggtgccgtccagcagccccatgcggaacaccgcgaaaaaccacaccaccaggccgtacagaccctgggtgccggggatcacctggaggatcatcaccttgccgaacttgctgggatcctggcacagaagccccgtgcccgcctcgcctgcgatgccggtgcctttggccgacccgatgcccgagaggaccgctgccagaccagcgcccagcagacccaatgccaaaccgccgaatgcctcaaagaactccatatctcgattcctcctcagtctttttgaatatccacgtattttgtatccaccgccagggggcggaagggctttccgccgtcctgatagaagtttttaaagaactccaggcactggagccgcaggtcatggacgtagcagcccagcagattcagcgcgaagttcagggcgtttcccgccatggagacgatgaagaacaccaccacgttgccggggatggcgcccaaggtgttgaacacctgagcgatgacgctgccggacagcatcagggccatcagccgggagtaggacaggatgtccccgaaatagccggtcacgtggttgtacagggagccgaagatcccggtgatcttcccgaatccctttccgttgatgacaggcccggccaccaccagcacgatgcccgcatacagcaccaggttcgtcacccccagcactgccagcgcgattccggcgaagaccacccaccaggtgatctcctcccagaacgcgtccaggaactgtccgcgcttcagtttccctaccacgctgatcaccatgccggtgaggatctggacaaagcccaggcacatggcgcccaccagaatcatcagcgtgtcgtccagcggcgtgaacagggctggcagggcgaacgtgctctccgggtggatcagctgggccagctgggtgaggaaatcgccgaagaaaccgcctgtcagggcgcccatcacaaaggtgctgatgccgcacaggcccagcaggccgaagaagtgctgcatcgttcccttcgggcggtatgtccgcaggacaaagacggaggccagcatcatcagcagtccgtatcccatatccgccatcatcacgccgtagaagaggatgaaaaacggcgccatgagggggttggggtccacattgtcataggcaggcagggagtacatctccgtcaccatgttcagcggccgggtcagacagttgttcttcagcttcaccggcacctccggatactcctccggcgcgggatccgccgcctcccaggcacagcccaggcgctccagcagggcgctcacgtccgccatgcgctccgccggggcccatccctcgaagaagacaatggtcccgtcggtaagcagccgctccgccgcgctctcccgagcggtctccgctgtcagccggtccgcgtaggtccgcagggtgtcccgctcccgggcgctctccgcaatggccgcctcggcctcctcccgcctgcgctggagctcctccagctgccggtcggtctgcttcagatccgctgccgccgtgccggtgacccccggaaaagcagccgcgctgaagccgtgggcccgcaggacctccattaccggctcctccgccgcccggtggcagaggagcagcaggtatcgctgctgcttgtcggcgctgatctccagcagctccgcaggcagcgcctccaactctagccgcagggcgcccacgtccgttcccgcggggcaggtccccaggcgggagagcacgtgctccgttccctccgcctccagcggcaggtccagatcctgccagggcagcagccctgcccggcgagcctgaaggcgggacatctcggtctggatcccggaaagggtccgcagccgctcccccacgtcttgggtgacggttttggcctgcgcctccagtccaccgcccagaaactccttctctgtgacgagcctgcgcttgacaaacagcccgtccttcacctgtccgtaccgccgcatggcggccagggcggtgttcacctccgccagggcgcctttggcctccgccaggcgggagctctcccgctccagcaggccggaccagtcctccccggcggtctccggctcccggatctccacacagcccagccgctggagctgccccagcagctcttcccggcaggctgccatggcgatcacccggagcctcttcatctttacaatggccatgtcagtctttcacaacccttccgacaatgagatcggcagccatgtccagccgcttctccgcctcacggcgcaggcgctccgcctccgcctgggcttcttgcccgatctcgtctcctctggccgcagctcttgcctccgcctgacggagcagctcccgcccccggtccgcagcggcagcccgcgtctgctgcaagagcgcaagaccgtcccgctgtgcatcggcgacgatctgtttcgcctttgcttctgcggaggccttgcgctcccggttatccgcctccacgcgtgtgatgttctcgatgacttccagtggcatcttcttcacctctttcctgtcatggggcttctctatgcgaaatggatggcttcagggcctccctgccgccgcttgccggcggcaggaatacccggatggtcgtctatagcgcgtcgttcctttccagggcagtctccccgttcgtcttatcttaggcagcttcgggggcaattatccgcggagtgcgcccaagtctttgcggtcgatctgcgggctcaatccggctttgaccaatgcatgtttttcgaacggctcaccattcgaacgttcagatccggcggggctcaaccccgcggctctttttcctctttcttggtgctccggtccagcagggcggccagctcgttcagttctgtccccgcctggtccatcgcccggggcagctgagacaggttgacctcaactttccgcagctccgccgtcacatgggaggcggtggactcgaaggaggacatcagcgtcacatactgggcccggaacagctccaccgtgcggcgcagcctggcggtggtggacgcctccagctcagcggcccgtttgtgggcgtcgcactcgatgtcccccacccggtcccggaactgggcgtaggcctccgcctccggccggagccgctccagctcagcggccagccgttcagcctccggcttgaatgcctccagcccctgccgggctgtgcgctcctgctccagctcggactgggcctgctcccggagggcggtctccgtctccagccgcgtctgcagctcccggacctgggtccgcaggctgtccgcctctgtctgcaggtcctcgttctccttctgcagcctctcctggacggcggcggcctccttggcagtctgctcaatatagtggatcacatcctgcttgtcgaatccgccgaacgcgacgcttttgaatgcgtagttctccatggtccgcttctctctttcccgaatgaaaactttaactccactttagcacagaaccccggcgtttacaagggtttgaaaattaacataaaaaatccaaaaaaactcttgcattttgaaatcagacatgctattataataaagctgtccggcaggacaggatgtgcgcccttagctcagctggatagagcgtctggctacggaccagaaggccgggggttcgaatccctcagggcgtaccagcaagaagcctgtgttctctaagaacacaggcttctctgtttttctccggtccttcccccgcttcgtctctgcccatatcacgccacaggccggtgaaatttcaggctacttctaccattactatcagttcctcgctgctgtcaggatgccgctgaccgtgtttaccgcctggatctgggtgtctttggtgacgtgggcgtaggtgtccagcgtgaatccggcgctgtaatggcccatcattccagagactgttttcacgtttcccccgttctgccgggcgatacgccgctggatacggagcgtttttctctggaagtcaatgcctgtccattttaatcccaacagctctccccgccgcaggccggttgtccaggtccatgtagcagcgttcatacacgccgcttttcccggccttctgaaaaaacgctgtcagctgatccggtgtcaggtccttcacctcctgcgctccacctttcgcagtgtgcgcagctcttggccggggttgttcggatgagcgactgttccgcctctacttccatggcgggggacggcatttggcgaagattccgcactgttttgcatacaagtctttttgctttacagcggttctctttgctttgaacgtcctcctttttcagcagctctttatagagccactgtatctccagagaggaattgcccgggcttccggccagagttatcaaagaattgacagctgcggaggcggattgtgtcgggacagctttccatctttcgattcagtatatcaggccgcagctggagcgtctggactgcctccgctttcatatccgcaagcagcaggaagcacagcaaagctgaccggcagcacaaacacaagactatttttcgggaaggaatttttatgaggctccaggacaacgccgcctttgcgccgctgcgctgcgttttggccggatttttcaaaagcatctcccatgcgccgtccagatctgtgtctgcctggggctgagtgctgttccttgcatctggaatttccggatggcggaagcgcaaatgacggctttcaatctgcggagtctttccgtcggtacagggtgagcgtgtacatcggagccgttggctcgcccttccatccagagccatcgtgtcgaacctccacatattgttcccgtgatttggagaacactatttctaaattacgcatttggaggatcgtatatggagtcattgtgggaacagacgtccggacatacagggttttgtcatctggagcaggatgcaaagaccgatgtattgattatcggcggggggatagcgggggttttatgtgcatatctgctgcaccaggccggagtcctctatctgctcttggaagctgagacgatcggcggcgggatcaccaaaaacaccaccgccaaaatcacctcccagcacggcctgatctatgacaagctgatccgtaaatttggagctggccaggccaaacagtaccttgatgccaatgaagcggcccttcagaagtaccgggagctgtgccgcggcatggactgcgactttgaagaaaagaccgcctatgtgtactctctgaatgaccgccggaaaatcgaacgggagctggatgccctggaaaaactgggggttcctggggaatttacagaccgcctccccctccccttccctgtggccggagcagttcgatatccaaaccaggcccagtttcatccgctgaaatggatcgccgcgatttcaaagagcctgcacatctgcgagcacacgccggtgcgggagctggtcggaacaactgcaattacggattatggaaaagtcacggcaaacaaaataattgtagccacccactttccctttttgaataagcacggcagcttctttgccaaactgtatcagcaccgctcctatgtgattgccctggaaaacgccccgaatgtagacggcatgtatgtggacgaggcccagacgggcatgtcctttcgcaactacaagaatttgctgctggtaggtggcggagaccaccgcaccggaaaacagggcggggcctggcaggaactgcgggatttcgcccagcggcactatcccaaggccgcggagacatcccactgggctacccaggactgcatgtctctggacggcgttccctatatcggcccctattccgccagcgcatccgacctgtatgtggccaccggtttcaacaagtggggaatgacctccgccatggtatcggccatggtcctgtgcgatcttgtccaagggaagcagagcccctatgccgaggtgttttccccctccagaacgattcttcgcccccaattggtggtcaatggcttcgaggccgtggtcaacctcctgaccccttccgccaagcgttgtccccatctcggctgcgcgttgaaatggaacccgcaggagcacacgtgggattgcccctgccacggctcccgttttacagaggagggcaggttgatcgacaacccggcaacggggaatctgaaaaaatagtgccgccgaatgaaacagctccatctgtgtttcctgtctgagacgcagatggagtttgcataacaagcatgatctttcccccaatccctagtctgttgccccggccgcagaagatgcacagagtccttccggaaaaggcaatcggccgatccggtcttgccgcatggttcaggccctgcctctcatccctctccggcggaatatgggcagcagttccggctggttttggaaccatctgtatatagggagatagtatccgcattgctcccttttgaacagcaatctatatccggtatccgatatataggtgcgccccttctccatcagtacgattcttgatcccctgttccgttgaagatgtggtccgccttcgcgccgtcatatcccctacgccagaaatgccggtttccatatttatctcatgttcgcatgctttcatagatcatcagactatttttcccctttcaacaccccataatctgtgaaacgctgtacttgggcgggataccttccaatatgtgaacatgatctttgtacgcctctcctctataatttctgtccccttgtactcacacaatttcctcctttggttcttgtagcagttggcagacctccattgttctaccaaaggaggatattttttcggcatggctaaagctttttggaaccatcggttttgccggtggttctctttttcaaaaaagcagcagggcggatttctccgccctgctgtcttattctgatttgtctcaggccacctgattccagaagcgataaaggatcaccgcgaactgggcgcgggtggctgttccagcggggttcagcgtccctgcgctggtgccgcccacgatgccgttggccacggaccactgcaggggttccactgcgtaccccgccacgctgccggcatccggataggcgctcagatcggcccgctggccgttggcataattccgcagttccgcaaagcggtacagcagggccaccagctgctgccgggtcaccgccgcaccggggttggtgccgtcggagatgccgttgtccatggcccaggtgcgcgcctctgccatgttggcgggagactgtccgctgagccgcgccaggatcatccacacctgctggcgggtgatgctgccgttggggctgaacgtcgtggccgtggtgccgttgacgtagccgttgtcataggcccaggcgatctcatcgtaggcccagaaggtctccggcacatcggtaaagaaggcgctctctccggtgcgggtgaaggtgacttcgatggtcacccggccgcggggctgttcaaaggtataggtgccgtcccgattggcggtgacgtcgatctcccggccattccggtcggtgacgatgacctcgtccaccccataaccgctgtcgggatccggggtgatggtcaccttgtcgccctcctcgggagtccggggattcaccttcacgctgccgccgctgccgacatccaggatgggggcgtaactgggatcgctgtcagagccgccggagccggtagatggggcagaataataaacctcataccctcccgagatctgccgcacatagtagtttgcggcacattggatatttgccgcactgaaagcatggccgtttgtgtaaatagagatgttcttggagacggagaccgtttcactgatgtccttcagcagatacacggccgaacccacgggcgcggaggagatcgcctctgccagcgtctcgtagtacgtctccgtgtttccggacaccacgtaagcggtatcagaggctgcggcttcctccacatttacctggttcagatacttgttcgcacagtcgataaaggtggatcctgtgaccgtgatcggagcaacctgctctccttccacagcgctggtattattgacgcagtatccgccctcctggctgcagtttttgaatgtgttgtccgcaactgtgattgtggaggtttcggtcaccgcgccgctgaacataattccgctgccgctgccgctcagatcaaaggtgttccccgtaatcgtacacttgtcgattgtaccataggccacagagatcgcacaggactggtttgttccatcaaaggtgcagtctgtcaccgtgagctcttcgcctgcaaccagcattccccagctgcgcatgttccggaaggtgcaatgatcgtatgtcacatcatttgcatggggattattgagcgccatatagcacgttttgacctcgatgtcatcgagtccctccacgccttccagtccggtgaaggtcgtattggtataggtggcgttgttccaacggtcaaacaccgcaaatccgttggtacggatggtacagtctgttacaaccagcttccacgcttcgtcgatattctcgccggtttgcgcccaagcagcaacgccgatcacagaaggagacgcactgttgatttcgtctgcggtcccggcaacaggggcgatcaattccgtgtttttcagagtcagggttccttcggcggcgccgtaatgaacaatggcgccatagggaattgcagtgccggtcatccgctgaacaatgcagttttggatggtaagatttgttcccgtttccgtggtttttaatttgcaggcaccctggtccttagagtcctcctcagaataggtctgctggaaccagatgccatccagtgtgacgccatccgcggcaacactgaccgttcccgtcaggatcgtgccggcttcgcccgcgccgctgccaagcagcgtgatcttcttgctgattgtgagatcctcggcataggtcccgggtttgatctgaaccgtgtcgccggagacggccgcgtcaatggctccctggatcgtggtgaactccctgtcgcctatctgcgccacaaaggtcttggcgggatctttccccaccacaaagctgccgttctcatccttgaccgccacatagccgtcctggcacaaggcctccggcacttcagcggagaaggtgccgccggagacggaaactacctcgccggcagtgggccatgcttcttccgtcttatccgcattattgaaggcgtaggccttgactgcatcaacactttctgcggattggaaggttccgtcctcaatggtgacggtgcccaggtcctgatagccctcccgctccacaatggagatggcagcgccgtcgccgatgacgccgtcgctgtcagttttttgcgtcggctcccctgtcactgtgatggccgtctgcgctccccgtactgccagactgccggcgcacatctgcacacccacatacttggcgttgatgatggagttttcgatggtcactgtcccggtgctggggaagtagatgccgttcccattgggcacgttgagggtgctgttcttcagggcgatggcgttcttcacattggtgccgttggtgacgatgccgtagatatcttctcccttaacgtcgacggtaacaccttccagggtgagggaactgttgctgtacagcacttgagctccatctgcctcagggcttgtccccatcagggtgccgttctggatggtgaggccgacattctcataattgacatctacaatcgcgtctgagcctgtgtaagtatacgttctgccggcaagattcagcgtgccgctgcggctgccggaatagatcttgtcacttccagtataatcgtgcagaagcgtcacgacggcattgttcccggcagcactcgccgcattggcatagcggccataaatgcggtcgacaccgccgacgctcacccggaagccgccgttggcaatatagtctgccgcagtttcactgtataggagatacgcgctgctgtccagcttgacagcatccgtaccgccctccagaaccacaagtgtcacgccggcgccgatttcggcgggcagcggaatcgtactgttcccggatttcacgctgacaggcagcttcgcctgaatggtgccgccctgcccggaaaccgagttgatgagccgcatagtggagtccacgccgtcaaccggcttactgctgtaattcgtcttcaatgccactgcgccgtcactgctggtaactgccgtgccgtcaatatcatagccattgagatcaatggtcacgccataatttacagtgctgatgccggaggtgagcacgagattcttctgcagctggacggtgctgccggcaggcgctgctttcgcagccgcactcaaagtcaggtagttggttctgcttccatcccgggcaatcacgaccgcctcggcggactcgtctttcaccccgacagagagggagccatccggattttccaccacgccgtaaccatccctgaaggcgtcggaactgttgacaacccgcgccgcctcggcgccggggaagctgccgccggaaatttctgctgtggccgtttctgccagactgatcacgtacgaagagccgtcgccctgcgtctggaaggtgccgccggtgagcgtgagatccgcgccggcccccatggaaatggcggttccgctgctctcactggtgaatgttcctttcgaaatggtcagcttgccggtgttggcctcgcctgcaaagtagtcagagcccacaaccgtgctctcggcggtaaatgtgccgccggagatcgttgccgtgttggcattatatacggcatagcgattctcgccgggctgcgtgaagttgccgccggtaatggtcagctctccgtaatcgtcattctttactgtgatctggccgccggtaaaggtgccgccgttgatggtcagcttggcttgattcccgcccgcgctgggctggggctcaccattggagccattttccgctgcggagctgttctgccagccattgccgatcaggctggaatagaggccggagttgctatcagaaaacttcaccgtgacgccatctttgatggtcatggtgccgaaattcttcaacacataccagctgttgctgccgcttgcgtcgctgccggtactggcctcctgagagcgggtataggtgccgccctgcagggtgatggccgcattgatgttgttgtacaccgcacccctgccatggctgatgttatccaccacgccggtcttctccgcggaggtatccacaatggtaatccgggtgctgttgttgaagatcgtatgactttccttattggtcagggtgtggccgttcaggtcgattttgatataccggccttccgggatcaccacgtcttcagccaagttctcattcagtgtaatggtgtacagccctttgttggtgtctttgttatacgcttgcgtagcgtcgatggccgcactgacggagtcatattccgtcgtcccgccgttctgttccatggtaacggcggactcctccagaagaatgatctcctgaagcggcacctcattcggcacagaggtgctgccattttcagggatttcctccccggtggggtcctgtacaccgtcttccggcgtctgcggatccctttcatcctctccgtcaccggcgggcagttccggatccccgtcactgggctgaaggtcctcttctccctcctgctctttctccggatcgtctggctccttttcaggagtcgaaggctccttgatctgctcttcctgctgttctccggattcttccggaggtgtgagttcctctgcaaacactgccgtaggaagcaacgtcagtattagacagagcgccatcagaacagacagcaactttctcttcattttctcgtttcctccttttataacttctttataacccctgcgcttcaggttcagaacgcacaatgacacagccgctttacaggcggctcccgctccggagaccgcctgtaaacactgcgaacaggaaaatcacagagcatgtcccatcacctcctcccaactgacgataagcggttcatttagcgaccgctcctggaaatgctccagcagcagacgaaagcagaccgcagattcgtccgctgtggattactgagttttcttggacaccgtatctgtctagcgcgctgtccgggtgtcacgggtcagcgtctgttcgatccttttctctttagaatatttttatgtcaaaatttatattttgacaatat

SEQ ID NO: 4898 - DNA, 40073 bp, Unknown
  gut microbiota DNA sequence
cgccggctttgccggcggcccctctttgattcaggagatcaggtctgctccaaaggctcacgccccggcaaggcactgctccagcgcatccagcgcctctccggcatccgctccgtctgcggtgatcgtgatccgcgtccccgctccgatggacagggagagcacacccagcaggcttttggcattgacgttgttgtcgccgtatacgacgcggacgacgctggtaaagcggttggcagtctggatgaaccgggccgccgtctgatggtgcaggccgtcagggacctggaccgtgacttctctcgtgcacagcataagaagacctcctcagtttctccttgccgcgggctgtccgcccgctgtgatggaacagaataattataccttctttttcctgtccgggcaagggggtaacgcaaacccgagagcaccgggatggcccctgacagaagcatggagacgtgccgcatccgaaggcacagccatcccgcagcctcacggcctgccgctccggggacccaggggcaccccgcagggccgcatcagctggagtgcgcaatgcccggcggcaaaatccctgatgcgccgggttccatcccaggggcttttcacagcctccgcatcatttgacacccgaaaaagtcccatgcctcggctcccgccccctgctgccccgtaaatagcatccgccccagcgcatctcctctacggcagcatctgcttccggtccagctcctccagccaagcggccgtgtttgcgaaaatggtccggtaaaagccgctgtccatgaaatcgtcgaaatcctccatcttcaaaaaggcggcgttctgggtgtggcggccgtcgatctcatccaggtgattcagcacgccgtactcttcgccatagaggccgatgaactgccagaacacggggaaacgggaggtcttgatgaggatctcctcgatctcccagtcggactgcaaccggccatccgtcaggaacagcaccagaatgggcctgcgcaggccgccgtagatcatcatgatgtcccgcatagcctccggctcgttgttgtactggtagttgagcatgctcatccaccgctcgtatccgccggcctgagagaaggtgtagtcccggatgttgtccagcgtcaccggctccagctggcggctcttcgcagcaaaggcccagcagtccagggcgccgctgtctgacagggtggaggacagggcgaagaacttgtcgaacatctgctggacccggcccccgcggtacaggtcgaacatggagccggaggcatcggcgcacaggaccgtctgaaggtccctctccgctgcccggggcacctgggccagtgctgcaaaggaggctttgtacaacggcgccaggaagtccaggtccccttggcagcggcgggccagcccctccatgcgggtgcagacatggggcggcagggagcgcaggatgtcccccacggaaggaggcggaccgccggcgggcgcggccggctgccgggttgtccgggcagacacagctgtccggacaggcggcggaggcggcgggaccgggtctgacaccacgccgccgaagctctccaccagggcccggaggccgccgttgaagccccggcccacggcgctgaacttccagtccccgtttttccggtagagctcgccggccacgatggctcgctccccggagaactcgttccccgcgtaggcataccgggccatctcctcccctctgacccacagaccgatgctgccctgttccagctcccgcagggtgcggccgccgtcaatggcggcagtgaaggagagccgctggatatggtccggcagggccgccagatccacctggaatcgggccgttccgccggatgctccctcagagagggccatggccccttccggcgagcgccgctggttatagaaaagaaaataccgctcgtcggagaggcggcctgcgctgtccaggccaaagcaggacacgtcgaccgccaggggcccctgatgccgcagctccacctccagggtccaggtccggcagacggtttgaatggagatcttctgtccccgctgcaaatccaacatgacttcggctcctctcccgtgttatttgtggcccgccacccagcggaagccgaagtggtaatgggcgtccacagcccggtggctgttgaaaaacaagtcctcccgccggacctccagcccgccgtcccggccggtgaggctggccaggacgcagaaccgttcgttgctgttggggttgtcgatctggacctcaatatccggcgtcccctgctggctcaacaccacccgggcgttggtggaccgccagttgggcacaccctcatagatgaaggcgaaaaccacggcgaagtcgatcagctccggccggaagaagtccatgttttcgccgttggcgctggcgccggagcggtcgtccttgtccagcttgatgtaggggggctgatcggcggcgccgaagctgttgcccagggcctggatgaccccctgccgcccgtccttcagccggtacatacaggccagatccaggtcgatgccccggctgaacaggccccgccgctggtcccagttcaggttcacgtggatgcgccgacggtttttcgtcaggtcgatcttgtggctctctccgctcttcttcaggctgattttggagagattcaccttcggctccggcggagcaggtgccggggtcggcgggtcaggcttgacctcctctccgccgaagtgggccagcagggcggagagtcccccgttgaagccgctgtccaccacggaaaagcgccaaatcccatccttgcggtacacctcgcagagaatcagggccttctcctgttgataccccgcaccggtgaagacataggccgcccggtccaactctccttccagcgtcaggagtccccgggccagcgcctgcatggtgccgctctccgccgccaccgtcaccaccagcctctgcaggaagcccggaaggcggttcaggtccaccgagaataccgtggactccccggactggtgcatggagacggcgccctccggcgaactggtctggttgtaaaaaataaaataacggtcgtcggacaacttccccgctccgtccacgccgaagcaggtcacgtccgcctcgctccccggcagggacaccgtcacggagattcgcagctgtccgcttccggtcaggtccgccagtttgcacttctgtcccttctgcagttccatgggatcccgtcctttctcgcatatccgtttctccgccctgcgggtttacctccctattttagtggatggcggccgccgaatcaagaagtggatccggtttttcaacccagcgggcgcagatctatccggccgccgcaggcccgctatgcgtctccccgcagcagaaacagccggaggaccttctcagccagccggacctcccggggcgtgcaccgggccagcagggcctctatggcggtcagatctgcatcgggctgaatctcctctcccaaaaggatatactccattgagagctgcgacgtcttcgataatttaatcagcgtgtcaatggacatctgcgaggtccccacctcgatctggccgtaatagccggcgctgatatccgccagctcggcaaactcctcccgggtgaggcccagaagggtcctctgctgccgcagccggtgccccatggcgactcgctcctgttttgtcatctgtttcacgctccttttagaataagtctattctggaacgtgtccattcaaaatatgctataagatattgattttagttatcttatagtgtatattttgagtgagaaaatctccgtatccattgtggtgcaatggattaggagttttttcaaaagcggtttcacgtgcataacaattgtcacaaaaaacgttagcttatagagaagattccgtcacccgcaggcttccaaaagcaggaaggtcatttttgtgacacacaagcgtaacaaaacgaggagacgccatgcagagttacacgctcaaccgccccgatggagccttgctttgccgggtgctggaacagcatacaaatgatgccgcgggagccatcctgcggctggcgtggatggccggtctgatgcgggacgaaatccagcacctcacctgggctcaggtggatctgctgggcgaacagctcctgctgccggaccgggcggtcccgctggccccggagctggccgcctggctggaggccctgcgccgggagcggaacggcagcagcgaacgggtggtgctgtcggaccgggaccagcagcccctggcggcccagtccatctcccgcctggcccgcgccgcgctggacgccggggacctgaaggccgtccgcctgatcgacctgcgccacgactacgttctgcggcagctggaacgtcacgactggcagtacgtctcccggatcaccgggctggaggccgccgccatgaacgtccacttcgcggcctacctgacggagaagaaggtctccacccgcatccgccggaaggcagcgccgcagatcgacgagttcgccctctggaagctgctgcaggcggaacaggacacccccgccggggcggccctgtggctcacctggcagctggggctccaggtggaggagatcgcgtcgctgcggtgggaccaggtggacctgcagaaggagcggcttatcctgccggaccggcaagtccgcctgaccagcggcgtcctgtccattctccagaagctgcgcaaggcggcgccgccagaggcggagtgggtcctgatgtccccccgcagccgccgcccctatgagcgcacccgcctgtccaagctggtgcgggcggcgctggtgcagggcgggctggacgatctctccctgcgggacctgcgcctggactacgacatccgggtgggcggcgagaaccaggtgctggacgttgtccggcgccagggctccatcacccggaatgaggtgatggcccttctgcgggtctccaagaacacagcctacaaccggcttcggcagatggtggcccggggaaagctgaccaaagtgggaaaccgctattacctgcccagcacggttgtgccgccggaggaccaggagcaggcgatcctggcgtacctgtcggaggcggggtttgcctaccgccaggacattgcccgggtgctgcggatcggcccccgccagtgctggcccattctccagcggatgctggcggagcaccagatcgccaaggacgggcagaaatacatcctcttgcagaaggaggcgtgagaccgggcagccccggtttcccgcctctctcttttttggaaatctgcaacttttgttacataaattaccacgaatcaggcgcttttgaacggcgtgtttcgtttgaataacaatcacgccgaatccgtagacaatccggaaaaacactgatacattggcgttgcggacggcgggagtgtcactggcggccggctctgtggttggtgtaggccgacacaagttggttggctagcccccacacgaatctcagacccggcggcaggcataccggcggaccgcaaatattttaaaggaggagaaatcccaaatgaagaagttcctttctctggtgcttgctctggtgatgaccatgtctctggtcaccgtcagcgccggcgccaaggacttcacggacgacagcgagatcacctacaaagaagctgtggatgtgatctctgctctgggcgttgtcgacggttattccggcggcgacttccgtcccgatgatgtcctgacccgcggtgcggccgccaagatcatctgcaacctgatcctgggccccaccactgcctccgctctgagcgcaggcaccgcccccttcaaggatgttcccgtgaccaacaccttcgcgggctacatcacctactgctctcagcagggtatcatcagcggctatgctgacggcaccttccgtcccaccggcaccctgagcggcaacgcgttcatgaagatgctgctgggcgctctgggctatgacagctccatcgagggctacaccggcgccaactggaccgtgtccgtcatcaagcaggccgtgggcattggcctggacgacggcaacgacgagttcgtgggctccaaggccgtgacccgccaggaggctgccctgtatgcgttcaacatgctgcaggccaccatggtggagtatgaccagcagaacaccatcgttgtgggtgacatcaccatcaacaccacttccagccggaaggatgttgtcaacaacgacaagaacgagagcatcagcgaggacaacaagatgcagttcgccgagcgttacttcgacgatctgaagctgtccgacggcacggatgatttcgcccgtcccgccaacgtgtggcgtctgaaggccgagaagatcggcacctacgccaaggaggctgacgcttcttacaccgccaaggtcgccgtggacgatatctatgccgacctggacctgggcagcagcgtggacaagaaggacgtcaccgtctatgaggacggcgctgagctgaagaatgcggctgttgacatcaccaagaacgacgacgacaccgagttcggcgccaacggcgttctgaccgaggtcttctatgatgatgacgacgacaccgtcgtgatcactatggtgaacacctatgtgggcaccatcaaccgttccgtggctgccaagggcaacaaggacgcctatgtggagatcgctgttgaggatgtgaagcccgacggtgcaaatggtgtcgaggactttgagaccgccgagaccttcgaggacgacgcctatgtcctgtacacctactcccagtctgctgatgaagtcaagtctgtggctttggctgaggaggtcactggtaccgtaacccgcgctgagaacagcgtgaaggacgaggacgtgaagaaagccctcaccatcggcggcaccaagtacaacgcctctaagatgatcgctggcgaggacatcggcaatgtcagcgtggatgaggaatacactgtttatctggatgcctatggctacatgatctatgtcgagcagaacgacgagatcggtgactacgccctgctggtcgacacccaggataagagcaacttctccagcaaccgcgctctgctggtgttcgccgacggcactgagaaggtcgttgacaccactgagaactatagcaacggcaaagataagatcaccaatgccaccatcgttacctatcgtgtggacgaagatggcgactacaccctgaagcctgtcgattccaagaaggtctacgagactgacagcaacaatgaggtcaacttcggcgatggtagtagtgcgtatactgacggcgtgaccgacttctccatgatcaacgacaaggccggcatcaccctgacccgtggtacgactgtgacttccaacagcagtacggtgttcgtggtgtatgacgatagcaacgacgattacagcgtctataccggcatcaagaacgctcccaccatcagcgcttcttccagcgccaaagtcgaagcatttgcttactgcaagtccggcaagatggctactgtcatgtttatcttcgtgcaggatagctccatcattgaggacagcagcaaggataccctgttcctggccaaggagtccgtctccaacctgatccatgacaaggatggcgactactacgagtaccaggctgttgtcaacggtgaagtcaagaccgtgaaggtcgacgagagcctcggcaagacccagaacggcatgttcaagagctattctgtcgacaagtatggcgttatcaccaagctgaatgcttataccacttataccgatggctctaccaagcagtatctgaccggctccggcgtggataaggtctctgctgactacaccgttatcctggataccaaggacaagaacgagaccatctctgtggccgatgacgccaagttcttctatgtggacgaggatggcaacattgagtccagctcttaccgctctgtctccaaggacagcaacgacaaggtctacgctgttgtggacgagtacctggtcgagttcctggtgatcgaggaagtcgatgacaagtcctccgacgaggataagcccgagctgagcaaggatatcgaggtccgtgatgtgtccctgggctccaccactaccatcgagtactaccgtgaggccggcaagatcactctgagtgaggatgacatcatcgccatcctgcaggacaagggctgcaccgatatctccgttgaggataataatggcgcaaagtggacttacaccaagcccaatggcggcactgtgaagaacgccaccgtgacggccacccaggtttatgttgtcaacctgaagctggacgctgatgtccaggctctggttgatgctaaaaccatcagtgtggaaattgcagagggttctgagtatgttgcggcgaacggtcaggttaagatcgttctgactcacaacaccagcaccttcggcagcaagttcaatgctaacagcactgacggttccaaggtccctgtcactgctaacggaactggtgatgctaccggaaacaagacccagaccatcacaatcagcgatgtcggcgcaattgccaccgatatcaccgtgaccgtttccaagtaaagaattacctgaaaactgttgcgccccccggctctttagagccggggggcatatttacttcgcgcccagacttccaaggtcgaaccagcatagatagagtgtgtggccgctgttgacctccatacgaatgactcttcttttcctccccctccgggagcgaagctggaaatctgcgccctcctctccgggacagctgtctccctgtcagacttacgccctccaggacaacagccaagaattttttacaggacgcaaagggccgccaggccgctccggcagaaacagcccataaatccagacgcgcaagcgtccatcttcccaacagccgcggcccggagcacaacgcagcgggcgccatcacatcaggcacaccagcagcgtaaaggccaggctgatggggatgcagagggagtggatcgcccccacggcgccggaatcacagccgcaccgctcacagtaggccagggagacagagggcaccggcgccagaaggctcagcgccagcacctgccggatcccggcaggcagcggcagcatccagcagacggcggaggccgccaggccgaatccgtagcgcagcagaaccacccgcagaacgtcggaccggctctcctgcggaatccgcggctccagcagcaatccgatcatcagcatcgccagaaaggcgttggcctgaccgaacatccccgccacggtgtaaaccggctgcggcaggcgcaggccgagcagccccaggagcagaatgaccaaaaaggtgtcgaagggcacggagcggagcattctgcccagaacggagcggaccgtcaggcgctccccgccggtgagggcggccgtcagcgcataggcgccgccgcagttgaaggggctgttgcccgcgtcaaacatggagacggccagcagcatgtccggcggcagaaagctctgcacaaagggcaggacaaaggtgccgatattgtagctgggggcgttgagcaggtagagcgcccggacgggccccggccgcctccgggtcaccagggcggagacagccagcagcaggacattggcggctgctgccgcggcgagaaccgccagcagggacggaaccagcctgaacgcgctgaagctggagaggagagcccccggcagcgtcaggttgacgatgatcctggacagcagacgggcatcgccctgctgaaagacgccccgtctcttgagaaggtatcccagcgccacgatcagcagcagcccgccggttttgatgagtaaagcgtccatgccgaaacctcctgaaatggacacagccaccaggacgtgcctggtgactgtgccggaaaaaagaagaaaagaagattgggaaaaatcagtgctcagagttgaggcgctgccggctgcggctgaccaccgcctggatcacaatgaacaggcacagcagcagggcgatgatgatgcgcgtccaccaggcggagagcgtcccctggaaggtgatgaaggtttggatcacaccctggatcagcacgccgagaagggtgcctggcaggaaggccacgccgccggacatcagcgtgccgccgatcacggaggaggcgatggcgtccatctccatgctgacggcgtggaggggatacccggagagcatgatgagggagtagaccacaccggccagcgccgagcagaagccgcacaccacgtaggcgaggattttcgtccgtttggtgggaaggcccatcagctgcgcagacatctcatttccgcccagcgcgtagatgttccggccgaatcgggtgaacttcagcaccaatgtggccgcaaccagcgtcaccagcgcgatcaccacgcccacggagatgaatccgccgggcaggacatagatccgtgcggacgccagcgaggtgtacacgggattgtcaataacaatcgtctcccgggagatgatcgccgtcatgccgcgggcgaagaactgccccgccagcgtgacaatgaagggctgcatgttgaattccgtaatcagccagccctggaccaggccgaacacagcccccatggccagcacgatcaggatgacggcgggcgcgggcaggcccgtgttctgcagcatctgcgccgacgacatacaggtcagcgccaccacagagccgatggagatgtcaatcccgccgatcagcaggacaaaggtgatgccgatggtggcaataatcagggccgcattgtcgatcagcaggttgcagaacacctggggcttcatgaagccccggtagttcatcatgccgaccacatacagcagcacgaacaggctcagggtgatgccgaaggaaaaataccgggaaccgaccaggcggtctttcaggctgctcttctgcttcatctctgcttcaccgccttttctgctgtgcgcttctccagaacacccttgaatttttcggactggaggaggcagatcaaaatgaccacaagggccttgtataccggcagctgctccgaggagacgcccagcgcgtacagcgtggtggtcatcgtctggatggtgatggcgccgatgatggagccgccgatgtagaatttgccgccgctgagaagcgttccgcccagggccacggacaagatggcgtccatctccatgttgaggccggcgttgttggggtccgccgccgcgatcatggaggattccatcagtccggcaatgccggcgcagatgccggagaagacgtacaccataaagatgatggaggagaccttgaggcccgtgcgccgggcggcgttggcattgatgcccaccgcctggacgaacagtcccacagacgtctttttctggatcagaaccacaaacagcaccatgagggcggcaatgaagatggtggtaggcagggggctgccgggaatggtggtgccgatgtaggtgaagggctcatagtacacggtgacattctgccccttggtaatcagcatggcgatgcctcgtccggcggtcagcaggatcagtgtggccaccatgggctggatcttcagcttggagaccaggaagccgttccacacgccgcacagggcgcagaccagcacggcgatcagacaggccggcagcagcggcatattggcggtgccgtcccctgctccgccgatcagggagcagcagatggcgccggagatggcgatgacagaaccctgggagatgtcgatgcccccggtggcgatgacgaaggtcatgcccatagacaagatcaccaggatcgaagcccggttgagaatgtcaataatgcgcccgtaaaactggccgttctggaactcaatggcaaaaaagccgggggtggcaaacgcgttgaacaccagcagcagagccagggcaaacagcggcagaaacaggtggttggacgtcacctttttcacttttcccatcatttaggcacctcctgcaatggctgccatcacccggtcggagttgatgtcgtcgccggtcagttccgccaccttccgccggtcccgcaggactgccaggcgtgtgcaggtgcgggtcatctcgtcaatctcgctggagatgaagatgatggacatgtgctgctcccgggccagctggatcaccattttctggatctccgtcttggtgccgatgtcgatgccgcgggtgggctcatccaggatcagcagatccggctgcgtcaccagccagcgggcgatgatggccttctgctggttgccgccggagaggttgcggatcagctgctccggagaggagaccttgatctgcagcagcttgatgtactcgtcggcgatccgctcctgctccttcagggggatgtggttccacatgccctttttggcctgaaggccgatgatgatgttctcccggacggagaggtccccgatgatgccctggatcttccggtcctccgggcagaaggcgatcttgtggtgcatggcgtccaggggggagttgaaatggacttcccggccgttcatccgcagtgcgccctgttcgggcttggccacgccggccagaagctctgccgtttccgtgcggcctgagcccaacaggccggcaaagcccacgacttcgcccctgtggatctgcaggtcaaaatcctggatacggccgaacgcggagagtccgtcggcctcgatcagcacctcgtccccgcacagggcggtgtttttgcccatgctctgaatatcccccagctccttgccgatcatcttggagatcagctccacccggggcagctccgccacggcataggcgcccaccagctcaccgttgcgcagcaccgtgatccggtcgcagagctcatagatctgatccaggaagtgggagacaaagatgacccccaggccctgggccttcagcttgcggaccactgcgaacaggcgctgggtctcctcctcatccagggaggaggtgggctcgtccaggatcagcacctttgcgtccacatccaccgcacgggcaatggcaatcatctgctggacggccaccgagtagctccccagcgtctttgtcacgtcaatgttcagattcagcgtagtcagcagctccgcggcccggcggttgatggtcttccagtcgatgccgcccgccttttttggctcacggccgataaagatgttctccgccacgctcagattggggcacaggttgacctcctgatacacggtggaaatgccgcacttcatggcctccagcgggctggagggggaaatgggcctgccctccatggcgatcttgccgccgtcctttgcgtggacgccggtcaggaccttaatcagggtggattttcccgcgccgttttcgccgaccagcgcgtggacttcaccggagtgcagggtgaaatccacattctccagcgcgcggacgccggggaagtatttacagattccccgcattgtcaacagggcttcttctgccacaggtcatcacatcctttgtcttggattcggcgggtctggcatcccgccggaggccctggggagccagggcaaaacagtccgcgggcggggaggacatcccccgcccgcgggatcatggaacggttggcgaaagccggtcaataggtgcggttgggcagctcctgctcggcaatgtcagcggggaagatcccctcttccagctcaatggtggcgggtacttcttcgccggccacaatcttcttggcggtttccatcagggtctcgccgaagttgggggtgtgctccacggcgcagttcatcttgccctcgatcatagcgttgaactcgcccttggcggcgtcgatggagacgatgacgatgtcctcaccgggcttcagtccggcagcctcaatggcctgaatagcgcccagagccatatcgccgttgcaggagaagagaatatcgatcttgtccccgtcggacttcaggaaggactccatgacctccatgcccttggcacgggtgtactcaccggtctgggaacagatgacgttgtacttgccgctgttgggggattcggccatggcatcgttgaagccctgcaggcggtcggcggccacggaggagccgaccgtgccctccagaatcgccacctggaactgatcgccgccggcacggggagtcttgccctcagcagtcatatactcgtcaacccaattgaaggcattggcaccctccttcagggcgtcggcaaagatgtgggtcacatacagagaggggtccgcagtcacgccgcggtccaccaggaccaccgggatcccggcgtccttggcctcctgcaggaccgtatcccagccggtctccacgatggggcagaaggagatcacatccacgtcagatgcgatgaaggagcggatggccttgatctggttctcctgcttctgctgtgcgtcggagaactggagggtcacgccggcggcctccgcggcagccttgatgttgtcggtgttggcagtgcgccactcgctctcagaaccgacctgggcaaatccaagggtgatgctgtcctcactgccggcatcggcgctttccgcgcctccatcactgcaggcggccagagacagggccatcgcagcggccaaaacgccggtcaaccatttcttcagtttcatacctttcaatcctttctcgctttcttcatcttccgaatgggcggtctcgcgccctgtgttaaataatatacaagacgcctccacctttgaaaagaggcgctccaacgggtttttatttgaattttacagaaaaaagtccggccggaaagccggacttttgcttttttctgctgcttctcagcttttttacgattttgccggaatctgtagcgtgacccgggtcccgcagcccagccgagaactcacgtgaatgccgtaatccgctccataggccagctgaatgcgcttttggatattgggcagcccaaacccgccctcggagatctgaccgagatctccggccacctcccgttgcacttcctccaatttctcaggcgtcatgccgcagccgtcgtccgccacctgaaccaccaggcagccgtccttcacatcggcgcagacgcggatggtgccgcccccccgcttcttttcaatgccgtggtacagcgcgttttccacaaggggctgcaggctcagcttttggatccggcagtccaaggcttcgggctccgcctggatctcatagttcaggatatcggcatagcgcactttctgaatatagagatagctttggatgcaggacagctcctcctgaagggacaccactgcgcggcctttgctgaggaccacccggaaaaaccgggagagggactggaccacctgaatgacctgctccttatccccggactccgccagccagacgatgatctccagcgtgttgtagagaaagtggggattgatctgttcctgaagcagccgcagctccagctgctcctgggtgcgggtgtcctcctccactttttccatcaggcgctggagttttgccgccatgcggttgaagctcttgttgaggatggtgacctcattctccccggcatcttccatcagggcatcaaagtcgccctccgccagccgccgggtgttttccaccagcgcctggatggggtcgttgatggtccggttgatgcgcatcagcaaaaatgccagaaccgccaccatcagcaccaccgccgccagatcccccagcagcagcagctgaaatccggtctggagcatctgatcaatggactccccccagagcagctccagataaatgtattcctcaatctggttgtacaccagggcggagacatcccgaatctgctccagcgtcacattctgcagttccagggacacgtccgcatcaatctcctgccccagcttctgacagtaccgctgcagggtgccgaaggtgcgcgtggcaatctgcagctggatccggccgttttcagaattgttctcctgcttcagcagatacagcccctggcgaatttcctccatgtggtggaagagctgggtcgtctccagggtgcggcgccccgccaccagataataggcgtccaggctcacgtcatcccggacagtggggatcagcttgtttgcggaaatgacccgctccgccaggatatggtattctcccaaaaagtggtgggacaggccgataaccagcaggttgatactcaacatccccaccaggatgaccgtaaaccccgccaggatcttgctccgtatgctcccacggcggcccagggcggttttcagggcgccggctgcacgactcatccgtctcatagcgtgtgggagcggcggtactggctgggcgtctgcccggtgtttttcttgaacagcatgctgaaatactccatattctgataccccacccgttctccgacctcactgacccgcagatcgctggtaatcagcaggcgtttggcctggcgaattcggacctccgtcagatattcactgaacccgacgccaattttggatttgaaaagcgtgctgaggtggttggggcttacagacactgcattcgcaaccgaggagagggacagctccgggtccatatagtggcggtcgatatacgctctggcttgctctgcggagggcgtgtgccggctgcccccggggcggacctccatcacctcttcgcagagctggcaagccagcgtcaggaaatcatctacggaattcgtcagcagaatacgcttttccagcagatcctcctggcgcagggattccggaagggggatccggttttcctggcagaactcatggaccacaaagaaaagctctgtatagagatagcagcgatagacaaaggaggaatacccggactcgatggtcggccggtagtgggcccaaaatgacggaagtgcagacggcttcccagtccgcaaaaagtccagcagggtgtcccgctggaaggaggtggagtgggacagcgtcttgctgtctgcggactcccgctgctttttctgaatcgtcagcagatggtatgctttcggcaggtcgctgagccgggccgcctgttttccaggcagcagatgcacgctcagtccctcctgcccggccagcgcatccagccatgcagagaactcccgcaatttcgggggaagcccggccgcgtcttccgccagcagcaggaacgtggcccgctccccatcaaagccggagccgtatgccattggcgcggcatacagcttgtcccgcaacgcctcccgatccggtatcacaccgtccagctccgtcaggatgatctggtaggctcctgcagccaaagagatcccgagctgcgccgcacgctggaacatctgcgccggtcccatcaggatgccgctgtacagattgctgaaaaagagctcccgctgtgtgatgctatggctctgccgctcaatccgccgtgcgcggcattccaaaatctgcgccttgctgcggtccacggcttccagaatatccctgctggagacaggcttgagcagatagtcatttacgcccagggtgatggcctttctggcatattcaaattcattgtgtccgctgaggatgatgatgcgggtatccggcagctccttccgcacgatccgggccagctccaggccgtccataaacggcatcttgatgtccgtcagcagaatatccggccgtttttccaggagctgcggcagagcgacttctccatccggcgcatcccccaggaacaggatatcgtgttcctgccaaggaacattgtctcggatactctcccgggcaatccgctcatcctcaacaagaaacagcgaaatcatgagtctcctccccatacgcagtgttctgaatttcaaacagctcccgccggcaaatcccaccgaatccattccatgcaatcggagaggcagcgtcccggctgtggaacaggcgtttttctttattatatcgtattttgtcgaaaagaaaaggtgctgaatcatttttgcggattttccggctgtcggcgtatatgcaaaccgccgcacggacaggcccctccatcgtcccggttcgtggggagagagctatcggggcgacgctcaagatgccgggagcacttctctgccgggctcacgccggatgtccatgcccatgtgcatatataccgcacttatcagacagcgtcttgcaaacgcgccagaatacaagcttctttcgtaaattacacttacaaaaagcgcccaagggcatgatgaaccgtccggcaaaacaatgctattgtatatggggagacttacgcgcctactcatgccgcggagtgataaacccgctccacagccgccatacttcttaacataatattttttctgcaacatttaaaacccgcagtttgagaatgacaccgcggcgccgtctgttatgttgctgtaaaaggtgtaagcgacacggaaaagggccgggtgggctggagccggagcaagagagcattcaagggcttgagccctaagacagcgcgaagcattcaccagatcatcgtctcggctatgaagccaacaaatgcttatcacagcagctcaaaatacggcaaaaccacgcaaaaattcttccagatgccatctaattctttgaaggcgcaagaaacccggctgatttctttggaaatcagccgggagagaagcggaatgcaataccaggcggtagcctgtgtccactttgaaaaggcagagaaaaaggggcaatgcccactgctcaaggtgcggcagagataagcctgagatttccatctatgagccgatgctgtttcaaacagctataaagccaggttgggtctgccagaccaatttgggcttgttttacatggccccgtaaaaggcaaaaaacgtcccggtacaagagcgcagagtctcctccgggcggtatcgcgtcggccaactgtgacgcaaaaaagcagaaagcgtatgacagcaggcgtcaggccggaagcagcattctatcccgccacgacgggcagaacgggactccttccacgtacatatcctgattttttgtgcgcattcctaattttaggaaagtgacaggcgccgaagcgcctgcccttttctcgaagccgcaatcgcatttctgcccgaatgccctgcagtctgcacgtaagccgcttccggctcatgcattgacacgcgatgatggcggaaacctgtaccccatcggtggagatgggctgatccgtccaagttacaaccgctttggatacgggaaatactgtcaagatgccctcggtatgtcccgcgggtaataaacgtcgtattccataaaatagtgggacaaagtctctcatatagaacaatatgcagaaggaatccgggaataatttttgagattctctcacttgttgtctccgcgccagcccccattgtaatccaacctggcgggaatatcggcgtgcgtcaggcaggagtcgttcacatcctgataaatcgttggggtccagtgttcagagcggttccctccccccacatctttttacacgtccgataccataagaactcccttttcaatccgaaaacgtatggcagcatgaggctgatccggagcatactgacacggtactgcatccgtaaaaaagcattcaacgccaaactgcgacaaaatctgaataatttttttgctggggcagtcatctgtccgatcatccgagaccgagataacggcgtaccgtggccgcagcatctccagaagtcgggatgtcaaggcgtccccgtgcccatggtggggcagctttatgagggtgcagggcgggagctggtgccgctcccagcaggaggcatacacatcccccggcagctcaatctcctgcccggcataggatagccgcaggcggatactggtgttgttgataaagccgtcaagcgcctccaggtccccgctgctgcccgcgccagaaaggacggcgtcccagatggaagcctgccgcagccggagttcttcatcctccagaaaaacaccggcagacaatgtctccgtcagccgccggcaatcacagggcgtccggatcagccggatctccgtcttctggcttcgcagatgggccagggcttttacataaatccccatagaggtcatcagacaccgggcgccggctggagctcccggcactgccgggagtgtgtgaccccacatctcctccggcgggaggtagttggtccagaattcccgcacccggactcccggcagcaaatgagtcagtccgccggcgtggtccaagtggaggtgggtcagcaccagcaggtccagctcccggatcccctcccggcgcaggtagtccgccgcagtgatccgccgtccgtccggtcgggagcgcccgatgcgagcgtccccgcagtccaccagcatggcgaagggtgtctccgtctcccgcagcaggatcgcgtcgccatagcccacattgataaagtcaaccagcagcatccgcaccaccgcctttcagcacgtggagcttgcgagtatccaaacgaagctgcacatcccctgtccgggcgccggtgaggtccacattggcgtcatcaatgacaaagacctcctcccctacccgcacccagtagcggatcatacgacccaggaagctgtaattttcaatggtgccgcgcagcgccgtgccctccgggacagtctcttccagccccatcaggctgataccctccgggcggaccaccagagtcaccggctcgccgccctgaaggtccgtgtcctcgtccacccggaggcgcatacccctgtggtccacggacaggctgccgtctgcctcccgatgggccgtaccctccaggaagttcaccgtgccgacgaagtccgccacaaagcgggtggcggggcggaagtagatttcccaggggctgccgatctgctcgatgcggcccctgcgcatcacggcgatgatgtctgacatggacaaggcttcgtcctgatcgtgggtgacgtacatggtggtgatcccgaacttctgctggatctgccgcagctccgtccgcacctccacccggagtttggcgtccaggttgctgaggggctcatccagcagcaggatctcctgccccatcaccagcgcccgggcaaaggccacccgctgctgctggccgccggagagctgcttcgggaaccgcccatccagtccctggaggttgaacatctccagcatctccgccaccttgcggtccttttcctccttgggcgcctttttcagcttcaggccgtaggagatgttctcatacaccgtcatgtggggaaacagcgcatactcctggaacaccagcggcgtattgcgcttgaagggcggcaacccgttcatccgcttgccgtccaccaggacgtcgccctcctccggctcggaaaaccccgccagctggcgcatcagggtggtcttgccgcagccggaggggcccagcagcgtcacgaacgccccctttgggatctgtaaggacacatggtccagagccacaaagtcgtcgaacttcttgacgacgttccgaaattcaatataagcatccatacgttccgcctccctttacagttccagcttgatgccctggcggcccaggagccactgagccagccgcagcacggtaaacgcgatggtgatgagcaccacagtaaacgccgccgcctcgccccactgtccgctctgcacgaggaccatcacagagatggtgcccacggtggtggagggcgcgtagaggaagatcaccacgctgaggcaggtaaccgaccgcaggaaggacagcacgaagcccgagagaaacggcgccttcagcagcggaatgatgacatccttgaaagagcggaagctgttggctcccagattcagggccgcgtcctccaccgaggcgccgatctgctgcaggcctgctgttgccgcactgtaacaggtgggcagattccagaacagcagcgccagcaccatgatggcgcccgtccccgtcagggacagccagccgccgttgaacgccagcacaaatccgatgcccagaaacataccgggaatggcaccgggcaggatggccaggaagtccagaaacttgttgaggcctacctgcttcttctgtacgatgtaggccaggaccatggccagcagcgcggcgcctaaagacgccaggaggccgtatttgatggagttccagatctgttcccctttcaggaacacgtactgcaggttctcccaggtgaaggaccagtcatatccccaggtcttggtgaaggccccgtagaaaagggtgccgtacaccagaaggacgaacagggagatcagcatggtcagcgtgaacagggtccacttcacccacttggggaccggaaagggatttagcgaaatctccttgccggtaatggtaacataggaccgcctgcccacccagaagcggttcaccaggaacagcgccacggccgggatcagcagtgccaccgccaggacggaagctgtactcatgtcgtaccagccgttgatctgcatatacgcctccgtgggcagcagggccagatcgccgccgatcatgatggggttgccgaaatccgtcaggacgttgatggccgcgatgagggcgccgccggccacgccggggcggcacaggggccagaacacatcccggaacacctgccaccgggtggcgcccatgttgtaggctgcatactccagattggtggagatgcccttcatcacgccgtagatcaccgagtaggcgtaggggaagaaggtgacagtctggacgatccacagtcccaggcggccatagatatccacatggagtcccagcaggccttttgtgatgatcccctggacgccgaagagcaggatatagctcagcgccacgataaagggcggagagacaatgggaagcagtgtaataaatcggaacagccctttgcagggcacatccaggcgggcgatgacataggcgaacagaaatgccaccgccgtgcaggagatggtggagaccagggtcatgaacaggctgtttttgatggcggtgagccagcggggccggttgaacagctccagataggtccccccatcggggaacaggatgaccttgaccactggatagatcacaaatattcccacaaacaggataatggcgatgatgaccagcagcaggagcggttcatttttcaaccgcttcatttctttgacggattcccgtgcggacgtgcccgcgaccatagggactcctccttccagctccgtaattgtaaattgcaaaagtgcctgcctgctcttgcaggcaggcactttcctgctaccggttaggtgcggtttgccatgatttccgcctcaaacttttccaggacggactcccgcatcgcggtggcctggtcccggtcgtagtccaccagatccacatcctccagcgccggcaggccctcgggtgcagccacgtctgtgcggacgggatagcggtaggaggactccacgttcagctcctgggcctccttggtcagcagccagtccatgaagatcttggcattctctgtgttggggccgccgttgatgatggccgcgccgccaatctcataggcggtctgctccggaatgatgagcttgagggggtagccctcctgctgggtcttgaagctgtcgtgggcccaggcgatggaggcgatgaactcgccggttgccacggggctgatgacgtccccggcaccctgataatagtggtggacgttctggtccagcgccttcaggtaatcccaagcggcgtcttcacccaggcggaaaatctggcaggcggtggcgatgtaggcaccgcccgcagtagtgggattggcccagacaaatacatcgtcataggccggatccagcagatcgtcccaggtggcgggctccgccaggccctgagaggccagttcctcctggaatcgctcctcgttgatgatgatgctcaaaacgcccatgtaccagccctgccagagatgattggggtcattgaagcgcgcatccaggtcatcgttgttgggggagtcgtattccagcagcgccccagcctccgccagggagccgtacaggtccacggagccgcccaccaggaaatccgcctgtgggttgctcatttccgcctggacgcgggccacagcgtcgccgccgcccagggagatatactcgacctcaatgccggtgtccttttcaaactgctccgccatcgcaatggtgttgtcctcgttcagcgcggagtacacgaccagttttccaccggtctccgccgtctcgctgcctccgttctgctgggcgccgtcgtctgtggaggaaccaccgccgcacccggccagcagcgacagaagcatcaaaacagaaagtgctaggctgagaaacttcttcatcaatgacatctccttttcatccaaaattgaaaaatcgaagctgagaattgcgagtttctattgttaccgtaccaccaaaattggaacgtgtcaatttcttttttggattttttcagtactatttacacgtttcttacaaaacatatagaatataagtccttattctgttcaattttactatttcgttttggcgagaagtgctcttgccaggaacaaactcacatagtacaataaaaacagatcagcggaaggaggcgccgggatgcctactatcaaagatattgcaagggaggccggtgtctcccacggaaccgtatccaatgtcatcaacggccgcggaaatgtcagtgtagaaaagattcgtttggtctggcaggcggcggaaaagctgggctataaggtcaatgccaaggcccaaagtctgcggctgggaaaggaccgggcaatcgcggttatgcttccggggatcgagtacacccactgggcggctatgtatgaggtctttcaaagcgagttttcacagagaggatattctgtacagctctattccacccgttctatggagagcagagaactgtccctgctgacggaagcattgaacgcccgtttcagcgcgatcattaccagtacctgcctgacggatgcattgtcccactaccgggccgaagctccggacctgccgctggtttttttgcagcgggaaggtccggaacagccggatgtgatgtacgcaggttttgatcctgagcgggctggccgggagattgcggactatgtctgctctcaaggtgctgcccgaatcggcgtctttacagaggccgcggagctgccggatgctgctctgtttatcaggggtgtccgtacgcactgccagaataaggaagccgtcaactttctggactgccgcaattatcagatcggcctgcgggcctttgcgttttttgacggcggccaggcgtatgattatatgatatgctcggatcgccgcagagaggatgccgtccgggcagcctgcgcctactccagtcaggcgccgctgcctcgttttgttacgctggccacaaaggccgctgtgacggatccggagacctcagtttatgaactggactacaagcaacttgcccaccggattgtgaaacagctgctggcccgtctggagcaggggaaagccctgcccggaaagctccgtatggaaaatgacggattccgcactgcgcagatggtgccgggccatctgcattctcaaactttacgaatactgaccatggcctccccctcgaccaccgctttggccaggctggcgccgcatctcgagaaaaccgccggcatccacctggagctgacggtcctgccctctctgcgggatgtctaccgggtggtccagtctcccgcccgcagccagtatgatttgatccgcatggatgtagcctggctggatgagcttggagaggaggtataccgtccccttgcccagatcccctttgattgggacgggctgctggctaaagccattccggagctggggcagcattttaccaccgcccacggcaaccgctgctgtgttccctatgatcccagcatccaactgctgttttaccggcgggatctgttcaccgaccccacatataagcggatgtattatgaggacttccgggaagagcttgctgtccccaagaccttccgcgactataaccgtgtcgcgtctttctttaccagaggctgcaatgccgcctcccccacacagtacggttcaacggtagccatcggcaatgttgtcgtaagccccagcgaattcatgccccgcctttttgcggagaacggacgtctcctggatagtcagggccggatcaccctggatacgccggaggcgctgcgtgcgctggaaaactaccgggagacatattcttattcggaccggacgatctatgatttctggaagaatgctctggagggctttgccgatggaacggccgccatgactgtggtgtttatcaactatgcctcccacattctgaactctcagatgtcccgaattgctggtaagctgggctttgcccccgtccctggcggaaagccgcttttgggcggcggcgtgatcgggatcgcccagagctgcacctgccctgcggctgcctgcaagtttttggagtggctgtatgcggacttggtggcaccggtcttcacgatgctgggcggcctgtctccctgccgttccgcatacagcaaccgcgatatcagcgagcaatacccctggctctccactgcgcgaaagagctttcccacagcgcagcgccgcagcaacagcacttactaccagaacttcagcgagctgcaactagagaccattctggcggcccatgtccagcaggcagttttgggggtatgttccccagaagaagcgctgaagcaggcccaagaggactgcaatcgctattttcagccatggtaaagaggccaaactgcaagagacagatagtcgaggacgaatttatcagatctggaagagacgtcaacccggcaggaccaggagattctgccgccgtctgcagaactggagatcgggccgcaggctgaaacacggctcagaatctgcagggccgtcgagagcaggaaagtccttcgttccgggcatgttccttgttagcccggcaccatgcatccagcgccatcgtggcggagcatcgcagatgggtgtggggccctttcacctgccggctcttttggcgggggcgggggagccgttgctccgacaccggccaaagtaaggtgcaggccggaaagcggttcctgcaaacggaatcaacacgccgataaaaggcaggcacatccgaatttcccctctttcgagcgccacgccgttcaaatgcttttgtatggtcgcccctctctcaaagcagccgctttgcgtaccgtttgccagacggtcgtagccggttttaagaggtctctgccggaataccatgccgggtgccaatgcttgcgcggtcccggggcttgacaaaccagaagatgcggctctataatgtttttggttagatttagctaactgatttgtatgggaaaccagactgatattgcctggacaattcccctgacaggaaaagattatcctgcggttagcgttaactaatagaagcagcagtggaggcggcagaatatgtggaaatatactgtgcgggtgacaggtatgatgtgcggcatgtgtgagagccatgtgaacgacgcggtgcgcagagcctttccggtgaagaaagtcacctcgtcccggagcaagaaggagaccacggtgatcgcagaaacagagttggatgaggcagccctgcgggaagccatccaggccaccggctatgacgcaggggagattcggaaagaaccctgggggaagaaggggctgttcggccggtaagcggccgggacatagatcagcagagagaggaggcagacggatgctggcagaggttctggcggaccgtggagactggtcgcaggtgatgcccggcgtccgggcctgcctgttctctctggaaaagagccctctccccctgccccttcgactggagcctctgcatttcgaggccttgttctgtgttgccgggacggtaacactgacccggcgggacggatcggccctgacggcaggtgcccggcaggtgcttcttctcacggacgcctccagcctgtccgccgccaaggccggcacctccctggagggagtcctggtagcagtggacgcccgcagcgcccgggacagcctggaggccctgtgtgcgctgctggggggcctctctctggacacagggcaggtacggcgatggatggccagccggaacggctgtgccgtagaggggcccagcacctggagccgggcggtctttgccaacctggactgcctgccccagagcgagcaggcccgctggtgcgtgtggaaatcggcagagctgctctatctgctctccgccccagagggaaatgcgctgaatgtcctcccggtcccggcactggatcgggaggtagtccgggttttaggaaagacgcgccgttatatggaggatcacctggccgatcccctgaccatcccagccctgagccgcatggccatgctctccgccacaacattcaaggatgctttccgccgtctgtacggcctgccggtccacgcctggctgcggcagcggcggatggaacgggcggcagagctgctgcgggactcctccctcagtgttctgggggtggctcagtcagtcggatatggcagtgccagccagttcaccgccgccttccgccggcagtacggtatgacgccggccaagtaccggaaggatgtctgaaccggcacaacatcgtctgttttggtgatacaccgggcgtttcatctgctataatactttaatacgcgaagagacgggcttgtttccagacaggaggagatcttgatgaaacaacatcgcttctgggcctggggcgccgtgatctgcatgatcatggtgatgatcacaggttacaaacgcaaataaccaatcacggaaaggaagaatcctatgatgaagcattacgtcagactggcctgctttgtgggcggtgctctgttcggctctgccggcgtgaagctgctgaccagcaaggatgccaagaatgcctacatccacatcaccgccgccggcctgcggatgaaggacagcgtgatggagacggtcaccgccgtccaagagaacgccgccgacattgtggcctccgccaaagacatcaatgaggcccgggcctccaaggaggccgaaacccaggtggagggtcaggaggcttaaaagctgcggaagggagccggaaagcggctccctttttcataggaaggagtacctgtatgcgagcaaccatcgtacacgagagccgggggcggctacgtctgcgcctccggcagaaaaacctgaccttgcgtcaggccgacctgctggagacctggctgaagggccagccctgggtccgggaagccgctgtccatgagcgcacaggctgtatcatcgtgacctttacaggggagcgggaaacggttctctccgcactcggcgcgttcacctgggccggggcagaagcgtctgtcgccctccccgatcacagcacccgggctatgaaccgggagttccaggagaaactggtgggtaaggtggcagtaaaggcggcggccaccctgttcctgcctgcgccgctgcggattgcccgggtgatttggcacatggcgcctttcctgcgcaagggccttcgctgtctgggacggcgtcagatcaaggtggagctgctggatgccctgtccatcgggatttcggcctgccgccgggactttggcaccgccggcaccgtcatgttcctgctggagatcggggagctgctggaagactggacaaggaagaagtctgtggccgacctggcggagagtttgtcccttcacgtagaccgggtgtggctgaaaaacgggaacgacgaggtactggtctccattggacaagtgaagcccggcgatctggttgtggtccgggccgggggcgtcatccctctggacggcgtggtggcggagggtgagatcaccgtcaatcaagcctccctcacaggcgagtccgtccctgtggccaagcgtcccggaggggcgctgtacgccggcaccgtggtggaggagggcgagtgcgccctggaggtgaagcaagcatccggccagggccggtacgaccagattgtggacatgatccagcggtcggagcagatgaagtctgccgctgaagccaaggcgtccaacctggccgacaagctggtgccctataccttcgccgggagcctgctggatttgctcctcacccggaatgtgacccgagccctgtcggtgctcatggtggacttctcctgtgccttaaagctggcgatgcctttggcagtcatgtctgccatgcgggaggccgggcgtgagcacatcaccgtcaagggcggcaggtttctggaagccacagccaaagcggacaccatcatctttgataagaccggcacccttacccacgcctgtccccaggtggcccagatcatccccttcaacggcaagaatgaggcggagatgctccgcctggccgcctgcctggaggaacacttcccccactccatggccaacgccgtagtggaagcggcccgccgccgaggcctgcgccatgaggaacgccatgccaaggtggagtatctggtggcgcacggcatcgccagctcggtggatggggaacaagtgcgcatcggcagtgcccattttatcttcgaggacgagaaggtgcgcattccggaaggcgagcaggaaaagttcgacaccctgcctccggagttctcccagctctacctggcaatcgacggagtgctctccgccgtgatctgtatctccgaccccctgcgggaggaggcaaaagatgtgttctccgctctgcggagactgggcgtgaaaaagactgtcatgctcaccggggacagcccccgcaccgccgccgccattgcggcccagctgggggtagatgacttccgggccggggtgcttccggcggacaaggcggagtatgtggcagccctgcggcgggaggggcacacagtcctcatggtgggagacggcatcaacgattcccctgccctctccgaagcggatgcaggcatcgccatcagcgacggggcggccatcgccagagagatcgccgatatcaccatcgccgccgacagcctgtgggagctggtgcagctgcgacagctggccatggccctcatgaaccgcatccaagccaactaccgattcgtcatcgggttcaacggggcgctgatcggccttggcgcggcgggtgtgctgccgccggccacatcggccatgctccacaacctgtccactctgggcgtcagcctccacagcatgcgtgctctgccccttcccaaatcagggcaaagattttgatcgaaaagcccggcgcacttgcgccgggctttttcggctttccccccttgacaaattgtggggctggttgtattataacaccgttatataacgatgttacaggagagattccagtggaagaaacatctgttaccacattggaaaaaattcaggaggccgctatggcggaattcctggataaaggcttccagggggcctccctgcggcagatcgtgaagaatgccggggtgaccaccggcgccttctacggctatttttccagcaaggaggccctgttcgcctctatcgtggagccccatgccgccgccctcatggggaagttcatggcggcccagacctccttcgccgagctgcctgaggagcagcagccggagcacatgggcgtggagtcttctggctgtgtccactggatggtggattacatctgtgcccaccgggagccggtcaagctgctcctgtgccgggcggagggcaccagctatgagcacttcgtccacaacatggtggaggcagaggtggaatacacccaacggtacatggaggtactccgccgcctgggccgggacatcccggtgctggacaaatccctgtgccatatcatcgccagcgggatgttcaatggcatctttgagatcgtggttcacgacatgccccgggaccaggcgatgcgggatgtggatcagctccgggacttctacaccgccggatggctgaaattgatggggggatagccccctgtctttttggatgacagttagttttagctaactttgagaaggaggttttttatgaagcagaagaaaaagagtgatgtggccgtcctgttgggctacgcaggcagccacaagggcctgacctttctgggcctggccctgtcggcggtgtccatgctgctgagcatggcaccctacatctgcatctggctggcagcccgggacctgatcgcggtggcgccggactggacgaaggcgcagagcgtcgcccaatacggttggctggcgttcgcctttgcggtggccggcatcatcctgtattttgcgggattgatgtgtacccatctggctgccttccgcacggcgtccaatatccgcaagcagggtgtggcccatgtgatgaaggccccgctgggctttttcgactccaacgcctccggcctcatccgcgggcggctggacgcggcggcggctgacacggagaccctgctggcccacaacctggcggacatcgtgggtaccatcacgttgttcatcgccatgctggtgatgatgttcgtctttgactggcggatgggggcggcctgcctgctggctgcggtgatctccattgtggccatgttctccatgatgggcggcaaaaacgccaagattctggcagagtatcaggcggccctggaccgcattaccaaagcaggcactgagtacgtccggggtatccctgtagtcaagatcttccagcagaccgtctactccttcaaggcgttccaggaggctattgaggactacagcaccaaggccgagcactaccaggcagatatttgccggacacctcaatccatcaacctgaccttcactgagggcgcctttgtgtttctggtaccggcggccctgttcctggcgcccggggctctggccgccggcgacttcacaggatttgtcacaaacttcgccttttacgcggtgttctccgccatcatctccacggcacttgccaagatcatgttcgccgcatcgggcatgatgctggccagcaccgcgcttgcccgcatcgaccaggtcatgtgcgccccggagctgaaagtgccggagcagcccaagtccccccagagcagccgtgtggaatttgaggatgtgagcttcacctacgacggcgcggaaacccccgccctctcccatgtctccttcacggcggagccggggcagactgtggccctggtggggccctccggcggcggcaagaccaccgccgccagcctgatcccacggttctgggacaccgcctccggcgcggtgaaggtgggcggcgtggatgtgcggcagatcgacccccatgtgctcatggaccagatcgcctttgtgttccagcacagccgcctgttcaaagcctccatctttgaaaatgtccgggccgcccgcccagacgccacccaagagcaggtgcgcgcggcgctgatggccgcccagtgcggggacattctggagaagctgccccagggcatggacaccctgatcggctccgaggggacctacctctccggcggcgagcagcagcgcatcgccctggcccgggccatcttaaaggatgcgcccatcgtggtcctggatgaagccaccgccttcgcggaccccgagaacgaagcattgatccaaaaggcgttctctgagctgacccggggccgcaccgttatcatgatcgcccaccgcctgtccaccgtcgtgggcgcggacaaaattctcgtgttggaggagggccgcattgcggagcagggctcccatcaggagctgaccgccgccggcggcctctatgcccggatgtgggcggattacaaccaggcggtccagtggaagatcaccagcgaacagtgagagaggggtgaagaagatgttcggcaaaaactttcagcgcaaatacgccctcaccgaccagggcgtgaaaaacgccaaaaagggcgctttctggacggtcattgtcaatctggtcgtcatggacggcatgggcatcctgtacctgttgatgtacggcctgatgggaaccctgacggacggagcgccgctgcccggcccggcgctctttcttgggctggtaatcgcgttcgtcattctgtcctttgtgacccacctgcagcagtaccacgccacttacggcctggtctacaacgaggtgaagtccacccgcctcagcctggcggagcggctgcgcaagctgcccttgggctacttcggcaagcgggatctggcggacctgaccgagaccctcatgggcgatgtgaaccgcatggagcacgtctggtcccatgtgctgggatacctgtacggcgcctacatctccacggccattatcgcggtttgcctgctggtatatgactggcggctgactatcgcctgcctgtggggggtgccggtggccttcggcctgctgttcggcacccggaagatctccgcccgggcctcggagcggacgaaacaggccgcaatccgtgtctccgacggcatccaggaggcgttggaaaacgtccgggagatccgcgccaccaaccaggaggtgcgctatctggccgggctcaaccagaagatcgacgaccatgagaaggtcaccatccagggcgagctgggcaccggcatctttgtcaatgcggccagcgtcatcatgcgcctgggggtcgccaccaccatcctggcgggggccagcctgatcgtctccggacagatcgacttcatgctgctgtttttgttcctgctggtcatcacccgtgtgtacgcccccttcgaccagagtctggccctcattgcagagctgttcgtgtcccaggtgtctgccgaccgcatgaacgaaatctataacacccccaccgccgagggagtggagcgtttccagcccaagggccacgacattgtgttcgaccatgtgggcttcgcctacgacaagaagaaggtattggacggtgtgaactttaccgcccgggagggtgaagtgaccgctctggtgggaccctccggctccggcaagagcacctgcgcccggctggccgcccggctgtgggatgttacggagggcaccatccgggtaggcggcgtggacatctccaccgtggacccggaggcgctgctgaccgactactccatggtgttccaggatgtggtgctctttgacgataccgtgatggaaaacatccgcctgggcaagcggggcgccaccgacgaagaggtgcgggccgcggcggaggccgccaactgcggggagttcatccgccgcctgccccagggctatgacacccccatcggggagaacggggcgaagctctccggcggggagcggcagcgcatctccatcgcccgggcgcttttgaaaaacgcccccatcgtcctgctggacgaggccaccgccagcctggatgtggagaacgagaccaaggtgcagggagccctctcccgcctgctggccggcaagacggtgctggtcatcgcccaccggatgcgtaccgtggccggggcggaccacatcgtggtgctggaaaacggccatgtagccgagcagggaactccggcggagctgatggagcgcggcggcctctaccgccgcatggtggagctccagagtgagagcgcccggtggaagctgaacggaacagaggcatagaacagagatgatttcaattcagcgttcccaaaagcaatttcttatggaagggccgcgtattttcaacggaaagcagagatcgtctggaagagtaaacttttacagaggaccgtttcctggcgagaacatcaaatcaaggcgcgttcactttgcatgtgtctctggattctattgttcggaatcgtcaaaggcacctgattctgtataaacgaggcggttcataggcaccgccccaaacgtctgaatctgtgagaagaaacaggccgacaggagggaagccacgtcaaagggaccagttgcaaaagccgcgatgacctgacgctgttcctcaatgcacaactgtgatcgtacttgccgtgctaccgtccggcagctgcgaagcgctgtacgaatcggacttcttggtgttccgcatcgtcagccggaggagcgcggtctccgcaccacggagatagctgagctgatgaccagggccgccagacgacgcgacggcagcccgcggttcaccatccgtccgatccggcagaaattggcgggcactccgccaaacagccgcagaacacccgcgggtaatgccccacgtgactgcctttcggccgctatgcgccttgcgggatgggcagagttcctctccaggcggtccgggaccggttttggaccatcgttccgccgttgcagaggcgtgtctatttggccatctgccgcccgcttgggcgtttttcaaaggccgaagggaaaagcggcagcagcccttgggtattcccctcccacaccggcggaccggtctccctgtacagcgtcccgcacatgttccacggggttctgaagcgggcggctgttgaaagcgaggttccacgacctacgccgcgcattcgccactctgatatttcagtgtgggattgaccttggacacctagtcccacgccacaccatcggccccaaaagaggcggaaaaagccatggaaaaagtcccggcaaatggttctgaaaccgaaaacagcaggaggctcagatgcagaaaatgcttctgagcctcgttttttgtcctgtatagtttggggttcgggacaggcggaagtgcctcccgatctggtccgagctttttgatgccaaaagccgggaaaaccagcttgattgatcgcaaatcagacagttttgcggttgcggaggcggacctgtacaacgcctttcaggtgataagctgaggcagaattctccatccgatacaccgtgctttccaagtgtgtttagccccgaaatcgcccacccccggaggtcgtgtccactctacggcggcttttatcattccggggcaggctatgggaagcacaagatcacaacgaaaggaggggcgaacatcctgctaaataccggttttggcgtcttgccgctctgcccaggtgacgcagatcacttcctccacaaaatttctattcttaaaactatggcggacatcatagcggatgccatactggcttcaaacagcaaaccgcagtctgtataggccatattttcctatacgggcagagcaaagcagcctccggtcgcactgacactctgaccagaaatgcggcaggcacacagggcaatccgtcccatccaaaccccttacaagttgattggctgccggatcagagaggcaaccagaatcccaattgctctatcagccgggccttttatggggagcggcaatatctgaaatctttacgttcatcggccggccatctgcttcaaaaaacacacagcaaaaaacgcataacggaccgcccgttacaagttcacgtatactacagaaaacaaaaaatgaaaccagactttgaacggactttggagggctcttagtactgcataagctgcctcctgcaagataaaataaagaaaaatatttgtaggaggttatagaaatgcctgagcggacaatcgacccggcacaactcgcatcatatacggcacatctgcggagggaggagcggagccccggcaccattgaaaagtatctccgggatatcagggcctttgccggctggctggacggcagaccagtttccagggaactggctgccgaatggagggatcacctgctctctaaagactacgccccggtgaccattaattctatgctggctgcacttaacggactgtttcattttctgggctgggacgagtgccgggcaaaatttttgaaagtccagcgccgcctgttccgcgacgcaggccgtgaactgacccgccaggagtacgagcggttgctggccgcggcaagagcgcgtgggcaggagcggctggccctgttgatggaggccatctgcgctaccggtatccgggtgtccgaggtgcggtatatcaccgtggaggccgcccagcggggtcggaccgagatctccctcaagggaaaaattcgcaccattctgctgccgggcaagctttgccgcaaactgctgaaatacgccagaaaacacaaaaccgtttcaggcgagatttttctcaccagaaacggaacctctctgagccgccgccagatttggacagagctgaaacggctgtgcaagtccgccggagtggaatctgccaaggtgtttcctcacaatctgcggcacttgttcgccaccattttctaccgggcctgcaaggacatcgtgcggctggccgatgtgctgggccacagttccattgaaaccactcgtatctaccttgtgacctccggagcggagcacgcccggcaactggaacgtctggggctggtttcgtaggtcaaaatcaacattttgtcacaaaaaatttcaacggccccttttttcttacataaattgcttttattatagcacggtttgaaaggaaccgcaagggactccccccaattgggacgcacaaaatcaggccgggaaaaaggatttttctcggccctcttttctctgccccaacgaggtctggagcgtgttttagaagcggattctctcctgaaatcatgcgctccaggtcttactttgcccgcggacgtattcaaaatgttgatttcgttgatagggggaggagcaatgcagagaacaggcgcggtgtgtcaaaaggcggcagcaccgctgaaagcaatcggtgtaacggtaagtgaagagagcatccgggcctatttggaggatctgaatcaccgagggcgccgggaagagaccgtgcggttttacgccgcaaaactgaagacattctacgactatctgccgcctgacaagcaaatcgtcctgaatactctggagacatggcggcaggctctgctggcagagggatatgccccggccacagtgaacacaaacatctccgccgctaacggcctgctggactacttgggccgccgggatctgcagctgaccggacagctggagacggaaacggcaccccagtcggaactgacccgaacggaatatctgcggctgctgtctgctgcccgggcgctggaaaaggagagaacgtatcttttggtgaaagcaattgccctgacaggagcccatgtcggagaactgcctcagatcactgtggaggccgtgcagagtggacgcacaccagctgtctccggcggtgagcagcggcgtgtccagttgccaaggtgtctgcaggcagagctgctatcctattgtcgccggcaggggctgacggcagggccggtgttcgtcaccagaagcaggcggcccctgcggcggacacaggtgacgggggacatccagagtctgtctggtgcggcccgtgtagcgccggagaagtgcaatccccggtgcttgcgaaagctgtatctggtcacccaggcagagatcgaccgcggcgtgcggctgctggcggaacaggcttacgaccgtctgctggacacggagcagctggccgtcggttgggatgagctgccagaacagaaaaaagcggcccaataggaccagcggatcccgcgccatcaccgccgagacaggccaagtcggctccatcaccccctccgggcgcgccaacgtcagccggggcggcgaccgggccttccacattatggccggcgacggttaccggatttttaatgtgctggtagatggcgagagcgtaggcgctatcagtcactatacctttgagaacgtgcgggccaaccacaccatcaaggtggtatttaaggccactcagccgatcgccgatcctgataacaccgacgtgtccagctggttgaataccagagaccatacggtttatctcgacggattcacaggcggctctttcgcccccggccggcagatgacccggggccaggcggcgcagatgttctacaacctactattggaaaagaacgtgtctatcaccgatacgttgcacagatgttccagatgatatgtggcgcgcctctgctgttatccctgggcatcatacagggctactccgacggcgcatttcagcccaatcgggatatcacccaggcccaattcgcagtgatcgccatacgctttgccaacgagac

SEQ ID NO: 4899 - DNA, 1732 bp, Unknown
  gut microbiota DNA sequence
gggctacatcacctactgctctcagcagggtatcatcagcggctatgctgacggcaccttccgtcccaccggcaccctgagcggcaacgcgttcatgaagatgctgctgggcgctctgggctatgacagctccatcgagggctacaccggcgccaactggcaggtcagcgtcatcaagcaggccagcggcatcggtctggacgacggcaacgacgagttcgtgggctcccaggctgtgacccgtcaggaggccgccctgtacgccttcaacatgctgcaggccaccatggtcgagtatgacaagaaggacaccatcgttgtgggcgacatcaccatcaacaccacttccacccgcaaggacgtggaaaacaataccaacaccgacggcaacatcgatggcgagcgcaacggcgacggcctgatgcagttcggcgagaagtatttcaaggacctggagaaggaggatgccaccgacatcttcggccatccctccagcaagtgggtctatgatggcgacgatgtgggcacctatgccaacgaggctgacgccacttatgtggtggaggacgacgatatggacgtcggccaggtggtcaccagctccagctacatgaattacagcagctccgaagccaaggatgccaagtacttcctgaacggcgatgacaatgaggtgaagtcctctgagctggttgccgtgggcgatatcgtcgaggcttacgagaatgacaacggcgatgtggagaccgttgtggtttcccgctacactgttgccaagatcgacaaggtcgataccgacgtcagcaccgctgagagccgcaacggcgcctccgaggtcctgaccctcaccgatctggacggcgacaacagcaacgactactacgacaagtacgacgatgccgagaagaccctgcggggctatgcctcctcctatgacgagggcactgttctggccgtggccttccgcgacggcaagttcggcgatgaagtcctggcttcttacgaggccgaggctgtcaccggcgaagtcaccgctttccgtgaggacgagaccgtcaccatggacggcaccaagtatgagtttgcccgcaacgagaacggcaccgctggtttcgtggacggcatcaccagcaacttcgacttcgacaaggagtacaccatctacctgaccgccgacggctatgtcatcggtgtggagggtgccgctggtgcggacctgaacgacgtgtactatgtgaccggcgtttactgcgaggagagccgttacaatgccaacaagtttacctggtacgcccaggccgtgtccctggcggatggttctgcctctgacatcgagctggatgaaactgatgcggacaatgcactgaaggctttcattaatgatgaaaagacagatgagtttactgttgtcaatggcctgtatacctttgatgatgacattgccactgcttgggacggggacagagactataccgtctatggcttcagtgatagtggtgagctgaacaccaatttgaaggatgctctggctatggacgacaccaagttctccaccaccatcgtcggcggcggtagcggcaagaccttctatgtggacgagaacactcagtacctcggcgtggatgattatgccgatgatatcgacaccgtctatgccatgggcggcatgaagggtacaccgagcaacggaagccgtgtgatcgtgattgctgaccaggatgagaaccgtgac

SEQ ID NO: 4900 - DNA, 1894 bp, Unknown
  gut microbiota DNA sequence
tccgttggctccgccgacatcctgtacgccgccggcagcagcaccgacaaggtgggcaccgacaagtacgtccgcgagttctggtccatggaggacaacaccagcgaggacatcaccatcgatgaaaagctgagtgcccatggcttctatgaggtggacagcatcgacgaggacggcgtctacacgctgaaggactatgacaagaccgcttcttctatcgatgaggattccgacggcatcgtcgtagaggatctggcgctggacaacacggaccagatctatcgcaacgctctgagcggctccatcgataacgtcaagttcgacgatgtcagcatcgccaacgccaccatcatcgatggccgcagcaactccgaccggaacgactccgtgtatgaccgcgagatcaacagcatctcccgtctggaggccgctctggatgccgtgagagacgaggatctggagaccaagggcactgtggagatcgatctgtacgtgaaggacggcgagatcaccttcatctgcgtcaccgacgtgggcggcgttgccaaagatgacggtgagcaggaaagcggcgagctggacctgaccggtgtggagaatttcgtctgcaacagcaatatcgttactgttgacctggtcggcaccggaaagattcccgctaactatcctgttactgtgactctgatgaaggccaacagcaccgagggcgatgcggaagtcggctccaaggagcatgtaaacgagactgcctatgaggttaatgattggaacaacctgggacaaatcgcgatccaggaaagtggtaattactatgtaattatcaccatcgaaaatgaagacggcagagttgtggatgagttcacttccaacactgtccgcttcgtctacactgcccagccgtaaggcaaatagtttctttcaagtaacttgttgcgcaagaaagcccccgctcgtaagagcgggggctttccctgtttccatcacatccaggccagtagtgctgaacaacgtcggcatcgttcccccctgactggccggtgcctcgtggttgatgaaaaatccatcgtcctccagccccgcgtattggcccgcagctttcaaaaaggtctctccaggagttgaaggagatcctgtctgctcagataacttttccctcttccccatgggtgccggtcttccggcgctcatttttttgtaaaatacagccagattcaagacaaaagtaaaaaaatatattatgatagattgaaaggggggttccaaattctggaagacaggctgcgcagcttccccacgcaatggaagatgtcgaattttctgagagatgtcgttttttcaggctttgctgtttttcgtcgtacaatcttctcatcgcaaatttcgaggaggtgctctccatggacacgatcatccgggaaacgctgcgcccctttggcattacgcgcaattaccgcggttacccgcagacggtccgcgccattgctctggtcctggaagacgaatcccgcctgctcaatgtcaccgaagagatctatgaagtcgtggccctgcagacccggtgccatccctccaacgtggagcggaacatccggactgtcgttctctgcgcgtggcatacaaaccgaccgcttctggtcaaaatggcgggatttacgctgacggctccgccccgcgcctcccagtttattgatatcattgcctcctacatccagcgggaagttttgagtgaccccaaccgccgtgtgctgatctgatgcccctcgcctgtctgttccgggatttggtaccgacggcccatctgcggcccccgtgcggcagggattcccgcatctgctgataaggtgggattcccgctctttactggcggcctgccggagcagccgccaaatcgccc

SEQ ID NO: 4901 - DNA, 14378 bp, Unknown
  gut microbiota DNA sequence
caacgaatccggcacaggcggccgccctattccgcggggcggccgcctgtcagtctctcactctatttctggccggtgatcagcgccagccgggtctccacggtgtccagctgcttcttcacattgcccacgatatccgcacccacgatgtttccctcgctgtccacgatatatgtagtgggataggtggaaatatccgcaacgaagtccttgtagaaatcgccctccggatccggagagatattgtgataggtcacgcccttttccttcaaaatctcccgggccgtgtccagctgctcccggctctcgccggagtcggtacccacaccgatgaggttgatgtttcgctctttgaaatcctgatacagctcctccagttcaggcatctcggcgatgcaggaaccgcagccattgttccagaaattgacgatggtggcgtcatagtcggcgaaaatgtcgctggagatctcatcgcccgcaatgtccacctcggaaaattccgggaaaggtgtcttggacaccagggcgtcctcttcaccggagctgcagccggtcaatgcggcggtcatcagtaccgccgacagcaataggatcagaacacgtttcatgtggcagtctccttcttctcttgtattcttttgatcgaaaataccctggtgatggccccatgggggcaggcagccgcacagtccccgcagcggatgcactcagcatggttgggcgtcctgaacacatccacatccatcctgcacgcacgactgcacgccccgcaggcggtgcaccggcccgagtccacctgcaggcggcagatggaaattctgttgcacagcccgtaaaaggcccccagcgggcacagccacttgcagaaaggccggtagaaaaacaccgccagcagagctgtccccagcaggatgcagctcttccaggtaaatagtccgcccaggccggcccggatgcccgcatcggccagcgccagcgggatgccgccctccaggatgccggcggggcagatatacttgcagaagaacgggtcgcccattcccacctcgttgaccaccgtcataggcaggacaatgacgaagagcgccagaatcccgtatttcagataggtcaagatgcggacccgcctggtgctgaacttttttgcagggattttgtgaagcagctcctggaaccatccgaacgggcacagaaagccgcacaccacccgccccagcagcgcgcctgcgaaaatgaggaatcccaccacataccatgcaaactggaacttggaggagccgatcaccgcctgaagcgccccgatggggcacgaagctgccgcggccggacaggagtagcaattcagcccggggacgcagacggccttcaggccggtcctggagatccttccatgcaggaagttcatcaaaaaggggttggaagccagcgcggcccccagctggatcttccagcgatgcttgttttcagccaatgcccacacactccaaacacaggttgacgcccttgtgcaggaccatgtccgcttccccgcgccacagccccagtccaatcatcagcagggcggctgccagacaacagatcgtgatctttctcatatcagcccatagccgccatagcggcgccgccctctgccgccgtcccagactggaacgcggcgttccggctcatctccacaaaggcggccgcggacgcaggcagctcctctgcgtccacggcggaataccatgcagagaggaatgttccgttcacataccaggaggcgacgtttggcatctccccgtcctccaccatgcttctgttgctgcccacagctgctgccagagagtcgttgtagaggatgacggggaagggtgcatcggcaaacatctcgctgccggttccgcttttggtgcaaaccaggatttccgccccattctccgcaacgcccccatatccctccgccagtgcgttatagaagacctgcgtcccctccgcttccggatccaggaaggcaaagaacaccacatccccaagctgttcccgggtaaacgcctctccggacagggtggtcgtggcaaagtcgcccaccatgttgctctctgttttgctggcggcgggaacgctgttctcctcataataggcatccacccacgcctgatcgacccagcccttatccagggcgtcctcgatggtaagcgtaccagcctcgatggattgttccacatcctcctgactgggccgcttctctccgcaggccgccagggacagggccatggcagcggccagacccagcacggccagcttccgtttgttcttgcatcgcttcataaaaaacctccttgccgcacctgcggcggattttggacaggaggcattgtagcatggaaaacgtaaatttcctgtcaaggcggtcttgatggaaattttatctggatgtgctataatagccgcacatggaaaagggcggtgagtgggatgcggattttggtggtggaggatgagcgtctcctgtgcgacgggatcgcggaggatctgagactggaaaaatacacggtggattgctgctacgatggtccggcggcctgtgagcggctgtttgtggaaccctatgatctggtggtcctggatctgaacctgccaggcatggatgggctggagctgctccggcacatccggacggaacagccggagctgcgggtgctgattctttccgcccggtcacagctctcagacaaggtggcagggctggatctgggcgcggacgattacctgaccaagccgttcgccctggaggaattggaggcccgggtgcggacgctgctgcgccgggaatttcgtcagcgggagtcccttgtacaggtgggcgcgctgaccctaaacaccgtgacccgggaggtctccggccgtggggaaccccttcccctgacgccccgggaatttgccatcctggagcatctgatgcttcaccggggatgctggatcagccaggaggagctgatggagcatatctgggaggcggatgccaaccccttcagcaacgccgtgcggatgcacatctcctcgctccggaaaaaactgcggaagcggctgggccatgatccgatccagaccaaggtaggtcggggctatcgcctggccggagaggagacggcatgaggaaaccgatgtccctgcgcctgcgggtcactctgctctgcgcagccctgctgacgctctgctgcctcctgctcactgtgactaacaatttttcggccatccggatggccgacgccattcaggcggtgccgcttcttccggcgcagcgcgcagagctggaagacagtgtcagcctgcccatggcggaactgcatatcagcgatacgatccagcaggctcagggggcgttccacatgcagagcctgctggccatggttgccatcctggcgttgggcctgttcctcatataccggctggttggaaaagcccttgctccgttggacacactcacttgccggatccgggagcggacggctgcggatctggcgcagcccgttgagatccccgacagcggggatgaggcggccgcagtggccctggcgttcaatcagatgtcccagcggctgaaccaggtcttcgtcatgcagaggaacttctcccgcaacgcggcccatgaattccgcacaccgctggcagtcctaaagacccgaatcggcctgttccgcaaaaagcaggacttccgcccccaggccacactggagctgctccagatcgtcgagggggaggtggaccgcttgtccgccatggtgagcgaactcttggagctgaccaatctggagcgggcatcccgcggagagcggctctcctccggccagctgatccggagcgccgcggaccaggccgccccccaggcggaagcgcggagcatcaccattttggtggatgccgcgccctgtaccctggccggaaatgcagagctgctccggcaggcggtatgcaatctggtggaaaatgccgtcaagtacagcccggccggcagcgttgtacacatcgcgggccaccgggatggggaatggttccaaatcgtggttgccgaccagggacccggcatcccggaatcgctccgccagcggattttcgagccctttttccgggtggatgattcccgctcccgacagctgggcggtgccggacttggactggcactggtgcgggccatcgcggagttccacggcggcgctgtttatgtggaaaaatcccggggagcgggaagccgattcgtcctgaagctgccatgcgaacaggatcctccgccggattgagatccaaactgacgtcttttgtcagacgggatcggcggaaacgcctcgcggcagttattttcatgcccctggctgtgggcaagctgcctttccgtgcgccgccccctggggctcagcttttgggcggaagacgctctgcggagggaaccgccgtccggaagcctgccaccgacacgtggcggggcagtctgcgtacaacgtttgaagatatcagcgtctctgcaaacgcaattcccgttgcctctccatacagccctgtaatctgtgcgccacttacagcaggaaagcacctgaaatctaaagatttcaggtgctttttgcttctcagcggacagtgcgcatctgttttgggcttcgcacatcaagtttcctgcggatagcagcagcgaagcccgcatgacgcccgcatctctccaggaaaaatgtgcttccggcacacgcaattctccaatcggccccttaataaatgctgacagttcgaaaggatgtatacctccagatccgtcagttggtctgccgggctgttttccccgtgatgggctcctgacttatgattgatgcggcccatgacgatctttgccatgccgctgacccttgcgtattccgcgatctgcaccgcaggagccgtcccgtacaccatggaaatctgcgccccctgctgctccgccaagtgcagattgcagcgcagttgctttatattccctgtggtaaagaaattttgcaggacctgtttggtctggcgtttccgacagacttttcccacccgaagaagcctctccacatcccgatgcttggtatgccggcacccctgggtgttgttgtgcgccgcttcatccaccaggacagttggaatctggtcaatatcaaccctcccggagttgaatgccgcggtattcgtttttcttattcagcaagacctcccgtccgttcagcagggacaatgtatccggtcttacatgcggggctccacatagcccaccaccagatcagcgccctctttctgcgcctgatgcgccgcttacgacagggcatacgttttgctcacgccggccgcatagccaaaaaggatttttagcctccccggaggatcctccgcttccggatcgtgtgggaaattcgcgcattcattgtttgtccgtcccctatgtactcaccctcccacaactcgtcatagaatcaataccttgtcccgttatcgtatcacgcgtaatactaccaaaccgtgaataatggcgtcatgatcggaagatagaattggggcgctcccaccagcaggaaaacgagcgccagaatcatttggcgctcgtttcataactgtgtgtatcgtcccatcccaaaatccgtttggccatcagatagattcccggcttgtaaaggaccagaaccacatccaaggcaggactccggcgtataaagtccgtaatcgcttggccggcaatatagattgcttcttctcgtgggatgtgatattctcccgaaaaaataagtggaaacgcaatgcttttgcatccgctggtcactgcccttgtcatggcgcggcggtagcagtctgccagcagtaaccgctctcgctccgcgcctccaaaccagccaggtccggccacgtgaataatatagcgggccggcagcccaaaggacggcgtcatcacagaatgtccgataggacaatggccatgacgtcggcaagcctcctccagctttgcactatccgctgcggcgaaaattgcctcacagatccccggcgtacgcttcagttctgtgtttgcagcatttacaatggcatccgtggcaatatttacgatatttcccatccaaagatgatacggcataggtcttcctcctttacagcagagcaccgcataccagataccccaaagcggaaattccgctggcacacagcgcatacggaatctgagacaacgcatgatccatgttctcgatcttacagcagctggatgtcaataccgtggcatcggaatagaagcaggcatggctgccgagcgtggcgcccgagacaatcgcccccatgaccaggagcagatttgtgccgatgctctccgccagcggcagcaggattggcgcaacgatggccggaatcccccacacgctgcctgtactgaaattcaggatcgccaccaccagaaatgtcaccagagggaagatcacggcattgacatggggctgcaccagggtaatgatgtaatcggcaatcccgatatcggtcattgcctcctgcatgacaaacgcaaagaagatgatggccaccgtgggaatcatgttgcaaaagccgtgcatcgccagatcacagaacctggaaaagctcattttgcctctgggaatatagagtacaaagcacactgcaatcgcagcaaccacggccagaaacagctctccggaaatgattgccaagataatcaacacgcccaccggcaggataaagtccatgaggctgccctgtgtctgaaattccgactcatcctcctcgttgagcggtgcgctctccggcgaatagaccttgccggtctcctgaaggcggcggtaagcggtccgcatccgccccagcttgggaacaacgccaacgataaacagcggcacgatgataaccgctgcgatggcgtaaaaggcaaaggggatcacgtgatagaatgtctctatcgccgttccatagcccagctccgcaatccccggctgcgtgaaaaatagcccggaaaagaagattgcccaggtagagaacggcagaatggcacacaccggcgcgccggtggaatcgatgatgtaagacagggcctcccggggcacacggcgttggtcggtcagttttttcatgcaggtgctcagtgtcatgatattcaaatagtcatccacaaaaataagaatccccatgatccaggtgaccatcatggtggaccttggcccccggcagagctttccaagcgcccttgtaaatcccagtgttccatgggattctcccaacagcgtaatgaggctgccgaacaacgcgcacaccaaaaagacccattggtgcgaataatctgtcgccacgcggaaaaaagcatccatccagtcggtggcgatgtgagacagtgcatacactccctcggacgggatccgtgcagcgctggtaatcacataggtcagcagagttccaaagatcaacggttccagagtccgctttgttttcagcgcaaaggcaatgacgaacaggacggggatcagtgtccatattccatattccatgagtacaacctcgtttctaccacagtcgcatttattggagtgcttctggtgcccgctaaagtcataatagagcacttccgatgaagatagtgttagtttcccggctctgggataaggaatatattaagaacaccatttgattgaaatgacaaaatgataggccggcattccagtcgatggaatgccggcctctactgtacagcggatattcctttccgggcattttctgagtccggaatgtcccctgcgcaattcatcagctgccagtttatttgccacgctccagatagtctgccgcaaactgcgcatacagtgcggcccccctctgcagcaccggctcatggactgtatagcggtcgttgtggttccccaccgtcataccgagttcctcatttctcgttccaagaaaaccgaacaccgctggaatcttatcggcaaagaaagcaaaatcctcactgcccatcatctggggaagttctttcaaacacgcttccccatagagtttcacagctgcgtcatgggcgattttattcaactcttcatcatcgttataaagagagtttgcatagtaatcatattcaaccgtggcagtcgcgccaaaagccttggctgtgttttcagcaatccgccgcagccccgcttcaatcttcatacggaattctgcgttataagtccgggtggttccaaacagttccgcatggtttgcaataatattataccgctgtccggcgtgcatctctccgatatttactaccagcgggtttaaggggtcgttcgttctggagacaaatgactggatattgctgacaatcgctgcggcagccaaaagtgcgtccacacccagatgcggctgtgtcccatgggcggaaacgccatctaccttgattacaaagttatccacactggccatgcggggccccgcctgcacattgatgtatggctcctccagtgtcgcccacacgtgctggcccataatggcatccacgccatcaaggatacccgcttcaacatagtattccgcaccgtggcaggtctcctccgcagcctggaaaatcagtttgacgttgccttgcaattcgtctttcgtctccatcagcatctttgccgcaccgagaagcatggagatatggcagtcatggccgcaggcatgcatgacgcccttatttcggcttgcaaagggcaggcctgtcttttcctctaccggcaaggcatcaatatccgcccggagagccacagttctgcacgccttttcggcctttcccccccgcagcatcgcacataatccggtatggtccgggaagcgttggatctcggtatagcccattttctgaagctctgccgcaatatgctctgtggtctggacttcctcgaggctcagttccgggttctggtggcaccatctgcgctgttccacaatgtaatccaatgcctgttcagccagttctttatagttcataacagtcctcctatttctgaagaagcatctccaaaatcaaatcatcacatttagaggaaccctcattcccaagccgcacgaaatttctgatcgtttcttccgggtctgtttctacaattccatctgtcgctttcacgctttcactccgaagggccatagcggcacattggaaggcggcaaagacacaggtgctgatcttcaaggcgcagtctgccttggcaccgtcacagagcattccgctcacattcccaaacatattgtttacagcaaatccgatctgctccagcgtgcctccttgtagatacaccaagccgcaggctgcggcggcagcggcaatggtcgccccgcagagcccggagagcggtccgaaatccgcgtggatatgaatcgccatcaggttgctcagcgtgacggcgcgaaacgttctctcttcatcaataccaagactcttcgcggcagacaagatgggaactgttgcggtaatgccctgattgccggatccggaatttgtgatgaccggggcattggctcccgccattctggcgtccaccccgctggcagtcatggctacggcatccatgacaacatcgtgccccatcagccccgcttcctgattgttccggataccatggccgatattcagtccgtaatcacccgctgcgcccagctgcgcgatatgcccattgacttcgatggcctcttggatcatgtgtaaatcatcctgtcggcgatccatcgtctccacaaattcatagatcgtccggatattcagcgtcctgctgatctgctccggcgtgatatccgtttccatcgtctgcccgggcagctcacagcccaccctctggtggtcccgctccacaaggatcacattggtatgcgctcccttaataatggcgcgggactggtgttctttattcaccagttcaacttccacatacagcttgtccggatcaaacgcccttctcacgtccacatatccattttccacaagatgggccgctctttcaatgtcttccgggcgggcgtcatccacaacccggagctggcggtccaccgccccgcacacagcacccaaagcagctgcataatttattccagtatagttcgttccgggtatccccgcagacatcgcgttcttgatgatattcgcgctggccctgaccttgatatgctccagctctccatccaactgctctcgggcaatggcggctgtcagcgcaatcgcggcaggctctgtgcagccggtggccagcatcatctcatgattcaatatttgacaaatcagtttccgattcatagcgatacgctcctattctatgatcccaaccaacatttgattctacaaaagcggaacacttcgtgtcccgcttttgtagatgatatggcctttacaatcagaacattttggcaaatacgcttgcaatgataacggacgtgatcgtcacagtggtaaagccgccgacaatcatgggcgggaacatcttgctcatcagatattccttttcctccggggtcgccgccagagcgttgcaggtgttttcagtgataattgcattgggcgggaacccatacagggcagtcaatgcggtggcaaaggccagcaggaacgggatcttcagtatttttgcgctgacgaagcacaataccgccatgccagcaacaccgacaacaatcagaatgaccatcggcccgatgatgctgcccagcatctggggcgtgcaatccttcaggccgtcaaagatatacatcatcagagcgaacatgacaatgccataggaattgcttttattcagtgcgttctcatccagaaaaccaatgctggtgaaaataatgcccagaaccagtgcatacacagcgccgctgatcgtcatgttcaggccggggatgacaactcttcccagctgtgtggccagccaggccacgaatcccagcttgcccagcatcaccacaacagaattccacttggcaggcgtggggggcagcagtttcttgcgcggactctcggtggtttccagctttccgttgactgcatctaccgcatttgaaacgccggcaaccgacacaccgccgttccggtattctttcaggagctttttgccctccagctggaggcagaccgccgtaagcggataccccgcgaacccctggacgcagtacatggcgatagcaaacacagccgcttccttgaggccggcagcattggccgcctccatcatcgtcgttgcagccacgatgcctccggtgagaggaggcagtcccgcgacaacaaagctgcggtccatgagcagggggcagacgaacagtgccaggacgcacatacccgcaagtcccgcaaggcagaccacaatggtcttccactgctccagcagctgcttgatgctgatcacggtgcccatgtgcgtaatcagcagatagataccgattgtgctgccaaagggaatcagtacggcgtcgctgatcagcgtagtgggaaggactgtccagtagcccaccagaatgatagcggcagttacgaataccgatggaatccatgcttttgttgccgtggaaacgacctcgccaatgatgtacactgcagcgcagagcacaaacgctagtgcaaagttatacatgtcttttccccctctttacttattcagcacatatttcggcggcagaactgcctcctttcatggttttgcattctcccacccaatatgagtctgaccaattactgtgcgttgaaatccattgccacctgcgcatagagcatggcgcccttcaaaagctgtgcctcatccacgcagaaattgccggaatggtttggccaaacggctccgcaggcctcgtttccggttcccagcagtgcgattgctcccggcaccctctgcatgaagtaggagaagtcttcgccgccggtggtagccggattggatgcgaggcaattctcacccaggacagcaaccgcggatttttgggcgatggaaaccaccgcctcatcattgacagtgggcggcacgatgcgcaggtactccagctctgcctcagcgcggtaagcctcggctgtgcctttgataactctttccatccgttcctcaaaggtttcccacacctcattgctgaagcagcgggtggttcctgtcatatagctgttctccgccactacattccaacgggtgcccgcctggatcgtccctacggtaacgaccgccgggtccataggcgagatctcccggctgatgacggactgcaggttattgatgatggcagccgttacaacagctgcgtccacaccccgctccggctgtgcgccgtggcacccctttcccttcacagtgatatggaattcgtctgccgacgccatccgggggccggcttccagagaaaccatgccggacttcacatctgtccacacatgaatggcaaaacatgcgtccacgccgtccaaagcgccctgctcaaccatggacttggcacccagagctacctcctccgcaggctggaaagccagttttaccgtgccgcacagttcttctttcatgtcatgaaggatgcgggtggcggtcaggagcatcgcaatatggcagtcatggccgcaggcatgcataatgccctcgtttttgctcgcataaggcgccccggtggtttcctgaaccgtcaaggcatccatatctccgcgaagcaaaatggtcttgccgggctttgcgccttgaatggtgaccagcacacccgtctccagcccacagggccgccaggaaacgcctatctcgtccagcgcctctttgattgccttgctggtgtgatattccttggtgctgacttcaggatgctgatggaaatagcggcgcttttcgatcagatactctccgtattgggcggcgacctcttgcacattcataacaattctccttttctcgcgaattttttcgctttaaatggttaaatcattttgaactttccaaatctgattacttcaggaattccagagcaatagaaaccaaggtcctgatgcctgccggcataacatcctcccgaaccgcacacttgggattgtgcaggggcgccagctctccctcgtgtcctgcataaagcatcagataggcgctggggataccacccagctttccatagaagctgaaatcctcactgaaaggcattggatcgggcatggggaccaccgcgtcctcacccaattcctttcggaccgcgtcagcggcaagatccatcagctctttgtcattgaaagcgctgggatatccgtcggcatagtgaatatgtactgtatttccggaggcggcctcgataccttttgcaattgcctggacctgttccttaatcacgcttcgcacactttccgaatacgctctggtcacgccgccaaacttgacctccgccgggatcacattgggcgcgtcgccgccatggatgctccccagggagaatactgccatctccatagggtccacccggcgggcgacgatctgctgcatcatcacgatcatctgggcggcagccagcacggggtccgttgtattctgcggctgagagccatgtccccctctgccggagacggtgaagtcgaacaggtccacggaagttgttatgggcccgatgtggaacccaacctgtcctgcccggtgggcgtccggcagcacatgcattccatagatcgcgtccacatgggggttttccagcacgcctttttccacaagctccttggcgccgccaggtaatgtatcttcgctatgttggaatatcagcttgacacagcccgcaaaacgctctctcattccgcacaggatcttggccgcgcccagcatcatggatgcatgcatatcgtggccgcaggcgtgcataatccccggattctcactggtatacggcagtccggtttcctcctgcacgggcaatgcgtcgatatcgcagcgcagtgccacgcagcggcccgggcctctggctccatggatcaacgctacaacggcggttggtacaggccgttcgattgcatcaaccccgtattcctccagcttctttcgaatcagggccgatgtccttacctcgtttcttccaatctcaggatggcggtgaatatccctgcgaatctctaccatctccgggaaatattcctccgctctttcttttatcgtactcgtctcaaatttcctccttcctgcatggcttccggaagccattgtttgttcagcatggtttctatgtttgcgaagcaaacatagaaacagggatccctgtttccgacaatacgatgttgctttaactatactttatctataataatcctaaaccacaaagtatatcaagtcaatatttttctcctgacttttcctgactccagcattttgagcacttccttgttagagtcggagacccttttccgggtcttgtatcctatcggcggaaagccagaagcg

SEQ ID NO: 4902 - DNA, 1665 bp, Unknown
  gut microbiota DNA sequence
aaatttccacatggcgaaggtgctctgacgcccgatcagatactcaatgcagaatgtagttgcaatatccgctcatcgtacgtccatccagcgcacgtttccaggcggtcaggcccattggtcttgctgcggtctgcattggtgcaaatgatctctgccccaccgcgccctgtgacggcgtaaaagcccgcagaacttattttataccacggtatagaagtcccgtacggtggcgcccggcacagatgtcaatgatctgctgccagatacggcgctcactggtccgaatggaattacctccgctccagcggttttaaaggagccgatgctgaaagtagtcctaccctgcctgaggcgttcatcacccaaggcaaagttcttggttcattactctttcagttcactggtggcccaaatgcggatgtgggcggcccgcagcgatggtccaggttgtaaaagcgggcttccctcgttttggtctttctatccatcgctccgtagagcgtgcttgttacatttttgcaacaactcctttgtcctgcaattcgcctttctggacgatattagtttcctttctgagaatggcttggaatggcgagaaggaagataagctctcactcttaagttcacgaacgtgatattataagaaatagtatttgcattcgccccgcaaaaagccgttgcaccgtgaaaagccttgagaatactgaattttttgccttttaggacactggaaaacacactgattttcggtgctgtggtgcccaaattccttgcggcgatataaaaccacacaagcaaatgtaaagaaaaatcagaattatcgagggtaaaagcactccctgcttttgccctcttgactgccgcacgagcagaagcattcgtacttgtcagcggcgggcgggtcccgttcatcttgactattgacaagcgggaatggttctgctgtctcaggatttatgcaaacctcaaaaaagcggcagaccactgcgggcagaactctgcggcgaaggtctgtcccagactgtccggggcattcaaaccgcccttcatgcagcactgaataaagcggtggaggaaaacggattttctgtaatccctcagatgggtgtaattggagcaacgggtgatatttgctgcatcccataaattgggtgatatcctacgccacccatgtccgcgctggtcttagagggctactgggcgcacgccaaaatgaaatttgacaagtgctgaatactataaaatttctcctacagccatcataagtgatgttgtactcggcttttcaagttagatcaagtgttggcggaactgacaccagaggaacggagtaaaaagcggttggagcagacaaacccggttttagacgcactgtagtcatagacaaatgagatgcaggtggaagcagcaccgaaatctgcaatgagaggagttatccattatctgctgaagcagtggccgtacctgatccggtatctggaatacgagcaactagaagtgagtgccaaccgcgccgagcataacataaagtcgttcataatgagcaggaagaattggctatttatcaatacgaatacgcccgctggtacgcagaccagcgcagttccacagtttcattgagccagcaaaggaaaacggccttgatttgtaccggtatctact

SEQ ID NO: 4903 - DNA, 4911 bp, Unknown
  gut microbiota DNA sequence
aacatattatcatcaagaaaggaagatttcaccatgaaaaagcttttctccctcgttctggccctgtccatggcgctggccctgaccgcctgcggcggcagtgcggacaccgacagcaccaccacagacgacaccacagagaccaccgccaaaccggtagagctgtacgtctttgccgcggcctccatgcaggagtccctggatcaggtcatcgaggcctacaaggccgtggctccggaagtcgccgtcgtggcgacttatgactcctccggcaccctgaaaacccagatccaggagggagccgactgtgatgtgttcatctccgccgctcccaagcagatgaaccagttggacgccgagggcggcgaggagaacaccgagggcctggacctggtgaatagcgccacccgcctggacctgctggagaacaaggtgaccctggccgttcccgagggcaaccccaagggcatcgagtcctttgaccagctggcggggctgctggccagcggcgatgtgttcctggccatgggcaacagcgacgttccagtgggccagtacacccagaagatcttcacctactacggtctgaatgaggagaccctggccagttccggcgtgctgacctacggctccaacgtgaaggaggtcaccacccaggtctctgagggcaccgtggactgcggcgtgatctacgccaccgacgccttctccgccggtctgaccgtggtggacgaggccaccgctgagatgtgcggccaggtgatctaccccgccgccgtcatgaaaaacagcgccaatcccgatgctgccaaggccttcctggacttcctgtcgaccgacgaggccatggcctgcttcgaggcggtaggcttcagccccatggtgtgagttcaagcagattggaaataggcgtctgataaggctggatcgtttaaaatgctttctgacagcccttgatcccctcattccaaactccggatttcttattttccaaaggaaccttatggcctggtcccctctctacaactcattgcggatcgccgccatcgttcccattgggccttggcccaatgggagcccttgatttgattttgctcggccaggcagagcccggcctctccaaggttttgctttgcaaaacgcttgtacgccacttttgtggcggcccgcctctggcgggtcgggatggcagacgccccctttccccaggaggttttttgaaatggactggtaccctctctacaactcattgcggatcgccgccatctccacggtggcggtattcttcctggggatcctggcggcgtactacatcgccaagctgccccggctggtgaagggcgtgctggatgtggtgctgaccctgcccctggtgctgccgcccaccgtggtgggctggctgctgctggtgctgctggggcccaaccgccccatcggcgcctgggtgcaggcccacttcggcctgaggctggtgatgacctggtggtccgctgtctttgccacggtggtggtggccttccccctgatgtaccgcaccgcccggggggcctttgagagcttcgatcctacgctggcggaagctgcggcgaccctgggccggtccaatatctggatcttctggcgggtgcggatgcccgtgtgccgccagggcatcctggcggggactgtgctggcctttgcccgggctctgggggagtatggtgccacctccatgatcgccggctacacccccggccgcaccgccaccatctccaccaccgtctatcagctctggcggaccgacaatgacacagaggccctccgctgggtgctggtgaacattgccatctccgctgtattcctgttggcagtgaacctgctggaagcccgccagaaacgggccggaaaagggggcagacggtaatggcgctttccgtggacatccgaaaggccctgggaaattttcatctggcggtccagtttgacgccggggatgagacgctggccctgctgggggcctcggggtgcggcaagtctgtgaccctcaagtgcatcgccggcattctgacgccggacgagggacacatcgagctggacggtgttaccctttacgacagcgcctccagaatcaacctgccgccccagcggcggcaggtcgggtacctgttccagcagtacgctctgttccccaacatgacggtgcggcagaacatcgccgcagccgtgcgggacaaggcccgccgccaaacagaggtggcggagaagctgcggcagttccggctggaggccgtggcagaccagaagccggggcagctctccggcgggcagcagcagcggtgcgccctggcccgaatcctggcgtcggagcccacggccatcctgctggacgagcccttctccgccctggacagctacctgaaataccagctggaactggagctggcagagacactgggcggattcccgggcacggtgctgtgggtctcccatgaccggggggaggtgttccggaactgccgccgggtgtgtgtcatagaccggggcagatcccagcctgtgaccaccctgggggagctgttccgcagccccggcacagaggccgctgcccggctctccggctgcaagaactatgccgacgcccggccaagggaggatgcggtgtttcttccggactggggactgacgctctcctgcggccgtccggtgccggagggcgtctgccggatcggcatccgggcccaccatgttcagctggccggtcccggggcggaaaacgccttctcctgcacggcagtaaaggtggtggaggacgtgttttccaccatcgtgctgctgcggccggagggcgcggcgccggaggcgcccctgctgcggatggagctggacaaggacaactggcaggcggtgccggacaaggaccgcctcaccgtctccgttccgccggaggccattctgctgctggaatcgtgaaggagtgatctaccatgttcaaagccgctgtcctgaccgtcagcgaccggagtttccggggagagcgccctgacgcgggcgggcctctggttgtggaaattctgaaaaacgccgggtacgcggtgacggagaccgccattgtcacggacgagaagggccggatcgaggctgccctgcggcagtggtgcgaccgggagccggtggatctcatcgtcaccaccggaggcaccggcttcgccccccgggatgtgacgccggaggccaccctcgccgtgtgtgaccggctgacccccggcattccggaggccatgcgctacgcctccatgcaggtgacgaaccgggccatgctgtcccgggccgcggcgggcatccggaaggggacgctcatcgtgaatctccccggctctcccaaggcggccagggaaaacctggaggccgtcctccccgcgctcgcccacgggctggagatgctctccggacggcccgccgactgcgccgggctgacggactgacctgcttttcaaacaaacgccggcctctatatgaggccggcgttttgccattcagtctgtggagggtcgggacgctctcccctgtttctccaattcctcccgcaccagatccgccagggtgaagcggtctacatattcgttcacggccgcatacaggcccgtccagaagtccagggtcgggcagacgccgcaccgctcgcaggcgttctcctccgtctccaggcaggccaccggggccagatttccctctgtcagccggaggatactgcccagggtatactcctccggcgctttcgtcagacgatatccccccagggcgccacgcccgctgcggaggaatcccgcctttcccagcagacccgcgatctgctccagatacttcatggaaatgccctgccgggcggccacatccttcaaggagacgaactcctccccgccgtggaccgccacatcgatcatcaggcgcagggcgtaccgccccttggtcgaaatcttcacgaaaccgcctccttttctgtcccatctattttgccacaggcgcttccggaatgcaagagaccgcttggattttccccgccccgccggcaccggaaattgacaaccgtccgcttttcccgtacaataaaaacaacttttgagcgttatggagaggagtaccgatcatggattacgcaaaggaatccctgcgcctgcattccgagtggaggggcaagctggaggtgacgccccgggcccaggtggacagcaaggaggcgctgtccctggcctacacccccggcgtggcccagccctgcctggagatccagaaggacatcagcaagagctacgagctgacccgccggtggaacaccgtggcggtggtcaccgacggctccgccgtcctggggctgggagacatcggcccggaggcggggatgcccgtcatggagggcaaatgcgtcctgttcaaggccttcggcggcgtggacgccattcccctgtgcgtccgcagccacgacgtggacgagatcgtgaacaccgtggccctgctggccgggtccttcggcggcgtgaatctggaggatatcgccgccccccggtgctttgagattgagcggaagctgaaggagcggtgcgacatccccatcttccacgacgatcagcacggcaccgccgtcatcaccctggcggggctcaccaacgccctgaaagtggtgggcaagcggctggaggatgtccgaatcgtcatcaacggtgccggcgccgccgccgtctccatcacgaagctgctgctctccgccggggcaggggacgtgaccctctgtgaccggaagggcgccatctacgccggccgcagcgacgacatgaactggatcaaggaggagatggcccaggtgacgaatccggagaagcggaccggctccctggtggacgtgctggcgggggctgatgtgttcatcggcgtgtccgc

SEQ ID NO: 4904 - DNA, 425 bp, Unknown
  gut microbiota DNA sequence
ggcctcctccagccaggcctcgtcatagccgttgccgttgaagatgatccgctgatgctcggtgaatacccggcggatcagcttgggcaggtccgcctggaagtcccgggatgcctccagctcgtccgcgaactgtttcagctcctcggccatgatggtgttcagggcgatattggggccggagatggactgggatgcgcccagcatccggaactcgaacttgttgccggtaaaggccatgggggaggtgcggttccgatccgtgttgtcctggcggatggcaggcagggcgtccacgccgatctccagcgtccgcttgccggtgctctggaagtccgtgtcgttgatgatggagtccaccacagcggagagctcgtctcccaggaagatggagagcacggcgggcggtgcctcctgggcgccca

SEQ ID NO: 4905 - DNA, 1522 bp, Unknown
  gut microbiota DNA sequence
gtgctttacctccggtaatctaacataacgctagccctaaagctatttcggggagaaccagctatctccgagttcgattggaatttcaccgctacccacaagtcatccgccaccattgcaacgggggtcggttcggtcctccatggggtttcacccccacttcaacctgctcatgggtaggtcacccggtttcgggtctatggcaacgaactttacgccctattcagactcgctctcgcttcgcctccggcactgaatgccttaagctcgctcgttactataactcgccggaccgttctacaaaaagtacgccatcacacgttaacgtgctttgacagcttgtaagcacaaggtttcaggttctctttcactcccctcccggggtccttttcacctttccctcacggtactgctcctctatcggtcatcaggtagtatttaggcttggagggtggtcccccctgtttcccacggggtttcacgtgtcccgcggtactctggattcagtcgcacggccttctctttcggatacggggctctcaccctctatggcgggccttcccagacccttctcctagataacttccgctaaatgactgtccgcaaccccgaggaataaatccctcggtttggcctcttccgcgttcgctcgccactacttgcggaatctcggttgatgtctcttcctcgccctacttagatgtttcagttcaggcggttcccttcctacgcctattttgttcaacgcaggatgactggatattgtccagccgggttgccccattcggatatccccggatcaatggatatttgctcctccccgaggcttttcgcagcttgtcacgtccttcttcggctcctgatgccaaggcattccccttgcgctctttccagcttgacctatcgccgttctcacagcgacttgtcagagaattcttggttctctttgagaattatgcaggctttacaaagatcgaaattgtatgtcaccctgcatcctttcggatgctgttccacaatcaatttgtttcctctgtgtctccacagagaaacctctctgttgccttacttgcttttgtcacattgttcagttttcaaggtgcagatcgccgtccgcaagctttcgcttgtctccggcacagcttccaaccgcttttgcagtcagatttgaagatccgatctttcgatcaggtcttcaaatccaaaggcaaatcgcctggtgggcccgagtgggctcgaaccaccgaccttacgattatcagtcgtacgctctagccagctgagctacgggccctcgtcttggacgaggtgacgctttattctcttggtggagatagtcgggttcgaaccggcgacctcctgcttgcaaggcaggcgctctcccagctgagctatatccccttctatctcccggcgtacgccctctaaattaaacaacgtaactccttttccgctccagctgaccaggaattccaggcagagcttgctctgcccaggtctccttagaaaggaggtgatccag

SEQ ID NO: 4906 - DNA, 2926 bp, Unknown
  gut microbiota DNA sequence
caccgggttcttagcctacggctcacagcgcagtacctcgtgctgttcgtcgcagggcttctgggcgtcttcgtctgcttcgccggaatgtacatgagcggcgtcccgcagggcttctgcatcctcttcgccctcgcagccggccttgccgtcacgggcggcaccttctacctgagccgccgtttcggcccctacggacttcaaaagctcatggcctcgcgccggcatccgcggcgcatcatccatcgtcgggccatccggcggctgctacgcattcgtatccctcgaaccgtaaaaccgtaatcctatgcgcggaaccttgaaaacctcgaccttggaatcgaaattccctttgctgcgcgtcgagaacaactgcatcatctccaagttcgccgacatcaccgcggcttaccgcgtctcgctgcccgaactcttcaccctcacgggcgaggagtacgaagcgctgcacggcgcatggctcaaagccctgaaggtgctgccggactacaccgtcgtccacaaacaagacttctttatcgaagaacgatacacggcgccggaggacggctccgagcggagctttctcgcccgctcttacgagcgccacttcaacgagcggccctacctgcgccatacgtgctacctgttcgttacgaagaccacgcccgaacagatgcggcagaccagcgcctcgtccgtgctgtgccggggcttcatcgtcccgcgggagatgcgcgacacggatgccgtgacgcgctttctggaggccgcggagcagatggaacgcatcctgaacgattcgggcctcgtgcacgtcgagcggctaacggaaacggagatcgtcggcacggcagacgacgccgggctgctggcccgttacttcgccctctcggacgagcggagtccggtcgtcaacgaagatatccgtctcgacccgggcgtgatgcgcatcggagacaagttccttacgatgcacacgctctccgatctggatatgctgccacagagcgtggcgacggatttccgctacgaacgcctttcgaccgaccgctcggactgccgcctctcgttcgcggcgcccgtggggctgctgctctcctgcaaccatgtctacaatcaggtgatcttcctcgacgaccacgacgagacgctcaagcggctcgaagcctcggcccggaacatgaactcgctggcggcctattcgcgctcgaacgccatcaaccgcgagtggatcgaaatgtatctcaatgaggcgcactcgcagggggtgcgctccgtaaggtgccactgcaacgtcatggcatgggccgagagcgaatcggagttgaagcgcatccgcaacgacgtagggtcgcagctggcccttatgggctgcacgccgcgtcataacacggtggacgttccggtgctgttctgggcggcgattcccggcaacgaggccgactttcccgccgaggagagtttctacaccttcctcgatcaggccctctgccttttcaacggggagaccaactaccgctcgtcgctctcgcccttcggaatcaagatgtccgaccgcctgtcgggcatacctctccatctggacatctcggaccttccgatgaagcgcggcgtcatcacgaatcggaataaatttatcctcgggccgtcgggctcgggcaagagttatctgacgaaccatctggttcgtcagtactgggagcagggagcgcatattctgctggtcgacacgggcaactcctaccaagggctctgctcgctgattcacgccaagaccaagggccgcgacggggtgtatttcacctacaccgaggaggcgcccatcgccttcaatcccttctatgtcgaggacggagtgtacgacgtggagaagcgcgagtcgctcaagacgctgctgctgaccctttggaaacgcgaatccgaggagccgacgcgctcggaggaggtggcgctctcgaacgccgtgaacctctacctctcgaagctccgcaccgaccgctccatcgtcccctcgttcgataccttttacgagttcgtcgaaaccgactaccggcggcttctggagcagaagcgcgtgcgggagaaggatttcgacctcgaaaacttcctgaacgtgctggaaccttactataagggcggcgagtacgactacctgctgaactccgacaaacagctggatttgctggacaaacgtttcatcgtcttcgagctggacaacatctcctcgaaccggacgctgctgccggtggtgacgctcatcatcatggagaccttcatttcgaagatgcggcggctgaaaggagtccgcaagatgattctcatcgaggagtgctggaaggccctcacctcggccaatatgagtgcatatattaggtatttgtttaaaaccgttcgcaagtatttcggcgaggcggtcgtggtgacgcaggaggtggacgacatcatctcgtcgcccatcgtcaaggagtcgatcatcaacaacgccgactgcaaaatccttttggaccagcgcaaatacctctcgaaattcgacggcatacaacgtctgctgggactgacggacaaggagcgggcgcagattctctctatcaacctctcgaacgatcctaaacgccgctataaagaggtctggatcgggctcgggggcgtgcagtcggcagtttatgccacggaaacttcggtcgaagaatatttgacctataccactgaggaatcggaaaagatgcaggtgatggaactcgccgggaagctcggcggcgacatcgaagccgccatccagcagttggcccgcgaacgcgaatcttaattcctgacgccatgaaaccgatactttggatatgcgccagtatcctgctgacattggccgccgtgctcggagcgtttcacctcttctacgattacgaataccacaaaatccgtccgttgt

SEQ ID NO: 4907 - DNA, 270 bp, Unknown
  gut microbiota DNA sequence
gggctacatcacctactgctctcagcagggtatcatcagcggctatgctgacggcaccttccgtcccaccggtaccctgagcggcaacgcgttcatgaagatgctgctgggcgccctgggctatgacagttccatcgagggctacaccggccccaactggcaggtcagcgtcatcaagcaggccagcggcatcggtctggacgacggcaacgacgagttcgtgggctcccaggctgtgacccgtcaggaggccgccctgtacgccttcaa

SEQ ID NO: 4908 - DNA, 93327 bp, Unknown
  gut microbiota DNA sequence
attattataaaaaataatagctcgcttcaatacccgtcttaaaggtcatccggcgggagatggtgcttgcagtaatccagaaacagcgcgcaggctttcggcatatacttgtccttgttccaggccagcacgatgtcccagtatttcatgctgtcgctcatgggcacgcagcacacgttgggatccggatgcttgtccagcaccggcttgggcaggatggaaaccgcatggttttttgacaccagctccaccatgaaatcccactgggagctgagcagggcgaatttcggccggaaaccggccgcatggcaggcgtccacgatctgttcgtggagaatgaagtcctgattgaagatggcgaaagagtcatcccggagctgggagaccgtgacggagggctccttcgccagcgggtggctcttgtgaagcagcgccacgttcctctgggtggaaaaatgacagtaagcaaaggaggacaggcgtttggaattgagcgtgacggcgatatccacctcgccgcgctcgatccgctggtcgatgcggtaggcgccgtcctcaatcatcttgatctcaatattgggatactccatggagaaattggggatcaagtcgccgaaaaagcaggcgccgaacagcggagagaggcccagggtgaatttgccggagctgtttttgttggtggtcttcatatcgtccagcgtctcctgatacaggtccaggatctgcttggccttggtccacaggcgcagaccctcgtcggtcaggtgctgctcccggttgaaggcgtaaaagagctgaacacccagctcctcctccagttttttgaccgtgacggacagcgtgggctgcgacaccgccagactctctgctgccttggagtagctgcccgcctgtgccaccgccgtaaaataatacaactgtttgatatccataagaacgcctttctgccctgtgctggtatcggggcccattttgtttcatcatagcccaattttcccaaaatggaaaccccaaaatgcggagccgcagtctttttcggtaacataccggggtggatcatggcacccttccggtttgagaaacggtcccgggcacctacaagggcggccttctatgcttgattggaggcgggcgcatgggccagcgggccgcagcgtccgggtgcttccaaccggccctccaggatttcagctcccttcccggcagctcctgtcgggaaggcggcatccccacagtcttccgccgcttccacccaagaaaagcagccccgcgccggtccggcgcagggctgtcattcagacaggaaacggaacgccgggtccggcggacctcctccctcacatttgaaatccctgcagcagcttggcggtaaacgaccgcgtcagctcccggacagaaatccggacatagccgacgcccgccagctccatagccgtacgctgttgctccgttactgcggtataggggtaaataccgaacatgaacgggaaaaaagcatagaggaatccctgcacgtcctcatccgtcatccgggggaaaaacttctccaggcagtgggtcacggccagcagggagccgccatacgccttcttgaacgccaccagattttcgatccggctgttggcctccatatcatagtgattcacggccatcagcttcagcagccgctcccgccgctccagtgtgcgggccagctcgtcggagaaagcatccacggacagcttccggtgtccgcagcgcagggcgtccagatcctcgatccatgcctcgtactcccgctggaacagagccagaaagatctcctcttttgtctggaaatagttatagatcgacgttctggtgaaagaggtcttctccccgatctccttcagcgtgatctccttgaagctcctggtctcatagagtacggcacaggcattgacaatctccgctttccgcgcgttcgtcagctcttctgatcctctcggcatggcagttccctctcttgtttccatgggtttccggcacgcattccgcgcctatggtcccagtgctgttcaaacacatgataccggtttcccatcgctgtgtcaaatagaacacggggcgtccgtccacagctctcacccagccggatgtgccgggtattgggaacgcctgctcaaggccggtgtcctgcggccccggcgcttcagcaccccgaattcagcacgcttttggtccaggcggccgcatccatgtggttgagcagcttgcccttcttccagttggcctggggacagtgggacttcaggctccgctccgccttctcgatcccgctgccgccggaggtggcgaagggaatcaccgtcttgccggaaaaatcagatctctccaggaacgtgtccacgatacggggctccacataccaccagatggggaagccgacgaacacggtgtcgtactggtccagatccgccgccggtgccgcgatggcggggcggcaggctggatcgttcatctccagcgtgctgcggctcttctggtccatccagttcaggtccgcagcggtatagggctctgccggacaaatctcatacagatccgctccagcggcctttgccatctccttcgccgtgcgggccgtgacgccgctggcggaaaaataggcgatcaatatcttgctcattgcaggttgctcctttcaatgcttacagttcggtcagatcatacgcccgggagccgaagcccaattccgctgcggcctcgatggtgtggatgccgttgcggctgttcacccgctccatgaagtgttccctgcccggatcatcggattgcattaccaggtcaatacaggcctggtcgatggccactgggtccagagaggccaggatgccgatgtccttcatgcagggatcctcggccacggcgcagcagtcgcagtccacggacaggttcttcatcacattgatgaaggcaatcttgccccgaaagtgctctatcacgctggaggcagcatccgccatggcctctggaaagaccacggagctggcgtgctgctcccaggtcttgaagcggtcatcggttttcccggcggagtggatcagcgccttccccgcccgggaggcgcagccgatggccagttgcttcagggcgccgccgtagccgcccatggggtggcccttgaagtgggccagcaccagcatggagtcataatgcaggatgtgtttgcccacgtggttctccttcaggaccttgccattggggatgggccacaccacgtcggggccctcggcgtccatcaggtccacgtcgaagtacttggtccagccatgctcctgcagcagcttccggtgggactccgtatgatcccggacaccgccggccgcatcaccataggcggtattgcactccacgatggtgccgtggacctcctctaccatgggacaccagaattccggacgcaggaaattctggttgcccttctccccggagtggaccttcacggccaccttgccgggcagctccacgcccagggcacgatacagctccactactttttcaggcgtgatctcccttgtgaaatagacattcgctctcatattgcaggtctccttattgacatagtgtcagtatctgcattatagccgtattctgacacgatgtcaatagattttcaacagaaattccgctctccacccaggtgattcccaggatagccttctgtgtgtcatccgtttcttgcatttaaaaaatttttgaataaaatgttaacttttttctgtttgaggacagaaaaattaacctgtgttaatgcaatcttccctgcaattttgtataattgcggcgaaagaaaggaagatgcgatgcatattcaggattgtttggaggagatcctccaccttgaggatacagatctggccgccagtctcgcagatgcctcaaggcttttttcctgcaaaaagaggcagcttgtcgccaagccggacgcctgctctgactggatcccgtttctggtcagcggagtcattcggggttacctgacggatgaaaaagggcgggatatcacggattgcttcctctaccggcctggagaggccgtgctgagtctcagcatcttgacagcttccttcccgatcaactttgaggcggtgacggactgtgtgctcttgtccatccctacccagctccttgcggagcagttccagcagtccgcagagctgcagcagctgtatagttcttacctgctggagaaactgaagctggaacgggagctgaagctccttctcggcatcagctccgccatggagcggtaccagtggtttctccgccgctatcccgagctggcggacgtggtcagcatcaagcacatcgcatcctttttatgtatgtccccagtgtctctgagccgcctgcgcgggcagctgcgcaagcgcggcgaggagcctccggtcaagcagagccgactctcagaaaagagcgggctcttttgatgtccgccgccagaatatgggcggcccagcttgtggaagatgttctcccgcgctccccggcggaacagcgggagcttcttgaatacggccctgcggccaacggaaagaaggcgatccccggaactgagtgacttccccctgcacctgtgtgaaattaggaaagaccaaggagaaagcgaaatgaaaaagagattttttgcactgttcctgaccatggcgctgctgctgcccgccgtgctgctgtccggctgcgcatctgccgacagcggcatcatggacaccgcgaatctgaacgccaccgctgccggcggcgacagcagcctgcctgtcgtgacctggaagatgggttccgtttggggcgctggtaacgtccacttcaccgtggaccagcgcttcgcggagctggtgagccagctgaccgacggccggttcatcattaccaattactccgagggcgaactgtgctccgccagccagctgttcgactttgtcagccagggcaccgtggagtgcggcggcgactggggcggctactggtccggcaaggacacggcctttgagctgctgtccactatcatggacgacttcaccgccctggactactacacctggatctatgaggccggcggaatggactgctataaggagatgtacggccagtacaacatggagtacttcccgctggttaccaacccctccgagtccggcatccgctccgtgtcccccatcacctccatcgaggatatgcagcacatgaagatccgcctgggcggcgtcatggccggcaaggcagcgcagaagctgggtatcaacatcaccaccgtggccgcctccgagctgtatgagtccctgcagcgcggcgtgatcgacggcggcgagttctccggccccaaggccgacgactccctgaagctgcaggaggtcgccccctactggtgcgcccccgcctggtatcagtccgccggtgtcaacggcgtcatggtgaacaaacaggcctgggaaagcctgcctgaggcctatcaggtggcctttgagagcgccgcccgcctctgctgcggtgagcagctctcccgttacatctacaatgatatgaccgtcaccaatcagatgatcgaggatcagggcgtcacggtcaccagcctgtccgacgaggacatgcagcttatccgcgaaacctgcatcgagacctataaggaggagtgcgagatcaaccccaacttcaagatggtctatgagtccatgcaggcctaccgtgagactgccaacaactaccgcgactggaccggcgactacggcttcggcttcaaccgcggcgaatgaacgcctcttcaacaactgatgagagagtttatgaaagaggtgtgaatttctgatgaaagccatcaaagcaatctacaatggcatcgacaagttcaacgacttcctgggccggatcttctccgtcctgtcgctggcaatccttgccgtcatcatgtgcgaggtcatcctgcgccgtattttcaaccggccgcagatctggactcaggacctgatcgtgatgctgttcgcctgctatatcattctgatcagcgcgtacggccttcagaaaaaggccttcgtggcggtggacgtggtctacgccatgttccctgtccgggtccagcacatcctgcatatcgtcacatacgcgatcttcctggtccccttcctgatgggtctcgttcccgccagctggaccttcttcctgaacgcgtataccaccggtgagcagacctactccgtgtgggccgcgcccacctggccggtgaagctctgcctgttcgtggggctggtgctgctcgccatccaggccgtctctgagatcctcaagcatgtggagggactcgtcacggcttccgcgaacggaaaggaggcgcagggatgactgcgattttggaacaactgcaggggctggttgcagccgctgagatccccgccggcacgcttggcgtggcgctgatcctcggcctgttcggcctgatggtcgtgggccttgtcctgggccaggagctggccttcgtgctgggcggcgccggcgtcatcgtcggctggctggcctggggtacccccggcgtcaccatcgccatgacaaagatctacgaccagatgcaaagctactccatggtggccatccctatgttcgtgctgatggccaacttcctgacccactccaaggtggcggacggcctgtttgagtccatccgttacctgctggggcccctgaagggcggactgggtctggccgtgatcctggtttccaccgtgttcgccgccaccaccggcatcgtgggcgcctccgttgtcaccatgggcatgctgtctctccccgtgctgctgcgcagcggctacaaaccctccctggcctgcggcatggtgtgcgccggcggctccctgggcattctgatcccgccctccatcatgctggtctccatgggctcttacgcagaggtctccgtcggcaagatcttcttcgccgccatggtccccggtctgagcctgtccctgggatacatcatctacctgatggtggtctgccacatccatcccgactggggcccggccatgagtcccgaggagctggcggagatgcccctgaagaagcgcatcaccggctccctgatcaacctgatcccgccgctgattctgatcttcggcgtgctgggctccatcttcggcggcatcgccacccccacggaggccgcgggcatcggcgccctgttctccctgatcctggcgatcttctacaagcagttcagctggaagatgctctatgagtctctgatcgacaccgctaaaaccaccgccatggtgttcatcatcctcttcggcgcagctgcctttaccggcgtgttcatgtctctggatggtgaccagatcatcgcggactgggtcctgagcatgggtatcggcaagtggggcgccttcgccatcatgatggtcatcatgttccttctgggcatgttcatcgactggctgggcatcgtcatgatcgtgttccccatcttcttgccgatcatggataccttcggcttcgaccggctgtggctggtggccgtcagcgccacgttgctgcagacctgcttcatgacgccgcccttcggcttcgccctgttctatgtgaagggcatcctgcctccgagcatcaaaatccaggaggtctacaggggcgttataccgttcattatcatcatctgtatcgtgaccgcgctctgcgcggtgttcccgccgctggtcacctggctgcccagcatgctggcaagctgatccccataagcgaagaggtccgaaggacgtacgtccttcggacctcttttctcttttgtccatttccagcggacggccggtctgccggagacgttacgcccgggtctgaaacacccggctgcggcggaccagccgctccacaaaggacgtggccgggtgcgccaggaggcggctgggcgcgtcatactgctggatctgcccggcgtccatcaccagtgtgcgggtccccagtttcagggcttccgcgatgtcgtgggtcacaaacaggacggtgatgccgctctcccggtggatgcgcaggagctcatcctgcagctggccccgggtgatctcgtccaccgcgccgaaaggctcgtccatcagcagaagctccggaccggcggccagcgccctggcgatgcccacccgctggcgctgtccgccggagagggcgcggggataccgccccgccagcgccgggtccagccccacctgcttcagcagggcagcgactttttctctgcactgcttccccttccattcctccatgccggagatggcgggcacataggcaatgttcttctccacggtcatgtggggaaacaggcccacgttctggatggcgtagccgatgcggcggcgcagggccaccgggtcgattcgggccacatcctgcccctggatcaggactcggcccgtgtccggcgacagcaggccgtttaccagcttcagcacggtggtctttccgcagccggaccggccgatgatcgacacaaatgcgcccggctccacatccaaagagaagtcccgcagaacggtctgggtgccgaaggccttggagacgccttcaaagcgaatgatcggctgggtcatatcacgcctccagcaggcccttctggagcaggaagtccctggccgcatcccgctcgtcccggccctccacctccacctggtagttgagcgcggccatctccccgtctgagagaataccgtccatctgcatcagcacctcctccagaccggggaatttttccaatgcgtcccggcggaccaccgtggagcaaaagtagttcacctgcagatgcttgtcatcctccagcgtcaccaggtctgtgtccggattcgccagttgggcgtcggtggtgaaggcgttggtcacgtcgatatctccgccggccagggcctggtatttcaggccgatgtcgatgtccaccacattccggaagtccaggccgtaagtcttgcacagggttggaaagccgtcctcccgctccagatagtccgggtttccgccgaaggtcagctcaccggccgccccggccaggtcgctggtggtctccaggccgtactgctccgccacatcgccccggacggcgacggtgaaggtgttgttgaagccgtacttccccacccaggtcatgtggaacttctcctcgtactcctgctgaagccgggtgaacatctctgcatcatccacaccctcggcctggtggtccagcaccagtacccaaccgctggaggtatactccggatagaggtcgaactctccgctctccatggcgggctggatgttgctggtgccgccgcccacgcccttagtgatctccacgtcatagccggcctgctcaatgagaaggcccagcatctctcccaggatgtactgttccgtcatgggcttggtggcgatccggacagggtcgccagagccggtctcccctccggaggcggcgcctccgccgcagccggtcagggtgcccagcatcaggatggctaggacggccgcctgcagtcgattcaggatgttcataagttcagcttcctctctttttgaaatagcgctccagcgcgcccagcgccagatcgcagacaatggccagcagggcgatcaggatgctgcccgccgccgtcatggccggatcgtaaatggtgattccccggtagacggccacgcccaggccaccggcccccacaaaggaggcaatgccagccacggagatggtcatgaccaccatgttccgcacgcccgccaggatgactccggcggccatgggcagcttcacccgaaacagcgcctgtgtccccgtactgcccatgcccctggctgcctccagaatatccgggtccagtgtggtgagtcccacgtaggtgttgtgcaccatgggcatgatgccgtaaaccgtcagggcaataacggcagtcttgttgccgatcccgctgaaggggatcaggatgcccagcagggagatggcgggaatggtgtacagcacgttgcagacgcccatcaccggcggcgcgatacggggatgctccgcgatccagatgcctgtcaaaagaccgatcatgccggacatggcgatggcggtcagagccaggccgatgtgggcctgcagcaatcccgcgaaccagtctgcccgctgggcgtacaggcccaaaatcccttgcagcagttccatgagccgcttacgggtgcaggcggcgcactgcgtctgccggacaggcctccgcgcagcggccgcactggaggcagtgcgcccagttgatgacatagggcgttccgggagtgatgcacttctggggacaggctgaggcacaggcgccgcagccgatgcatgcatcctggatcacaaagccgttgtactcctccgtgtccccgccgtaggcaaatgtctcccggctgatgggatagtggagcaggtcgaaccactcgccatggcccgcgtagatgtggaaggcgtccaggatatagcggctctcaccggggtagacctcgttcataccgggattctgcgcaaagaccttgtccacccagcttttgtccacgacccgcagcttcccggtgaatttcagggactggcagtctggacacatggctgccagggcgatctctcccgtctccaccagctgcttgtagaagggcttgcctctggaggtgacaatatacatcccatcgtcctctgccagcatcacgttgatgatccgggcctggggatggccctccgcatccaccgtggcggcggctgcgatcttcacccggcggaacaggtccacgtatttttttgctttttcgttcatggagaacaccctttcgttttctgatctgtgcccccatggtagcgcggcaggcggctttcgtaaagtacgcacaatcttgtggcataggcaccaacaggtaacgaatgggcagctgcaaggtatcgcggcattttgagaccgggaaaatttttcccaggatacggcttcacaggggcgtctgccttggcgcttcaggaggctttccccgccgcaggcaaaaagccagccccgcgcctgctgagcgcggggctggctctcctgcaagatcgcatttgatgccggtgtgttcaatgccatccggaggctggtgaagatctccgcgggacctccgccccgctcaatatccggccttgccgctgccgggctggccgtaggacctgaatcgctccatgacctccgccatctgctcatccgtcaggatattgggcgtgccgatgcacatggtccggtactgcagctccgcgacgtactccagattacaggccaggccgtaagcacttttgaggtccctgccgcaggccaccaggccgtggttgcccagcagaacggcgtcgctgccgccgcaggcctctatggcggcctctgccagctccgctgtgccgaagaggcggtacggcgcgcaggggacggtggctgctccggtgtcgccgattgcatagtggacagcccgaaggggctggcccagcacggcaaaggtggtgcagtacatggagtgggtgtgcaccacggccctggcgtggggcttgtggcgatagaacgcggtgtgcagcgcccactcgctggagggcttgcggacgccgtccacaatgttggcctccaggtccgtgatgaccacgtcctccggcgtggtggagaaatagtccatgccggaggggctgatggccatcagtcccttttccgcgttgcagacgctgatattgccgctggttcccgtgctcagacggtcggtgctcattttcctgccgtattcaacaaccagctctctttcctcctgcatcagcataatttgctgcctcctgttttcattttcatttttaatttctgatatagctgcccgtatgattccggttttgcggacacgccggaaaaggcgggcggggcttccgtcccttgcctgatatgcagcagagcacatttctcccggcggagaggacctacccagattccttccacacagccggatcggcctgccgggggtgctcttcggcatccgacccagcgccgcaaccggcataccgtccccctgcgttttccaattcttccgcccggcggccctttgccgtcaatagaacggcttgacgtcagagtcaaaatagtttcccagcagatacggcacatacacgcccttgtccgtcaccacgccggagatcagatgcggcggcactacgtcgaaggaggggtagatggccttcaccccggggagcgtgttggggatcccccgataagagaggacttgggcggggtcccgcatctcgatgacgatgtcgtccttcgtccgcttctcccggtccgggatgccggtgacatagtagggcaccccgaaacacttggccaggatggcgatctggaaagtgccgatcttgttggcgatatggccgtcccaggcgatggagtccgccgctgaggtgaagaggtcgatgccctcccgctccatggcgtaggcgatcatattgtctgtcaggaccgtggtatcgatgcccatctgggcaaagcagctggacgtgagccgggccccctgtaaataaggccgtgtctccgcgcagtaggcccggaaggtcttgttctgccgcctggcggcccggatcactgtgccgatgatggtttcgccgaagcactgggtcaggatggcgccgccattggggatcagattcgccagataatcccccaccacctgcatggtgctgtaccggcggttcagggactccacggtggatgccacgatggcctccaccggatcccggcccgcagccagggtctccttcgccacatcggcacagcggcaggtgatctggccgtaccggttggcggtggtgggccgggcgtgtgccaggtcataggccgcctgccgcaggaactcctcctgctcccgtgcgcccttgtcccggacctgccaggcagccagggccatgcccatgcccacggcggtataggggcccgcgctctgggtcaccatgtccgcgatggcctgtaccacctcgtggtagtccgtgcacaccacgaaccggacctctgtgggatagacccggcggtccagaatgcggacttttcccttctcaaaccacgccacatgctcatattgcagcaggaacggcatatcccggtccatacgttccatcttgccgcctcctttacgccagtatcccgcggaaagctctggtcacagcggagccattcaggccgctctcccgctcccggattaggaagatacccattttaatcagggcccgctccatgggaatccggatgtccgggtctgtgacggaggtgacctccatgaccttggagtcgcccaccacccgtcggatgatctccgtgcccgcatagccgtaggagtcggccatgacgccgtccagatacgcgcggcagaacccctccgcccggtacagggggaaggtcaccagctcgtcgtacctggcggtcagcttctccgccgtcaggtcgcacacgccgcggatggtatcctccagcgcccgggcagccgccgtgtcctgcggcgcggtaaaacagcggttggcccaggagaagaacaggttcccgatgacgttgccgatatcatatcccatgggaccgtaaaaggcgaattccggatcaatgacctttacgccctgttcgttggcaaagatggagccggtgtggagatccccgtggagcagcgcctgggcgttgttcatgaagccgtttcggagcctgcccacctccctgtgaagggcatcattttcatagagaaaggtcctgacaaagtcctcgttcccgggggtaacgatgttgcggcccttgtagttccagtagggttccgtcaggaccagatcctccgtgatgtcgcacagctccggattggtgaagaactgcacccggcgctttttctcccggcggtccagcaccagatccgtggtgggcagcagggactgggccaggaaggtggagatgttctccgccagatggccgtatatcctgcccgccagcagctccttgcggaggttccgataggcggagatatcctccatggacagagccgccatggtctcgtcatagtggtagacctccgggatgtaatccggcgccagccgggactccagctgcagggcctgcgcctcgatcctgctccgatagatgtccagcggccgcccggaggagcgcagccgcttgtccgcctgcttgacgatgaccgagcggccatcccgcagagagcggacccggaagacgtagttgatgttgccgtcgccgatctccgtacaggtggtctcctcatccgggtcgaaccggtgaagaacctctgccgcatagcgcttgacgtcatccggcttcatgaggaaaaattcgctgaatgcagacatggatcaaaggactcccttctcattgcggaccgaaacggacaggcgcggcttttaccctctcttttcaacccgggcaggatttcccgcgtgtttgaaaatgatgggtagaccggggcagcgccgttttgcagcggccagagcctgcccggcggccagggatgatcggcccttccccgattgaccatagatacttgtttctcttgccccggcctgccgggatattccccaggcgttctgccggacaggccaaggaagcgtggcatctccctgtccgtgggcgatcaaccaaatcataccataagacagggccattctcaacaatatgtccggtataaccgcttaactttcaggatttcaaccgcctcaatcatgcacacaagcagcttgcggccgtcccgccccggctgtccggtccgggatgcgatgccgcgccattcccaggcgaggattctgctgacggggccgcctgcttccctccggtgccaacgcacgctccggcagcccggttccgcctgtcatcattctgccggaactcctccggcggaagtccgccaggacagagattgccaggagaatccccggccgttgtccgtccatgcggcgtggcgcacagccatccgcgaaacgcgaatcgccgcatgaacggcagaaaaggcatggcagcttgccatgccttttccggcaccgggtccggggaaccccaaaagcggcatacggaccgcatctccattctccggcagagagcgtgccatatcgtgctttgtctcctccgcacacggccgcaggtcagtgtttgcgtcctgccgcagtgcctttccgccgccagcggatgagccagcaaaagccgatcaacagcccggcaaagccgacggccagaataacgaccgccagaggaccggcccgctccgtcaggcagaaggtgaccgtcccggtctggctctccagcagcagatactggccgtccaaccgggcatccgtcttggtccagccatcctcactcagcacccagaggtcgtaccgcttgccggggtccggcaggcggcagtggaccgtgtaggccgcctgttccaggtccgggtcctccaccgtcacggtataggcggtgcccgcatactccgcgccgccgtccgtccaggccacctcttccgtggtgtgggagacctgtgcccggctgctgaagctgccgtccaccaggatctccggcagctccccgccatccgtcagggcggaggtgtagggggtatactccgcctccagggtctggctggcggtgaggcaggtgtagtccagatccggccaggaggcagagcagccctttttcgccggaatctccggcagggcgtcaatcccctctccgtactggaaggggacgacctctaccaccacgccgtccgccacaaaggtcagctccagccgggagaaggattccggtacgccgggcgtggtgcacagggtgtcaaaatccaccggttcagcatggccggcgtagctgatcccatccagagcccccagtcgttcactggtaaaggtgttgtcggatacggcggcatcggcgtccacatctcccgccacggcgcccagataggcggagccctcttcgatttccaccagcgtatggcagttttccagggtggctcccagtccggccacgccgccgatataatcgccgccggagagatgacacttgacccagctgtcccggatggtcccccaggaggcgccggcgataccgcctacataaccgccgtccgtgctggcgatgtccccatagttctcgcaggcgctcacccgccccaggtccatgagacccaccacgccgccggcatagtcccgttttccggtgacgccgccccggttcatgcaggcgcggaccacggccttcgtctgatagcggaagtccagggagcggtctccctcttcgatcaggtcatcctcggggtcgaagtcgtattcaatggccatggaccctacgatgccggccacgttgatgtctccctccacggtccctgtgttccgggaattggcgacacatccggtatccggtccactggtctcctggtccgagatgtcctcgaaacggtccgacaattcctctccagtttgctccagcagatcccgcagcagatccgtgataacccggaactggtctccgatggcttccagatcgtccaatagtgtatccgtggccgcggacatggtctcccgcagggcgtcgccgtcctccagcagaccggcaaagacgtcccccagggcgtccccctgctcccgaatggcactgtcaatgggacggatggtgatggtgggctcctcggccagctcccaaaagacgtcggccaggtcctcgccgagacgggatgcccgggaagccactttctccaacgtcctgcccgggtcccgaaacgcttccgccaggtctccgccctgtgccagaagctttgccagcagcgctgccgcgtcggtggcgtgtccggcggcggcccgcagggcctgagccgcctctcccagtgcctgccatgcggccgccgcgtccttcccggcctcttccagctcgccgctgtccatgtgggccgcgacggcgttcgccgcctgttccagcgcatcccccgccctggccagtgtatccgccagggcttgagccgcctctcccagcgccgcttcgtcgccgccgttccacagaatgcgggcgatctctgccagcgtgtcggacatgtccccgagggcggctgccaggtccccggcggcagcccgaacctcttccatggcctcctggctctggagggcgctgcccagggccgcgcccagatgctccagcgccgacagcaggcgggcaacggcctcttttccactggaggccgcccggcggagggactggactgccgcccgcagctcctgttccgcctgatctcccagccctgatgccgcgccgacttcatccagcgcattcccaagctcgtcggccaggtcctccaccaggtccatcacatcgacggcgtcatccaggatcggcgccagctggtcgatgagccaggagatccgggccgtgaggctgttgagctcctcgatattctcattggtccagtccgcggcggagtccgccagatcgcccactgcctcccgggcctcgtccgtccgggcggagatggcgtccatccggtccgacagagcgtcggaagtgccccgcagatcctgctgcgtctggtccagcagatcccccagaccgtccagggcatccagcaactcccccatctgcccctggtcatagagcagccgcacttccggctccagctgaccggcgacgccgcccacgtccttccggcccagaatgtcgccggagttggcacagccgtccagatatccggactgccgccccacgatgccgccgatgttgtagcccacgtggtcatagcccacgctgccggaattggtgcagctctggatgataccagaggaatacccggcgacgccgccgatatcggtgcataccggcacgttttccgccgcgttcagctgttcccggttgatggcgtccagatccagctccgcatccacctccgtggtgttgatgctgccgctgttccggcactggataacggcgccgtagttctgcccggcgatgcccccggcataatgctctcccgtgacggctccggagaaagtgcagttgacgatctgtcccgagctctcgttgatccccacaagaccgcctatgctgtccgctccccgcaccgtcccgtggaaggtgcagccggcaagaaggccccggttgctgccggcaatgccgcccagggtattcttccggtcagagggatcgacccgtccctccaccgacagatcccgcactacgccggagggctgtatgtaccggaacagtccccggacattgccgctgcccgtgatggacagaccggaaatggtgtggccctgcccctcaaaggtccccccaaaggtggggatgggggtgaagtccgtgccggacaggtcgatatccgcctgcaggcggacaattcttccctgggaccagctgtccagggtgcagttctctgccagttggaccaggtcctccgccgtgcggacgaaaaccgtgtccccgccttcggcggccagggcagcaggcgccgccagggacgccagcagcaccgccgccagaaggaagctcaggcatttatgaatcttccgtctcatgggcgggctcctcctctttctgataagctcccgtctccagcattccggagacgtccccgtaaatcacgccctggatctgggcatccactacgccggaaatacggccccgaacccggccgttgacatagacggtgccatgggcactcctggcaacctccggcaccttgagatcgaaccgggtccgctccacgatcccgtcgcccaggaacaggatctggggcaggatgaacatgaccaggaacatggagatcagcgtcccccggcacaggcactcgccgatgcccacgatggcaggctctgtggtgatttgggcgatgaggaatccggcagaggacaggatactccccgaggtcagtaccgtggggaaggacagattcagcgcctggacgatggcgtcccgtcgggacatctccgccttcagctcattgtaccaggaggagatcacgatggcgtagtcgatattggcgcccatctggatggctgtcacgatcagatagctcaggaagaaaatgggcttctgggccatgccggggaaggaaaaattgatccagatgctgccctggatcaccaaaatcagcaggatcggcagtcccacagactggaaggtgaacagcagcacgatgatgacgaacaccaccgacaggacactgatcatgatgttatcccgggcaaaggagacggacaggtcatagtcgctggtggaatcccccaccagatagacgctgtccgcgtcgtagtaccgctccgcctcccggtggatggtctggaggaaagcaaaggtctccgccccctcctccggcaggttcagattgatgagcatacgggtgtagttttcccccagcatctggacccgggcgttgtcgagctgttcatagagatcgtccaggtccgcctgctgcccctcgtccagatccacatagccctcctccgccttgtcgtaggcgaagaaaaacatatccatcagagggaccgcatagtcgtccagaccgcccacgatccggccgtaggcctcctcctccgccgcgtaggcagtgtacagcaggcagacgagctcgtagtccaggtctgtcatttcggaaaactgccggggcgtcagggcatcggtgagggtgtgtccgtccatcacctcgatattggagaggcccatggcgtagtccacctgatcgcaggcctccagccgttccagcagggctttctcactgtcatagtctccccggggcaccagcagagcgatcacgttctgggtgccgaaggtgtcgctgacccgctgctccgccacctgggactcgttctgccgcgcagtctcgatctgggtatagccgtacacataggggcaccggttggagaggaaaaagccccccaccagggccacaatgaacagcggcactcccacatggcgcagcttcaggacaaatccgccccagcggtcgatcctggggatgaagctgcggtggcgggtcctctccatcgccttggaaaagagcatcagcagccccggcatcagggtgaacaccgacagcatactgaacagaatggacttgatcagcacgatgcccatgtcgaagccgatctgaaactgcatgaacatcatggccgccaggccggagatggtggtgaggctgctggcggagatggagggaatggcggcgctgaccgccgcaatgcacgcctcccggtctccggcgtgctcccgctcctccaggaagcggtgcagcatgatgatggcatagtcgatggccagagccagctggagcaccaccgtcacagagttggagacaaaggagatctctccgaagatgaagttcgtgcccagattcagcagggccgccgcgataaaggtcagcagcagcaccggaatctccgcataggagcgggaagtcagcagcagcaccagcacgatgataaccgccgctaccgccaggatgatccccatctcatcggccagggagtccgcctgggaatcccccacagagctgtctatataaaagtcatagggggccagcagctcccggatggcctccatggcggccagggcggattcgtcatcctcctcccccgcaaaggtcacggagatcagcgcgtccgcgcccttgaaatacgatgcgatgtcctccggcgtctcggcctccccgtcctcctctgcgccgatgctgtctcccagggacgcggaggagacgccctcgatctccccgatctgttccgccagatcctccgcgatgccccgcgtcacgtgggacaccatcacccgggcggtaccgaaggtggtgaattcctcctccatcagggtcagcccctggcgggtctctgtggagtccggcaggtactccgtgatgtcgttgcagacgctgacccagttccgggagaacaggcagaacagcagcgcacacgcgtacaggaaaaagatcagcttccgcttatccacgatcaccgtggccagccgcacaaaaaaggatggtttttcagtgtctttgcgcacagtttcagctccttccggcaatcccggtcccatcacggctcaggggagatccggctcccctcccatcgcatccggcagacgtccgccgtggtcactccagtaaggcgttccccatggagctccagcgccgtctcgcagaaaagggtgctgaccgccgtccggatagcatgagagaggcacagatgcccatcctccgaccgtacgccatggacggggttgcggcgtcccatcagttccagggatcctgtgacggcagaaccctcgtattggaggtccaggcgaccctccctggggcccatctggctgtacagcgtgacgtgatactcttcccgcatcttcctccgctcctttccgcatttcctccagcatactggaaacaggcccggagatgcaaggtgcagaccttgggcagatgtcagaaatctgacacttgcccccattctgcatagatgcactcctctggaaaatgtgttatactggactgcaatggactggagtctgccggtccatggaggtcgatatgaaaaaacggacatacgaggccagcaatgcggccaagcggcagatctgcactgtactcaaggagctgatgacccagaaacccctgaacaggatcaccgtggcggagatcatgcggggctgcggcatggcgcgccagcatttttactaccattttgacgatgtctacgacgcggtgcgctggatctttgaggaggaggcggtggcgctgctccgggaacacgagggcgtcatgctgtggcaggacggcctgctccagcttttccaatacctgcaggagaaccgtgtgttctgcctctgcgcccttcgctccatgggccgggaccacctgaagcggttcttccagacggatatccgcgccatcatccggagcacgatccgtctgattgccgcggagctggggtatgaggccggggagcaggagctcaccatgctgactcagttctatgtgggcgcgctggtaagtattgtggaggactggctcctgggcgagatccagggcacgccggaggagctgatccgctttgtagaccaagtgctgcgggaccatgtgcgtggcgccgggctccggctgtcccaggcaggtcccgggacggcgcctcttctggaaccggaccactgtgccggacctgtttccaaataaaaaggctccgggttcccagagaaacccggagcctttttccgctgttcaactctctgtgggcaggtcactcctgcgcatcgtgaagccagagatatcgctcgtcctcgttgcgggtggtctgcagccaggggttgccgtccagatggcggatcatccagcaggtatacatctggaagcccggcgccactgcctggggatgcaggcacccgccggggatggcggagaagctgttgtccacgctcttgaatacctggtcccccacaaaactggcgccgaagccctccggccggtcgaacttgaagtaatagcactccggctgggggtgccggtggggcagatagccggaccagttcccccggtcgttcagcacctcgcccagcaccatattggaccagggggcgatatccttgtcaaagatggtgtttacccggcgcttggccacattgccgaacttgcccacgcaggagtagacccagggggcgtcctccggccggtacagcctgccggagaacgctgtgtcattcttcgtgcactggaccaggatctccgcgtctgtctgcgcctccacggtgatctcctccccggcgcaggcatggagggcataggggccgtcagtgaacacgtctctgcggctgaccgtctccgtccggccctcccagccgaaggtcacggttccggacagaagcagcaccgcggtctcctcgccccgtcggcaaaagcctctcttccggccgggttccatccggtagacccggatgtccatcagcatatcgctgtatgcgttgtcgtaggtacagaggatttcctcgccctccgcgtcaaactccggatagccgaatacgtttttcatgtgtaattcctcccaaattccatcatccggcgggcccgttcaggcgcccgcgtttgctccctgccgctccagcaggcggcagagcatggcggccagctctccccgggtggctgtccggtccccctgatagcttccccggaccatgcccagcgcctgggcgatggccgcatagcccaggtctgcctccgggatggcggcagcgtcgctgtatgtgcaggtgtagatgccctgaagccgggcggctggaccataacctgcgcagtccagcagacatttcactgcctgcccgcgggtgacggccctgccttcatcccgggttccccggggcagaatacccatccggtaggccacggaatagacggtgtcccgcgtgctctcatccgctgtctccgggtcgatacagtatccctccaggctggccaacagggccaccagatcccactgggtcagctgtttgtccggccggaagcggcccccgtcatagcccacgccatagcgggccagcttctccacatcggctttcaccccggagcccgacaggtccgtataggtgatggcggtatccccggactccggcgccgccggtttgccggtggcggcgtcaatgcccagataccgctcctcccgctccagagcgtaggtcagccgcagctcgtagaagtgggtaagccccagctccatcagccgggcttccgtctcgtcgccgctctccagagggcggggcaccagacggtaggccaggaccgtgtcataggtccccgcccaggcggccagggccgccgtctcacccacgataccggcggagccggcgaacgtcacatcctcgtcgtactgataatccagccggtacacggacccgtctccgctgtcgatggccacggtatagcggttctccgggaagggaatgccgcctacctgctggacgtatgtgaaggtgtagtacggacgccggtcctccgtgttgtctcggccgtcatagagtgtcagggcactccaccgcccgccgcagagggcggacaggaacgtctccgctttgacctgcgcctccgcctgggtcagggccggtgtctccccctcctccattccgggtgcgtaggagaatacctcctggaccgcgccggtgcgggcatccactgtgatggtgcgggaacggctgtcctcctctccgggccgcacataggacaggacgcagaggacctgatcctccttcccctcctgttccgccagacggtaggcggcggaggacagggcgtactccgtcaggccgtagaccggctctgcccgcaggctctggtccaggaacgcggaggaccggacgccctccatctgggcgatgcccgcctgctccgccgggctgaggccgctgtcctcgctctccgcagccgcggtgttgtcggcactgcctccggcgccccagccgcccatctggtcctccagctccgtcagattcaaaagcgctcctgtggcggcatctacataaaaggtgtccgtatccaccggcagataccggagcacggccgacgtgccgcccgcctcccgcacgtattccagcttcagctccagggtatccgtcaggagtttggcagcccggtcgcggcgcaccgcagcggcggcagaggggacgtctcccaggaaggtgtcctccgctgtggtccggtggaaagaccggacccggttgtccgccgcatccacagtgatggaataggtcagcggcgagggcaggccgttcagcaggatcactccggagtagcggtagctgtccccgcccagaatatccatgccgcggggctcttccagcttcacgctctccccctcccgcaggaccttgtccaaaaagtccccggcggcccgggcggccgcggcctcatccccctggggaaagaccgggaaatccccgctgttggaggcggtgtacggcagacccagatcgtagctgattacggtcccgtcatccagagcggaaatggacagttcctcctccaactcggtcgaccagtacagatcccaggcaccggtcagaccatcctcataccagctgccctgaaattcgtcataggcatccgtgtccagatccagggccgcctttacggcctgggtcaccctggccagggcctcgtctgtggtctcctctgcggcggacgccggcagcatcagccccagagccgtcaccatagccagcgtcaaagaaaacagcttcttcatcattcgtccctccattgtcggcagtttccggaatggtgattccattctatcccaacagacggaaaaattccagagatgctgcggattctccttatttttttaagttccttgaaaggcagagcggcgggccgcacggagaatctccgcgcggcccgccgtttgacatgggctgcgtcctggccgggcgattcagccggacctgcctgcatctgtcctggggccctctctgtcacgccatggcgcggtggaggaaggtcatgatctgcgcccgagtgcaggtcgtgccgggctcaaaggtagtggaagtggtgccctgggtcacaccgctctccacggcccaggccaccgcgtccgcatagtacgcaccttccgccacgtcccggaagtcatgcgtcccggatgctgcgggagagccctcggcctgccacagcagcaccgccgcctgagcgcgggtgcaaacccggtccggggcaaaggcagtcttggtgacgccggaggtgatgccctgctccacagcccacagaactgccttataatagtagctgtcggggctcacatccgtgaagggattctccttttcggacggctcaggagagccgtttgcccgccacaggaaggtcacaagctgggcccgtgtgcatccgcggcccggggcgaaggccgttccggtgacaccggaggcgaccccctgctccacagcccaccggaccgcatcgtaatagtacgcgccgctgtccacatccgtgaagggcagctccgtctgctccccggaacggacgaaggacgcggacacggtcaccccgccgccgggcatgacgaaggtatagcgcccctcccccgcgttctggaccgggactgcgccgtcctggctgtcggtgacagtcagcttcttcagctcgtatccgtcatccggcaccgcggtgatggtcaccgtctcgccctcgtcggcccgaccggcactcacctccagggagccgccggtgacccggtccacagtaatgagatgctcgccgtcctcggacttctcagtccaccgggcgtacagggttgtgtttgcgtcgaagacggtatcggcagtaactgcagtgccgccgtcggcggcggtgtaccagcccgcgaaggcgtagccgctccgctccggcgtgggaagcgtccccacggctgcgccgctggtggctgccatggcggccgcgccggcggcgccctcgccgagctccagggtcaggatgatcgtccggtccgggtcaatgaaatcctccagctctgcagtggcaaagctgccgccggtgacagaaatgctgccggagccgctgttggccacctgaccggtcacagtgccgccggagatggtgatctccgccgcggtgtcgttgactacgctgcccacggtgccgccgttgatggcgatggttccgccagtggagccgccctgcgtcttgatattctgatagctgccgctctccacggtcaggctgccggaggcatcctgaccctcaaagacaatggaatccccctcggcaatagcagcgttcgcaaaggtgacgcggctgccccggtcgatgttgacgccccactggtttccggaggtggtcaggccgtccacggacagctccgtgccattgaccaccagggcgtaccagcggcagttggagatctccacgttctccagggtcaccattccggcgtggtagatgttcaggccgtgcttggcggcactgccgccgtcaaaggtcacatcccgcagcgtcacctcggcgccatcctgaagattgaggaggctggggccggtgccattgtcgccggagacagaaaatgtgcccgccttcgcccggatggtatggccgctgccgtccagagtcaagtccttggacagcgtcagcgctccctggccgttgaccaggccggaggcgtccagctccacgtctcggagcagccggatggtggcgccctcttccgcctgggccaccgcctccgccagggtggcatactgggtgccgtcgatatccgcggtgttttccgtttggacgccgtcctccccggccccctccgtcatggtctggacctgcccggcggcagacgcaccaaacatcccctccgccgcctgggcattggccggcagcatggaggccagcaggctcagagtcagcagtccggtaacaagttctcgcttcatgtgtgtagattcctcccgattggtttgtaggtatcggcgctttgaagcgggcactctccgtccggtccgaaaaggggccttcccagatgtagaaattctgccaaatcattgcggattctgtcaaaaagccaagcaggcagcggaaaatccggcctcaaaagcacggttcacatcctaacacagcggggcagagccacgcaagggctttccggattttccagatgactggaaatacctggcacatcagccgcatctattgggccgcagtgcatccggcaaaatatgctggaacgatccgggcgccgcgccagacattcccggcagcgcagagccggctccccagcttggagggctccggtgagccggcgggcggcaaggcatgtgaaagcccccggcggaccggaacgtgtccggtccgccgggggcctgctctgcctgcgaaagaagccgccgatcagtcagtttccggcggcctgggtaccggcctgctcccggcggaagcggaccatgccggtgcggtccagagccaccatcaggacgggaatgaacaccagctggaggatgatgccgggaatggcgttcaccagcgcctcggtcaggaagatctgccaggtgaaaggcacgctggccacgccggtcatcaccacccgcaccgcagcccagacgatccggccgcccaccatagcagccagcagagcacggtacagggccaccacacactgccagcgggaccgattgtacaaaaagcccgcgatgccaccgtaagccgccagctcaaaggccatggccacagcggccaccagcggcggcattccgaagagcgccatccgcatcagcggggccacgaatcccaccaccgcgccataccgccagccgcagatcaggccgcagaggaacacgggcaggtgcatgggcagcagcatcccgccgatctgggggatctgtccggtgaggaagggcagtaccagcgccagggccaggaacatggccgccaggaccaggttatggacatttgttttgaaattgctgtgtttcatggggttaaactccttctcaaaaagtcttttcgcgccgccttctggcgccgcaccagccttctggctttttttacggagtctgcagggctgtgaataccggccttctggccgggcgcttttcagggctttcccctcatcaggggaaaaattcggtggtgtcgatcaccagctggcagcccttctccgggccgcattggcggatataccgctcctccaggggcatccaccggctctcataggcggcgaagtgggcgccctcccgccgctccaggcggcggcgctgctcctccggcgcacaggtgagaaacatccgcagatcatagcgggccgacagcagcgggtgctgggagtagcttccctccaccacagtgaggggccgggccggaagcgttgtcccctccctcagcgtgccgctccggcagtcatacgggcggcagcggatctgcgctccggcccctgccggcaccagtacctcctgcaggaagcgggccaggtccatatttccagccgggatctgctcccagttctctgcccggcggtccggtgggagataatagtcgtccatgtggaccacgttgcagggaaggagccgccccatcaggtctcccaggccgctcttgccgctgccgcagcggccgtcaatggccacgacggctggtctgccgctccgcgccagccgggccgccgccagcagtgccgggaagtacccgccgtatgctgtccgcaggacccggtagtgggggtcatacgcctcccggtaggccggcgagtggtggacgggcggacagccctgacggcggtacaccgccagccagtccgccataccgggcaggggcagcgcctccgccgcggtcaggcattcctccaggtccgccgccgtcccgtggtgctccgccgccgtcagaagcagcagatccgccaggagcggcgcagccagcgtccaatcccccgtccccgacaaatgaacgcggcacaaaccgttcccgatccgctccggcggccgggcctcccggtctgcgggaagggcgctgcactcccccagcagctaccggaggacatctccccgttcccccgctgcatgggctggaccgaacgtactctgataggccagcttggcgcagtcctggggctccatcagcggatagcgggccaggtgctcccgcaggaccgtttgaaattcctcatgcatctcttcagcccccggcagccgtggtattgcgcatcggtcatccgacacgtttataggatagcacctggagtacactcaaagtcaagagcaagcgtgaaaaaatctgaaattttttcggatggtatccgcacgcggagcagagtgggagtttgcagctggttttgcgcacccgcctttcatcgcgcatgccgattcgggatatgcccgttcaagtgcggaatccatgctgtgcagcccgcgttccgcatccgttccctgtctgatgccatgccggggcgcccgtcccgcagtaccctctgggctgaaaaagcctgtgttcagaaagaacacaggcttttctgcactccggcaaagcaaggcagtacgtcaagcggtcaccgcctccacaggaacccggagtacaaagggctgctccgggtccgtgcagtcgttccccagcagctcccggagcccgtcgtcataggcccgcccccgggccagattgacggctgccgccaccgccgcccgggcctggtcctccgggttctggtccaccgtcatatagagcttgccgctctccagggcggcggccccctccgccgtgtggtccacgctgacgatgggcgccgcgcccggatcccggccggcggcctccagcgcctcgatgactcccagggccatttcatcgttgtcgcagatgacgcagtcaaagtccacgccctgctccagcagggccgccatggcttggcgggcccgctcccggctgaagccgcagacctggtaatccgccgcggcgatggggcagaagccgtcgtccagcaggctctgcacggcggtgccggagcgggcatctgtattctcctggccgggcatcccctggaacagcagatagcggatatccgtcccgtggtccgtctcccagaaatactccgccagggcgtgcccctggagggcgccgctcccggcctcgtccatgcccacaaacaccatccgctcgttcaggatcgccgtccccggcgcccggttcagcagcacgacccctgcgtcgcccacgatgtctgccaccttttcggagtcctccccgtctgcaaggttcaccagcagggtctccacgccttctgccagggcctcgtggacctggcgcagctgggtctccgggtcgttgcccgcgttgtaataccgcaccgcgtagccctgggcggcggcctccgcctcgatgtccgccttcagctccgacaaaaacgtatcctccctagacagcagcaggcccagagccctcgtctccctggtccgggactccacagccccggcggcgtccgcgccgcagccggtacccagcactgccacggcggccagcagggccacaactgcgccgatcttcttcctccatgtccgtttcatctggatctcctccctattcatccgtcttctgcttaggatgctggacaaagtatacaaatatacctgacggaatgaaatagacaaacctgcggggggaacggcacggttccctccgcaggtcttttttccggacttttctgcggtctcacggcccgatccggaatttccggtactccgtgggcgtgaggccgacgtattttgaaaagatgcgtgagaagtagctggcgtccgcgaatcccaccgcctcggagatggtctggacgctgtcctgcgcgttcaccagccgcatctgagcctccccgatccggcggcgcaggacatactgcttgaggctgtatcccgtcttctgccggaagatatgggacagatgatagggactcagataaaactggcgggccagctgctcgatggagaggtcctccgcataatggcggtcgatgtatctggccacacggccgaaggtggagtcctcccgggtgacgagatcctccttccgccccgccgccatccgccggaccagctccagcgacgccagcatcaggtgctggcacagctcctggaagcccggctcccgctccgctgcataccggtccatcaggcagaagagctccttcaggtccgcaaactgctccggctggtgaaacagggggcagcggtccggggaaagcaggctgtatggcggcaggtccgccagcgccaggttcccgatggccacgcacagggtctgatacggctggtctgcctgggggaattcgtcgtggagggcgccgccgctgcacagcaccacatctccggctgccacctcgtaccggcggagatcgacggtgtaccggccgctgcccttcaggatcagcagcacctccgccaggcgttcgtggcagtgcatcagtgtggcgtgctctccctccgcccagtcatagtggcagatgtacgccgcatagggccggtcctgaggcaggtgcgccgcctcctgcggtgtgaacaccacccgctgccgattcagttccgcctctctcatgccgccgtctcctccccgctggaaagtgcggagcatccggccatccgccgctccccgccgcggggccgcaggaaagtccggtcccggcccttatgataccgttcccagcgggccatgtcaagggcggctcccgctcactccagcgccgccttcaggcgctcccacagctccacggccttgaatttcagctggtagccgccatcctcctccgtcatcaggctgacctggtcttccgtcaggccagcggccagggccgtctccggcacgtccgcggaggcagcggtgcacaggggtggaaacaccacacaccaccagttctgtccggcgccctccccaatcagaatccgcagggccagatactccccggctggaagagagaagccgtcatattccttggtgggaaaggccgtgtcctccagctccgccgtcacggcgtagtcatagccgttggcccgtaccgtctcctcggcgatggcctccagttccggcaggctctcccgcaggcgaatctctgcctccgcccggtccgccgactgctccagaatctccgtggctcgctccagcaccgcatcccggaccaggagcttcagtgcctggtcctcctccgtatcagagttggccagcacatggagccgcaccaccttgtccgccaggtcccgctgggtgttcagcgcccagacgccggtcatcagaaacgccgccgcacccagcagcagggccagttccacgatccgcagagtctttcgctcacgctttgcagctgttttcatatccgttttccgtcctttgctatgtagccccatggggcccgtttcccccatcatggacggaaattccggattttattccatcttttccaatatttttaccggcgcggccagatacgtctgccggtaacgtccctccagcgcctcctttgcccggaccgccttctgccggtcatcaaacaggccgaacaccgtggggccggaaccgctcatggccgcgcccagggcaccgtgccgcagcagggcttccttgatggagcggatctcttccccttcctcctccgtcagcacccgctcaaaaacatttccaaggcaggcggccgcggcggccagatcgccccgggccaacgccgctgccatggccgccgtatccggccgggggccaaggtccgccccgtccagccgggcaaacagctccggtgtgggcaggccgaagtccggcttgcacagtacgatggcacagtccggcagaggcggcaggtccgtcaggagctcaccccgtccctctgcaagacatgtgccgccccggacgcagaagggcacatcgctgcccactgccagcccgatctcctccagcgcctgccgcggcagatccggggcgtacagggtccgcaggcaccgcagcaccgccgccacatccgcactgccgcccccaagccccgcataagccgggacccgcttggcaaggcgtacctccagccccggcaccgggcggcccagcctgtggaaaaaggcatccgccgcccgctgctccaaagtgaccttccccgccggaagggagatgccctctgtcagcaaggaaaagccgcccgccgcctctgccaccgtcacggtgtcccccagggacacggcctgcatcaccatccgcatgtcgtgatagccgtctgtacgccgccccagaatatccagagtcaggttgatcttggccggggcctccagcgtcaaagtcttcatcgcaccacctcccgcgggcctccgcccgctgtctgggtccagtatagcacatccctccccaagtagaaacaatgaatcgcccgcaaccggacggttgcggaaagttggtggacgcaaccggaaaaacctgctatgctgagagcagcggagcgggaggcggtgcgtcatggacatgagcaaggcgattcgggaaggccgggatcgcttgggcatgagccaggaggctctggcggagcggctgggcgtgagccggcaggcggtatccaagtgggagatgggaacctctgttccctctccggaaaatcggcgggcgctctcggagattttggggacagaccttcaagtggaaagagaaacagcgccgcccgtccctctgcggcggtggaagcggctgacgctggcggcagggctcctctgcctggcgctgctggcggcgctgggctggatcctttacagcgcgcatcaggacggctggccgccgccggaggatccgcagattacaggcgtctatttctatgatgcggccgggcaggagatcgccaaaagcgacttcggctggtatctgtttccgccagacagcaccgtgaacgtggcggtcacctttcaggacggccgggagcacacggtggatcaggtagttttgtttctgtatcccaccggcaccggagtggccgaggagcggcagcagatcggcgtccggcggatccggaacggccggaccttcgccctgttccgctgggagctccccaccagcctttattctcatttggaagtgcagctggagtgcaaggatgggcagacagtctccgcctctcactggaacgtgatcgaccgggattctgccttttgaacgaatgcccggcgtcatgtaaaatttcacaaatcttctttcttttttaacagaatgcggtgcatttatacgcagcacagagggggtggaatgaattgtttgggcaatcccccccaacagcaccagaaaagagcatcgtatgctggacatcctgtttttgagcagaagctcattgctgtacgcagccctgctcctgccggccatcacaatcctgtccctcgccctgctctgtttcgcgtatgaagctacccagaagttccggaggcggaggggcctgttttaaaaagacgctctccccaaaagccgcggcggtcccgcggcttttgccaggtttcagaagaaacagcgccgcaggcaaaagcctgcggcgctgtctgtatctgtggaaatgacttcttacttgatcttccgggcctccacatagtaccgcttatcctgggcgtggcccatggagaaggtcttgcggggcaggacgccgtcggccatgacggtcttgaacagctgttccttgcccatagccgggagcttgaagccgatgttgccggacttgctgcccaactcgtccgtcacttcgtcgccatggatgtagtccacttcgccgccgtgctccttgagataggcgtccaggaaggtctggagcgtgcccaccgccagctgcatcctgggattgggcaccgtgatggtaccggtatgccctgcataggtgtaggcgatggtgtggccctcgccctccccttcgtgggcgccgggataggcggccttcatcgcctccagcacctgttcgggctccacgccgaagaggacacggtggatcggctcgaactggagggcgtcatcgtgattattcaccacttccaccagagcatagcgggcgggcaaatcggcccactggtcctccggcgtgaccttcttcaggttctcatagcactgcttggctgttgccagagagtggttgccgtcgcccaccgcgaacagcagaggtgccgcgtccttcaggccgtactttttctccatggcctccggcgtgcacatagccgccagggcgtccgccacggcgtccatctgggcgtccgtcagcttccagcccttcaggtgcccgccgccctgctgcaggtcaaagtcatacagctgctccatctccccgctggcggcggtcaggggctcaataaccgtgcggtccgggtcgtcgatcagcagcatcacgtggggcagctcaacgggggcgtcctgccgtacccgtacccggggtgggatgcgggagagcaccgtcccctccgtggcccggatcagggcgccggagccgggggtgaagtcatactggtccaaatccaccatgccgatgaggccgtggcgcaccttgccgtcggactgcgtgcgctcaatatagaacagggaccccggcagggtctgaaagacgccctccgccagatagcggttcatagcgccgttgatgtccgcgatatgggcgtccacatccgggtcgttcagcttggcctccggcaggatcagccggagggtggaaggcgcgtcccccacagtctcctccaccgcctgccaatactccggctgggaggtgaactggtcgcaggccaccacggcccacttggtcatgtccgcatccttgggcagcaggatatccgccgggtaaaagcccagcttctggaatttctcgttcatgtcgcgtcccctttctttccggaaaactcttacagcgccgccttgatggccgccagcaggtcgtcaaactcctcaaaggccggaatctccgggtggtcggctttgatctgctccgtgctcttgaagaggaagcctgccttgctggcctggatcatccccaaatcgttgaagctgtcgccgctggcgatggtgtcatagccgatggactgcagggccttcaccgtggtgagcttggacttctcacagcgcatcttgtagccggtgatctcgccgttctccgccacctccagggagttgcagaagatggtgggccagcccagcttttccatcagaggcttggcgaattcctcaaaggtatcgctcagaataatcacctgggtggtggcccgcagctcgtccaaaaacgccttggcgccgggcagcggatcaatcttggcgatggtgtcctggatctccttgagccccaggccgtgctccttcaagatgcccagccgccaggtcatcagcttgtcgtaatccggctcatcccgggtggtgcgccgcagctccggaatgccgctggcctctgaaaatgcgatccagatctccggcaccaggacgccctccatatccaagcatacaatattcatactgtctccccttatcaatcggtctgcgcggcttcgccgcgggcgagatcggatcccgctgtttcgattatacaatccctatctttcctttgcaatgcgatttgcaaattttgtccaggctggaaattttccccatccgcatagttcccgccccgttggatacactaacgccaaatccctgctggaaggcataaaggaggtttttcgcatggtgattgataagatcgcattggcactggctatcatcggcgccctgaactggggcgggatcggcctgttcggctttgatacggtggctttcctctgcggcggccagatggccattctctcccgcatcatctacgccctggtgggcctggcgggcctgtggtgcatcacgctgttgttccgctcctccgacgaggagacgggccacgcccgccacaccgcctgacggcggatacagcgcgcttttcaaaatacggggagccgaccaaaaggccggctccccgtatttgcggttctcagtcaccggagcagatcagccgcggtccttgtctccgccgtgctccccttctttcaggtatttctggtccctggccagaagctctgcggagacgatatccagctgctccatcttctcatagtggtctgccagattgctgtccgccgcgctggccggctgtccgtcgtgccggaataccagcttcagcaggatgggtgtgaggatcgtgccgcccaccacggtgatgatgaccggtgccatcagggtcccggacagcactcccagctccagaccccggttggctacgatcagcgccacctcgccgcggcagaccatgcccacgcccacctgcaggctctccttgccagtgaaatgacagagctttgcgcccaggccgcagccgacgatcttggtggccacagaaatcagcagcaggagaatggagaacagcaccaggctgccggtcatgccgtccacctttgccttgatgcccacgctggcgaagaacaccggcgtcagcagcaggaagctcaacggctcgaacttggattggatataggaggacttgggggtgcaggagatcaccaggcccgccacataggcgccggtgatgtccgccacgccgaagaactcctccgcgcagtaagccatcagaaggcacagcacaaaggccagcaccggatagcggcgccgctcccggccgggccacagggccatcagccagcagaagaacttgtgggcgaggaaggagaccacagcggagaacacgaagaacagcacgatcttcagcagcaccagggcgatgctgtcctgtccgccggacaggctgctgacgatggtcagggcaatcaggcccagcacgtcgtcgatcagagccgccgccagaatggtgttgcccaccttggtatccagcttgccgatctccttcagtgtctccactgtgatgctgacggaagttgcagtaaggatggtgccgatgaacacatcctccaaaaatccgctggtctcaatcatgccggtccggtctgcgagcatcgccagacctgtgcccagcaccagtgggacgatcacgcccagcagggccaccaggaagcccgccttgccactgtgcttcagctcctggatatcggtgcccatgccggcggagaacatcagtacgatcacgcccaactcgctgagctgggtgaggaactccgtttctgatagtacgttcagcatagccgggcccagaatcagtccggccaccagtgcgcccaccacctggggcatctggatgcgtttcgtcaggatgcccagcaccttggtgctcaacaggatcagcgccaggtccatgagataatgatacgtcattgcctctcactcgctttctgaggtctgaatactgattgcctcccgttttcaggagagctttattgtaaacctttgctcccgttttgcaagagccattctgcacaaaaaagattcctgtttttggatattttgaaagaaaaagaagctgcttgaccaacaagcagcttctttttaacaacttttttatgacaattgaagtttcttcacaagtccctcctccggcgccacgttcacggtgcggcaggtggagtagatcaccatgccgggccgggcaccggcgggcttcttcacgttcttcaccggtgtgtagtccacggggacgttggcaccctcccgggcctgggagaaccaggccgccagcttggccgcctccacgatggtgtcatcgtccacctcacggccgcctgtgcagaggatcacgtgggaaccgtggatcttctgggtatggagccagatgtcccggtggtccgcgctgcgggtcagcttgtcgttctggcggttgttccgccccaccagcacccggaagccggaggtggtgcggaactccagaggctttgcaggccggttctgttccttttttccctgtcggcggaggaagcccgcgtcccgcagctcgccgcggatgtccaaaaagtcctgttccgtctctgcccggctcaactcctccagcacactctccagatagtccaggtcccggcgggcaagggccatctgctccgccagatacttctccgccgtcttggccttggtgtagcgcttgtagtatttggcggcgttttgctggggcgtcagcagcgggtccaggggaatggcgacagggcggcactccgagttatagaaattctccgtctccaatctggccgccccccgctccatgcggtagaggttggcggtgatcaggtcgccgtagatccgcagctggtcccggttctgtgtggcggcgtagtccttctcctgcatggccagtttccgccggatgcggtcccgtgccgtggtggcagtccgcagcaggtccgccccccgctgacgcacccgctcctgctgctcccgcagggcgtagaagtcatccatcagggtggagaacgtgtcataccggacggtctccataacagggccgtactgggcgatggggcagtaggtgaaatctgccatcttcccatcttttttcaggcagattggtgtaaagtgattttcctgtatatctctgatgagcccggacaattccttccagaggcggtcctctcccaccgctcccaggtcaaagagatgggcatccgtctcccctgcggagcggaaggccagttcccgggcgatcaggggggagatgccgaagtagtggtccagcagaaaggcgtccacactccgctccgggtttgcggcggagatcttctcccggaagccgttctccgtctcctccgtcaccggcaggcggcctacggaggcaggcggctcgtaatacagccccggcagcacctgccgggcagcagacatgtccgcgtccacccgacggaggcagtcgatgatccggccctccccatccagcaggatcaggttggaccggcggcccatggcctccagcaccagggtccgccgccccggctgaccgaagtcgtcagtaacgtccagctccagccgtaccagccgctccaggggcggctgggtgaccgctgccacccgtcccccaaccagatgcttgcgcagcagcatacagaacatggggggctccgccgggttgtcccttgtcagggccgtcagctggatgcggggagtgttggcgccggcgttcagcagcagccgcttattcccccgcagcagcaggatcacctggtcccgggcgggctgctggaccttatcgatccgcaggcccagcagctccggtcgcagctcctccgccaccgcctgcatacagattccatccaatggcatggtcttactcctccatcatcgcgcggaaaagcgcattgatccggtcccgccggcccttcagatacagccagcccaacagggcctccagggccgtggcctcgccgtactgggcccgggtggcatggccgggtaccgacttcacgtgagcgttccgcccgcggcggaacacagcggcctcctcctccgtcaaaaggggcaggatccgctccgccttctccgcctggctctccgcccgcaccagagcgatggtggcctggtgcagcccccttcccgtggccttgccgtgggcacagagccaggtgcgcaccagcacctcgaacacggcgtcccccatgtgggccaggccgatggaactgatagcgcgcagctggtcgtcggtgagattcggttgaaaatagttttccataaaggactccttggggaacagaaattttcataccggaatatcttaccacacttcccccggtttgtcacctgggatgcaatgttgtcttttccgcagacgcagctggaactgcggccttctccgcttctcttccggccgtatggccgcatgatcgtatattgaaaaaatactggaatctgttgtaggatttgccgaaaaaaacgtagtgtacaaagtgaaaccggaaaggaggtggagcaaccatggatgaggaacagatcatcacactgttctttgcacgttccgaacaggctatcgaggcattggacgcgaaatatggaaaactattccacagtctctcctatcacatcgtgaatgacaggcaggacgcagatgagtgcgtcaatgatgcgtacctgggggcatggaatgccattcccccggcaaagccggactctctgctgccctatatggcgcggatcgtccgcaacatttccctgaagtgctattggaaaaagggcgctgccaagcgaaacagtccttacacccttgctttgcaggaagtcgaggagtgtcttccagaccgaaagagcgccgaggaagaggtggaggcaagggagctcgcccgcgtcattgcgtgctttttggatacgctgtccgcagagaaccgcgtaatcttcatgcggcgctactggttttctgacagctgccgggacatcgccgggcttgtcgggctgagcgaaaaaaatatctccgtccggctgacccggatccgaaggaagctgaaacaatatctggcagaaagagaggcgtttttatgaatgcaaagaagttttccgatgctctgagtgcgctcgacggcaggtatgtggaagaggccgcccggtacaggcgaaagcacaggcagtccttttgggtccggtggggcgccgcggcggcctgcctgtgcctgctggccgccggcggggcactgctgattcagggcagagggcgcgctgccccggatcctcagcaggttcaaatcccgaatcccatcctcacagtcgcgtccgccgcagagatggaagcatatctggacttcaaggtccctgtgctggagaaagaggtggaggcgtactccgtgttcatctcagatgggtaccccaccatgggacaggtggactatgcggacggatcccagtttcgtatccagtatgggagtggagacatcagcggaatctacggcggcacactggaggagagcagagagattgcgggcgtcagcgtcgcatactaccaatacgatagtatgtcgtatgccatctgggaagcgaacggctttgcctgcagctatttgtacaccaatggcggtgatgctgaggtggatctgttgatccagcaggggccataagccctcctggaaatgatacgagaatggggccgcaaccgggcgcggccccattcctgcgttttttccctaccgcagcagcggcaggcttccggtcagccggtccacctgatgccgggggcccaaaagggccatgcccaggtatcgcagctcccccggcccggtgcgggccattttttcgatgaactcgccgtaggtacggcagctctgggccagatctgtgaagtccacagccgccacatctgcaaattccagctcggccagctgccgccgcagggtctgaaaagtctccggcctgccggagagcaccggcaccggcgtgcggatgatcccggggtggatggctccggcagcgtcggtcacgtcctcccctaccagttccggccgcagccggccccatgtgatgcccaggatggccgctgtgttggcagcgaggccccggggcatggcctcatcaatcaccaggacgcatttgtccagttcctgtttcatggtgtgttccctctttccaatggagtttgccttcagagagaagcagcccgatcagggtcagtaccgtaccggctccggtcatccaggtgaagggttcccgcaggatcagcacggaggccgccactgtgatcaccggcaccagatagatgtacacgctggttttcaccgcccccagtgccttcaccgcgaagttccaggtgacgaagcacagggccgaggcccccagccccagaaacagcagattccccaggttcaccggggctgtgagtcgcgtgagctccagccggacgccagagaccatcagcgccggcagcatgaatgccagcccgtagaaaaaggttcgccgcgtggtcaggacagtgggatggcccagggcgctgatcttccgggacaagagggcgtaacaggcccacacgaaggcagccagcagcgccagcaaatccccccggaggtccagctccagggcagagccgttgaagctgataaggcagatccccgccatggccaccgcaaagcctgcgaaaaatgtgggccgcagccgctcctcgccccgcatcagaaaatgggtcagcagggcggtgaagcagggagacacggagatgatgacccccacgttggaggccatggtgtacgtcagggcgatgttctccagcaggtagtacaggcacacgccgcacagccccgccagggcaaacaatccctcctgccgccgtgtgacgccctgcaggcggcgaggacagactgccagcagcgccagaaagcccatcatgaaccggataaacaagatctccaccggctggaaatccaccagcagcaccttggtggagatgaaggtggtcccccagatcacaatggtcagcagggccgccaggtggccccgtgcaggattcgtctccacggctgtgtcatcctctctcccattcctgccggaacagctcccggcaggcccccggcgtcaggccggtgaaggcagtgaaatagttggtgaaatggctctgatcggaaaagcctgtctccacggcggcctctgcagaggagacaccccgttccaacaggcgccgtgcctcgctgatccgcaccgccatcagatagcggtagggcgtgacgcccttggccttggcaaaggcccggaccagggcggatttgctcagtcccgcctgaaggctgagctcctccagcgtgatatgccgggcatagtggctccggatgaacgcacaggtccgctccacctccacccggcaggcagaaaccgtttccaccatcccggcgtaacccggtagcaggaggccccaggccagcagcagcgcctcctccctccggagctccggctcctcccccagcaccgcccggtgcagggcccggaggcggcctgccagttctccgtcccgaaccacggccacggaaaagccgggcattgcccggctgcccatgatctcctccgccagggccagcatggtgctgcgtgggatattcagtccccggtagtccagagccccgtccgcctggatgcaggcatggctgtctcccgggttgaacagcagcacgtctcccgggccgatgacctgccgttggcggccgcaggtgagggtccgggtcccccgctccaccacgccgatcacataatggtcgtgaaagtggctgggaaagggcctgtccaccgcccggaggctgtacgcctccagccccagagcctggtcatatcgggcggtccgcgccgcttgtctcatggttcttccctcctgtcggcaccagccagcataccacctgagcggagccgccgtcttgtaacatatccgcgttttcccccgtcaggcgtaatggtaacgccgccgcatcagcaccagcagcaccaccgagagcaccacccccagcagttccgccgctgccacggaccaccagacgccatccacgccgaagaacaccggcatcaccagcaccagtccaccccgcagcagcagcgtgcgggtgaaggcgatcagggccgacagggcgccgttgcacagggccgtgaagaaggcggatgcgtagatattcagcccgcagaagaggtagcacagggcaaagatccggaagccgtgggtggtcagctccagcaagtccggagagtaccccacgaaggcagcagacaggggccggcttaagagctccgacgccgccaccatcgccacggaggtagcggcgatgatgacgccactgcggcggaagatgttcttcagctcatcatagttctccgccccgtagtgatagctgacgatgggggcgctgcccatggagaaccccagaaaggcagccacaaacacgaaatccacgtacatcatcaccgagtgggccgccacgcccggctctcccagaaggtccatcagccggatgttgtagaggatgcccaccacggaggcggagatgttgctcatcagctccgaggagccgttgatacaggcgtgaagcagttcccggccgtaaaagttcgtccgcaccagccgcaggccctctcttctgggaagcaggaagtacaccaccgggatgacaccgcccacgcagtagcccagcactgtggcccatgcggcaccggtgacacccatgcccagcagggcgatgaacacgtagtcaaaggtgatgttggtggctccggcagccagggagagcagtaaccccagcttgggtttctccgccacggaaaagaaactctgaaaggcgctctggagcatgaacacggcactgccggccagcaggatccggccgtaggcgatgcagtcttccagcagcaggtcgctagccccggcaaaacgcatgatgggttcgatgaaggcgatggtcacaatggagagcaccacgcccagccccgccacgcaccagatgaagagcgtgaaatatcgggaggccagctccggcttcccctcccccagcgtgcgggccacgatggcgctgccgccggtgcccagcatgaagccgaaggcgccgatgatcatagtgatggggaaggcgatattcaccgccgacagggccaggtcccccaccaagttggatacgaacagtccgtctaccacgctgtacagagaggtgaagataatcataacgatggtcggcagtgtgtaacgcagcagccgtccgtaggtgaaatggtcagaaagtttgatctgcatacatcagtctcctatcgcagcggtctgtaaaaaagcttccgtctccgcccgaaaggcatccagcagcttctggctcaatgccacaagcgccgaccgctcctcctcggtcaggcgggcggccgcggcgctctctacgccgaacacgcggtccacagtgcggcggaggaatgcctcgcccgcctctgtcagacagacccgcttgtttttcagattgccgtccgccgcctccaagcggaggactccctcctccaccagctttttcagggcggaattcaccgtctgcttgggtagggacagctgctcgctcaactgggtctgggtcaggggcgcctcctccgaccgcagggtgtacagcagccagaaggcgcagtccggcaggccgcaggcccgggccagacggtggtacagcagggtattctcattgtagattcggtcattggatttccagaaagcatccagaacttcctgtcccatcgaatccctcccgtcttattttgtccgatttcggactattcgattatacagaaaccgctcctttttgtcaagggctcccctgcgcggcgcgtttcgtcaaaatatcccttgtgttttttccaaaaatcgcatatcttaaaaaggcgagaggaggcgttttatggattcggacaagctgttgaatctagccacatcgctgggctgcctgctggcagagagcggcgcggaaatctcccgtgtggaggagtccgtctaccggctgctgcaggcctaccaaggcaaggacgcccaggtgtttgccatccccagctgtttgattgtcagtttgatggcggaggatggccgtccggtgacccggatgcgccggatcagtgcccacggcacggatctggagctactggagagctgcaacgctttatgccgccagctctgccgtaccgtaccgcccctggacgaggcccgggccatggtggaccgcctccctgcctcctgccgccgccaccgccccgccacggtgctgctgggctacggtatcgcccccgctttcttctgtcccctgttcggcggcgggttttgggacagcttgagcgccttcttctgcggtctggtggtgggcacctgcctgctctttggcggcagatggctgggcagcaacagctttctgcggacgctggtatgcagcggcatcgcctccctgctgtctcttctgctggtgcgggcgggcctggggaataatgtggacctggtgaccatcggcgtcctgatgctgctggtgcccggcgtggccctgaccaacgccatgcgggagatcgtggccggcgacacctactccggactcagccggacggcggaggctattctgatcgccacgggtatcgctctgggggccgctgtgggcctgggcatcgggtatattctgtaaaggggatctacttttatggatatctggtctcaatatgttctgccctgcctgtgtgctttcgccggctgtatcggattcactctggtgttcaatatccatggccccggcaagctgattgcctgctgtggcggcgctctgggatggctggtgtatctgctggccggcaagaccatcctggcaggctttttcgccgccatggccatcagtctgttctcagaagtcatggcacgtatccgccgctgccccgtcaccggctatcagctggtggccctgctgcccctggtgcccggcggcggcatctactacgccatgggctactgtctggagggcgacacagagcaattcctcagcgccctgctgggcactctgggcatggcggccgccctggcggttggggtcatcctggcctcctccctgttccgggcagtgttcccgcgcctggctcgcgtcccgaagcgcatgccctccggcaggcaaaacccataaatgattttttcagcagcccggcggaacacgccgggctgcttttctccgccttgcgctgtcggatggaagagattataatggaatcgacttgattcgacagaggaggacttccatgtacattgccgacctccacatccactcccgcttttcccgggccaccagtaaggacggagatctcccccacctggactggtgggcccggcgaaagggcatccgaatggtgggcaccggggacttcacccaccccgcttggcgcgccgagctgcgggagcagctggtgcccgccggagagggcgtctataccctgcgccaggatttgcgcctgccggatgtcgccccgggcgaggcgccccggttcgttatcaccggggagatcagctgcatctacaagcgccacggcagaacccggaaagtccacaacctgatcctgctgccctctctggaggcggcggacgagctctccgcccggctggaggccatcggcaacatccactccgacggacggcccattctggggctggacagtcgggacctgctggagctgaccctggacacctgcccggacgcggaattcatccccgctcacatctggacgccccacttcgctctgtttggcgccttctccggcttcgataccatggaggagtgcttcggggatctgaccggccacatccacgcggtggagacgggcctctcctctgatccgcccatgaactggcgggtctctgccctggacggactcaccctggtctcccactccgacgcccattccccctccaagctgggccgggaggcggatcttctggacaccggcctcacctacccggagctggtccgggccatccgcaccggagagggattccagggcacggtggagttcttccccgaggagggcaagtaccacctggatggccaccggaactgcggcgtctgcctgaccccggcggagacagcggcgctgggcggcgtctgccccgtttgcgggaagaaactgaccatcggcgtggagcaccgggtggaggccctggcggaccgtcctgcagggtttcgtcccgagggtgccaaaccctttgagagtttggcgcccctgccggaggtgatcgccgcctccaccggagtctccgccgctgggaagaatacccaggcgctgtacgagcagatgctccatgccctggggccggagttctccatcctgcgggaggtgcctgtggaggatatcgcccacacggccggcccctgcgtggcggagggcatccgccgcctgcgggccgggcaggtggagcgccgggcgggctttgacggggagtacggcgtcatctccctgctgacccccggtgagatcgcccggttcagcgggcagatctctctgtttggcctggacctgcctgtgcgcaaatccaagccccgccgggagctgcagcacgttttggcgccagaagcggccccggctgctccccagccggaggcgctgaatcccccgcagctggaggccgtcacctccaccgcgccggtaaccgctgtgacggcgggccccggcaccggcaagacccgcaccctggtggcccggatcgcctggctggtggaggaacggggcgtccgccccggagagattaccgccgtcactttcaccaatcaagcggcggcagagatgcgcgcccggctggaacagcgtctgggcggcaagcgggcggtggcggccatgaccatcggcaccttccacgccatctgtctgaaactgcttggcgacgtgcggctcatcagtcccggcgaggccctgaccatcgcggagcaggtgctgcgggagtccggccgaaagggcggcggaaaaacgctgctccagtctgtctcccgggtgaaaaacggcgtgtccccggaggataccggtctggacgcggagctgtacgacgcctatcaggcccggctgcgagacctgggcgccctggacttcgacgacctgctgaccgaaggactgaagcgggatgtcaccggtctgcggtgcttccgccatgtgctggtggacgagtttcaggatatcaacgatatccagtaccagctggtccggtcctggagccggagcggggagctgttcgtcatcggcgacccggaccagtccatctacggcttccggggcgccgactgccggtgcttccagcggcttcaagaggagcatcctggtgtaaaggaaattcacctaacagaaaattaccgctctgctccggccattctggatacggccttggcagtgatcggtcataatcccggcgggggccgaatactgactccccactgccccgccggtcctgccgtgcgactggtccaggcagcggacagcttctccgaggccgtattcatcgccaaggagatcggccgtatgaccggcggcgtggacatgctggaggcccaggccctgggccacgagcggacggtgcgggccttttccgatattgcggtgctctgccgcacccaccggcagctggagctggtggagaaatgcctccgccacgacgatattccctgtcttgtcaccgggcgggaggacttcctggatgacccggcggttcggggggcgctgggcttcctccgttccctggtggtgccagcagacaacgcggcgctggagtccgccctccggctgctgtggaactgcccggcagatctcatccagaaggcccagacgctctgccaaaagatgggcacgctggactcggcggccctgcaggaggcggtccggggccacggcattctggaaaactggctggaccggacagaggtctggctccctctggtccagacggaaacaccccggaagctggtggaacagtgggaggaacagtacggcacctctccggccctggaacgcctgcggaacacggcggtattccacgaggacttcgacagcctctgggatgctctggtcctgggccaggaggcagacctccggcgggcatccggcaaacactgggcctccggcgcagtgcgcctgatgacgctccacggtgccaagggtttggaattccctgcggtgttcctggcgggtctctccgccggagcgatgcccctggagtcccccggccgcccggcggatgcggaagaggagcggcggctcttctttgtgggcctcacccgggcccgggaggaactgatcctcaccgccgcgccggagttctctcccttcctgcgggaactgccggagccggtggtccgggagaccaccggccgccgccgggtggcggaacagctgcgcctgttctgagcgcttccccttctcccagttcataccaaaagccccgggcacacgtgtgtgtccggggcttctctcttttccgttgccttcagcttcggtgtgcccgatccctgacagcggccaacagcgcgtgacgctcgttgggcagggagtcatccagcacagcgttcagcagttcccgcaaagtctgtcccaccgcggggccggagagtcccatggccagcaggtcccgcccgttcaccgccagctgccgcagggatacgcaggcgccctccaccagcagctggtccaggatgcattccgccctgtcgatctccccctgcaggaagcggtacgccggggcctgagccagattgtccgctcgcttcacatccagcagacgccgcaggtcccgctcccccagtgcccccagtgcccgagccacgcccgggcgggtgcgtgggatgttgcggtcatgccaagccaccagctgcaccaccgtctcccggagaaccgtctcggcccggaggcgacccagcatggcctccgccatgcgggcgctctccgccggatggccgtaaaagtgtccgcagcccagcccatccactgtaaagcaatttggctttccaatatcgtgaagcagcatggtcagccgcagctccggctccggttttactttctccatggcatggagagtgtgctcccacacatcgtaacaatggtggccgttccgctggtcaaaccccaccatgggcagaatctccggccagaagacgccagccacatccggataggcccgcaggacctctgcggcccattttccggacaccagctttttcagctccgcccagatccgctccggagcaatggctctcagcaattcccggttccggtggatggccaccgctgtatccggatggacagtgacccccagctccgccgcgaaccgcagtccccgcaggatgcggagggcatcctcgccgaaccggcggtccggctctcccacacaccgcaggaccttcgccgtcaggtctgcccggccgcccagagggtcgtacagggtcccctgcaggtccgctgccatcgcgttgatggtgaagtcccggcgccgcagatcctcctccagagagtcggtgaacgtcacggtctccggcctccggtggtcccgataggcaccatcccgccggagtgtagtgatctccacgccaccctgctccgtctttacggtgacggtgccgtggcgcagaccagttgggacagcccggccggcaaacagggccatagtctcctccggccgggcggaagtggtcacatcccagtcccccggcatccggtccagcagggcatcccggacgcagccgcccacgcaccatgcaccataccccgccgcctccagtgttttcaggatctcccctaccggagcggggatcgttaccgttgtcatgtgcccacctcccttatgtccattctccttgcgtatcgcggatcagctctgcgggccgtcccatcgccactccataagaagttccgcttccccagtctcgggatccacgccctcctccaggacacggaacccctcccgccggtagaaggctgccgcccggaggtttttccggtaggcctgcaggcgcagctgcccgcggctggtcttcacgtggtccaacagctgccgacccacgccgccggaccgggcctccctccggacgaagatgccggcgatgtagtctcccagaagtccgatgaagcctgaaatttcggcccgcgcctccgtctcaaagacccagacctccgcccgggccagcgcagtcctgacctctgcaaaatgtcccagccaataggctgctgggatgaaatcgtgggcttcccggttggcgtccaaccagatggccgccacagcatccaggtcgcccttccccattcttcggatcatgggcctcctccattcctcctgtacctcgcgctgctctgatgataccacaccaagcgacccgccgcaaggcaggggccaccggattctgccttttgaagtatgatcgtgatttcacggaacaaggaaatcttctgtcatttgggtgaaactatgcctggatctccgctccttcacagccggtcatgtttccacccgtgggcaaaagacgtgggcagctgttttccccgcggaacacagctgcccatgttgtccaggcgtggaagcaatgccttccgcccctcaggctggaatttcgggaactgaattgcaccccaaaacaggcccgctctatgccttcttccgtgtcaggaaaatcccaaggattgctcctatcaagagcatcggcgcaaacctgacaaacagccattcaaatgcgtgaaaagcgactccaacaacggcggtttccggatcgtgataattccaccccagataaggactcccgcagtaaatgaaaactgcggaaataattacgatggccgtacacaatccaataagcaggcagcgagctgtttttcgccgcagctccttcccctgtgccagctgcaaatttatgatctccagcttttcggaaaccgctttcaggtcatcagccttcgccgctgtgacaggttctccgagcagcgtgctcacaggtgtttcaaacgcctctgacagggagatcagcatatcagcatccggaacagacaatccctgctcccatttggagatggtctgccgcaccacattcagcttgatcgcaagttcctcctgcgatagcccttttgattttctgatggctttgatgttttcacataacatagggaatgaactcctttctggttaacgccattgtacgagaaacagcctgttttcgcaagcaacgtatattaacatttgcgttcagactgtgcaggcggcttttggcttctttcttttgcggcaggcaagatttgttgattcctgcggcacgtatccaaaccggcaaattacgcaaagctgccacaggtatgcggcaaattaccttcctcttacggctgcgctcagtttggtgaagccgacggaattggggccgccaccgctgatcttgaaacggggccctggatttctctggttgcattttccgtcttctcatactataatgaaatatttggtaaggaattgcaggtttttgggcaacctcatggtattcccacagaatcatcagcggcgcgctggcagtgcgcttcagataaggagtcttttcatgatgaacaatctccatcccatccgcgactatatcgtccccggcaagcgggcccatctggtgggcatcggcggcgtgtccatgtgccccctggcggaggtgctgcggggcatgggcctccatgtccagggctccgacatgacggagagcgacacggtccgccacctccggtccttgggcatccccgtggccatcggccacaacgccgaaaacctgggggactgcgatctggtggtccgcaccgctgccgtccacgacagcaacccggagatcgccggtgccgtggcccggggtatccccgtgtacgagcgggcccaggcctggggtgccatcatgcagcggtatcccaacgcgctgtgcgtggccggtacccacggcaaaaccaccaccacctccatgtgcacccacatcttcatggcggcggaggcggatcccacggtgatgatcggcggcaccctgcccctgctccacgccggctaccgggtgggccagggggacaccatcatcctggagtcctgtgagtactgcaacagcttcctcagcttcttccccaccgtggcagtgattttgaacgtggaggaggaccacctggacttcttcaaggatctggccgacatccagcactccttccgccggtttgcggagctggtgcccccggcggggtccgtcatcgtcaacgcggacaacgccagcgccatggaggcggtggccgggctggagcatcccatcttcaccttcggcctggaccatgccgccgactgcaccgccgccaatctgacggaggtggacggcaggccggtattcgacgtgatgatccgcggcgagaaatacgcccgcgtagagctccacgtctacggccaccacaatgttctcaacgccctggcggcagcctctgcggcctgggcactgggcctgccgggccatgcggtggagacgggcctggcctccttcaccggcgctggccgccgattcgagcacaagggtacctatcacggggcggaggtctacgatgactacgcccatcaccccgacgagctccacgccctgttcaccaccgccaaggaaatggggtatgaacggctggtggtggccttccagccccacacctactctcgcaccgccaagctgttcgagcggttcgtggaagagctgaaaatcccggacgtggccatcctggcggagatcttcgccgcccgggagcagaacaccttgggcatctcctcggcggacctgtgccgcaatatccccggcgctgtgtactgctccaccctggacaaggcggcggcggctctgcggcaggcggcccggcccggcgacttgatcctcaccgtaggcgccggtgacatctaccgggccggggaaaagctgctggcgggggtgtgagccgtggagatctcagagagccgcaccgccgccccggcagagggccgcgccgccgtggagctggagacctttgccctgctggaccggctgcgcatcccctatgcttgggtggcccacgagaccgccgacaccatcgccgactgcgatgtggtcagcgaggtgctgggcatctccatctgcaagaacctgtttctctgcaaccggcagaagacggcgttctacctgctgaccatgcccggcggcaagcccttccagaccaaggtcctcagcgcccaactgggcaccacccgcctctccttcgccccgccggagctgatggagtccatgctccgctgcacccccggctctgccagcgtgctgggcctggcctatgacacggagcgccgggtccggctggtgatggaccgggcagtccatgacgcggcctggttcggctgccacccctgcaagaacgacgccagcctccgcctgcggacggaggacctgctgcatgtctttctcccccacacgggccacgatgtgacggtggtggacctgtaacggcatctatggaaaaacgaggaccggaccggtcctcgttttctgttttccctcagtggggagaggtcagcttgatgccgacaatgcccgtcagcagcaacacggtgaaaaacatccgggcggcggtcaccggctccttgaagatcaggatgcccaccgccacggagcctacggccccgatgccggtccagacggcgtaggcagtgcccaggggaagcgtcttcatggcctggctcagcaaatagaagctggccagcatccccgcaatggtcatcacggaccagcccagcttcgtgaagccatcggacagtttcaggaacgaggaccagaacacctccagaagtcccgcgcatgccagaaatacccatgccatgcaaatcactcctcctctgacagcaaaaaataaaaggcgcccgcgccccgcatctccaatggcctacggatgcaggggcaaacgcctttgtccgcccggcggcggacctatattgatgttttattttacagatttcccgggaaatgtcaagtcctttctaccacagagcggtaaaaccgctcccggtcctcccggagcatccgcagctccccggtggagagcatctgccggatgcgctccgccagccagacgtcgccgatgcccggcttctcccggcccagaacctctccaatgatgttggcgatcttcgtctggccctcgggcagatggcgtcggatcatttcgtcgtagaagtcctcccccacgctgcggacccggccgttcaccaccgcccggagcggggcgttctcctgccggagcacctcccaccgatgggccatagcgcccagcatcaccggcggcagcggctcctcccgggacaggaagcgtccgaacagctccggctccacctcgccccaacccaggtaggtctccacgacgccgtccggccgctcccgccagggcggcaggaacaccacgcggacgtcggcctttgtgtctttcagcaggctggcagcgtggagcagaccgcaggcgccgtatggcgtatggtccacccaaatacggacggcgtccctagagccgcaggacctcaatcgctccgctgcctccaaattccgctgccagtcccggtccgtggtctcatcatcaccatcacaccaccggcgcagcaggtcccaccggtccgcccccagcggttctcggatatcccccatatccagtcccagggacaagaccagtacatcactcggactgccgcccagggggatggcctcccgttccagggccgcctgccgccgctgggcccgctggatctggtggatctcttctcccgcgggcgcttttccgtcatcgaagccgatgaccgtagtagatgtcacatttccgccgtcctctgtgcggctgagaacgaatccgaagcctttccgtccgctcccgccgcagcgctgggccacccgcagggcaccgcaggttgacatatcaaaacacagttccagcatggtcttgcctcctggatgtcacggctgctgatcttctcagggatccagcaatgttttcccaaagccaaagccccattgataggcccagcccaaggacgtgagcagaagcaccgtcagcccgtagccgaagaggagccccgtcgccagccgccggagattaccgctctcatagggcgtacagagctggagaagtccgtccgcaatcaacggaaccagcagcacagccgccactcccgccgggggatggaccgcccaccaggttgccagccccgccaggatgcccgccagctccccggtgcaccgggcgcagatgggaaagggcgttccgtcccgaaaatggaaagagcgatccggccggcagtggcatccgaagagaatcggaagccaccgccaaagccagcgccgcagcttaataggcatacaccgctgcgctgatgcccagaaccgccgccgcaacgtacatcagtacataggcgatcacgcacaccagggcgccgatgcccgccgccttggcagtccggggcttggtatccttccataccaggaacaagatcaatcctgcaatgggaatacagcagcccagaagcccccacaggaagccgccgttgtccgctgccggtggaggattattcggtcctccgttctgaggtgtgccgcatttcgggcagaccgccgcatagtcatcgatcaatgcaccacattttctgcaataagccatcgtttttccctccaagacacagtttgctgcgttcgcctccgcgctgtcccaaagccgcgtggcgccctccacctgagggaaccaagcaccttgattgtatcggtccccgcacctgctgtcaaggctaatccgacagattccaaccaaaagggacaaggcaggcagctttcgctgcccgccttgtaaaaagtccgggagatcttacttcttgctcaacgcctcgtcgatggccttagccgcggtcttgccggcgcccatggccaggatgacggtggcagcaccggtgacggcgtcgccgccggcatagacattctcgcgggaggtgagaccgtcctcgttcaccacgatgccgcccttcttgttgatttccaggcccttggtggtggacttgatcagggggttggggctggtgcccagggccataataacgcagtccacgtccacgtcgaactcactgccggggacctcgatgggacggcggcggccggaggcatcgggctcgcccagttccatccggatgcagcggattcccttcacatcgtcgttctcgtccgccagcacctccaccgggttgcagagagtcttgaagatgatgccttcctcctcggcgtgctccacctcttcacggcgggcgggcagttcctccatgccgcggcggtacacaacatagacctctgcacccaggcgcttggcgcaccgggcggcgtccatggccacgttgccgccgcccacgacggccaccttcttgggatggatgaggggcgtgtcggaatcgggcaggtatgccttcatcaggttgatgcgggtcaggaactcgttggcggacagcacgcccttgtagttgacgccggggatgttcatgaacataggcaagccggcaccggagccgatgaacacggcctcaaaacccatctcatccatcagctcgtccacggtgatggtgcggcccaccacggtgtcggtcatgatcttcacgccgaagtgttccagccgggccacctccttggccacaatggccttgggcagacggaactccgggatgccgtacaccagcacgccgccaacctggtgcagcgcctcgaacacggtgacgtcataccccttccgggccagatcgccggcacaggtcagacccgcagggccggagcctaccacagctaccttgtggccgttgctctccggcacggcgggagcgccgccctgatggccgtgggcattgtgatagtccgccacaaaccgctccagacggccgatgcccacgggctcacccttgatgccccggatgcactggccctcgcactggttctcctgggggcagacacggccgcagatggcgggcaggctgttggtggaggtgatgacgccgaaggcctcgtcaaacttgccttccgccaccttggcgatgaactcgggaatatgtacgttcacggggcagccgttcacgcacttggggttcttgcagttcaggcagcgcttggcctcgtcgatggccatttcctcagtatagcccagggccacctcgtcgaagttcttgttgcggacatcgggctcctgagagggcatgggattcttcttcaaagacatattggccatgattattcggcctccttcttgaacaggttgcaggtctcctcatatttgtgggcctcaaagtcccgatacatctggttccgcttgaccgccagatcccagtccaccttgtggccgtcgaaatccgggccgtccacgcaggcgaacttcatctcgccgcccacgctcaggcggcagccgccgcacatgccggtgccgtcaatcatgatggggctcatggacacggtggtggggatgccgtagggctccgtggtcttggaaacaaatttcatcatcaccatgggaccgatggcgaacacctcatcatactggttgccagcgtcaatcagctccttcagcgcctcggttacaacgcccttctggccataggagccgtcgtcggtgcagaccttcagtacgctgcttgcggcccggaactcatcctccaggatcaccagatccttgttcttgaagccgatgacggcgtggacctcggccccgcagtcgtggaacttcttcagcacgggatacgcgatggcgcagccgacaccaccgcccaccacgcagaccttcttcttgccctcggtctcggtggccttgcccagggggcccacaaagtcctggaggctgtcgccctctttcatgcggctcagcttttccgtggtggcgcccacggtttggacgatgatggtgacggtgcccttctccgggttatagtcgttgatcgttatggggattcgctcgccgttctcatccacgcgcaggatgatgaactggcccggctgggccttcttggcgaccaggggtgcctcgatctcatacagggtgacggtgggacggagggcctcttttctcacgatacgatacatagtgttccttctttcccgaatgatcgaattttggtatttgcggcgatgtatccttcggcacgacacattgtctatactttaacacaacccccgaaagcagtcaatccgtttttgcggggattctgcgaaaaaaataacaaactttccagcgccccttctggccggtcaatcatcctgtacaaagggtgatgcgccgcccctcggaccggaggacgccctcctccttcaatcgcttcagctcccgcatcatggcgctgcggtccgtggcgatgtaatccgccagcatactcagggagaagggcagctggaaggtccggctcccctccttctccgccagctggttgaagtagcacaggagcttttcccggatggaccggcgggagagaacgtccacccgctcggacagggcctgggccttgtctgagatcagccgcagcatattctgcaccagcaggctatgatgggtgcaggcccgctcacaccgcttcagaatatggggatagtcgatgaacaccacgtcgcaggccgtgcggcagaccacttccaagctgtcccggccggaggtggaaaacgccaggctcttgccgaacacaccgccggggcccagctcctccagcacagtggcgactccctcctcgtcgatgcggatcagggatgcctccccccgctccaccacgcctacggcgttgccagccgggccggagaagtcgtagatcacctcgtccacccgatagctccgctgcaccgcctgaaagcagtccagcatctgctggtaattctcgtacccgatgtcctgaaacaaggggctctttttcagttcctgtggggtcaacatcgcggccgctcccttctgttgcatatatcacattttataataacagcctctgtcgaaaaagtaaagaccgttctccggcagatttcatagattattcaccaattccccaggcatttcctgtatacttttttcagaaggccggaaaggccgaatacgggcgggcccccgcccttagaaatgaggcagcaaagtgaacatagcttattttctgctcccgaagcacagcgtcgcctatctgtacgatgactgcaccttccgtcagggactggaaaagatgcggcaccacggctataccgccatccccgtcatcagccgggatgggaaatatgtcggtacagtcagtgagggggatttcctctggcagctcctgtccaaggactgcgagaccttgactgcctactccatgaaggacatggagcggctgcaggtccgggacattctgcggggcaacagctatcctcccgtccggatcaccgtcaccatggaagagctcctccacagcgccatgaaccagaacttcatccctgtggtggacgacctggggaacttcaccgggatcgtcacccgaaaagacatcatccgctactttgcggagcagaaggatgcggcggagccgctgcctttgcggaagatcgtataaaccgaccgggagacggcggggcagtgccccgccgccttttttctcccccgcttttatcccatcatctcatccagggagtatttgcgcacctggcctggcgggcccccgtcccgggtggccactcccgccacatagcccggaaaggtgtccagaaaatagaatcgctccccaggctggagcggggtctccgacgccagcatggtccccacgccggcgccgctgcgcttggcccgggcctcccgccggacccagctctggaagaaggcccgttccgtggtcacatccgccagacgccgcatggcccgctcgctcaccggccggatgtgctcgatatccacccccaccggctccccggacagggccaccagcaccgcgccggtggtgtggctcagattgaagtggacctccgggaaatccgggaagtagggcttgcccagagaggtgagccggataggcggaagctcccgccagcggtactgatcccacaaggcatggcgtagaatgagataggcgcacaggggctcccgccgcttttccgactgcttgatccgcagcagccgctcctgccgctccgggggcagcaggggcagcatggcctccgtctcccgctccgtcagcgggcgctccaaccgggccgcccaaagctcgatggacatctcacgcctcctctccgccgcttcgacgcttttctaccattttacgcaggccgcggcagtctgtaaacccactgggcaaaaactttttgaaaaaatccagcaaaaaaagaggaaatcccaaaagaacggggtatatctaaaatgtctcgttttgggtacgccctcgctttcgggtatgaccctcgggaaatctggcaacactcaccgaaaggaggagaccttgacatgccctttccccagagctttctggacgagctgatggcccggagtgacatcgtggacgtggtgggcagctatgtgcagctgacccgaaagggcgcgaatctctttggtctgtgccccttccacagtgagaagaccggctccttctccgtctctccggacaaacagatctactactgcttcggctgcaagcggggcggcggcgttatcaacttcatcatggaggaggagaatctctccttcccggatgcggtgcgctttctggccaaacgggcggggatggaggtaccggaggaggacggcgaccgggaggcgggccgcaggcgccagcgtctgctggacctgaaccgggacgcggcccggttctactatcagatgctccaacagccggaggggcgggcggtgcaggaatatctggaccggcggaaaattcgcagggccacggcagtgaacttcggtctgggagcctctctggatgcctgggacgcgctgatcctggccatgacgaagaagggctatacgaagtcggagctgctggaggcaggcttggcggtgcagaaccggaacggcggcctgtacgacaagttccgcaaccggctcatctttcctgtcatcgatgtgcggggagacgtggtggccttcggcggccgggtcctggacaagtctgagcctaagtacatgaactcccaggagacaccggtgtactccaaacggcgggttctgtacggactgaatctggccaagaaatccaagcggtccaacatcatcctctgcgagggcaacatcgacgtggtaacgctccaccaagcgggattcgacaacgcagtggcctccatggggacggctttgacagtggagcagacacggctcctcagccggttcacgaaggagctggtgctgtgctacgacaatgacaacgccggcaagatcgccacggagcgggcgctggagatcctgaacaactcggagttttcggtcaaggtccttcagctgccccggcggcggacggaggatggcaaactggtaaagcaggacgccgacgacttcatcaagctccagggaaaagacgccttcgaggcgctgctgaccggcagtgagaacggcatcgagttccgcatggcccaggcggcgggtaagtacgacctctccagtgacgaggcccgtgtggcctactgtgaggaggtcagcgccctgctagccgcccttgccaatccggtagagcgggagatctacaccacccgggccgcagagaccgccaagatcacgccggaggccatgaggctggaggtccagcgggccttcaaacgccgcctctcccgggagaagcggcaggagctgcggcgggacctgaacccggcggtccagctccagcccaaggagcgggagctgcgatacgacaacatccgctccgcccgggcggaggagggcatcctgcggctgctgatccgggacgagagcctgttcccggaggagccgcccctgcgggaggagcagttctcctccccactgctgggccgtgcctttaccacgctgtggcaggccaaggcggcaggacgcgtcccctccctggcggcccaggcggagttcttctcccaggaggagatgaaccatctcaccggcgtctgccagcagccggagtctctgcgaaacggacaacaggcgctggcggactacatacgcatcgtacagacggaggccgagaagcggctggggggcgggactgccgacccgctgctggcggccacagaaaaatacaaagacaaaaagggtactggaggaaagcagcatggcaaatgagtttgagttgagccccaaggagctgaagagacaggcagacgcgctcctggcggccgcagatgcggcggagaaggccgcggagagggagccggctgcaaggtctgccaaaaagtccacccggaaaaagggggaggagacggcccaggaggcccccgccgtcatgacggacgaggaggcccggaaggccggcatcctccggctggacgacaagcaggtggctgcgctgcccgcagcctcctggctgatgaacaacgaaaaactgcgggaactgctggcccgcggtaagaagaagggcaagctggactccgcagatctgatggacgcggtggatgacctgaatctggagagcgatcagatggatcagctctacgactccctggaggcgctgaacatcgacatcagcgccgacgatgccctgttggcggacctgccggatgacgagcccgccgcagaggagatcgccgatgtggaggaagaggagctggtggatcccaacactctggtgaacagcttctccatcgacgatcctgtccgtatgtatctgaaagagatcggcaaggtgcccctgttgtccccggatgaggagatcgacctggcccaggccatgggcgcgggcaacgaggccgaccggaagctggcggagattgaccggctccggaaggaggggcaggagatcccttactcccaggaggagatcgccgcctggaagtccgcccacgccaagggtgagaccgccaagcagaagctggcggaggccaacctccgcctggtggtgtccatcgccaagcggtacgtgggcaggggcatgctgttcctggatctgatccaggagggcaatctgggcctgatcaaggcggtggagaagttcgactacaccaagggctacaagttctccacctacgctacctggtggatccggcaggccatcacccgggccatcgccgaccaggctcgcaccatccgcatccctgtccacatggtggagaccatcaacaaagtgattcgggtcagccgccagctcctgcaggagctgggccatgatccctctcccaatgagatcagcgcggagatgggaatgccggtggagaaggtccgggagatcctgaaaattgcccaggagcccgtctccctggagacccccatcggtgaggaggaggactcccacctgggcgacttcatccccgacgagggggccagtgagcccagcgaagccgccagcttcaccctgctgaaggagcagctgatggatgttctctccactctcactccccgggaggaaaaggttctaaagctccgcttcggcatcgaggacggccgcacccgcaccctggaggaagtgggcaaggaattcaacgttacccgggagcgcatccgccagatcgaggccaaggccctgcggaaactgcgccaccccagccgcagcaaaaagctgaaggattttctgaactgaaaaaacacagacaggcgctgtcccgcatggggcagcgcctgttgtctcttctgatctccgtcacgacggaaagtcctggatcaccgtcagaaagtcccggccgtaccgctccgccttggcggagcccacgccgctgaccgcacgcagctccgtcgtggtccgggggcgggaaatcgccatctcccgcagggtcttgtccgagaacaccacgtaggcggggactccctgccgccgggccaactgggcccgcagggcccggaggcggccgaacagctccgccgcatccccctccagctccccggccgccgcccggcgggccggggcggaccggtcctcccgcagcgtcttcatctggagcgtcgattcgccgtacatcacgtcctccgcccgctccgtcagccgcagcaccggatactgccccggactcagctccagcacgccctggtccagcaggaagcggatgcgctcctggacctccttctgggtcagctgacccaaagcgccgtaggtatcctcccggtccatgtggtacttccgcacccgctccgtgtccgcaccgcagagggtctccgcgatgacacccacgccgaagtgctgtccggttttggcaatgcaggccacgatggccttggcgtcccggctgacatccacctcttcgaagttatggaggcagttgtagcaggcgctgcaagtgtccggcgcgtgctcgccgaagtagtgcaggatatactgccgcaaacaccggcgtgtccggcagtagccggtcatctgccgcagccgctgcaggtcccgctcccgcagctgctcggccgtccggggatccaagtcctcccggggctcgctgtgggtgatgagaaactcattagtccgcacatcctggccactgtacaacaggatgcagctggagggcgccccgtcccggcccgcccggcccgcctcctggtagtagctctccatgtccttgggcatattgtagtggatgacataccggacatcggacttgtcgatgcccatgccgaaggcgttggtggccaccatcacctgcacccggtcgtagaggaagtcctcctggttcctctgccgctcctctggggccaggccagcgtgataccgggcggcggctaccccccgctggcggaggaagtcgcacacctcctccacattcttccgggtggcacagtagacgatgccgcacttgccggggcggcccttcaccagctccagcagcgccgcccgcttgtccgcaggctgctggacctcaaaatacaggttctcccggtcaaagccggtggtcagctccagcgggtcctgcaggtccagcaggcggtggatgtccgccttcacgtccggcgtggcggtggcggtgaaggctcccaccgggggccggtggggcaggctctccacaaaggcggggatgttcaggtaggagggccggaaatcctggccccactgggagatgcagtgggcctcgtccaccgccaccagggagatgtctgcctcccgcacaaaggcctggaagccctcggtctccagccgctccggggccacgtagatgatcttgtaccgccccgccctggcccggtccagggccagcagatactggcggaaggttagggagctgttgagaaacgccgccgggatgcccatctgcaccagctgcgtcacctggtcccgcatcagggacaccagaggcgagaccaccagggtgatccccgacagcagcaaggccgggatttggtagcagacggacttccccgccccggtaggcatgatggccagcgcatcccgcccagagagcagcgcgtcgatgaccgcctcctggccgccccggaagacgtcgtagccgtaataggttttcagtgcttcttccttggtcatagtcccgttccctctggggctgtcttgcccctgttttcgcttccagcattgtagcacatctgttcgcataaggcaaggccccggcggtataccgccggggcccgcatcctgatctgattcaacccagccagctgagaagccgccccgcctccagcgccgccagggttcggacaccgtcgaaatccacataggggttgtagactgcctccagcttatcgtggttggctttggcgtctttcagcgccgcggccccttcctcccgcaggagtgccgccatccgggtctggaaccgcagccgggccttgccctgaggttccgtcatggcgtccagccgcacccggcggaagggcttctgcccgtactccatgccgggccgggaggtgacgaaggccagccccagtccggggatcagcaggtgctcgatccgccccggctcctccggcgcgcagcagacgatggtgtcccagccgttatccgccgccgcccgatgcagccgggcaagcatctcccctgccagctcccagctgtccgccagctcatagaccttggggcacagggcgtccacactgtcaaaccgccagatgtaccccttgtgggtaatactgcccaggaagcggcgggtggtcttccccgcctcaccgccccggcggcgcagctcccgtgagagaatgcccgccgtccggcggtccgccttctcccggtcgaaggtcttccgcaccgccgccactgcatccagctccacctgccgggcagccttcagatggtgataggcccggatatatgcggccttgtaggcccgggtatgagccttcacctcctctgccgcggccttggcggcggtgaggtcgtaaaaccgccccaggtccacataccggtccaccgccgcagggtaccggggctccaccacatgaggcgacgtaccatccaccacggcgcagcggagctccggcagcaccacgccgtccagggaatccgggtcgccggaacaccataagtactccaccggtgtgccggcctcctccatgcttcggccgatctcccgcatgaaggtggccttgcccacgccggggccgcctttcaaaaccatcaggtcataggtgtcttccaggtccacgatctccgaaaacaggttctggaagccgtcaccgctgttagcgcctgcgaaaaaatgggtaacttgagccatacgctcccctccaagtgttgttcttacactcaggctatgcaaaaacaacttggcctgacagcggtttttcacgggtcaaaagccggatggataaaattccctctgccaaaccggaaaataggagatgcattttcttccatcatctgttataatgaagagtacgagactgcggcggtgccggacaggcccgcctttcagataggagcgccgatatggacgaggagtacaagcccattatcacggacgaggagcgggccacccggcgggcccagcgggcggaggcccgccgaaagaagcagcgggaaaagcggcggcggctgcttcgccgtctggtgccctgcgggctgctggccgttctgtgtgtaggcctggtgaccgtgggagcccagctgattgaaaagcctgcgccggagatggttaaggccgaacggccctttcaggtgacatccgtcgccagcgcccctgcgccggagccctatgccagggccgtgtccggcccggacacgatccagctgggagaggactttcccagccgctgcgcggtcctggttgacctggacacccggacggtcctggcggagaaaaacgcggatactgtgatctctcccgcctccatgacgaaggtcctgacggttctggtggccgctgagcacatcacagaagcggagctggacgacaccttcaccatgaccatcgacatcaccgactactgctatgtcaacgggtgcagcgtggtggggctgatggttgacgaaacggtcccggtgcgtgagttgttctacggcaccatcctctcctccggtgcggacgcggcactggggctggccacttatgtggcgggctcccaggaggcgttcgtggcgctgatgaacgaaaagctggaggagcttggcatcgcggacaccgcccacttcaccaactgcgtgggactgtatgacgaggcccacaagtgcacggtctccgacatggcggtgatcctggaggcggccatggacaacgacctgtgccgggaggtgctgggtgcccggacctatgagactctccccactgcggaccacccggaggggcagatcctctccaattggttcctgcggcggatcgaggacaaggataccggcggcattgaggtcaccggcgccaagaccggctatgtggtggagtccggcaactgcgccgccagctgcggcgaaacagcggacggcagacgctatatctgtgtgacggcagacgcttacagctcctggcgggccatctatgaccatgtggcgctgtacaaaacctattgttcccccgcagatgacaccacagaggatggcggggcggcggatccccttgtggaaccggtggcccccaccataaaagacaccacggaacacgaaagcggagcgtccctgtgacgctccgcttttttccgctcaaaagcctctgtttttcagatccgctaccagggagacatagaactcccggacgtcgaagccgggaatgttctcccgattcagatccaccacatccccgtgtgagatgccccggtgcccccttggctccagcagggtgaactgatcgccccatttggcggagtccaccgccaccagcccgtcgttcaatccatcaaagtgcttgacgatgggataggtcatgttcagagggaacttgccgtgctgggcctttctgcaataggacatgacgctctggtaaaagacgccgggggcgtccggggtagccgcgttcctggcctcgcaggcagaggcggtcagatctgtcaccgccgccaggaagtccggggcctcatcccccagccgcttcagggcggcgttgtaggtatctgcgatcttctgccgagccgctgcagggatcttcttcagcagatattcggcaaagatgcagccccggtggggcgtgttgatggtggtgaggctggccacacagggggcacatccagcgtgggcgatggcggcccggctgtccagtccccccttggagtgggcaatgatgttcaccttctcacagccggtctccgccaggatctgccggatacggtccgccagctcccgcccgctgtcctccaccgcggcggcggactgctgctgtccgtagtacactgttgcgccgttgcgctggagctccttgggaatgcggccccagtagttgacatagcggaagtcccggaagaacaccccgtggaccagaaggatcgggtatttcgtcttacagatctcgctctccgcccgggcggtgtccagctcccacttctccgtctcgaactccgcctcgtcggcggtgatgcggataatcttccgcagataccagatgttgagaattgggatccacccgcacagggccgccagcacccggtgcttcagccccagctggacggaggtgagatacacccggatcatgccgttccagaagacgatggcctccagcaagacagcccagagaacgccaaaagccgcacctgcaacagctgttccagcggcaaggctgttctccggcgttatcatggaaatctggcaccacagccataccatctgcacaaagactgtgaccgtagctgtaatcaaaaacaggcgcagcaattcgcagccgcttttcaaataccagatccgctttgtaggcgcaccgctcttctcaatgggccgcagattaaaatagaggaactcccccagaagcagtatcgtcgtcaagagccagctcaccgggccaaacgcatagatcagagaaacccagttggctgtgaccgccatcagaaaggcaagaacccaccgcctcacagatacacctcattctccttgggctctgtgaagttctgctccagcatggccacgtgggacaaaaaggccgggtcgtcaaagtacttggcgtgcttcgtgcacttgcggacacaccgctggcacttgatgcaggtgccgggcacctccgccacgttggagggattgatggcccccatgggacacaggcgggcgcaggcgccgcagtcggtacacttgcccaaatccgtctggggcttggccttcaggaacttgacgggctggccgtccgtgcccttgggcacgtagtagggcgccgccgcatcgcccggcacggccaccggagcagggatgtccgtcaggtcttttaccttgtccgcaatgcgggccgcgaactcccccatctgccgcttgtcatcccagtccgggcggccgtccgccagcgcgtccgtaaaggcgtggcggcacgcaaaggcgcccccggccacggtgtggaagccgtccgcctccagcgcggcacacagctccgccagggagttgtcgtaggaccggttgccgaaggtgaccacccccaccgccagggcgccgttcccgtggatctgctgctggacatagggcagcatcttgttgggcagctttcccgcataggtgggcataccgaacaccaccaggtctctccccgtaaaagacagatcctccgcccggtctgacgggcgtgtgaagttcctccgctccagagggacgcccagcttctccgccagggtctccgcgatggtgttcaccgtcttgtctgtgttgcctgtggcgctccagtacgccgcgcagatccgcttgacttccatgatgtctcctctccttcccatttgtgacagcgcccgcccggggattttctccaggcgggtgctgaacgctgcttacagcgaaaaatcttcctctttcagccgttcagtctccagcgctgccggccggggcggcacccgcttcaaggggtcgtatttgaatgcccggcagtggtgctccaccgccacgatgccccgcttgacgcaggccacctcccgctcgttgatctgctggccccgctggcagtaggcacagcggggatccatatccttccgaaacagcatggtcctccctctcctcttcctccggtcacagggtgtacagccgaatggcaccgtcctccaccgtggccttcacctgggtgatgggatgctcgtagctgtcgatgatctttgtggccatggggtcctccagctccttctggatggtgcgccgcaggttccgggcgccgtaggtcagggagtaggacttcttcgtcaaaagctccaccagtgcgtcgtcgtaggtgaaggtgatgcctttctccttcagggaacccaccagttcgttcagcatgatacgtgcgatgccgtggaagttctcctcgctgaggcggttgaaggtgatgactgcgtccacccggttgatgaactccggccgcaggaactgctggagcgccttcatggcccggtcggcgtcctgctcgttcacggagcggccgaagcccacggtgccctccttggtggcgctgccggcgttggaggtcatgacgatgatggtattctcaaagttcaccttgcggccgtgggcgtcggtgatctcgccgtcatccaggatctggagaaggatgttcagcacatcgggatgggccttctcaatctcgtcgaagaggaccacggcgtagggcttgcggcggatcttctctgtcagctggcccgcctcgtcataccccacgtagcccggaggggagcccaccagacgggagacggagtgcttctccatgaactccgacatatccagccggatcaaggcatccggcgtgttgaagaggtctgttgccagctgcttcaccagctctgtcttgcccacgccggtgggccccacaaagatgaagctgacaggcttgtgcttgggggagatgcccacccggttccgccgcaccgcggcggctacggcggacacggcctcgtcctggccgatgatatggctcttgagccgcacttccagctggctcaggcgctggaactcctgctcccggatcttggccgccgggattttggtccacagctcgataacatgggccagattctccatggagagctgtggatcgcccttttccagcagactgttcagctctgtgttcagctggagttccttgctcttcagctccgccatgcgggcgtagtcgccctcggccttctcctcctgctcctccagcatggtgcgctctttctcatagtcgtccagctcccgctgaatctccatgcggcgggagatatccgggtctttcagattcaggtcggaacaggcctcgtcgatcaggtcgatggccttgtccggcaggaaccggtcggtgatgtaccgctcactgagcagcaccgcctgacgcaggatcccctcagagatcttcaccccgtggtactgctcatacttgggggccaggccctggagaatctgcacagagtcctcaatggagggctcgttcaccgtcaccggctggaaccgccgctccagagcggtgtccttctcgatggacttgcggtactcgttgaaggtggtggcgccaatcacctggatctcgccccgggagagggcgggtttcaggatgttggcggcgttcatgctgccctcggcgtcgccggcgcccacaatgttgtgaacctcgtcgatcatcaaaataatgttccccaggcgcttcacctcgtcgataaggcccttcatccggctctcgaactggccccggaactgggtgccggccaccagagctgtcagatccagcaggtagacctccttgttccgcagcttgaagggcacgtcgcccttggagatccgctgggccagcccctccgcgatggcggtcttacccacaccgggctcaccgatcaggcaggggttgttcttctggcggcggttcaggatctgcaccacccgctcgatctcctgctcccggccgatcaccgggtccagctttccctcctgggcccgctgcgtcagggagatgcagtagttctccagatatttgcgcttgccgttcttagggtccttgcgctccttttcccggcttcgggcaccgctttcctcctggccgccgctctcgccgcccttggcggcctcgccggagaacaggcggttcaggaaggggaaggtggcggtcttgccctcttcctcctcttccccggcgtcctcgccgccgggcaggtcctcgatattctccacgccgctcatggcctggagcatctcactgttgagcgtgtccagatcctcgtcggaaatgcccatgcgcttcatcatatcgtccacctggggcaggcccagctccttggcgcatttcaggcacaggccctcgttggtggtcttgtccccctccattttggagatgaagacaacggccacgttcttcttgcatcttgaacaaagtgtcggctgcatcgtgtaaatccctccagaaatcgtgacgccggcggggcaacggccccgttcgtcattgcagaagcgacagcgcgctcaggggcgtgtgtgtcgcaaaaaatcgtaaaatatgggtggctgagacggtgtctgtctcaaaggagacgccgaagcgccgcagaacccagatggccagaaacagcaccaaggccccctcgatcaggccgatcacggcgccgcccagggcgttgaccaggtgcagccccggcagctgcagcaccaagtccatagcccggatcagcagcttcagcaggatcgtcagtcccacgaaggagaccaggaacagcgccgcatagagaatggactgggccagactctccaccacggccatgaccaaggagacgccggtgtcctggatcttctcctgcgtctggctggccagggagttccgcacgtcctcgtccagtcccatcagggccagcaggtcctcgatggcgaagccctcgtccacgtcctcctccggcatctggacctcctgggactgccgggccatagcctcgtccaccttcgtctcgatttgctcccggatcaggggcgtcaccagacgggccgccggggcggccagggtatttgcgatgatggccgcccccaccagggccacgatcaccaccgccaatcccgccagggcccggaaaaggcccctgtgggcaccgtagatgaccgcagcgatcaaaaccacagccataatcacgtctattataacaggtgttgtcatgcttgcctacctttttgctcgtaaacgttttgtgaattccaagatcaatgtttcccactcaaggcaggaacaggtgggcgctctctgccgccagcagcagggcagagccatcctggcgcatcagaaccgaccgggcgtagtccgtgccctccagctgagcatagatctccagctcctctgtgtagatcaccacgctgtccatatacagcaccgccagataccgtccggcagcggagatgctgaggatctcctcgttcacgtccagggcggcgatctcctgcccgtccgtgtccaccgtcaccaaccggcccacaccgccggacttgtaccggttcagcagcagggcggtgaagccgtccccgtgcaagtcgtattcccgcagatagctgccggcataggagtaggtagcgcgcacctccccggccggggacgcgtaggtcaggcaggtgtcggacaccgtcaccagctggccgtcctgctctccgacggcagccaccagaccgtcggtcacatcgtagtcggccgccgggtctacatttcctgccgtctccaggctgtaaagtaccatgttgctgacgaacacgctgttctcctggcctaaggtcaccaccgccagagtgttatcgtcatctgtcacccgggcgtcgatgacaaaccggtccgacgcggtgagtgaaaacacctccgtcccctggctgttataagcggtgacgccgcccttgtagcccggcagttctgtggtcacagccagccaaccgtcttcattcagccgggcggagaaatagggggcgtcctccggtgcggtgagcgtgaggatctcgcccccctcgtccaccacatacagctctgtgccccccacgtcgtaagccacagcccggccgccgcccgtctccagggcaggggcgctcatccgcacggatgtggaccagatctcctctccgccccgcgccaggacctgcagctttgtgtcggagagcaccaccagggaatcccccaggacggcaaagcggttgctgtcggaggcgtcgtagtcgtactgggcctcagcagtgctctcctctccgctgccgtaggaacacagccgccgcagggcgtcaaagccggtgccgtcccggtacgcggccacgagcaccacgcccagcaccgccgccagcaccagaaagaagatcccaaagcggcgcagccgtccgcccttccggggagcctcgtcctcttccccgtcgttgtcgttccagatgtcgttcgtcgtatcagccattgagccgttcatcctcataccaaagtcttgtcaggtacagtccccccggcggcaccgtgggaccggcggcggtgcggtccccccgctccagaatgccggggatgtcctccggggtgaacttgccctccgccgcgtacagcacggtgccggtgatggcccgtaccatgttatacaaaaagccgttggcgcagaccttcaattccagcagatctccgttccgggtcacgtcacagtaatagatggtgcggacagtggacttcgtctccgtgcccacggaacgcaccgccgcgaagtcgtgggtgcccacgaacatccccgctgcccggttcaggaattcctcgtccaggtgcttgggatagaagtaggcccggttgacgtaaaatgggttcttgaaccgggagttgtagatgcggtaggtgtactccttcttgatgcaggagccgatggcgttgaagtcctccgccacctcgaaggcctccttcaccgcgatgtcctccggcgtgtgggtgttgacggcgaaggggagccggtccacgggaatgcggctctccgtgcggaagttggcgatgtagtgctccgcgtggacaccggcgtcggtgcgtccgcagccggtgaggtgtaccgggccgccgcagatgtcagcaatggccttctccagggtcccgcagacggtgaccgcgttcttctgcacctgccacccgtggtaggcggtgccgttgtacatgagtttcagggcaatgttgcgcataagctctcctttggcagttccgccgcccggggttcccggcgggaacgctctttttatccggcagggcaactcagcggttgaccgccgggttgtctgtccgccccagcagataatccacagagcagtccagatagtcggcgatgcgagcaagggcaatacaggacatttgcttgccttttgcaaattctgatatcgcgttaattcccatgttcaaatcagacagcatatcttttgtgcggatgcctttttctttgaggcgccatttaatgcggtctgcaatgtcttgtgtaacatacataaaatttgccccgccttttgtaaagctctaaaatcacgaaaaaacgtgaaaagcatcttgataatcacgctattacatgataaaatccgtttagcgtataaataagaaataccataccacaaaaaggatatcggaacaacacatattaaggaggaatccccatgacaagcatttcggaaactctgttcgacacctacggcgacagcctgatgcaagagtatgcgccctatgatgaggcggaaatcctggcggcgctggaccggatgtccatgccgcaggacatgcagatccaggtctgtgatctcctctccagctgctatctccgctggggcacagctgccttcgccatcggcctggggctgggcctctcgctgatgcaggattgctccggtcgccgtctacggatctgacggactcccctgtgcggcgccgcagttcatgtatccggggataagccttccggggcggccggaatctcctgccgtcctgcgcctcttccgccagcgccccgtcccgtttacggccagaccagcaccggggtgttggtgacgggccagcccggcgccagccggtcctcctttaccgtccaggtccggacagggaactcatatcccaggcccaggccgtccacgcagaagaaccgcacctccagctggtccccggcggcgcaggataccgtcccggtgccctcccaggtgccggattcctggccggaggcggccgggatggtctcctccaactgaccgttccggtacaggcggaatgtctgctcggaggctgcggccgccttttcacgcagccggacggcggcggtaatccgggcttctccttcctgcagggccgcctctccgctgcggctggacagcgccatcggcaacaatccggtggcacggccctcatagagccgctctgtggccgtatcgccgccggtccggaccgtcaccagaatctggagtgaggtgctgtccgcaggcaccgccgcctgaccggagaagattccatccccggaccgggtcagctccacctgggccagacgcttgcgctccgcgccgccctgatagacattcagggtggcttccgccgactggtccggcgtagtcagggtcagggacaccccaagctccacctgatgggccgcggcgtccagccgaaggggcgtcagctcatagcgctccagcagcgactcctccggctgcggggcggtttgggcggccgctcgttccagcgcctcctcctgctcctggaggcggttttgtgtgcttttcaagtccaggcggagttctcccacctcctgttggagcgcggaatacgccgtctgaagttcccccagctgtccttgcgtctccgccagggctgctgccagcaaaaccacagccgcagtcagggcccaaagccagatgttctgcttcttcataggactctcccctctctgccaaaacacagccgctccgaatcaggccatgtccactatccatgatttccagtcatgcgtccggacggatctcgatgattaccagctccgggcgattgaaaatgcggggcagccggacggcagactgtctcccctacattccccccggagaaaatcctcttccggtgaggccggtcagcggttgaccgccgggttgtctgtccgccccagcagatagtccacagagcagtccagatagtcagcgatgcgttccagcttttccgctgacggaatctgtccgcctttttccaggtcatagataaaattccggttgatctgtgtctgctccagcaaatttttgactgaaattttctgcgctttgcagcgggccttaattctggctgaggtagtcaaaacatccaaaggaccattccctttcttaaaatacagttttttctgatcgttctgttgacttacagaaatttctgtattatactggtttcatcattccgaaatgataccataaaaagctgtattcgcaaaggagtgtctcctatgccatccgtttttgagcttctgttcgatacctacggcgaccatctgatgcaggagcaggcgccctatgatgaggcggaaatccaggcggcgctggaccggatgtccatgccgcaggacatgcagatccaggtctgtgatctcctctccagccgctatctccgctggggcacggctgcctttgccatcggcctgcgactgggcctcaccctgggcagccagtccgtggaccggcaaatcgttacgtaaattgccgcaggacgatgatccccgcggtgacggccagccccagcgccagggccagatagtcccgcccctcgtactgcagcacatggagcttggtgcgtccctcgccgccgtggtagcagcggcactccatggccaccgccagctcgtccgcccggcggaaggcgctgatgaacagcggcaccagaatggggatcagggccttggccttctggatgatattcccgctctcaaagtccgcgccccgggccttctgagcggacatgatcttgtctgtctcctcaatcagggttgggatgaaccgcagggcgatggacataatcatggccagctcatggaccggcacatggatttttttcaatccgcccagcaggcgctccagcccgtcggtgaggctgatggggctggtggtgtaggtcatcaggaacgtgcccatgatcaacagcatgatccgcagcaccatgaacacggcgttctgcagaccctccgcggagatccgcaggaagcccagctctgccaggatgtgctctcccggcgtgaagaacaggttcaaaatgccggtgaacacgatgatgaacaccaccggcttcagcccccgcaccagggatttgatccctactcgggagatgcggacacacactgccagcaccgccgccagaatgccgtaggccagcaggctcttggcgcagaacagcgccacgatgtaaaggaccaccagcaggatcttcgtccgggggtccaggcggtgggccacggtgtcgccggggaaaaactggcccagggtgatgtccttcagcatcccgtctccccccttctcagcgccagcagctcccgctccagggcctccacggtgtagaccgcagggtcgatggcgaggccctgctcccgcaggcgcatggcaatacgggtcacctgtggcacgtccagcccggcagagagcagctcctccgcccgggcgaacacctccgccggagtcccgctcatcagcacgtgagcggacttcagcaccaggattcggtccacattccgggcaatctcgtccatgctgtggctcaccaggatgatggtgcgctttttattgcggtggtagtcccggatgttggccatcaggttctcccggcccgccggatccagtccggcggtgggctcgtccagcaccagcacctgggggtccatagccatgacccccgccagggccacccggcgcttctggccgccggagagctcaaagggggatttgtccagctgatcgtcccggatgcccaccaggcgggcggcctcccggacacagcggtccagctcctccccggtcttgccctggttgatggggccgaaggcgatgtccttgtacaccgtctcctcaaacagctggtactccgggtactggaacaccagccccacctggaagcggacgtcccggatcttctttggctccgcccagatgtccttcccatggagcaggatctgccccgacgtaggccgcaacaggccgttcagatgctgaatcagggtggatttgccggagccggtgtggccgatgatccctaagaactccccatcgtacacgtcaaagctcatgtcctccaccgcgctgcgctggaagggcgtgcccacgctgtacgtgtgggtcagatgttgtacttgcagtatcggttccaatgttctcttcccttccgattacttggaaacggcggccaggatggcgtccgcgcactcctccaccgtcagggcggtgaggggcacgtccagcccgtctttgcgcagccggtccagcaggtccaccgtgtccggcaccgtcagtcccatggaccgcagccactccacctgtgtgaagacctgccggggcgcgccgtccataatgacttttccgtcgtccatgaccacaacccggtcggcgtcctccgcctcgttcatgtggtgggtgatgagcaccacggtgatgcccttctcccggttcagcctgtgaacggcggagagcacctcccgccggcccaccgggtccagcatagcggtggcctcatccagcacgatgcattccggctccatagccagcacgccggcaatggcgatccgctgcttctggccgccggagagcagatggggcgcgtggcgggcgaactcgcccatgcccaccgccgccagggcgtcgtccacccgctgccggatctccctgctggaaacccccaggttctccggggcgaaggccacgtcctcctccaccacgttggccacgatctggttgtccgggttctggaacaccatgcccaccgtccggcggatggccagcagcagatgttcgtccagggtgtccattccctccacgtacacatggcccccgcagggcagcagaacaccgttgagcgtcttggccagggtggacttgccggatccgttgtggcccagcaccaccacgaaggagccctgctcaatggtcaggtccacgcccttcagggccagaaccggctccgctccctcgtccgccgggtaggcgtactgtaaattctccgttcggatgatctccgccatagctgtcctcatttcgtcagtcttgtatttgccggaccctgaaccgccgggtccagccgggggctgcccggtccagcaggcaccagctccagaagccgcaaaaggcccccagggtgttgagccacaggtcgtcgatgtcaaaggcccggcccaccagcagctgccagcactcaatgaaccccgtgacacacaggcccgcggcgagcgcgcgtttccacgtgcacccccgccacagcagggcggggaaaaagccaaagggcaggaacatgatcagattccccgccaggatgtaaccgtcgcccagggtccggaagggaaccagattgacagtccccggagcgaagaagggattcccctccccgttccagccgcagccctgaagcaggtccgccagggcctggacgacccatcggggcgtcagggtcaccagggccatgccgccgcagaacatccagaagagggccatccccgcctcccggaccgccggactggcaaggcccgcggcggcgaggtgccgccggcgccgggggctcaggcacccaaagagcgccagggcaggcaccgcccccgctgccagcgtcagcaggtatgccgcagtccgtcccacggcctcactcgctgcaccagcggcctgtggcaccgcagggcagagccaggcccgtctccgtcaccggcaggcccagctcgtcccaggtgcacttgccgccgtatttggcccccaccaacagatgcagcagataccccagcaccgacggggccaggcccgtggtgtaggagttgatgagcacgaacaggggccgctccgacagcacgccggcgcagagcttcacgaagtcgtagaggttgtcctccagcttccacacctcgccgccggggccccggccgtagctgggcgggtccatgatgatggcgtcgtaggtcttgccccggcggatctcccgctccacaaacttgccgcagtcgtccacgatccagcggatgggggcctcccccaagccggagagtctggcgttttccctggcccaggccaccatgcccttggccgcgtccacgtggcagacgctggcccccgccttggcgcaggccaccgtagccccgccggtgtaggcgaacaggttcagcacccggatgggccgcccggcgttccggatcttctccatggcgaaatcccagttcaccgcctgttccggaaacaggcccgtgtgcttgaagttcatgggcttcacctggaaggtcaggtcccggtagcggatcttccagctctccggcagggtcttcttctcccagtggccgccgccggactggctgcggagataccgggcgttggcccgcttccaggcggggttcttccgggggctgtcccagatggcctgggggtccggccgcaccaggtactgctctccccagcgctccagcttctctcccccgccgcagtccagcagctcatagtcccgccattgctccgcgatccacataccaaaattcctccagacaaactcttatccattgtaaatcatgttattataccgccttgggaccgtgtccgtcaaccgtttggggcggttttatcccgcccatgcgcagaaaaagagaccgccgggcggcggtctcacaggggctgtgcttcaatgcacggcatcccacagctcccgggcaaaggcccgggtgcgggcctctttctccgcgtccatgaaggggacgtcataccccaggtgccgctccgcgtggctgcccagaaaacggagctgggcgtgcttgcagtaccggcgcatcccctcctcgaacaggtcgcagccccgctccgggcggtagccgcaggtcagcagcagagccagggctttccccgcccacagggcgggacctttttccgccccgtaatacttgtccatgccatacaccagccggtccagcaatgccttcatgggcggcgtgcagtaccaggaatagatgggcgtggccagcacgatcaggtcgcacgccagcaccttgtcaaagatcgtgggcacgtcgtcccgctgagcgcaaccgaatgccgtccagtcccgctggcaggcccggcaggccgtgcagggcctgatctccagagcatggagccatacagtttccgtctccgcccccagcccttccagctcctgccggaaggggcccagcagggcgttggtattgccctgttttctgggactgcccatcagaatgcacaccttcatcgaatcgctcccccttctctgccggccaatcttgttggttccatcatacctggaacgggacggtccgtcaaggagaggacgcatgcagggccgggacagtatgtcccggccctgcggcactctgttcagttcttttccagcagtgtttccagccgctggaggatcactgccgtctgggcgcgcgtggcggagccggacggatccagcgtgccgtcggaccggccctggagcagtccggcagacaccgcccaggccagggcctcccgggcatagtccgccacagcggcgctgtcggagaagcggctcaggtccgtccggcccgcggtatccgctcctctgtattccgtgtaccggaacaggatggccgccagctgctggcgggtgatccgcccctccgggcggaaggtgccgtcgtcaaagccccggacgattccctgctgttccgcccaggccaccgcatcggcgcagtagctgtccgccgccacatcggtgaagggaggcgtccccgccctgggtctgccctccagccggtagaggatggcggcgatcatgccccggttggatgcccggtcaggggaaaaggtgctgccggtggtcccctgcatcagccccgcctcatacacatattggaccgcctcttcataccacgcgccggggggtacgtcccggaagggattatcccaggtgctgcggaaagccccgctggcggcagcgatcagctctcccccatcgtcctgggagatctcccagaaccccacgccgcccagacccagagaccgggccagctgtgccttggcagcgagggacacggcatcgtcgtaggagacgaaggtgcggtttccgtagagccagggcacctgcgcctcttcatggcggaactggcggtagtccgtgttgtccagatagctcttcttcagcatcttgtagctgacggatttggctgatgtgtaagtgctgtacaggccgttgttctgggccttgaccccctggtaggcatagccgtacaaaggcatccccaggacgatcttttccgccgggataccctttttcagataggcctgtacgcaatcggagatgctgcttctgctctggggcgaggtgccggagggcgcatacaggggtgcgttgaagtccgcgtaggtatcccaggtgccgtggaggtcatagcccatcacgaagatgtggtccacaatggcggccaccttcacggcctcgatctggtttaagtaccagctcccggcggcgccggcgatagtgagggcatagtccttcccgtcccggcggccctgccgatccagctgctcccgcagctcctgaagcagcagagtgaagttctgcttgtccgccgggcggtggatggtccccgccgcgccgccggataccgggtactcccagtccaggtccaccccgtccaggccctgctccaccacaaagtccacacagctggcagcgaagctctcccgccgggccgccgtggcggccgcgtcggagaagtactgggagtccgaccacccgcccacggagatcagcagcttgagatgctggttctgctggcgcagcttccgcagggcggccaggttcttttggtcatgggcgggattctccagagcaatggtgagggtatctgggtcgatctgggcaaaggcgtagttgatctgagtcagatgctccgccgggatttggtcaggggtgaagccctggtaggccgcccatccggcgtagtagcccaccgcctctcctccggcggaatatgtacgctcttccgcctccgtgggggtgcccagcagcagggccgccatacacaggacggccagcgcggcggcggttcgtctgatgaaatttcgcaagggaaaacgctcctttttcagatgatcgtcaccaaaatgcgtgtgtcgtcacgccctattttaccggaacgggctgcgggcctcaaggcacaaatgctgggagcacggccagaaaacagcagcgcggcagaccctctcgggtctgccgcgccggcacttccagttatggctttgtttatacggagactgtctgaggctccgccgcgctctgtggggtctctgcgggcgccggagtctcccgggcactctggtcggcagtcttctccgccagccgctcccgggccactgccagcatcagcttgatgcggttctcctgattcacccgggtggcgctgggatcgtagtcgatgggggtgatattggcctgggggtacagctcccggatcttgttgatcatccccttgccgcagatgtggttgggcaggcagccgaatggctgggcgcagacgatgttctcgtacccggcccgcaccagctcgatcatctcggcggtgaggagccagccctcacccattttgttgccggtggagatgacgccgtccgtcagtttcaccagctcctggaagggcaggggcgcgtggaagccgttgtccttcaggacccggatcatcaccttctccatgccctcgatgtagtccaggattacgcttgacacatgcttttccaggaaggtgccgccatacagccgggcggtttcggaggggttgtaggcgcagtactgcacaaagcccatcaggcccggcaggttcacctcgcagtcctgggaggccaggaacttctccaggtcattgttgcccaggggggagtatttcacgtagatctcccctaccacgcccaccttcaccttgggtacccggtgaacgggaatggcggcgaactctgcggcgatcttgggcatggcggccttgatctcccggccggaccagcccttgtcctccatgacccagccgcagatggtgtccagccacttctcctgcaaagcggccgcgtcccccttgtgggtctcatagggctccgtctgggccttcagggccaccagcaggtcgccgtagtagatgcaggccaggagcttgcgcatcaggggcagggtcatggggaagccggagtccttctccaatccggagaagttcaggctcaccaccggaacctggccgtagcctgccttcaccagggccttgcgcagcaggtggatgtagttggaggcccggcagccgccgccagtctgggtgataatcagggcggtgtggtctagatcgtacttcccggagcccagggcgtccaggaactggccgatgaccagcagggcgggatagcaggtgtcgttgtggacgtatttcaatcccagctcgctgacctggctgccgcagttctccagcagctcgcaggtgtagccggcctgccgcatgacggccgccaggatgcggaactgcaccggggccatgttgggaatcaggatcttatgggtctttttcatttcaggggtgaacttggggtaattctggaattccagctccatgtctcacgcctcctttctggcagtttcccgggcctcgtcctgctcatccagggcagcgaacaggctccgcagccggatgcggacagcgcccaggttggtgatctcgtcgatcttcagctgggtgtacagcttgccgcccgcctgcaggatctcccgtgtctcgtcggaggtgatggcgtccacgccgcagccgaaggagaccaactgcaccaggtccatatcccgctgggtgcagcagtagcgggctgccgcgtagagacgggcgtggtaggtccactggttcagcaccgtggtggggaatttctccacccggttggagatggagtcctccgtgatgaccgcggcgccggcgcgggtaatcagagtgtcgatgccgtggttgacctccgggtccacgtgatagggccggcctgccagcacgatgatccggcggccctctgcccgggcctggtcgatgatccgttccccctccttgcggatgagggacatgtggtgggcgtactcggcgtaggcggcgtcggttgcctccttcacctcgcccttggtgatgtccgggaagtagctgcgcaggatggtgaagatctttttggtgaagtccttgggccggtggaggcccacatagtcatagatgaacttggtctgctggacctctgggcagttgccggcaatgacctccggatagtaggccaccacagggcagttgtagtggttgtcccccagcccctcatccagattgtaggtcatgcaggggtagaagatcgcgtccaggccaagctttgcgaggaactgaatatgaccgtgggccaacttggcggggaagcaggcggtgtcgctggggatggtgccctgccccttcagatacaggtcccggctggagaaggggctgtggtacaccgcgaagcccagcttggtgaagaaggtgtgccagaagggcagcagctcccacatattcaggcacaggggcagcccgatcttgccccgcctgccggggacgggcttgtagcccaggatcagcttgcgcttgtattcgtagaggttccgctccccggtgtccgccttgccggtgacgggccggtcgcagcggttgccgctgatgaaggtggccccgtcggcgaaggtgttgatggtcagctggcagttgttgccgcacaggccgcacacccggctctccgtctcctggcggaagtccgccagctcctgacggttcaaaagcgtactggtctgatccgcccgggcctttccccggccgaacagggcggcgccgtaggcgcccatgaggccagcgatattgggccggataacctctacgcccatctccttctcaaaagcccgcagcaccgcctcgttgtagaaggtgccgccctggaccacgatgttccggcccagctcctcgggagatgaggcccggatgaccttgtagatggcgttgcgcaccacggacatggagaggccggcagagatgttctcaatggtggcgccgtccttctgggcctgcttcacgctggagttcatgaacacagtgcagcggctgcccaggtccacaggccgctcggcaaacaggcccagctgggcaaactctttcacgtcgtaccccagcgcctgggcgaaggtctgcaggaagctgccgcagccggaggagcatgcctcgttcaggaagatgttgctgatggcgccgtcctcgatcttgaagcatttcatgtcctggccgccgatgtcaatgatgaagtccacattgggcaggaagtggcgggcggcggtgaagtgggccaccgtctccaccacgccgtagtccgcgtggaaggcgtttttcgccagatcctctccgtagccggtggtggtgacggacgccacatggagggccggatgctcgtcatagagctcctgcagcacctgccggatgaggggcaccgggttgcccaggttgggccggtagtcggagaagaggatgcgggcgtcctggtcgatgaccaccagcttcacggtagtggagccggagtcgacgccgatgtgcaccggggcggcgtagtccgcgccgaagggcacctggggcaccgtggccttggcgtgccgggcccggaacgcctcatactcctcacggctgctgaacaggggcggcagggagcggtaggtctccgccgcgccgtgcttctgcaggtcgtccgccacctggttcaggtcgaattcctggtcggaatagaaggctgcgcccagggccacgtacagcaggctgttctccggacaggtgccctggacccccagggtgtggtcaaagctctcccgcaggactcgggagaaggtcaggggcccgcccaggtacaggacgttgcccttgatgggccggccctgggccagcccagcaatggtctggttcaccaccgcctgatagatgctggcggaaatatcctccgccttggcgccctggttgatgaggggctgcacatcgctcttggcgaacacaccgcagcgggaggcgatggtgtacgtcttctccgcccgctgagcggcggcgtccatctcgtcggcgctcattttcagcagcgtcgccatctggtcgatgaaggcgccggtgccgccggcgcaggagccgttcatccgcacctccatgccgccggtgaggaacaggattttggcgtcctcaccgcccagctcgatgatgcagtccgtccccggggccagcttgttggccgccacgcgggtggcaaacacctcctgcacgaatgggacctgcacgctctccgccatgcccatgccggcagagccggagatggccagatccgcttttgcgccgtgctgatccgccacccggcgcagcagctcctccgacttttccagaatatggctgtaatgccgctcgtatgtactgtataccagattatccgcatcgtccagcaccacgcatttgatggtggtggatcctacgtcaagtccaactttcaactctgcttcctccttctgggaaaacggttgcgtcagagttttcaacagctaaccgcatgataccacattagttgacatcatacactttttccatgggatgttcaatcggcaatattctgaaagactgttaatttttcgttaagaaacttggctgggaaaggggcttggccttttctctcttctatgctatactggttccatctcagaaccaaagagaggcattttcgacatggaacgcgttttgctgcacacctgctgcgccccttgttccctcagctgcatcgaacctctgcggagcgagggcatcgagccggtggcgttttggtacaaccccaacatccacccctggaaggagtatcaggcccggcgggactgcctgctggcgtatgcccccaccatcggtatggaggtccgggtacaggaggactacggtctgaaggactttgtccgccatgtggcgggagacatcgaccaccgctgcgcctactgctacgaacaccggctggagggcacggcgaagtatgcggcagagcacggctttgccgccttcacctccaccctgctggccagcacctatcagaatcacgaggccatcgccgccgcagcggagatgtatgcccggcagtacggggtggaatttctctaccgggacttccggtcaaacttccgggccggcaaccagcgggcccgggagctggggttctatatgcagaagtactgcggctgcgtcttttccgaggcggaccgctatcagaagcagatcgaccgggaccgggcaaaatttgacgcggaggaggcggcccgacagggctgacgagcttcccttcgatgcgcaaaaaagacctgcacggcagctgccgcgcaggtcttttttgccatttgagacgcagggattcagaatttgcggatatcgtccagcgacacgatgaacaccgccgcaccgccggccatgacctccatgggtaccggcggcaccgcggacatctccccgtggggcatggtcacgctctggtacacggtctccttccggtgtcccgcatacttctgcaggacgtccagggcctcttccagccgatcctcctccacgccgatcatcaccgtggtgctctttttcttcaaaaagccgccggtggagctcagcaccgtcaccatgaagccgcgctcattcaggttacggatggtgttgtcggaatcgcttccctgtaaaacggccagcaccagcttgctctttttctccatattgctcacc

SEQ ID NO: 4909 - DNA, 36457 bp, Unknown
  gut microbiota DNA sequence
gggcacgtcgttcctccttattttacctctcgtgcgaaaaattgcaagcgttcttttccacccggcggcagactcatgcctcccggcagaagatgggaacgccatccttccaggtctccagtacccgaatatcccggagctcctcctgcggcaccgccagggggtcccggtccagaatcaccagatccgcctgcttccccggcgccagggtgcccttgtccgtctcctcaaaatactggtatgcagcgtggaccgtcaccgcctccagggccgtccggacgtccacccgctcttcccggcccaggacgcggccctgccgggtcacccggttcacggcacaccacaccgtctccagcatatcgggccggatcaccggcgcatcctgatggaatgtgaaggggatccccttctccgccgccgagcctgcgggactgatggcctccgcccggccgggtcccagattttccagatggacatccccccagtggtacacgtgggccacgaagaaagaggggatcacccccagccgcctcacctccggcagttggtccctgcccagcagctgggcgtggatcatcaccggccgcagtgccgccagatccacgccttcccgcgccgccgcatccagcgccgccagatactgggcgcaggcggcatccccgttgcagtgggccagcagctgcattccatctgtcccggcccggcggaccatgtccagcacctctgcgtccgtcagggtgccgtagccccggtattcctgctccccctgatagggccgccgcagccaagcggtacgtccctggggagatccatccagaaacatcttgtacccgcccagcttgaagcgccggtgatattgccggacactctccggaaatgcctgccgggccgcctccgctccctccggatctccgtaggcaaccacatccagcttcagggacccgtccgccagcagggcctgatacaggggtaccagctcccggcgcagcagcccttcctgcacggtggtgattccgtaggaggcgtacaggtcctgggccttccggtaggccgccagaaacgactccagcggcctcatgggcacccgcttttggaactccagaaaggcgttttcctccatgtagccggtgagggtgccgttctcccgtccgatgacgcctccggcgggggcaggcgtctgcgcagtgacacccagccgctccagcgccgcggtgttgaacacgcccatgtggccggactggtggcagatcaccaccgggttgtccggcgccgccgcatccaggcagagccgatccgggtggcgccgctccgagagcaggttgtggtcgtacccctgtgccgttacccactgcccggcagggatgcgctcccgccggatgtagtcccggatccggtcctgcatgtccgcccaggaggtgcagccctccaaagacacctgcagaaactggttggccaccgccgtaaagtggctgtgggcgtccagaaacgccggcagcagcgtcctgcctgccagatccacccggcggacgtcgattcccgtctggtcctccaccgccgtcctgccccccacggcggcgatccggccgttgcgcaccaacagggcctgggcatcagggctgttccgctccagagtgcggatggtgccgttttcaaagagaatgtccatgcgattcctccttttctcccagtttaccgcggcagggcgcgtcccataccccggcgtgaaactccaagtataggacagtatgccgcgaaaaggcgtgagccctgctgcacatgaagctgcggcatatctgaacgcctttccccatctgtatggcaaaacaggccgcccttccggacggcccgctggctcagttcttcaggctgtggaggggcgccgggatgcggccgccccgggcgataaagtccgcgctggactccgggtgcaccggcatcaccggggcgctgcccaggaggccgcccatctcgatccggtcccccacggtcttgccgggggcgggcagcagccggacggcggtggtcttgttgttcaccatgccgatggccgcctcgtctgcaatgatggcggagatggtctctgccggggtgtcgccggggacggcgatcatgtccaggcccacggagcagacgcaggtcatggcctccagcttgtccaggcagagggtccctgcctctgcggcggcgatcatgccctcgtcctcgctgacggggatgaaggcgccggagaggccgcccacagaggaggacgccatgacgccgcccttcttcaccgcgtcgttcaacagggccagcgccgccgtagtgccgtgggtgccgcagacctccaggcccatctcctccagaatgcgggccacgctgtctccgatggccggggtaggcgccagggagagatccacgatgccgaagggcgtgtccagccgacggctggcctcctgggccaccaactggcccatgcgggtcacccggaaagcggtcttcttcactgtctccgccaccacgtcaaagggctggcccttcaccgctttcaaagcagtacacactacgccggggccggagacgcccacgttgatgaccttctccgcctctcccacgccgtggaaggcgccggccataaaggggttgtcctccacggcattgcagaacaccaccagcttggcgcagcccaggccatcccggtccgccgtggcggcagcggtatccttgacgatgcggcccatcagggccaccgcgtccatattgatgcccgcccgggtggaccccacgttgacggaggaacagaccagttctgtccgggccagagcctccggaatggagcggatcagcttctcgtccgcctctgtcatgcccttctgcaccagggcggagtagccgccgataaagttgacgccgcaggtctgggccgcccggtccagggccagggcaaagggcacgcagtcctccgtctcgctggccccggccaccagggccatgggagtgacggaaatgcgcttgttcacgatggggatgccgaactcccgctcgatgtcctcgccggtcttgaccagcttctccgcataccgggtgatcttgtcgtagatcttctcacaggcccgcttcgggtccggatcacagcagctcagcagggagatgcccatggtgatggtgcggatgtccaggtgctgctggtcgatcatctcaatggtagataaaatttccttctggttcagcataacgtatctcccaacgtacaaattctctctcaaaaggactccggaaacgggtaaaagaggctaggggaaaacctccggttttcctcagttcttttacctccggcaaaagaagaatattaaatcattttcggcagggcgtgtacctgccgaaaatttcttgacccagccgccggggacggcgtccccagtgaccaacgtctcactggggagggggaatctaaagggtgggcgcagctccctcttgaagtcagatgcgatgcatggcatcaaatatctcctcccgctggatgcggatagagatctccatcttctgccccaactgctccagcaggtcccgcagctcgcccacggagaccttggccgctcccacgtccacggccatgaccatggtgaaggagccctggaggatcgtctgggagatgtccaggatattgacattgtgctcagccagcagggcgcagacggcggcgatgatgcctaccttatcctgccccacgacggtgacgatggcgttcatagcgaagttcctcctcatggccgcccgccggcaagcccggcgaggcggcattctcttgtatacagcgtccgtattgtaccacagatgggcgggaaagtaaatcctctctcatcccagcggattgacgaatggtccccagcccggaggcgtgaaggtcagcagcatgtacagccccgccagaagcagagccagggctgcccacagccccgggtgctttcttccgtccgggcagaaggccgtgcccgccgccagcagcaccgcccagaccgccaggctcgccgcgccgtttcccccggcggccgccaagccccagcacgccgctgtcatagccaggggcgtcagcaccgctgccggcagatcctgcagcagcgtgcggcgctccctgcccagccggccggtcagcacccaggcggcaagcagcggccagaaggccagcttgctcaactcccaggggctgggacactggggcacgaacgcggcaggcagtccgctttgtgccgtgctgtggagcagcagcagtgccaggccgcacaccacagccgccagataccgcagggcaaaacgattgaagggatctctcatggttcgcctcacctcgctccactgtatgcagcgcggcggcggagcagaccggaaaacagcacagggcgcgccggtgggcgcgccctgctgggctgatgctccaggcggaatcagatctcgccgaagaacttgtcgtggatggcccggaccgcccggttcacgtcctcctcatccagcagaacggagactcggatctcagaagtattgatcatctggatgttgatgcccgcctcatagagggcctcgaacatccgggcggccacgccgcagttgctcatgaggcccgcgcccacaatggagaccttgccgatgctctcatccgtctcaatgtggtcgaacctcagggtctctttatgttcctccagaatctgcttggattcctccaggtccttcttgtggaccgtgaaggtgatgtccttggtgtcctcccggccaatggactgcaggatgacatccacgttgatgttgtgcttgctcagcaggtcaaagacctggaatgcgacgcctgggttgtgctgcagaccgatcagggcgacgcgggcgatgctggtgtccttggcgacaccggcgatattggttttctccactttggtgacctccttgactttcgtgccgggcttgcgctccaggctggacacgacttccaaattcactctgaacttcttggccagctccacgctgcggttgtggagcacctgggccccctgcgacgccagttccagcatctcgtcgtaggtgatctcatccagtttgcgggcactggggacgatgcgggggtccgtggtatacacaccgtccacatccgtgtagatctggcacagatctgcacggaaggccgccgccagcgccacggcgctggtgtcggacccgccccggcccagggtggtcacgtccccgttgcggtccacgccctggaagccggtgacgatcacgatccggtgctggtccagctcggactggatacgctcggtgtcgatcttcttgatccgggcgtcggagtggacggaggtagactgtatccccacctgccaagcagccagggatatgcagggcaggcccatggcctccagggccatggcgcacagggccacagagatttgctctcccgtggagagcagcatatccatctcccgcttggaggcgtgggggttgatctcctccgccttggcaatgagatcgtctgtagtgtctccctgggcggagaggaccacaatcacgtcgttccccgccagataggtctctgcgatgatgccggctacgttgcggatgcgcttggcatctctcacgctggtgccgccgaatttctgtacgatcaagctcatggcatttccttctttaaatcagaatcaagtctcaaatcccggttcccgcctgttccagtatacacatcttccggcggtttggggcttatcccagcacccgcagacaggccaggacgcgcaggccttcggcctgcttccctgcctcggctccgctgatgcagtcggtgaggaaggcggtctcaccgccgtcctcgctgaggatctccacctggccgaaggccgcggcagcggcgctgaggctgccgccgatgcggaagtagtaccggctccgaagggcctgcgggtcctcaaagcccgccgggtccgcctcccagccgatctcctcccggcgggggctggactgaagcgcctccatcacgtccgccacgcaggcggaggccgtgggcagctccccggccccctggccgtagaacatcacttccccggtggcgtttccccggaccaccaccgcgttgaacacatcgtccacgctggccaggggctgctcctccgggatcagatggggtgccacataggcggtacggccgccgggcaggcgcaccgcccggcccagcagcttgacgcggtagcccgcccgctgggcgatcttcacgtcccggagagacagccggctgatcccctccatgggcacatccgccgggtccacctgacagccgaaggccagatccgccaggatacagatcttccgcccggcgtcgacgccctccacgtctgcggtggggtctgcctccgcatagcccttctcctgcgcctctttcagggcgtctgcaaaggtggtgccggcccggaccatccgggtaaggatataattggtggtgccgtttaggatgccgtacacctcgtcgatccggttggcagccatgcactgggtcaggggatgcagcactgggataccgccgcccacgctggcctcgaacaaatagttcacgccccgctttttggccagggccagcagctctgcgcccttctccgccaccagctgcttgttggcggtgaccacgtgcttgccggcgttcagggcccgcttcgtgtactcgtaggccgcctccacgccgccgatggtctccaccaccacccggatagcatggtcctcctcgatcttcgtgaagtcatccgtcatcagctgacggtagggcccgtccttgaaatgccgcaccagaatggtcttcacctgcaggggctcgcccagctttcgctcgatctgccgggcgttttccgccactaccttggccacgccggtgcccaccgtaccaaggcccataatcgcaatctgtatcatgcgtccgtttcctctctctttatcctgccaggacttccacccgtaccacgccgtccacggcggccacgtctgccatcagcttctccagggtctccgccagtccgctggtctctgcggaaatcgtcaccgccgcgcagccgttggtgggaatgctctggttgatggtgaggatgttggccccagaagtggcaaacacggacagcacgctggagagcacgccggtgttgtccttgagcatacagtaaaaggtgatgatgtgctccgccttcatatcgttgaacggctgcaccgcatccttgtacttgtagaacgcgctgcggctgatccccacctgcttcgtggcagcgcccacggtgtccgcctcgccggtctgcatcatccgcttggcctccgccaccttcacgaagatctccggcagggcgttcgcggccacaatgtaatacttgatctctctcgccatctcgtccgcctcctatggccatttgtctttacacgcaaagcatcttaccatatttccgtaggcaatgcaaccaaattcgccgaaattcttttgacgaaaacaggaaaagttcccccggttttctccccctcacctgagcagaatgccggatagaaacaggcgccccggttttcaccggggcgcctgtttcctgatctcagccgattcacttctccgcctggaatacggccttcatgcccttataggtctcgtagcagtccagcttggacaccgtctcaaagggcgcgtgcatggacaggaccggcacgcccgcgtccagcgtggtgatgttccggttggccatatacatggccacagtgccgccgccgccggcgtccaccttgcccagctctgcgatctgccagatgacccccgcctcgtcaaagaggttgcggatataggccaccgtctccgcgtccgcgtcggaggcaccagacttgccccgggcgccggtgtacttgcacaggccgatgccgtagttcagataggcggcgttgcgcttctcatacacgtcggagaagttagggtcgtaggccgccgtcacgtcggcgctgaggcagaaggacttctcgaaacacacccgcacagccgcgccctggctctcgcacaggtcctccataaatgtgtcgaaagcggcggactgcatgcccgtcacaccgtcggagccgatctcctccttatccgccagaacgcacaccgccgtcttggcaggggtcccctccagatccagcagggcccgcagggcggcgtaggcacacacccggtcatcatggccgtaggcgccgatcatgctgcgatccaggccgatgtccgttgcctttaccgccggcaccgcctccagctccgcggaggtgaagtcatcctctgtgatgccgtacttttcgttcagcagcttcatcaccgccagcttcacacggccggactcctccgcgtccccgatcggctcgctgcccagcagcaggttcagggtctcagcggggatggcctccgccagcggcttcttgttctgctccgcgcccaggtggggcagcaggtccgtgatcaccagccggggatcgtccgcgcccccgccgatgttcacctgtacgctggcgccgtcccgcagggccaccacgccgtggagctccaggggaatggtaacccactggtacttgcggatgccgccgtagtagtgggtcttgaaataggccagttccccgtcctcatacagggggttgggcttcaggtccagccggggggagtctatgtgggcggcagcgatctgaacaccctccgccaacggcttctccccgatgtgggccagcagcacgctcttgccccggttgcagagatagaccttgtctcccggcttcaccgccgcgccccggacatagggccggtagccggcctgctctgccaggcggacaacctctcctgcgcagagccgctcggtcttgctagtgtccagaaatgccttgtagtccgtgcagtacgattccatggcgctccgctccgccgcgtccatccggtcgaagccgttgcggcggcaggagagcagctgctccttcagcgccttaaattccttgctttccatgtgctttttcctccttgatggtgtcgatcagccgctggaaaaactcccgggcctccatttcaaaggccgcggcggtatcggcggcgttattcagctcacagtcgcacttgccccggtagtactcgtccggctgctgggcggagatccgcaggcgggcgtactgctctgtgatgttgtcccgggccatgatccgccggacccgcagttccaaaggcgcggtgacggctatcgtccggtcgcacagctggtccagcccgccctctagcaggttgatggcatcgatggcgaagatcttgctctccgacgctgccaagcgccgccgcacctccggcaccagatggcgggccacaatgccgttgagctgctccagccggtccttgtgggagaagacctcctgtcccagcttgcgccggtccagttggccggctgcgtcaaacgcgccggggaaggagacaccgatctcatcccgcaggggagcgcaggtctccagcatctcatggtacagggcgtcgcagtcgatgacctcgccccccagggagcggatggcccgcagggcgctggacttgcccgcgccggtgccgccggtgaggcccagcaccacccgctcactgtccgcctccaccacatggaagccggcggcctttttcagccggttgccgatggccagacccaatccccggttgtccgggcactgggcgaagatctccgtcacatcgctggtgtcaaaggtccgcagggcgtcgaacacccgctgggcctggaccagcttgtcgcctacaggccccagggtgtggacctcctgctcccggaacaggtccacaaactcctcgaagcaaatgacgccggaggtgggccccacccgccgcaggatctcctgggcggacttctccggcgcgccggtgatgacggtgaccggcgccttgggggcgtagtggcggtacttcatgccgggggccttgggcttctcgccctccgccagggcgccgttgacggccttgtccacatcgatcttgccgatgagccgctccaggtcctccaggggcagtccgccgggacgcagcagcctgggcgggtcgcaggtcaggtccagaatcgtggactccacacccaccgcacagggaccgccgtccaccacgccgctgatccggccgtccatatcctccagcacgtcctgggcagtcgtgcagctgggccggccggagaggttggcgctgggggccgcgatggggatgcccgcctcccggatgatcgccagcgtcaccgggtggttggggcagcgcaccgccaccgtgtccagcccggcggtggtctcgtccgggatgatgggccgccgcttcaggatcatagtcagggggccgggccagaatttccgggccagcacataggccaggggcggcacgtcggcgcagtagcggggcagccactgggcgccggtcacatggatgatgaggggattgtcctggggccggcccttggcctcaaagatccgcttcaccgcggtgccgtccagagcgttggcccccaggccgtacaccgtctccgtggggatgcccaccaggccgccgtcccgcaggatcttggccgctgcgccgatcttgtcctcaatctccttctgctgacccttggtgtcccgcaggtcaaaatatcgtgtctgcatatctcttcgcctctatctctcttcgccggagatctccccggccttattgcttactctttctgcgtctccaaagggctccgcggcgtcccggcaggctgccggaagtgcagcccctccacggcgccgctctatccgggccgccgtacagctctgttttatggttccccgccgccgttcttcagcttctccgcctggtcggcggtcaccagggcgtcgatgagctcatccagttccccgtccagaactgcgtcgatccggtacagcgtcaggccgatccggtgatccgtcacccggccctgggggaagttgtaggtgcggatcttctcgctgcggtcgccgctgcccacctgactcttccgctctctggcgatgtcggcatcctgcttttcccgctcgatctcatacaatcttgacgccagaaggcgcatggccttgtcccggttctggaactggctgcgctcctgctggcattccactaccaggccggtgggccggtggatcagccgcacggcggaggacgtcttgttcacatgctggccacccgcgccgctggcccggtagacctgcatctcgatgtccgcagggtccagcttcacgtccaccccttccgcctccggcagcacggccaccgtggcggcggaggtctggatgcggccattggactccgtcaccggcacccgctggacccggtggacgccgctctcgaatttcagccgggaccaggcgccctcgccctcgataaggacgctgcactccttcacgccccccagctccgtctcgttcagctccacggtgtcagtcctccagccccgggcggcagcgtacatggtgtacatccgcagcagcgacgcggcgaacagcgccgcctcctcgccgccggtacccgcccggatctccaggatcacgttcttccggtcattgggatccttgggcagcagcaggagcttcagctcctgccgtagccgctccatctcttcccgtgcggcggtcagctcctcctgggccaactcccgcatctccgggtcggagagcagctcctccgccgcggctcggtccgcctccgcctgccggtatgcctggtacgcctctgccaccggagtcaggtccttcagctcccgattcacagtcttcagccgctccgcgtcgccatagacagacgggtctgccagctgggcttgcaggtcctcataccgcagggccagctccttcagtttttcctgcatggggcatctcctctcccgttgatttcagaaaagggtctgccgctactgcccctccagaaaggcccggacctggcggagaaactcctcctgccagaatgcccagcccacgtccccgctccgcaaggacaccgccgccagatgaccggcgggcacacagagatccatctggcgataaacctcctggtactgggagccgctgctgcgggtcagcacataggccgcgttgcggatctccccgccccggtctttcagaaacgaccgcatgacggcgctggatcgcccggcccacaccggtgtgcccagaatcaccaagcggtagtcccccaggggacgggctgtctccaacggggccacggggcgggtgtctttgcgcatggcgtccagcccacagcgcagccagccccgccagccgctccggtccgcgttgtcccgcagctccgccagctccgcgtccagggcggcggcaatctcctccatggccttcttggtgttccccgtccgggagtaatagatacataagatatcgctcatttggttcctccgtatccgctcagtcaaacagaaaggtctttaccatggcaaaggcctcccgcagggtgtaattgatctccaaatgaacccagggcagcggcgctgggatcccggccacgtctccgtagccctcccgggcggcgatcagctccgaccgggcgatgtgaaagtcgttggtgacaacagccacccgtccctccgctgggtcgacccccgcctcatacagcaggggcttggagagggcgaagttctccgccgtgttggatgcctgatcctccagaatcagccgccccggctccacgccatgggccgtgaggtagtcgtacatgcacgccgcctcgctgatctcctcgccatagccggtgccgccggtgagcaccaccgggatctccgggtgggcctccagatagtccagggccgcgtccagccgggtccgcagggacaacgacggctccgtgccgttgacccccgctcccaggacgatgaccgcgtctgccggcaggggcgtcatgtcgctgcgcccccggttaatgataaagacctccagccccagcagcgcagccagtcccaccgtaaggcagccataaaagccccggcggatcagccgccagcggtgatttccggcggccaggcgatccagcagccaggaaagcaccaggagcgccgccagccccagcagcagaaagccggaaaaccggatgcccaggctccggatcagcaccagaagcaggccgaaaacggcgcagcccgccgccccgatcagccgggcctgtcctcttctgcggccccggtagacatcgtaccggtacaggggccgctgtttagccctctgcctcttcactgagctgctcccacctttcgtacagggcgtccagctccgcctgggcggcgtccttctgccccaccagctcgttcagcttctcatagtcgcaggccgcggcctccatatctgcctccagagcggcgatgcgctcctccgccttggcgatgtcccgctcacagatggtcagctgccgtcgggccgcctgctgagccttgttgccccgctggggccgctccgcagcgggcttttcccgctccttctccggcttgggagcggcggccttctccgcctcctcctgagccttcatctgccggtattgggcaaagccgcagggataatccgtgatggtgccatccgtcagctcccagatccgggtggcgaagcggttgatgaagtaccggtcatggctgacaaacagcagcgtgccgtcgtaggcctccaccgcctcctcgatccactcccgggagtcgatgtccagatggttggtgggctcgtccaggatcaggaagttgatctcgtcatccatcagcatgcacagccgcaggcggctctgctccccgccggagagcaccgacaccggcttgaacacgtcctcgccccggaagtcgtatgccgccagccggtttcgggccgactgggccgagaggccctttttcgccgccatcatattctccaccaggttccagtctgggtggtcgaagcggacgatctggggcaggtatgcctccttcacctgggggccggttttgatgcggccgtcgtccggatacagctcccccacgatcatcttgataagggtggactttccggtgccgttgtcgccgatgagggcgatgcgctcgcccccctccaccttcaggctgatgccctcaaagaggtgcttgtccccgtaggacttggacacgttccggatgcccagcacctcgtccccgtggaactctgcggaggagaaccgggcgtccatcttccgcgccttggtgggtttggaggtggtccgcatccgctcgatgcgcttttccatggagatggcccggcggtaggtcttgtccatgcccatgaaagcccagacccgcaattgctccgccgccttctccaactgtgcgatcttggcctgctctttttcgtactgcttcatccgctcctggtagcggcgttccttctccacggcgtagaagctgtaattcccgctgtaaaactccgctttcccgtcctggatctcgatgacccgggtgacggtgcggtccaggaaataccggtcgtgggagatggtgaccaccgtgccgtggaaagagcgaatgtactcctccagccactcggtagcgtggaggtccaagtggttggtgggctcgtccagcagcaggatgtccgtgtcctccaggatgaggcggcccaggttcacccgggtcttttccccgccggagaggctgtcgaacagctgggaccgctggctgtccggaatggacaggccgttggcgatcttattcaccgccacatctgtgtcatagccgccaaatgcctcaaaccgctcgcttaatgtgccgtaccgcttcaaaatggcagggtcgctctccccggcggccatccgggcctccagggcccgcatctcctccgccaggctctccagccgggcgaaggcggagcgcagcacatcctctactgtgcagccggcggggtagacggggatctgggagatcaggcccacccgccggccctggcccaccacgacggtgccctcgtcgtagtccagctcgccggtcagtatcttgaacagggtggtcttgcccgcgccgttgcggcccagcagccccacccgctccccctggtccacctgaaaggtgaggccgtccaggacgttcttccccacctcaaaggacttcaccaggttgttcacttgaatctcaatcatacgcttgtttcaactgctccacgatccagccaaagtgcatggcgtgggacgccttcaccagcatggcagtgtcggtgcccagctggtcagtcaattcgtggacggcctcctccttggtggcaaaatgggtgacggagccgccgctctgggcggcgccgtcggcgatcttctccgccttggcgccgatggccaccacctcgtcgatgcccagcatggcggccagggcgcccatgttgtagtgggcctggtccgtcaggtcccccagttcccccatgtcccccagcacggccaccttacggccgcactcagtcttggccaggatctccagggccgcagtgacggactggggattggcgttgtagcagtcatccagcaccagccgcccgtcccgcagacgaagcacccgcatccgggatccggcgggttcatacgaagccgcgccccgggtgatctcctccgtggaaaggcccagctcctctcccaccgccacggcgatggcagcagagtaggccatgtgctctcccggcgcagggatggtcaggtgataggtgtcccggggggacacgacggtgcaggtaattcccgctacgccgtggtcggccatgtctatcacccggacggcgcagtgctccgaccggccgcagcggacggtccggaagggcaggtccagggtgttcagcagggcgtcatccccgttaaggaccgccagtccctccggcttcaggttctcaaaaatctcgctcttggccttgaggatcccctcccggctgcccagatgctcgatgtgggcgtcaccgatgttggagatgacggcgatgtccggccgcaccatctcccccaaatagcggatctccccgaagtggttcatgccggtctcgatcaccgccgcctgatgctccggccccaggcccagcagggtcaggggcgtgccgatgtcgttgttgaagttctccggtgtcttcagcacccggagcttcgcccccagcaccgccgccagcatctcctttgtggtggtcttgcccacgctgccggtgacctggacaaaggggatggcgaaccggtcccggtaggcggacgccagggcccgcagggccagccgggtgtccgccacctggatatagaacttgtctggccgcagcagttccggcctccgggcgcacaagcacccggcggctcccgcgtccagggccctgtcgatgaagtcatggccgtcgaaccgctcccccacccagggcaggaacaggcagccgggggcaatcttccggctgtcggtgcacacagcggtgacgggggccgcccccttccggggattcagccaggtgccgtccacagcggatatgatctcaggaatggtcattggctgcatgcagttcaccctcttctcttcacgtcgcaggagagccgcacgatctcctcgcagagctggttgtagctcatgcccacggcggcggcctccttggggacaaagctgttgggggtcatgcccggcagggagttggcctccagcacccacagatttccgtctttgtccagaatcatgtccgtgcgggagtagacctccaatcccaacgcccggtgggtccgcagggccagctcaccggcggcctgcatcaccgcgggcggcacatcggccggacaggtctccaccgccgcgccggcctggtacttggccacgtagtcaaattcctttccggcgggcacggtctccaccgccggcagccagcggtcccccaggaccgccactgtcagctcccggccgtagatccgctcctccgccaggaccttggcgccgtagcgcagcacctcctccagggcccgcttcagctccgtccggtcctccggtaagtacacccccagggacgaaccgcccccgatggtcttgatgacgcagggcataggcagcgtctgggccaggggctccgcctcatccagtccataggacagcagccgccacttgggggtggggatgccgcacgcgtccagaatctgcttggaaaccgccttgtccatggcgacagcggaggccagatgacccgcgccggtgtagggcacgcccagtaaatccagggcggcctggatgcggccgtcctccccgtccataccgtggaggcccaggaacaccaggtccgccttctggcagatgtccagcacgtgggggccgatgtggctggggccctgatccttccggccgcgcttcaccgtctccaggtccggcgcctccacctcgatcttcgcgtcggggcacaggccgtcgggcgcgtcaaacagggtctccaggtccgccgggacctcctccagccccaggaacagatccaccaggatggcccgatggccgttttcccgcagggcgcggcacacgccggtgcccgtcaccagggagaccgcccgctctgtggagattccccccgccaatacaacgatcttcatgctcgtttccagtcccttctatcttgactgctctccgatgggtagtcataatcatcctattttaatgttccatagtttagcacaaaccgcccccaaatacaactgttaaaacgccgcaggccctccgaaaaagcacgggcgctttttcggagggctgtttgttctgctggaaatttccggctcagaggagccagtcgaagaggccggccggttctccctccagcagggtgccggcggcggaaagcatctgggccgcgtccgcccgggtgacggtttctcccatggcggcgctgccgaagctgcccgcggcgaggacgctgaccgcctccatgttccccacggcctgggccgcccaggagggcactgcctcccggtctgcgtaccagccggccagatccacatcctccaccgccaggacgcggttgagcacggtagccgcctcattgaaggtgatgggttcgtctccctggaaggccacgccctccgctgtggagacgccctgaatgatgccgtccgccacaccggccgcggcgtaggccttggcccaggtggggatggccgcgtcgtcgcagaagccggtcatggtgacggcggtaggctcgtccccggcagtctccatcaccatggccagaaactcgctgcgggagacgggcttatccggctcaaagtagtactggtctccgatcttggctccggtgaaaatccccgcctccgccaggtcctgcgcggccaccgcggcggtgctgtccgccgtgtccgcataggtgacgccggacttggccttctcaatggtgacgctcaccgtggcaggctgagacacgcgtccggcgctgtcagtggcggtataggtgaagctgtcgctcccggtggaatccccctccggggtataggtgaagctggcgccgtcaatctggacggtgccctttttgggctctttctccacggtgaaggtcaggtcctctccctcgccgcccgcggccagaaactgggcgtgatagggaatgccccggtaggtgcggatctccagcgcctgggccgtggggatcccctctgccggctgggccttctccttgccgccgaacagggcggcggcgttgacggacagggtcaggactaccgccaggcacagggcggcggcgcgtttcatcagttgggtcttcaaggcgatcatacctcctgtattgaattgggtgcaccgctagtttcttcccgcccgccggaaatatgcagaaaaacacggccggagcgcactccggccgtgtttgggagctccttccgctcaccccaggggcctgcccggacggcggaccacaggggatcgctttttgatgccggacaccacgcccatggcggcatacagcgtcaacagcgaggacccgccgtagctgaagaacggcagggtcagaccgatcacgggcatcacaaacaggcacataccgatgttcaccacagtctggaagatcagcatggccgccacacccacacagacatagcagtggaagggcgtctcagcccggcgggctaccagcagcacccggatgatgatggccgccagcagggcgatcacaacaagacagccgatcatccccagctcctccccgcagacacagaagatgaagtccgtgtgccgggccggcagggacccctcccccgcctgagtctgggtgccctgcatgtatccctggccgaagaggccgccggagcccagggccagcaggccccgggtctgctgccagcctgctcccagggtatcataggagtggtcaaacaggacccggaaacggttgatcatatagtccggcatcaggcccagagccaccgaggcggcaatggctgccccgctgccggcgaacagcaggacgaaccaccgcagagcgaagcctgccacaaaggccatgcacagaaagatgaagaaaaatgtcaggccgttgcccatatccccggaaatccccacgtaccaccccatcagggcgatggtgtgccccgccaccatcagggcggaggggaaggatttcagatcccgcttcacctcccgcagccactccaactgcttggccagcagcagggtgaaggtgatcttcaccacctccgccgggccgatgctgaaggggagaaagggaaatttcagccatgcggtgttgcccgtgttgtccgagacgccaaagggtgtcagcagcagggcgatgaacacgacgttgaaggccacaagccacttccaccgccgcatcagccgctccaggtccaacatggacatgaagatataggcgcagatgcccagcaccatggccgccccctggacgcccacatatcgcacgatgccgccgatgttcagataccgggtggcgctggcgatcagcgccatgccgtacagggtggcggcgcagcagagccccagcagcaccaggtcggcctgctggatgaagtctgccagaatggctttcagtcggttccacatgggcgtttccatttcctccggcgcagaatttgacgaatgcagtataccacaaatgaaaagatgtgtaaacgccgcaaatttgtttttacagactgttcaaaatatggtatactgaatcggatttggaaatgtcactggaaaggagcgctgcttcgtggagtatatttcccacagcgaggcggagacggaggcctttggtgaacggttggccgccgctctctctcccggcgccgtggtggcctaccggggcggtctgggcatgggcaagaccgcctttacccgtggccttgcccgtggcctgggatgccggggccgggtcaccagccccaccttcaccatcgtcaacgagtatgagggccctacccctctgttccacttcgatatgtaccggctgagcgggtctgaggacctgttcgacatcggctgggaggactatctctcccggggcggcgtctgcgccgtggagtggagcgagcaggtggcggacgccctgccggagggcacggtctatgtgaccctcacccgccatccggagcacgacggctggcggagcatcaccgtggaaggaggtgccgcccgatgaggatcttggcactggaaacctccgccaaagcagtctccgctgccgtcacggaggatgggaaagtcctctgctccggctatcaggacaccggcctcacccacagccgcaccctgatgcccattgtggaggccatgctgaaaaacaccggcctgaccgttcaggactgcgacgccgtcgctgtggcggcaggcccggggtccttcaccggcatccgcatcggcgtctcggctgccaagggactggcctttgccgcggacaagccctgcgcggccgtctccaccctggaggccatggcccggaacgtggcccacatggacgctctggtggtctgcgccatggacgcccggcgtagccagatctacaacgccctcttcacctccgaacatggccgcctgacccgccggacgccggatcgcgccatcggccttgcggagctggcggaggagctgcggagcgagccactgcccctggtgatcgtgggggacggcgccgtcctctgtgagaaggcgctgacagagtcgggactgccctgccgcctggcaccgccccaactggtgatgcagaacgccatgtccgtggccctgtgcgccgaggacctggcccgggcgggaaagctggtctccgcccaggaattgcttccggtctatctccgccctccccaggcccagcgtctgcggcagccgccccagatctgagggaacggtttagatcgtagggaacggtttacatcaaggatatcagagaaaaggagtttataagtatgagcggcaaagtgcatgtgatggaccaccccctggtggcccacaagctgaccatcctacgggacaaggacaccagcgtcaaggatttccgggagatcgtctccgagatcgggatgctgatcacctatgaggccacccgggatctgcccctgaccaccaaggaggtggagacccccatctgcaggaccatcgcccccaccctgaaaggcaagaagttcgctgtggtgcccatcctccgggcgggcctggggctggtggacggtgtgctgcggatggtgccctccgcccgtgtgggccacatcggcatgttccgggatgaggagacgctggagccccatgtctacttctgcaagatgcccaaggacattgcggagcgggacatcatgatcgtggatcccatgctggccaccggcggcagcgccgaggccgccatcaccgagatgaagaagcggggctgcaaaaacatcaagctgatggttctgctggccgcgccggagggtgtggagcgcatccagaaggcccacccggacgtggacatctactgcggcgccgtggatgaccatctgaacgagcacggctatattgtccccggtctgggcgatgccggtgaccggatcttcgggacaaaataaggcgctctccctttacgtgtgtgatgcacggcaggccggtcccgtccggcggaaaggagcataccatggccccagagcagacgaacgccaaacggcacggccccaaccgggccacgacggtgatctgtctggtactgattctcgctgccgcactggtcattgcccgcatggtgaaattccggtcacaggtggacgtgacactcccggcggtcctgtgggaggatggcgaggccacggccgtgaacaccactctgcatttccacggggagatggtgaagcagtgggggcaggatgacagcttcagcggctatctggaactggaggaacagcccttcacctctgaggaagccagcaaggtctggctgaccatggcccatgagggcggcggcctcaaccggggcctgctcgaatacggaaagttccccgcccacacgtttttcggggaactgtacacagaccgggaatatacgcagttcttcctgttcccctttgagcgggtccccggcgaggacgacggaacgtcaacctacgtagccggctcctccgtctatgtcgctccggcagcatctctggacgaggcaaaagctctgctggagtcgtacggcttgatggagtcgcacggccttccgataccggatgaaagcccgcaataaacagcgccagtgttccaattgcacagattccaaaagcagcccggcggatattccgccgggctgctttcgttttcagtcagatttttcgccactgcgtcacagcacatacagatataccgccagatagtggaagaaagaccccgccagaatcaacaggtggaacagttcgtggaaggtccactctgcagagatgtttggcttcttgacggcgtagaacaccgctcccaccgagtagcagatcccgcccagagccaccagcgtcaggcagggctggcccagagcggtgaagtcctttgccacaaacaccacagaccatcccatgatgagatatactgccgtggacagcatccgtggtgcgttgatccacagcatcttcgccagcacccccgccagggccacgccccagaggatcaggcagaattgtgttcccctgggctggggcagcagcaccacgcagaagggcgtgtagctgccggcaatcagcacatagatcatactgtggtccattttccgcagcacccgcttcactccgccgctggcggcagtgccgggatagtagtgatagatggcgctggcggcatacagtgccgccatagacagacagaagcacagggccgccgccaccgccggtatggccgcatccgtccagacgccccgaagcagatacagcagaccgccccccagggcggccaccgcgccgagcgcatgggtttcacagctgatggggtcctgggcctttgcaaacagtttgcgcatggaatggtctctccttcttgaaatccggcatcatgccgtccgcatcatataatatagttttcgatattatattaagcgatttcgttttttatttcaagtagtttttgtaaattttctgtttctattccattctatgcaaaaaaagcggacgccgaagcgtccgctttcaaagccctgccgtttttatttcagttccagtattcggtcttttccttcaggtcgatgtccgcggcccggaacacggggttcttgccggccctgcgctgctcggtatagttccgcagggctgccgccgccggacgggagaggaccgcgatcaccggaatgttgatgagcaccatgacgcccatcagcacgtcagacaggttccacaccagatccagcgtgaggccggcgcccaggaaaatcagtcccatggcaatcaggcggaacaccaccatgaaccgcttggagggcacgtgccccagcagatacgccagggcattgtccacatagtagaggtttccgatcagagttgtgaaggcaaagagcaccatggccacggtgatgaaaacgggacccagggtgccgaaggaggcggccagggccgactgcacatagggggcgccctgcagctccactgcgggctccacaccggagcacagcagcatgaaggcggtggcggagcagatcaccagcgtgtccaggaagacagacagcatctggaccagcccctgcttcaccggatggctgacattggcagaggcggcagcgttgggggcggagcccacgccggcctcgttggaaaagaggccccgcttcacgccctgcatcacggcagagccggtgaagccggcgaagatggcttggaaatcgaacgcctcggagaagatccgtccgaacacctggggaatcagccccacgttcatgacgatgaccaccagggccaccagcacgtacagtccgcccatgatgggcaccagagtggaggcgaaggcgatgatccgcttgccgccgcccatgacgcagtacccggtcagcagcgccacgatgccgccgatgatccagggcgtccactccggggaataaaagctgtatccggagaaggtggactggaggttgtaggagcagagcatgttgaagccgccggcgtaggtggcgatgaggctcagggcaaacagcaccgccaggggacggctgtggagggccgcctcaatataataggcagggccgccgtaactctcgccggtctccgggttccggcgcttgtaaatctgcgccagcgtggattcggtaaaggccgtggcgccgcccagcagggcgatgagccacatccagaacacggcgccgtagccgcccatgcagatggccacggacacgccgataatgttgcccgtacctacccgggaggcggtggacaccatcagcgcctggaaggaggacacgcttccctccttctccggccgctccaccaccacgcggatggcctcccgcagcagccgcagctgcgggaaccggttccgaatggtgaaaaacagtccggcggccaccagcagaatcaccagcaggtaggtatacatccagttgctcaaatccgcaatgatctctcccagcatgtgtgcatctctctcctttttaatgttggggaatggtcgggaaatcgtttcaatcagcccgaatagaatatcagagcttttgtgcccttgtcaatggaaaatcccaagattttgcagtattctacggaaaaaccggcaaaccgccggccccgcagtctctattccgccggatagccgcagagatcgccgggatcagtcagttcagcgtccggcacaaagtcaaccgtcagcgtgccgtccttctccgtttcataagtgatgtgcaggagtgctccggattccagccaggaaaggtccctcactgccgtggcccggtcatccagctcccggatggtccaggacctgctccatgttccgctctccgggtcacagcgtatgacgctgaattctgcagggtcctccgtcagggaagcagcccgcatcccgtcgcctgaccagatccgatagcgggcggtattttccgccagccggtcatctgtcatcgcctccgccgcgggtaccaggaaggatccggagccggagggcagcagaaacgccttctcactgtcgtactgttctgtgctctcccagtctgcgccgttggagaggtatacgtccgtgccgtccgtcacgatgtaggaaaatcgtttctccgtgatctctccgccggtccgcatccgccagagaaagccgcggccgtcatagatgacgtcgatcagcatgggccagctctcatagtagttctgaagggtccgcagctggcaggggatgcccagggagaccttctccaaaaatatctccgccgcatccgcattctccgttcccgcctcggtaaacaccacggcaccgccggcggagagctccgccgggtcgccgtactccggcacctcctccatggggccgaagccgtaaggcgtctctgcggagatgaccgccccctttgtcagggtgaactccgccgcggccgtatattctccgatctctttgatgacgcggaacgtactgccgccggagaagtcgtagtcaaacagggacaggatgcacggaaacgcctgcttttcaccggacggcagggtatacagcatggcatcccatccggcgttctcagccaggggcacctgggtccagctgccgtccgcctcccgcacatccagccaatagggcgccccatactccagagattccccttccccctcataggacaggatgcaccacaccgtctccaccgacgggtcgtaagtctcccactccgtggtcagggcggtccggggcgggtcatctgtttcgtataccgttgtcaccgcaatgtcgccggaatcgccgcatcccgtcagcagcgcaaaagccagcaggcaaatccaaagccgtttcattctgacgcctcctctttctctgattccatcgctttctttatttcatttcatgtagacggacccggttgggaataagttccgccgctttccggcaaactacacaaaatccatctgaaaatttttgagcttccctgcttgcattttaggctgctgtccggtaaaatacaagtacaagggaagaatgatagctgcaacgaagtgctgcgcgcacgggctgacacctatcattccggtcttttggtaggtgtttcaaaccgacagcggtttgaagcgccttttctttttatcagatatgcaaaagacggacaaaaggaggtcatttttatgattttactggcaaacggcaaggtcatcacccgggatccggagggcatcggctacctgccggacggcggcgtggtcaccgatggcggcaagatcgtggaggtcggcaccaccgcggatctgaaggccaagtacccccaggcggaatttgtggacgctcgtggcggcgtcatcatgccgggccttatcaatgcccacacccacatctactccgccctggcccggggcctctccatcgatgggtacaaccccaccagcttctatgaggtgctggacggccagtggtggtacattgaccggaatctggacctggaggccaccaaggccagcgcccaggccctggtgatcgactccatcaagcagggcgtcaccaccattttcgaccatcacgccagcttctgtgaggtccccggctccctgatgcggatcgccgaggtgacgagggaattcgggatgcgggcgtgcctgtgctatgaggtcagcgaccgggacggggaggagaaatcccttcagtccgtgcaggagaacaaggacttcatcgactactgcgagcagaacccctccgatatgctgaaggccatgttcggcggacatgccctgttcaccatctccgacaagacctttgaccggatggcggcggccaacagcggccgggtgggctatcacatccacgtgtccgagggcatgaacgacgtgtacgactccctccagaactacggccgccggcccgtccagcggctccaggaccacggcatcctgggacccaagaccatcctgggccactgcatccatgtgaacacggcggaaatggatatcatcaaggccacggacaccatgtgcgtcaacaacccggagagcaacatgggcaacgccgtgggtatctctccggtgctgcagctctacaagaagggcattctgatcggtctgggtaccgacgcctacaccaacgacatgctggagtccatcaaggtggccctgtgctcccagcggcacaacgcctgtatgcccaacgtgggctggtgcgaggtgacggacatgctgttccgcaacaacgccaagatggcggagcgcaccggcttccccactctgggcgtgctgaagcccggcgcggcggcggacgtgatcgtcatggactacaagcccttcacaccgttctctgatgccaacatcgacggacacatgctcttcggcatgacggggcggcagtgccagaccaccatgattaacggcagaatcctgatgaaggaccgggtcctgacggagatcgacgaggaggccgtgaatgcccacattctggagagcagcaagcgtctgtggggccggctgaaccacaaggagtattgatgaccggccgatgtgcccctgcggaagcagtgcgcattcgtatttcaggagttattctgaggaggaaaaactatgtctgagttaatgacccccattccctttcgggaattgatgacctggatcaccaccgaataccgccgggacggcgccgtgttcggcgtccacaagccctacaaggccggcatgaagaagctccccatcttcggggagaccatcgagactccgttcggccccgccgccggccccaacacccagctggcccagaacatcattgccggctatttcgccggcgcccggttcttcgagctgaagaccgtccagaagatggacggcgcggatctggccgcctgcatcaaccgcccctgcatcctggcggaggatgagtgctacaactgcgagtggtccacggagctgtatgtccagcaggcctttgaggagtatgtgaaggcctggtgcgccctgaagatcatggcaaaggtctatggtctgggcgatcccaacggattcgtgttcaacatgtccgtgggctatgacctggcaggcatccagggtgagaagatcgacaccttcctgaacggcatggtggacgcctccaagacgcccatcttccaggagtgcatcgctgttttgaaggagttcttcccgggagaaagcgattatatcgacacgatcactccccatgtgtccggatccgtgacggtgtccaccctccacggctgcccgccggacgagatcgagcggatcgccagctacctgctggagaagaagcacctgcacaccttcgtcaagtgcaatcccaccatcctggggtacgagaccgcccggtccattctggactccatgggctatgactatatcgccttcgacgatcaccacttcaaggaggacctgcagtacgccgacgcggtgcccatgttccaccgcctccaggccctggcagacaaggaggggctggaattcggcctgaagctctccaacaccttccctgtggacgtgaaggccggggaactgcccagcgaggagatgtacatggcgggcaagtccctcttccccctgaccaccaccatggccgccatgatggccaaggagtttggcgggaagctgcgcctctcttatgccggcggtgccgacgccttcaacatcgacaagctgttcgcctgcggtatctggcccatcaccatggccaccaccgagctgaagcccggcggctaccagcggttcacccagatcggagacaagctggacgctctggacttcaagcccttcaccggcgtggacgtggtcggcatcgaggccctctctctggcggcccggtccgacaagtaccatgtgaaagccatcaagcccctgccccgccgcaagctgtatgacaaggtgcccctgctggactgcttcaccgctccctgcaagggcggctgccccatccaccaggacattccggagtatatcgagctgtgccggaagggcgcgtacgcctccgccctgcggctcatcaccgagaagaaccccctgcctttcatcacgggcaccatctgcgcccacaactgcatgaccaagtgtatgcggaattattacgacgagcccgtgaacatccgcgccaccaagctggtggcggccgaaaagggctatgacgcctacatgtccaagatcacgcctcccgcgccggtgacggacggccggaaggtggccgtcatcggcggcggtcccaccggcatgtccgcggcgtacttcgtgggccgggcgggcatccccgtgacgctgtttgaaaaagcggaccgcctgggcggcatcgtccggcaggtgatccccgccttccgcatcagcgacgaggctatcgacaaggacgtggctctgatggagaagatgggcgtggaggtaaagctgaacaccgaggccccctctgtggcagagctgaaggcacagggctatacccacatcttcttcgccgtaggcgcctggaaggccggacggctggacatccccggcaacgtggtgccggtcatcggctggctgcgcgacatgaaggcgggtaaggacgtctccctgggccatgtggccgtggtgggcggcggcaacaccgccatggacgccgcccgggccgctctgcgggccggggccaaatcctctaccctggtgtaccgccggacgaagaagtatatgcccgccgatgcggaggagctggagatggccattgccgacggcgtggagttcctggagctggtagcccctgtggagcagaaggacggcaagctgatttgtgagaagatgaagctgggcgacccggacgacaagggccgccgcaagcccgtccccaccggcgaaatggtggagatcccctgcgacaccgtggtctccgccgtgggcgagaaggttgagagcgaggttttcacccggaacggcatcaccgtggacgagaagggcatccccgccttcaagaccaatctcgagggcgtctacgccggcggcgacgccatgcgcgggcccgccaccgtggtggagggcattgccgacgcccagtatttcgccaatgccgtcatcggcgaggcccacaagtttgccatccccgccaaggccgtagccacccgggaggaggccgtcgccaagaagggcgtcctctgcgagagcgccaagtgcgagggcaaccggtgcctgacctgcaacgtggtgtgccaggtctgcgccgacgtgtgccccaaccgggccaatgtggtcatcgagctgccggacggccgccagcagatcctccatgtggaccggatgtgcaacgagtgcggcaactgcgccgtgttctgcccctacgactccgccccctaccgggagaagttcaccctgttcctgacccgggagggctttgacgagagtgtaaacaatcagggcttcctgcctctgggcgggaagaaggtgctggtgcgcctggacagcaaggtgttcgaggcagatctggacgccaagaacgacctgcccgccgacatcgaggtgttcatctggacggtgctgaccaagtacgcctatctgatgggataaccgaacagacacaaaggcaggaggccgggagaccggcctcctgtttttgtgtttagtgctttcccctgccggaccgcctccaggttatggctgcagcgcagatgaaatacaccccaatatggagcaccagcgccaccaggccaaagcccgcctccgccgtcagcaggagaaggactccctgtgcgacggtgtatagcagggcaatgatccgttcctgccgcctgcgggtctcgtccggctccccgcccagccgccaaaactgccgcaccgtgcaccagaccgccgccgccaggaaaagggccagcacaggcaggtctctcagcttgcccagctggacataccaggcggtctgaccgacgccgtacagccctaccgccacgcccgcggcgtaccaggaggaaaactgggaggccgtctgttcccgtcgccggataggcggctgggccagcagccagagccccgccagggccaccgccgcccaaagggcaaagagccactctacgccgtgagctttcagaaaaccagccaggccggtgtagatgcggacccactccacccccgccggagcctcggaaaccacgacaggaaagacggcgctcagaatccccatggtcaccatacccaaagaacccgcgccggtgacgatgccgccggcgatataccagggccagtctctgtgaacagagggcctttccgttccctgcaggaactccgccgccgaaagccgatcctccccatcctgttcctcatccagcagccattccacgtccacgctgaacagccgggcgcagggcagcagtttcgccgcgtccggcagggccgccccctgttcccagcggctcaccgcctgacgggagacgcccagctgttccgccagggcctcctggctcagcccctcccgcttccgcagcccggtcagcttctctccaaaggtcatgagtcttcctcctccagtctctttcgctggtcccatcataccaagcgccgccgggaaagtccaccacagccacctgacaccgccgcaaccaaacgcaacattcccgccaaaacaaatgtaatgttttttctctttgcagcaattccgccctctgccgggtattccttacagaaggatgtgatcacatgcccgataccgccgaagccgtggcgcaatacggctccgcagtctaccggctggcctacgccatgacccgctcccgcagcgacgccgacgacgtgtttcaggaggtttttctccggctccaccggtccgctccggattttgcgaatgaggaacaccgacgtgcgtggctcctgcgggtgacggccaactgcgcaaggagcctgctggcctccccctggcggatgcggaccctcccgctggaggatgtctattcctaccaagactccgtggaatccgctgtggacgaggctctggcccatctccccggcaaataccgggccgtcatccacctgttctactatgagggctatcagacggaggagatcgcccggattctgggccggtctccctccaccgtccgggcacagctgacccgggcccggcagaagctgcggacattgctgaaggaggatatatgaacttttccaaaacctaccgccggatgaacgagcctgtcggcccgtcgccggacctgatccgcaagactctctcccaccctgaccgacaccgcctccccctgcgccggctggcggcggccgctgccgtggcggcagtgctgctggctaccccagccctggcggtccggtcggagacgggatatgcggttttataccggattgcccccgccgtagcccagttcttccagccgatacaggaagcctgcacggacagcggcatcaccatggaggtagcggccgtccgggtggagggagacactgcccaggcgtacatcgtcctctccggcggtcctgtggacgccaccacagacctgtttgacagttggtccttccacctgccctttgaccagaccggccgctgtgagcgggtggcctgggacgaggccaccgggacagtcacttttctctgcactgtgaaaaccatggacggctcccccattcccaccggcggcaagatgaccttctccgtccggcagctgctgacaggcaagaaggcgatggagggcgtgacggtggacctgaagctgacgaactatgcccaagaggcggagaccgccctcacctggggggctgatccccctgccgcaggggtgagggagccggaggtgacctattactctgccaccggtggaagcggcgatctggcttccgtaatgctgcaacccggtgaagtcctggcggagcccgcggagggcctgcccatcacagccgccggttacgcagacggcctcttccacatccagctgtgccggggagacgcctccaggacggacaaccacgcgtttttgtggatggaagatgccgacggcagggaattccattgtaccggtatctcttattttacaggtgagacggctggcggccggacggattatatggactttctctttgccgtcccgccggaggagctggcaggatgcaccctccacggcaacttctataccgccgccaccctgacggagggcctctggcaagtgacttttcccctggagaatacagattgatcctttcagcgcgcccggtgaatgtcgggcgcgcctttttctcttgccattttcaggaatcatgctatgatagagtcagaaaacacgggaggttcacactatgttggatatgctggaatttctgcgggatgaaggcgtcagcgccgacatcactgcggagatcgaaaaatttcgggacgcctatccggaggaggacgagaccctgcggcgccgggtccccgatccccggtatctctattatggaaaggacatctgggaggaggccatcaccgccatcctctgcggagagaacctgttgctggtaggccccaaggccactggcaagaatgtgctggcggaaaacctggccaccgtgttcggccgccccagctggaacgtgtccttctacatcaacacagacgccgccaccctgctgggcacggacacctttgaaaacggcgccgtacagctgcggaagggccccatctaccagtgtgcggagaccggcggcttcggcgtgttggatgagatcaacatggccaagaacgagtctttggcggtgctccacgccacgctggacttccgccgctccatcgacatgcctggctatgaacgcattccccttcacgacgccacccgcttcatcgccaccatgaactacggctacgccggcacccgggagctgaatgaggctctggcctcccggttcgtggtgatcgacatgcccgccatcaccaccgaggggctcatcaagctcctgaagcgggagttcccctctctgaaaggcgtgtatgccgagcagttcgccggattgttccaggacatccagaagaaatgcgacggcggagagctttctaccaagcctctggacctgcggggcctgctggccgccgtgcgactgatgcgcaccgggctggagggcaaccgggcgctggatctgggccttgtcaacaagtcctttgatgactttgagcggcagctggtgcgggacgtgatccgcacccgcctgccggagacgctccgccgtgaggatgtgtttgactgatggagatcctggacagtgagaagcggcgggcccggaacctgatctggaacgccgctgcggattactcctttgagccagacttcaaggcatacgacgaggatggccgtgcagacctgtattggaacagcatcatcggcgccgtgcggaagaattacggagcagagaccatagaagggctgtttgaatccctccacggctgctccaaggaacagctctttgagcagctgctgtggctggggctggaaaacgccgtctaccagcgggaggctccccgccggccggcgctgccctccctgcggcggagctatgcccgccgggccgtggctctggaccagcgggcagatcccggcgacctgctggccacgctggaaaacgcccacttctgcagggccctggggcagagcgaaccgcccctgctgcccagggaccgggaaatgctggatgccctggagttccccggagacctggacggccctgccattgcggagcgggccctggcattcctccacacctatttccatttcacccccggcgagacccaggcccaggagtcggaggagcggaaacggcgccgccccctcttcgccttccgccgccggtccgaggcggacctgctgcccgccgtgcgggcctttggccacgggttcggggagcatctggtgaagggccagggcggcggagccaacgcagagccggtccagcgccgcctgacggactacaacctggcccagacggaggccgccctgcgaaaatacatgcggggctacttcggcgcccccttatacgaccagtcgcagctggagagcctggagcgggagctctgcgtggacgagcaccagggctgccacctgtactacgccaccggagacgacactcatgaaaagctcaagggctatgtggccgcccagcggcgcaacgccctgcgacagatggagctgaaccgggccgcctacgaagccgacgccacccgccaccgcaccagcatccgccgcctcaccgcccgcatccgcaacgccatgctggcttatctccagcccacccctgtccgtgccgcctccggcgcgctggatgccggccgcatctggcggggcgtgtacctggacgacgacaaggtgttcacccgtattctccagtcggatcccggcgacctgtcggtggacattcttctggatgcctccagctcccagatcgaccggcaggcggtggtggccgcccaaggctatatgattgccgaaagccttacccgctgccacattccggtgcgagtatcctccttctgctccctcagcggatacaccgtggtgacccgctatcgggactactatgagacgggcaaaaacgaccgcatcttcaattacttcaccaccggctgcaaccgggacggcctggccatccgggccttggccaagggactggaagactcccccagcgaacacaagctggtaatcctcctctccgacgtgaaacccaacgacgtgatccagatgaaccacagcggaagctttgtggaatacgccgcggacaacggcatccagaacaccgccatggagatccggtccctgacctacaagggcatcaacgtcatgtgcgttttcaccgggaatgacgacgacctgcccgccgcccacaccgtctatggccggaacttcgcccgcatccgttccctggaccagttcgccgacacggtgggttccctcatccaaaaccaaatccgcagtctgtaaagcacgccgcccgaaagggcggcgtgctttacattcattcttgggcggcgctcag

SEQ ID NO: 4910 - DNA, 17937 bp, Unknown
  gut microbiota DNA sequence
tattatagaattggaattttacaataaaaattctatataatttttgataaattaaattattgaaatttatatattcttccgctatgataaacattggaagcactgccggccggcggcttttctgtgtgaaccccggatccgtccagagttgtagcctggaccagatctacattctgatagcgggaggaagaaagcctttatgttaagtttggttggcattattgtcggccttgcgctgctgatctttttggcattccgtggaaaatccctgctttgggccgctcctgtctgcgcgctgctggtggccttcaccggcgggctggacatgtttaccgcctatacgcagaactacatggagggtatggtcggcttcgtcaaggagtggttcccggcgtttatgctgggcgcgatttttggccagatcatgcaggattccggcggcgcggtctctttgacgaaagccgttgtaaagctggtcgggcgggacaaagcgatctttgcctccgtcctgtgcggcggtgtgctggcttatggcgggatctcaggcttcgtcatcattttctccatgtatcccattgtgctggggctgttcaaggaggctgacattacccggcgcctgattccggccacgattatgaccggcgcttttacctttgccatgagcgcgatgcccggcacgccgacgatccagaacctgattcccacagagtatttcggaaccaccgccacggcggcgcctgtgatcgggattgtgtgcaccatcatcatgttcgtgggtcctgtcctgtggctgagctggcgggccaagaagttccgtgccgcgggcgaggggtatgacgaaccggatgagatgccggaggaggtgccggacgataagctgcccccggcctggtgctgctttatcccctttgtggtcattgtgatcctgctgaatgtgttcaagatgaacatcgtggtgtgcctgctggcggggatcctgctctccctggtgttcctgttcctgatgggaaaggtgcggggcagtgtgtatctgaccaatgtaggtgagacctgcaacaagggctgccagagcgcagtgtccgccattatgaacaccgcggcagcggtaggcttcggctccgttgtgaagattaccccgggttttgcgttcctgtccgagctggttttgggaatcggcggcagtcccctgatcgcagaatccattgccatcaatgtcctggctggtgccacaggctccgcctccggcggtctccagatcgccctggacgctctggcggataactttattcagatgtcccagacctccggcattcctctggcggtgttccaccgggttggctccatcgcctgcggcggactgaacaccatgccccatgacggcgcggtggtcacctatctgtcctattgcaagatctcccacaagcgcggatacttcgatatgttcatagtggccggcgcaattcccatcctggccaatatcgttgccatcattctgggtaccatcggcatcgtctgacgcttcggacgagatcaagatacaagataaatgattgaggaggaaatcatgatgactatgaaatccgcattgattaccggtgctgcgtccggtatcggcaaggcctgcgccgagcgcatggcgcaggaggggtacggcgtcgtggtggcggatgtgaatctgcccgctgcggaggaactggctgccaaactggcagcagagggcctctccgccatcgccgtccacatggatgtggccgatgagcaggaggtggaggctggttttgacaagatgatggagacctacggctcctgcgatctggtcatgtccaatgccggtgtgcagatcgtccacccctttgaggagtatcccttcgcggactggcggaagatgatggccattcacgccgacggcgccttcctggtgtcccgggcggcttaccgccggatgaaggcctccggcaagggcggccggatcgtgttcaccggctccgtacagtccttcgtgggctccaagctgaaagagccctacaacttcgccaagcacggcgtggccggactggcaaaagccatagcccgggagggcgccgagtacggcatctacacctataccatctgccccagcttcatcaagacgccgctggtggaaaagcagatccccgagcaggcggcttccctgggcattacggaggaggaagtggtgaagaacatcatgctgcgggataccgtggacggggtgttcaccacggtggaggatgtagccaacacgctggtattcctgtccaaggatcagggcgctctgacgggccagtccctgcggctgacccacggctgggccatgatgtaatagaatcataggaatcataaaaggaggcagctatggaacgaattgcggtttatggagcgggcaccatcggttcctgccaggccacgctcatcatcggcaacggcctgccctgcacggtcatcggacactcggagcgggggctggagcggtgccggaagtccatcgagcagaactgggatgacctgatcgccgagggcctggctacggagggcaacaagcaggccgccatggccctggtcaccatcaccaacgaccctgccgctctgcaggagcacaccttcgtcttcgaggcagtggcggagggcactgaggaaaagcgggccgtctatgagaccatcgagcagaacgctgcgcccaacgtggtgatcgcctcctgcacgtcctccatcgacgcagagatcctggcggggctggtttcccacccggagcgccttctgatcgcgcatccgttccagccggtgcacatgctgcccctggtggaggtggtgcgccacgaaaagacggcggaggacacagtgacccgtacgctggcgctgctggagacactgcaccggcaggtagtggtgctgaaccgcagtgtgcctggattcctggtgaaccgttttgcccaggcgctgttccgggagtccatctacctcattgagcagggagtcaccaccgcggcggacattgaccgggcggtgaagtacgccgtgggaatgcgctatgcatccatcggcctgctggagtatttcgacgccgtgggatacgaactggagagcgccattgcaaagaacgtctatccggacctgtgcggcacccgggagctccagcagctggtgctggacggcctggccaccggcaagaccgggcaggcggcggggcagggcctgtacgactggtctcagaaggacgcggacgacttccgccgccgtaagcagagcccgtactttgcgggcgttaaagagtgggccatgcccgatgtgaagtgaccgctcgcagctgattcaaaagcagaaggacaggcatccggaatctccggatgcctgcctttttggaaagaggggagcacactgcggcgtgccgggctctttgcacacatgccgtcctgcctggaacggttttccactttccggatacggagccgcctgatcccacaggccggattcggagaggaggacaattgtttccatcaaaacgaaaatattactgtgctttaattggtgaaaagtaaaattacattacaggaaattcgcccttctcccatgcggcgcggacggaggcggcctgttcagtgctgccgctggccctcgggccgaaccgccagcaggaccacgccgctcgccagcaggacgaactggacgaaaagaacggccgccggcagcgtaaacgccgggtccagtgtccccagggtcaggggatactgggcgaagaggcgcccgttccacagccccagcgattccggcagggggagcgccagacagacgggagaaaccagcatccagacatagagcagccagggccggagcattcccaacagccagccgctgcccagtgcgaacaccagcagagggaccagtgtgaccagcgtgggaaataccaggccgctccagccataccagccgaaatagatcccatagaagcaggcggcttctgagatgcaggccagcgccagcagggcggtgccggtcagagcggcggcgcaccgggccagggcgtaccggcggggcggaaggggagccgcgtctgtgagcactgctgcccgtcgggctttttccgaggtgaagaaggtcaggaaaaacagcgccccgatccagagcagcgggagcatccggctcagaaagtccccgaagctccagggggaaaagggggcggtgtgggacaccccgaggatggtcacgcgccgcagcacctgccagccgtagaacaggagcaccagcacaagcccggcgaaaaatttgttccacagcaggcgcttgcactcatagagaaaaattttacgcaaggttcaggtcctcctccgtcagcccgcaggcgtttaaaaagtcttggtaggtcagatagggatacatgggatccagctcccggttgaacaggccgcggaggatccggtccatggcctcctcgccgccgaccagttgctccgctttcaaaatcttcaggggcatttcgcagtactgccgcacatagcggaggctgttggagatctccagccgctcctcttcgggcagcgcctccaaatagtccggattgcggacatagaagttcaggtaatagttgtccaccgcctgctgccactggtccacatagtgctcctgtgcgtaggacgggccgtatcgctccttgacaatacggtaggtggtgtagaccgtcaggccctctgccgaccaggggctgctttcatccgacgcatcaaacatgtttccaaggccccaccactgatggaccagttcgtggatcatgacttctccggctccgccgcccttgccggtatcgctcagattgtcggcagtgaagtctgcctcgtccagcagactggcgccgtttgcggcgtagccgccgccggtcacccggctctgaatgagcttcagggtatcgccgctgccgaaggacaacatgccgtagtgcgctgtacagtagtccaccaccgacttcacggcctccgccgccccggcggcctccatggcggcctgatgcttgcggccgtagtagaattcgatgtccatgccgccggcctggatatcctggcggatgtagtccccggcatagagaatgccgccggcgctgttggagtcatagcgccaggtttttgtgccgtctgtctgttctgcgacgaccttcgccttgctggccccgaaggggatgaccgacatggatgcgggaagcgtgatctcgatggtggtgggataaccgttttcccccggcagcacgtttatcaggcggggagacaatccggcattttccaggcataggtattcagagctgatctccgtgccgccctgcatgatggacacattccggttttcccggggaaagccaccgtagtccatagtcagttcgatctcccggtccgacgggagggccacctccagcatggcctcgttgtactcctgatagtcgctcacagagaagggcacttcggcgccgttgacccgcacgttggagatggtatagcccggattgacgccgaaggccgctgtccacgcctgcccggaggtgttccggaaccggtaggccgccgtgccggagaccgtcccagcggtggtgtccgggaatacctgggcgctgcggctggtacagaccacattctccgcatagggaacctggtagaagtccataaccgtctggtcggggttgctgtggtccaccaggggctgggcggcataggcaaagccggaacaggccagaagcgacagggcgatgataggccggtgggcccgccgcacgctccgggccagggagccgggcagccccttcccgtactgccggatgcagagatacgacaccgtccagatccccgccagggccgccagccaggtgagccgcatccaggctacggaccgaaagatgcggaaattggagaaatcgtccgacagcgcccacacgcaggggttcagccagcagagctgccagttgtccgcccagacagtcaggctcaacgccgcaaaggcggcaaagagcaccagggacaggtccgcccgccgggtatattgataggcggcagaggcagccagaatagacagcgggagcgccagtcccatgaacagcaggtacgccaggacatagtcgcccccgtcaaagacggagccgatcagcccacagctgatgggaagccacaccagcatggtgaggaccagcgccagtccggctgccgccagcagggccggcaggcgtaccagcgccgcagctagaggagaaacaaccgcattggtgagcacctccacacggctgcggccggcccggtccagctcatatactgtgagcaggccgaagagaataccgcccgccgcccctccggccagggccggattggccaggtacatggagagcatggtgctggcaatggccggcttgtagaggacgagtcctactgcgggggagatgacggtcagaagaacgatgagccaggtcatgcggctgtgcagaagccgtcccagctccagggggaacagacgcaggagcttcattgtaccgcctcccgtgagatgagatagaggtaggcgtcctccagagacggttccgaccgctggacataggcgggcagcgcgtccgccactgcgcggcatcggacgccctggctggtgttgacccgggcggtgatgtgcaggccctgctcctgaccggcttcccgttcccagaacacgcccacatggccctctgccgcctgaatcaactgctccggcgtgccggtgaacaggatttgcccgtggtcgatgaccaccagccggtcacacaccgactgcacgtcctcgataatgtgggtggacagcagtaccagccggtcctgggccgtgcgggagaacaggttgcggaagtggatgcgctcctccgggtccagccccaccgtcggctcatcgaggatcaggaggggaggggcgcccagcagggcctgggcgatgcccacccgctggcgctgtccgccggacaggctgcggatgcgggcgcgggcctgcccctccagattgaccgtccggatcacctcgcggacggctgttccggagtcccgcagccccttcagggcggccatatagtccaggaactgggccacggtgagctcgttgaacaacccgaaatcctggggaagatagcccagctgggccttcagctgccgctccatcttgagaaggggctgtccgtccaccagaatggagccggatgtggggagcagggcggccaccagcagcttcatcagagtggacttgcccgcgccgtttggccccagcaggccgatgaggctgggagaccggagctccagactcaggttctgcagggcctgttttccgctggggtaggtcatgctgacgttttgaatgttgatttccatgtgatcgggatcctttctgcttgggatacggaaaggataccatggctgtgtggaggggagttggagattatgtgtggtttgtgtggagaagcggacaccgggaaatatcttgcaaaaagtccgccgcagaacacttctgttttgcggcggactcgtttttttccatatagattggcggagcagtcagggatgcagggaatagaatttgttcaggcgctcggccagcgcctttgggttttcttcattcacaacatggccggtatgttcgataagctgtaattccgcgccagggatgttctgcgacaggtattgggcggagcggatattcgaacggtccttttccccgcagatgatgaggacgggacaccgcataccgcgcactctgccgctgaaatccagcttcttcatggaattgcccaagacaaacgtgctctctttatcaaaggccatggtgtcaaaaacggatctgggcagaaagcggaaaatcaggttttggataccgaacgccgccttgggaattttatgaggcgtcccgatcaggaccagcgtttttaccttttcggggaagtccagcgcatagttcagcgccaggataccgcccagtgaaagaccgcacagatggaccgccctgccgacgtgatcacagtattctgcaaacgccccatagaggctcggatagcttgctgttttcccggcaagcagggcacacaggtccggacacagcagatcctctttgccgtccatgcaggagaccgtttccttccagcttgccgccttgtgtccagaaccatgaaccaggatttttttcgccatacgcaacctcctcggcctgatctatgcagcttctccgcttgtacgatgtctcagcgtatacttgaaacggtcacatctgcggaagaaagtccggaatgggcagaaaactaaaaccttacagtcgcttttaccccttcctccgtattctcaatggtacacaccgcgccgtgccggtccaggatcattttcaccagatagagccccagtccgctgccgccggtgctccggttccgggaaccctcctcccggtaaaaggcttcaaacaggtggggcagggcatctccgctgacccgcgctccggtgttctccacactcagggcggggcggccctccaaccggccgcaccaaacccggatttccgccccctccggcgagtagcgggaggcgttggagagcaggttgcccacggccttccccagcagggaggcgtctgcgggcacggtaatccccggggtcagtgcggacaccagctgctggccccgctgctccagcagctcccggtccagagccagttgctgcgccatcagggcggacaggtccacgggctcctgccggacggcggcagatccggactccatgcgggagatggacagcatctcgccgatcaggcgctccatccggccggttgtctggagagagcggagcaggtacttgtcccggtcctgatatacgccgacgccctccagcatcccggccagctgtcccttcaaaatggtgacgggcgtcttcagctcgtgggaggcggcggagaaaaaggccatccgctgtcggtccagctcccgctcccgggccacctccccccgcagggcctggttggcggtttccaggtcggtgagggcggcagacagccgccgggccattttgtccagactgcggcccaactggccgatctcgtcccggcgccgctccccgcacacccactggaggtccagctccgccatcctgccagcgatgccgttcagccgcacgatgggccgggtgatataccgggagtacccgaacgcacacagcagggagaaggccagcagcgccagagccagccagggggccacccgccccagggcctccaccgcctggttggccaagcggagctgaggggagaccagcagctggtaggtcccctcctggtcggcaaaggtgatctgggtggtgaggatccccgtctgagtggcggtcaccacaccgtcggcccggtcaatctgcacctgataggtgtcggcctcgtaggtctggaccgagttgtccgccccggacatggtgacggccacctgccagtcctcctccggcaggaccaacagggagccggtgtccgcctccgccccgccgggggccgtcagggctacctccgccccgctctcccggacaaaggcgtccaggatgggccccgcgtcggccagattggtctgcgccagctggtgggtgaggtcggctacctgggcctggagccggtcgctgatcacagcggtgtaggtgatgggggtggcccaggcaatcagggcgaaggtgagtccccctgcccccagcagcagcaggaaggtaagcagaaaaatacgcaccgtcaggctttcagcgagtttccttcgcagcacggtagcccacccctctcacggtttcaatatagtcccgccccagcttgtggcggaggtttttgatgtggctgtccaccacccgttcatccccgaagaagtcgtagccccacagcctggagagcagcatctcccgggtgaagacccgccccggcgcggccagaaaggtgcgcagcagctcgaattcccgggccgtcagatccaggggacggccgtccagtgcagcctccctggtgtccaggtccaccaccagatcccggtaatgcaggcggctttccgccgcttcgccgctccggcgaaggatcacccggattttctccagcaggaccggcatggagaagggcttggtcacgtagtcgtcgatattcaggccgaagccccggagctgctgcgtctctccgtccagagccgtgagcatcagaatgggcacctgggactggcgtcggatctgcgcgcagaccccgaaaccgtcgattttcggcagcatgatgtccagcaggaccaggtcaaaagactgggcgcggaacaggtccagggccgccgcgccgtctccggccacagcggccgcatagcccgcgtcctgcagataggcgcacagcagctcctgcagctccggctcatcctccacgatcagaattcgtttcatcaacaatcaccgggaaaaagtatagcacaggattgtgaatttatcatggagaatttcatttccccctgtgtggggaacagacctccgtttccagcagcggccgcctgctgcgtgaccggtcccattgaccagtgggcaccggagctgtgacaggacgattcccagatccggttcgtgggctttgacttcttctgcatccaggtgttcaacccgcgtgaaaactccaaggacatgatgaccattgacaaccgacagaaatgtgaactcccggctgaaggccctccccgtggactggaactacaccatccccttcggcccgctccacgcccacgggtccgcagttactgtcaaacggttcctgagcgcggcgagggcggtattttccctttgatcccgcttcacgggctgtaacggaaaggtatatgcccatagcttttgaggcttctccggaaatctcaattttttataatagccccagaacggccgctatgcgggaagagaacgatacataatttgatttttgaaaatgggacgcggttcatttccggggccaggtgtctgaagaaatatctggccagctttttgagaaaaacggatcgaatatgctgctggtcgcagacagcagcggtggggagcgggacgcggagcacgggacgaagtgcccgccaggtccacctgccctgccccagcagcgaggcggcaggcggcccgcctgtgccgaaagcccgcctcgggggagtccaccggctgacccgaaagaaaaaaagagcggcatatccctatggatatgccgctctcctctgcgcgaaggcgcaccgggggagaccgtttccgcccgatgcgcgtttcttatgggatttcctccggtgcacggagctatccggctgctcggggcgtcagttctccaggtcctcctgcagggattccaccagggcgtccgccagctgatccagctctgcggccttgtccgcctgaagggaggaggccagggacagccgctcgttgagcaccgtcatgttcttgagttcctcgtcgatgaaggcctgcatcaggtctccggacttgcaggcccaggagccgttctcgatgatggcgaaggtgcggttctggaggttcagggccttcatgtcctccagatagctcttcatcaccgggtagatgcccagattgtaggtaacggaggccaggacgatgtggctgtacttgaagctttcggcaatcaggtaggacacatgggtgttggacacgtcgtacagggccacgtcggtgatgccccgttcgcaaagcttggcggccagcgcctgggcggctgcctcggtgttgccgtacatggaggcgtagacaatcagcacgcccttgacttccggctcatagcggctccatttgtcgtacttgtcgatgaagtagcccagatccttccgccacacgggaccatgaagggggcagatataccggatctggtccaggatgccgccggccttgcccagcagcagctggatgtgggggccatacttgcccacgatgttggtgaggtaccggcgggcctcgtcgatccagtcccggtcgaagttcacctcgtcggcaaacagcttgccgtccagggcgatgaaggacccaaaggcgtcggcggagaagaggacgccgttggtggtatcaaaggtcaccatggcctcgggccagtggaccatgggagctcccacaaaggtgacggtgtggtcgccgaaggaataggtgtcgccctccttgacctggatgcactcgtgaccgtccacatggaagccgaactggcgcatcagcatgaaggccttctccgtggagatgatccggaccttgggatagcgcagcaggatctcctcgatggaggcgccgtggtccggctccatgtggttgatgaccagatagtccagaggcgttccgttcagcaggtattcgaggttctccagcagctggcggcaggcggaccagtccaccgtgtcaaacaggacgctcttttcgtccagcagcagataggcgttgtagctgacccccttggggatggggtggatgttctcaaacagagccagacggtggtcattggcgccgacccaatagagattttcggtaacagttctcacacaatgcatgaagaaatcctcctttactcacagatgacaggccgttacgcctcaatgaactggtccttgggctccgcgcactccgggcagacccagtcctccggcagcttttcaaacaacgtgccgggggcgatgtcaccgtccgggtcgcccagctcggggatgtactcatagccgcagccgccgcagacgtatcgcttgccgatgggctccggcttggggagacggggccgcttcatcttcaccatgggcggcgcgggctgcttttcgccggtgtccagagcagcggtcagcaggggcagaatctcgttcacatccccaacgatgccatagtcgcagtttttgaagatgggggcgccggcgttggtgttgatggccacgatggtagaggcgtccttgatacccttcaggtgctgcaccgcgccggagatgccgcaggcgatgtacaggttgccggtgaacttctgaccggacatgcccacatagcggttcaggggcacgtatttcagcgtctccgccaccggacgggaggagccgatggccgcgccggcggccttggccagatcctcaatgagcttcatgttcttcttgccgccgatgcccttgccggcagagaccacccgctccgcctgggcgatgggggtgtccagggggatgcccacagtgaagtcgtggccgtccttcttcaaatgctccaccagggcggccacctgctcggcgggggagccgtcccgcaggatgaccttcttccgcacaccggtgacgggcgcgggcttcttgggctggctggaggaaccgccggaactcttgggggccttgcccaggatatgggaggcgatgaccacccgctggatctcgttggtgccctcgtagatggtggtgatcttggcgtcccggtaggcccgctccacctccatacctttcatgaacccggcgccgccgtgaatttgcagggcgtcgttggtgacctccagggcgatgtcggaggcgtacatcttggccatggcggattccatgccgtagggggcgtgcgcctccttcagctcggcggcggagtacaccaggaaccgggcgcagcggagcttggtggccatgtcggcgatcttaaaggagatggcctgctggaagccgatgggcttgccgaactggatgcgctccttggagtaggccacggcggcgtcataggccccctgggcgatgcccagcgcctgggccgcgataccgatgcggccgccgtccagggtggacatggcgatcttgaagccgtcgccctccttgcccagcaggttctccctgggcacttccacattgtcaaagatcagctcggcagtggaggaggagcggatgcccattttgtcgtagtggtcgccgaagtagaagcccttccagcccttctccacgatgaaggcgctgatgccccgggtgccgatatccggtgtggtgacggcaaagaccacataggtgtccgccttgggggcgttggtgatgaagattttgccgccgttgaggacatagtggtcgcccttcaggacggcggtggtctcagtgccgccggcgtcggatccggcgttgggctccgtcaggccgaaggcgccgatcttctcgcccttggccaggggcaccaggtacttgcgcttctgctcctcggtgccgtaggcgaagatgggccaggagcctaaggagacatgggcagacaggatgacgcccgcgccgccgtccacccgggccagctcctccacggcgatggcgtagctcagggcatccagcccggcgccgccgtactccgcggggaaggggatgcccatgaggcccatctcgcccagcttccggatggcctcgtccgggaactcgttctgctggtccagcatgaacgcgatgggtttgatctcctcctccgcaaacgcacggactttagcgcggagttcctcgtgtgcctgtgtggtctgaaacagcatagtcgtacctcctctttaatcttgataaaatttatcaactttcaagcaaaagaaaaactgtcaaatcaggggtccgtcaaaatctcctgcaggctgtgggcccgcagctcctcgtccagcttgttctgaatctcagccagcttgcagtgcacggtgcagccgccgtggcagctgcgccaggggcattgatacgccggatccatgcaggagctcagattcccgcgttctcccatggccttcatcaggtcatagaggctggtgccggtcaaatccgccgacagccgacagccgcccgccgttccgcggaccacctccaccagtccggccttctccagctttttcaggattttataggcaaaggcctgggggaggagttcatcctgtgcgatctgtcccgcggtatgcagttttccatccaacagtgcccgcaggatgcgcagggcgtaatctgtctcccgggtaatgaccaatgccgcgttctccttttatacgtcgtattgttaattggagaataccaatttggatattttttgtcaagtatcggatgcaaccctataaaaagtttggcagtgttccataaaaaaccagtcgtgattttgataaaatgccggggcggacgccctgggactcacggtgggcccacccgccgggggacagccggatatcggtgtcgttgccggggaacacactgttctgaaagtccggcgcggggtctgagggaaccgatttcagcaggacggcgatgccgttgtattcaaacgtattttcgttgtatagggagtggccgggagtgccatcggtgcagttgaaacggaaccgattgcccgtaaaggtgcagccggatgtgtgctccaggcggagatcgaaaaggcggtgtcccagacggtgaaggtgcagctgctgaccggctctacgacggcgaggtcttccgctgtgagctgtggctgccgtccgcctcttgacagcggcgggcgatctgctataattctgataaagttcgcaccatgcctgctgacaggggtgatagctgcagcccctttcgggcgccggccgcgagtcgcggccggttggctggattctggcgtatgcgcttcgcgcaggcgagcccgcttgcggtattggagcacacctgcgatgtgctggaagataccgccgcgcggttccccatacaaatttgtatcgctccgcaggcatgagaagggaggagagcacttgattgtctatcgggagctctcctcccttgtgcgggatctggggatccccgccgggacgctgtatgccgtcagcaatacactggaccgccattacatccgcaggcagctccccaagtcctccggcggtgtgcgggagctgtcggtcccggacccgctgctgaagcacatccagcgccagatcctgcgggtgctgctggtccacatgcctgtgtccccctacgccatggcctatcgatacggcggcagcactctgtgcaatgctgcgccccatgtgggaaagccctgtgttttgaagctggacatccgtcatttttttgacagtatcctgtattccgctgtgaaggaaactgcctttccagctgaggtttatgcagagaacttacgtattctgctggctatgctgtgctacgggtgggatcggctgccccagggggcgcccacatccccctgcatcaccaatatccttatgcgggactttgacaacgaggtgggggcctggtgccgggagaggcagatcgcttacaccaggtactgcgatgacatgacgttctccggcgatttcgcccgggatgaggtgctccggtgcgtggagccccggctgcgggcgctggggttctatctcaatcccggaaagacaaaatggctcccggcagaccgccggcagcttgtgacaggtattgtggtcaacaaaaagtgcaatgtcccgtccgaagagcgccgtgcactgcgccaggagctgcatttctgccaaaaatttggcatctccggccacatggcgcgagccgggatcgacggaccggaggaccgctacctggctcagctcctgggccgggtcaactaccagctgcagatcacgccgggaaggcgggagctgcaggaagcccgggactggctgatcaaagcacagccgcaatacggcggagggcgggagacatctccggcagaaaaacagatattgtgacatggaaaaagcgggaacatcatgtagatgttcccgctttttcggctttttccgaagagctcgggagaatatccccggcacataaaccgccgtctgcaaggtaaaataaggaggatcttttgttgaggaggtctgcaaatgtctgaacttacgatttccagtgaacgactcacagcctttgctgcgcacctgcgtgccgaggagcgcagccccggcaccatcgagaattacctgcgccacatccgggcattcgccgtctggctggacggctctccggtgacaaaggagacggcggcagcctggaaagagcatctgcttacgcaggactatgcgccggcaacggtcaatgccatgctggcggcgctcaacggcctgtttcactttctgggctgggacgggtgccgggtaaaatttctgagagtccagcgccggctgttccgggacgcgggccgggagctgacacgtccggagtacgaacgtctgatggagacggcccgttccagaggacaggagcggctggcgctgcttatggagacgatctgcgctaccggcatccgtgtctccgaagtgcagtatatcaccatggaggcagcaaaacggggccggacggatatctttttaaaagggaaaatccgaaccatcctcctgccggaaaaactttgccggaagctgctgaaatacgcgcaaaaacacaaaaccgcttctggtgagatctttctcaccagaagcggaagaagcttgagccgccgtcagatctgggcggagatgaaacagctgtgcagatacgcaggagtggagccgggaaaagtattcccgcacaattttcggcatctctttgccacgatcttctaccgggcctgtaaggatattgttcgattggccgatgtgctgggccacagctccatcgaaaccacacgcatttatctgacgacctccggtgcggagcacgcacagcaactaaacaggctgggattgattttataggacataatttatattttgaccatataaaacatctggctctgcacagtttgcactgtgagaaagaaaaagtgccacgccagcagcgccttccaggcactgatgggtatgaaaagaaaagccgcaatctttctcatttttgcggctcttttttgtgtgtcaaaagacgggatgggtcttgtgtttcaaaatgccagatggtataatattattatctatacagtaagtaaagatatttattttcgcttttatattgtcaaaatataaattttgacataaaaatattctaaagagaaaaggatc

SEQ ID NO: 4911 - DNA, 17190 bp, Unknown
  gut microbiota DNA sequence
gtttgagaactgcagtttcacgcaatgtctgccaaaagccaaagggcgccggggtgccacccgacgccctttgattttgcgccctttaatatgcggctccataaatgcgcggctgcatattgatttccccgacccatgaaagtcttgtttctgtctgctacagcatcattttagctttaaaattttgctcccctggccagttgcctgctggccaggggagttcttttttcgcatacctcagagatcgaatcctgtcgtgatccctgtcaagcggaggcgtcctttttcacatagtagagctccgtaatctccgaggcggattgtctaaggaggacggccacctgccggggggaaagggagccgagcgtcccatccggttgtttgatgctgttaaccagattggcggcgaagcagagtatggagcccccgctgcttcagctcagccgccttcaggatgcggtagtaccgttcgggtatagccttcgtgctcgtcagcgatgatcgacgcgtcttctacgaagtaccactccgctctcagatccaggatggcgtccaccgaggcctcgttgagaggcacatcccgcattctggtagatgcgtgtcctgtttccccaggtgcggagagcctcggctttgaacttcatggtatcatctggggtgaagatagtcacatttgcagaagttggttgctccttcttcggagcagagctgaaaagacggctgccgggttggcagccgtcttggtgatttcgggagatggatacggaaatggcgctcagtagaattccttcagataggcatctacatccgcccgggtgccggtgaaggggccgggggtctccatcttcagggacactaaggcggtggcgaagcggagggcggtggggatgtcagcagtcagccgctcattgatgtagccggcaaaggtggtgtcgccccgcccggtccggccggagaggtttctggcccggatggggcatgtgtagatctcccgaccatcgtagaccagcacctccgtgttatgggtgatgagaatctccttggcgccccactggtaaagctgtctggcggcctcagcccggtcggtgagacctgtcagaatctccgcctccgccgcgtcggtcttgagaaatcggacatacggcagcagctcctttttctctgcccagtcgtgatagaccatgccgccgttctccacccagcgcagcatggtttgcacgtcgatggccaccatggcgtgccgggcggcaaaggggatcatctcgttgggaatgtcgcccgctgccaggcccgccagatgccagatcgccgcatcgatatccggcacctcctcggtgcggtatggttcgatgacgctgtccacggtggaggtgcgccgctcccggtccggggtgtggtagacgttttttgtgacaaaggaggtcctgctgtgcaggggatagacggtcacatttggggctggggcgaaggcggcggccaggtccacctgggccgtgtccgccttggggagcaccgcggtcttgtggccggtgttggcggcggcgaagccggagtagtacacggcgccgcccacggcatggacggtggtgccgtcatagtccacattggtgtcctgtgccacctcgccgatgatcagagagtcaaactggctcatttctgtttctccttccgcatttcctcatccgtgtccacaaaggactggaactccgggctccagaggtggaaacggtgctgcccaatcaaggtcttgtaggcaaaggagtcggcgggcctctctggcaggatcacgccggcccgggcctcgtccccactctgatgggtgtcggatcccgccaggcggtagtattctggatggcggcgggccagctctagagcccggtcattgtagttgtcgtgccggggattgccgttgatgatctccgtaccgtgaatcgcgtcctcaaacaccgtagtgttgccgtcccgataggggtgggcgtggataataagcacctggtcatggaatttctggaagaactcccgggcgctcatgcagcaaacgtaggggttggatcgcagccacgcctcatcaatgccgtacaccaggtagtcgttgtcattttcgggaaatcgcagttccgcgccgagcagcacttggaagcccacctcgtcgccccgctgtttggaggcgcggtagccggagagatagtggtctatgaccttattccaatcgtggtctgtgtcaatccgggagaggtactccgggtggagatggtccgtcacaaccagtccggagaagccatggcgcacatagcggtccaccacctccgccgccggcaggtggccgcacttgctggtttccgccgtgtgagtgtgggggtcaaacaggtatccgtccataaaatgccttctttccatgattcagactgtcacgctcaaactgcgggaggggggcagcgccttggaacagggcagacaaaagccggtttttccaccaaaaagtcctcgaaaatgcaaacgttttcgattctgcgacgcaactccgcccgcaagaaagagaagtacacttctgcattgaaatatatagagttttgtcagaaaagtcaatataaaactgcgatttctggacttttggtcaaaatggcaaaaacaggggagtgtctttggcggttcctccccttgacagagaaaagtaatctaccatagaataaagacagaaaatcgaaaacgtttgcattcggtgcataagacgagtgggcagcggatccagagagcatctgcctgtctgcggataaggaggaaggatgaacgaaaaaaggtacagggccgtcctgttcgacttgggcggcacccttcggattgcgctggaggatgagccctatatgcgccatgcccgcaggaagatgacggagctggcgggggcaccgctgcaggtggaggacttctatcagttggtagaagaccgctacgagtcctatcgccgctgggccctgggagagaacaaggaggctggcgaccgggagctctggtgccggtggctgctgccggactatgaccagaagcgcattgcccaggtctgccatgagctgtcctttgagtaccgccagtccaaaggccggcgtgtggtggtggacggcggggcagaagtgatccgaaccttgcacgagcggggatacaagctgggcattgtgtccaacctgattggcgagcacgaggtgcccgactggctggaggaggatcggctggccccgtattttggcagtgtggtgctctcctccgtgtgccatctgcgcaagcctggcgcggagatttaccacattgcagcccgggaactgggggtggatctggcagactgcgtctccgtggcggacaacatcaagcgagatattccaggggccaaggctgcgggaatcggctgcaacatcatcttccggtctccggagaagaagcatcctgtggagttcacggaggagacgcggccggatgcagtgatcgatacgttcccggaattgctggagttgctgccgccgctgaagtgaacgcatcatttttttcaaatcccggaaaacgtttgtgtgagccgttcggatttgaattttgcaagacaacgaaataaccaaaattagaataattttattggatactttattaaatatgcggtatagttcttgacaaaagtatgaacgaatgttaaatttgaaatcgcatagaaacgaaaacgtttgcgatatttaacacaaacaacaagaggaactgaggagagagggtgcaagaggaagatgaaaccgcaagagcaaacgtattcaaaaagccggcggctgaagaatcagatcaaggcagtggtgacaaatccctacaacatcatcgtactgatcgccgtcgttctgctggtctatctgatcgtcctgccgctgctggacatgatcgccaccacctttgagctggcccagcgggacatccgggctgtgggcggcggcaaggccggcgactttaccctgtactactggcagcggctgctggccagtgagctgtcctggaccatgctgatcaagccgttgatcaactccctggtcatcggcgtctgcgtgtccgtgtgcgccatcctgctgggttccattctggcctggctgatggtccggtcggatctgcccttcaagaagtttttctccctggcggtgattatcccctacatgatcccctcctggtgcaaatcccaggcgtggctgtccatgttcaagacagcgaggttgggcggcgcgcccggcttcatggcctccctggggctggatgtgccggagtggctggcctatggccctgtcgccatcatcatcgtgctgacccttcattattacgcctatacatacctgctggtatcctcagcactgaactccatcaactccgagctggaggagatgggtgagatccagggcgcgggcaaggccatgatcctgcggaagatcactctgcctttggtgctgccggccatcctgtcggccgtgatcctgactttctccaaggccatcggcaccttcggaaccatcaactatctgggctctccggtgcagtactacaccctgtccagccagctgtacatgaatatcaactcccgggatacgcagaccggatttgccatggcgatcctgatgattattattgcctccatcgccgtgttcgtcaaccagaagctgatcggctcccgcaagtcctacgccaccatcggcggcaagggcggccgatccaccctgatcggccttgggaaggtaggcaggccggttatcactgcggcgctgttcgtgttcttcgcagtgggcatcatcatgccaatcgtcatcttggtcatggagagcttcatgctcaaggaaggtatctactccctggacaactttaccctccactactggattggcgaatccaatccccagattatggaggggctgccgggcatcttcaagaatgacgagttcatcaactccctgttcaactccctgcgcctgactctcgtgaacggcgtgttcggcaccatcttcggccagctgcttggctacatcaccgccaagggccgcggcaggctccacggcaagctggtggaacagctggtgttcatcccctatctgatcccgtccgtggcgttcggcggcatctatctgtccatgttctcccagccccagcagatcttcggcgtgaccctggtgcccgccctgtacggcaccttcgctctgctgacgctggtgtccgtggtgaagcatctgcccttcgcggcgcgggccggcacctccaacatgctgcagatcagcggtgagctggaagaggcggccaccatcgagggcgccggattcttccgccggttcgtgaagattgtgttccccctgtccaaaggcggcttcatctccggcttcatgctgatcttcgtttccatcatgaaggagctggatctgatcatcctgatcatgacccccaccacctccacgctgccgtacctggcgttccggtaccagaacggcaactcgccgcaggcatctgactgcgtggcgattgtgatgttctctattgtgttcctggtgtatgcgatagcgaatctctccggcaaggcggacctggccaagagcatggccggctgacgcggacagagaactgagaggagacgacgaacatgagcaagattgaattaaaacatatcgataaattctatggcaagaaccacgttctgaaagatctgaacctgaccatcgaggacggcgacttcatgacgctgctgggcccctccggctgcggcaagaccacaacgctgcgggtggtgtccggcctggaaaagccccagaacggcttcatctacatggacggcaaggagatcgtcaacgcggcggaggcgtactacgcgcccccgtcccagcggaacctgaacctggtgttccagtcctacgcgctgtggccccacatgactgtctttgagaacgtgtccttcggcctgaagatcaaaaagatcccctccgcggagatcgaaaaaatggttgccagcgccctggaacggatgcagatcggccagtacgccaagcggtatcccaccgagctctccggcggccagcagcagcgtgtggccatcgcccgcgccatcgtgtcagagccccggctgctcctgcttgacgagcccctgtccaacctggacgccaagctccgcgtggatatgcggtccgagctgaagcgcctgcaccacgacaccggcagcaccatcatctacgtcacccacgaccaggtggaggcgctgaccatgtccaccaagatcgccctgttccgtgagggcgagctggtccaggtggataagcctctggagctgtacgacaacccctgcgatctctatacggcggacttcatcggcaaccccagcatcaacttcgtggaggcctcgggcaccgccggcgcgtccgggctgtcggttgacggtgtcatgggccgcctggagttctcccgggaggacatgacgcctgaagcgcccgcctccggcgacctgaagctggttctgggcatccgcccggagcagatcaccatttcccgtgagaagaccgacgccgcgcaggtggaggcccgtgtatacgccggaatgcccgccggttccgagaccctggtctccgtccgggtcggtgagaagctgattactgtaaaggagctgggctccacccattacgccggcgatgagacggtctatctctcctacccgcccaagaaggtcaatgtgttcgacgcctctaccaaacgcctgatcaagtactcccgctaatgcgcgtttccatcatccgagcgatcccggagtatcctgcggcgtcagccgttgcgataaaagagagcgatttgaggaagaatgattaaaggaggaaaagaaccatgttgaagcacaagaaactattgagcgccctgttggctgctgtcatgctgtttactgtgaccggctgcggcggcacggatgatgaggcggaggatgccggcgccacctcctgggaggaaaccgccaacatcaccgccacggacgagacggatgaggagctctatgagcaggccatcgccgagggcggcgaggtcactctgtactccatctcctcccgctgcaccaaggtggcggaggccttcatggacaagtaccccgaaatcacctgcacgccctttgatatctctaccaacgacctgctggacaaggtcacccgtgagcacgaggccggccagtatgtggcggatgtggtccatatcaaggacgaggacggctccctgtacaatgagtatgtgcaaaacaagattttttacatatatcagcctgccgacatcctcgcccatattgatcccagcctgacagagacgcaaacccctctgtacattgagctgacccagctgttctacaatgctgaggcttatcctgacggttcccctgtcaccaacatctggcaggtgaccgagccccaatggaagggcaagatcctgatgcaggatcccctgaataatgtgggctggggctcctggattaccggcttctgcgtgggtgataccccggatcagctggctgccgcctatgaggaactgtatggcgaggagctggtgctctctgagggctgcgccaacgccggctacgagttcctgaagcgcctgcgtgagaatgagccgatcttcacctccgcttctgacgaggtcgccgaggctgtcggcacccccggccagtccgatccccccattggtttctgcgcctcctccaagctgcgcaagaacgaggataacggctgggtcctggctcccgtgaacctgtatcccaccaccggcatacccgccatcaacaccctgtacgtggtggaaggctgtgagcatcccgctgccgccaaactgctgatccgcttcatgatgggcggcattgatggcgataccagcggctacgagcccttcaacaccctgggcggctggcctgtccgggacgacattgaacccgctgagggctctgtcccctatgaggagatgaacgtttccccgttcgatcccaattccatctacacggagttcatgaccgtccgtgacttctggcagatgctcggataacagcacttcggcgatcctggctgcttcacacggccggcggacgggaatccgtccgccggctctccattccggccctctcagataaggagatatgcgcatgaatctattcattgacaagaatcaccggcggaagagccccattgccattgcaggctttttcgccaccctgctggacctctgcatctacggggttctgtataccctgctggcagagccgctgtaccggcagcttacgctgcccagcactgcagccaccaacgccgtgcacacgctgatcatcgcattggtggggacggcaatcggcagcctgctgttccttctgcgggacaagcgggtggcgctgttcgggtttgtggggctggcggtggttctggtgatgttctacttcgcagcctggatgctggatacagaccagcgggcaaccatggtgcagctgattaccctgtatggtgtggcaccggccctgatcggaaacgcggtggcttggccggtctatctcaagctgagaaagacccatcctctgcctgtgcagaagactctgcaggaggagatgcgggaggcggccgggaccaaggctgatgccgcccccaaagcgcatcctgctgccccggctgctgaagagcggccccggcggtctccccaggaggatgccatgctgttgtttgaggacggagaggatgccggctgccaccgccggcggaatacacacggaaaggatgaggattcctgatgctgacaaccgttttatttgatatgggcggaactctggaggatatttggtacaacgaggacacccagcgggcgacctgccgcaggctgctggaggtcctgcgggccaacggcctggagcccggctgcccggacgatgtgttctggaagcggatcacggacggcgtaaaggcctataagcagtggagcgaggggaatatgctggagaaaaagccggaggagatttggccggactggtatcttcgggactttgcctttgaccgggaaaagctgctgcccatcaccgaggagctggccaacctgtgggaggtcaccttctaccaccgggagctccgcgacggcgcggcagagatgctgcaggccctgaagagccggggctaccacctgggcgttatctccaacaacgcctcgctgtacaatgtgttccgcgtgctggaggactacggcatccgcggctttatggaggatgtaacggtctccagcgtcaccggttatcgcaaaccccatccggagatcttccggatcgccctgcggcaaatgcaggcaaagccggaaatgtgcgtctatgtgggcgacacggtctccagggacatcatcggccccaagcaggtgggctttgccaaggccgtgcagatccgctccttcctgtcggagcagaaggatgtgcacgtggccgcggatgcggcacagccggacaaggttatcggaacactgatggacctggtgacttggctggaccagatcaatccagagctggcccccgcccccggcgcataaccactcatttaatttgctcactttactttttctctttcttgcggagaggcgccccggctgaatggccggggcgcctctccgtgttgtcatgaaatccggggggctgtcaggagaactgggcatcgtataggacccgatagatgccgccggcatccagcagctgctggtgagtgccctgctcggcgatccggccgtcctgcagtaccaggatgcggtccgccgtgcgcactgtggccagacggtgggcgatgaggaaacaggtgcgccccctccgcagccgctccagggcggcgctgatctgctcctcggtctccgggtccacgtccgaggtggcctcgtccaagatcacgatgtccgcattggagaggaagcagcgggcaagggccagcagctgccgctggcccttggagaggccggcgccgctgtcagtgagtgcggtatcatatccatccggcagggaggagagaaaggaatggatacaggctgccttggcggcggcctcgatctgggcgcgggtggcgcccggcacgccgtaggcgatgttttccgcgatggtgccgccgcacagccagccgtcctgcaagacgatggccaagcggcgccggaggccgtcccgggtgtactgctggatgggcagcccgtcaatggtgatggagcccttctggggcgtatagaaccgcagcaggagggagaccagggtggtcttgccggccccggtgggccccaccacagccaccatgctgccggcggggatgtccgcgctgaagtcccgcagcaccgggtgggcggggtcatagccgaagtccacatggcggaaggagatggcgccggagagcttgcatggctcccgggcgcccggcaagtcgccatcctctgccggctggtccagcagatccagaacccgctccgccgcggccacggaggcctgcaggtcgctgaggagctccgccgtctcccggataggaccggagaatttgcgggagtacagcacaaaggaggacagcgcccccagggacagtccgccgcctaagtacagcagggcaccaaagacactgaccgccgccagggagaggttgttgatgaagttgacggagggccccagggccgtgctggcgcagtcggccttgtagtacgtctcggaggcggcgtcgtttttctcggcgaactgccgaagatctgccgcctcgacgccgtagacccgaatggcccgctggcagctgacccgctcctccgcaaagctattcaaggcccccagctcctgggagcggcggcggaacagggggtggatatgcttcatctggagccgcgtcagcaggacggagagcggcacggtcaggaaaaacacgccggagagcaggggggagagcatcagcagcatcacaaaggagccaatgaccgtcagcaggctggtgccgatctggagcagatcagtggacagggcggcgttgaccgtgtccacatcatagcagacccggctgatcagatcccccgccgggtgggtgtcaaaataccggaccggtagctgagtgatttgctgaaaagctgccttccgcaatgtgtaggatacggtctgccccacccgcaccagggcggcggaggcgccgtagctgcaaacagcggacaggacagcggctccgagacctgcggcacagcaccgcagcaccgcggtcaggtccgcagcccccggcccagtcccgatggcctccaccgcccagcccgccacgagaggcaccagcagcgccagcagaccggacagagcggccagcgccgcagcccctgctagggacggcgcctggggccgcaggaaccggcccatccggcgaaacagatgtcgtttcatccgacatcacctcccatctggagcttggccatgcgctgatagcgccggcaggaggccatcagcgcgtcatggcagccctgggcgtcgatgcggccgttttccaggaccagaatgcagtccgcttcacgcacggcggacacccgctcggagattatcaccagggtagtgcaggggaaatcccgccgcagcgcctgccgcagcgcggcggctgtggagtaatccagggcgctgtcggcattgtccagtatcaggatctccggccggtccgccagggcccgggcgatcagcagccgctggcgctggccgccggagaggttggcgccgcccaggtccagcggggtgtccagaccctgaggcagctgggagataaagggccacgcctgggccgtccgggcggcggctcccaccgctggccgtgggagatttcgcaggaaggagatgttttcatagacggtgccgcggatcaggtcgtcgctttgaaagaccacgccgaagcggctctggagtgcccggcgatcctgggcttttacatccatgccgcccacccagaccacgccccggtctgcgtcatacagccgcagcagcagggcggtcagtgtgctcttgccgctgccggtgggccccaggattcccagcatcccgccttggcgcaggaggaaggacgcctcctccacatccggcttggcaccctgataggagaatgtgacgcggtccatgcccagaaaaccgccgccagcaggcaggggagctgtttgccgctgctgctccggggccagcaggacctcctggatccggcgggcggatgcggcgcccttgctgaccttcacgaacaccttggaaagccccagtgtggcgctttggatcagagtgaagtaggtcataaaggcgacgatctgccccgggggcatcagtcccgcgttgacccgcagggcccccaccaggactaccaggatgagcccggcgttcagcagcagatcggttatggggtttgccagcgccatgacctgcccggcctgcgcctctgcctgccgctgggcctggttggctgtgtcaaagcgatcccgctccctgacctgacaggcgagggcctttaccacccgcaccccggcggcgttctcccgtaggatgcgcaccaccgtgtccacagccgcctgagctctggtgtagtgggggatcccccgccgggtcaccagcgtaatggtgagaaaggtgagaaggctcaccgccagctgcaccagcgccagagagggctccagcagaaaggtcagtatcaatccgcccaacaccagcatgggggcccggatgccgccccgctggaccttgtcaaacatctggtggacattgtaggtgtcattggtgaggcgggacaccagggaggagggtgagaattggtctgcctgggtgcaggagagtccctggatccggcggtagagatcctggcgcagtacccgggtcatctccatggagacccaggcggccatccggttggcggtaatattgcagcccaccgccccaagagccagcagcgacatccagccgccggtccgccagatggcggcagtgtcgccggcgggcaccagctcatcgatgacttctgccagcaggagggggaggatcagctccaggaccgctgcggtgaatttgatggcggcaccggcggcgacccgcccggcatgggggcgcagatagcccaacacggttttcatagcgcacctcttttccaatgtgcagacaatctcgcagcacgcccttggcggctgtatcacaaatacagggcccgcgcggaatgaggagcgcatcccgcgcgggccgagcgtcggcgctcatgaataccaggcgcccaggccgtctgtcagggcatcgtatgcccgctttaccttgtcgtaattcttgtcccggtccaggaccacgccccggccaacgccgtccacgatccgccccagcccgatctggtccaggcggctgtccagctccgccagcagcgcgggggcggagccgggttcggtggagcggccgtcgaagatgatgtggaagtagacctcctccaggccctgcttcttggccatctcacagatggccaggggatagtcgatgcacccgtgggaggacttatgggtgaggtaggccagcagatgcagggaggcatggttccgtctggcatgctcgatggcctccagaaagaccggattgcgggcgaaggagccgtcctgcaccgccgcgtccagccgcacgtcgtcctgcatgacgcaccggccggcccccagattggagtgtccggcctcggagttgccggccttgccggcccccaggcccacaaattcacgggaggcctgcaggcggcaccaggagcgattttccaaaagggcgtcccagtagggggtgtgggccaggtggatggcgtcgccctcatcgccggcgcccaggccccagccgtcgcagatgatgaggagcatcctccgcccccggctccaggcgtgtccctccgccagggagcggccggtcatctccaggggctgaggaaggcccatgacgtctaatattgtgggagccacgtcgcagagggcaccgtcccgcagggagatggggtcctcctgacgggagtctatcagaataaagggcaccagattggtggtgtgggagccgtccggcttcccggcaacggtgtacagcttttcgatattgccgtggtccgcagtgatggccaccacgtagtcctgggccagggcagcatccaccacctgctccagggcccggctgacgtaaccgcaggcatccagcttggcggcggtgttctgggtgtggccgatgacatcaccgttggcgaagttggtgacgatgaagtcgtatttccccagggcgcccgccacagtccgggccacctccggcagggagagctccggcttctggtcaaagtcgatgcctttgggagaggggacgcacacatcctcttcaccggggaaggaggtgttttccccgccgttgaagaaaaaggtcacatgggcgaacttctcggactccgcgcagtggaactgggtttttccggcctcggagaggacctgggccaaaggttttaccacgtgttccggcgcaaaggcgatgggcagatgcttgaacttgtcgtgatacagtgtcaggatagcgaagtacagatccttcagcttccggcgctccacggcccggaagtcgtccgccgtgaacagttccgtcagctcgatctcccgctcaccccggcggcagcagaacaccaccgcgtcgtgatcccggatgcggccgacgggaacgccgcgctcagtcagcaccatgggctccagatgatagtcgtcctgccctgcggcataggcatgccggacggcctctgccagctgggcaccgccgtgattggatacagacatcaaaagacctcccctatgtttcaggccgccattcacagtgggcaggagagcttctgtaaacggacagctgaagaatgtaaacgtttgcggttttcttgattttattttaggatatccgtctgtcatttgtcaagtcggcgcccgccaaagaatcttcggcagatttggagaaattactataatgataattttttcggagatattgacaagtttgatataattctatatgctgttcaataagaaaagtgaaattgacgatttgtttgattttaacggcgtcaaaatgaaaacgtttacgcaatggaaccggctcaggcgtggaccgatggaaaggacagagatcatgaagaacgtgacactgaaggatgtggccaaggccgccggtgtctcttatgcaacggtatcccgggctctgtcggggagtaaccagatcggaaagagcacgcgggagcggattgtccgcctgtgcgacgagatggggtacacggggaactacgtggcccgctccatggtgatgaaaaagacgtatctgctgggactggtggtgccggccattgaaaatgagttcatgtcccagctggcctattatgtggagatgagcgcccgggccaggggctacaacattatgctgtgcaactcagagccggatttgaaacaggaggagatggtggtcaaactgctgctgggccgccgggtggacgggattttgatcgtcccccagtccccggccacctatgagaagatcgccccgctgctggagcagatccctgcggtgtttctcagcgagaatctgcgggatcagccccagagctacgtatctgtggacaacagccgaggcgcctatctgggggtggagtatctctacggactgggacaccgggagatcctgtacttcggttgccggaactccactacccatcagctccgggcggagggctatctgcgggcctgccggcaattcgggctggaacccaggctccatcacagcgactttgcccggtcctccatcgagaatggatatcagatggtcaaggagctgtttgcaaagcccatcgactatacagcgatctttgcctctacggactccaacgcactgggcatcctgaaggcggctgacgagctccatatccgcatcccgggggatctgtccctcatcggatttgacaacatcccctccactgcgctgccgcgcatcgaccttaccaccattgagcagccgaaaaaggaaatggccgtccaggcggtggatatgctgctggacaagatcgaaaaggggacccagggttatgtgcaccagattttgatgcccagcctggtccagcgggggacctgccgttctctgacatgatggcagagcgttttttcaatttgaagagtgacagaaaaaacaccgttcctggcggtgttttctcttgcggccgaggtgcgggtgaaaagaaaatggactgcagcaactccagagcttcacaataatatctagcaggatatccgcgctggtggcatccctcttgtccaaagcgtgattcatatggctgtagctctcccggtatttcagaattttccagaccagcccaggagaagtgctctgcaatggactggtggaactggatattcagcgtgtttttcagcttcttgacccaggtggcctctttgtagacgctggccttggttcaccatactttccatgcagatcagcaggctatcggccatctccggaaggaggcatccatcgagggcgccagtatggctctttctcataggtttgaagttccccgaggaaagggctttccattgttttatgcgccttggtttttgaggggcggctttttccatgtctgtgcgctacggtcatccttggcgctggaaatttcagagatttggtctggttagtgtaaaatttttgttggcaaaagaaaaagggaaacggcgaaaacacagcttcccttgggactccaaaatcagtagaattgtgaagcgacaaaacacacctgctgcaaaggtgcctcaaggcagctgtctgtctgctggataatggagacattaaaaaaatgtctcaaaaatcaaaaaaaggattgacaaaagctgcggcgtaaagtataatccttattgttctgtgcggcggatgcgttgtcccaaaggatgacagcatcaagaaaacgtcagaattgtgaagagcgaactgctatggattggtaagtgtttggggcagtagaggaacgttgctctttgtagccatcccaaaaccgcatgccgagggttcgaattcttctgctcctgccattggaatctttagaaggcaggatgtatttgcttataataggacgagcctacaaaatggcccggtagttcagttggttagaacgctagcctgtcacgctagaggtcgacggttcgagcccgttccgg

SEQ ID NO: 4912 - DNA, 80147 bp, Unknown
  gut microbiota DNA sequence
cctctggggggaagtactggagacaggcgtccagcaggtcgccggtgccgtggccatggacagccgagacagcgatgggatcccccagtcccaggttgtagaactcataaaagtccgggtccgggacaccagtggagtccattttgttcactgccagcacgatgggcttgccgctgcgcagcagcatgttggccacctcctggtcagaggcggtgaggcccgtgcggacatccgtcagaaagatgatgacagtggcgttctcgatggcgatctgggcctgatcccgcatgaaggacaggatctggtcgtcggtccggggctcgataccgccggtgtcgataagggtgaaggaccggccgttccagtccgtctccccatagatgcggtcccgggtgacgcccggggtgtcctccacaatggagaggcgctttccaatgagtttgttgaacagcatggacttgcccacattgggccggcccacgatggcgacgatgggtttcaccggcgctcacttcccttctttatcaagcagacatacatggtcatattatacccagtgaccggcgaaatggcaagacgtcctccgatttttacacagtatggacgcagaaaaaggagggaagatgttgctcttccctcccgatccacagggcacgtcttatttcgccaccacggacttgacaaccttgacctcgcggccgttgtaagtaccgcactcctggcacattctgtgaggcaggtgcagcgcaccgcatttcgggcatttgacgaggccgggagccgccagcttccagtgggagctgcggcgcttgtcgcgtctagctttggatacttttcccttaggtactgccattgtgacacctccttgatctttcaaaggcaacggagtcgcccccggccttattcattcgttctctctgttctctaaaagctttgccaggaccgccagacggggatccgtctccttcccgcaggagcaggggccgaggttcaggtcggcaccgcaccgggggcacagtcctttgcaatcttccgaacacaatgtcttggtgtccattccaaggatgaacgccgtgcgggccagatcgcccacatccacttccccatcctccagcaggacgatctcgtcgttgtcctcgttctggagctcttccgccaataggcagcgaaagggaacggtcttgtcctgaagaaacgccttgccgcaccggtcgcagaccgcgtccagcgtggtccgggccgtcagctccagctccaggagatccgcggtgttgctcaccgcgccctccacctccacagggcggctgatgggatgccgtccggcaaattccacgtcggacaagtccagagaaaactggaacgtcaggcgcttgccaggggcatgcagtatgggtcttacatcaaaacgcataagctacctcgtaatgacacgaatagtattataagggatgtgtgcccggttgtcaaacaattttttcatgtttttgccgtttccgggcaaattttttcgtttccgggcaggcgctctgttcagctctcctcttcccgacgcttctgccagccggtgatgtcgatgcccaggatcacattgcggaagccctcctgcagccgggcataggtggtgatgttgtagatgtccttgggccggcgggtgttccagccgtcccgcagccgctccgccagctcttggcacaggggctcctccagtcccagcagcatgggggaaagatacgtcaccagcatctgcttttcccgggcctggaccatggtccggttccaggggcgctggcgtttccaccctgcctccagcaggtccagcagctgctccgccagtacccggcggccgtcagggtcctccgccgtctcccggacggcctccatgtacagtggtccgaatcgctccgtgtaggtccggaaggcgctggtgtactcccggcgggtgaaccgctcgttgtaatagcgcgcctcctgcacggcggcgcagagctcttccagcttcattcctcgtcccgtcccttctggtccgcttcgggtccgacctgttctgcaggtgtcgccggacgcttctgctccggcagggcgtcgtcctggctccagctatccgggtcgtccttgtgagccttggcgtactggtacgccttccactcccgccaaagcaccatcgcccctgccgcggcgaacactgcgcccgccgccgcgttcagagccacggtttcggcggtcccgtcccagatgcccttcatcagctggtaggccagatacagcaggtagccccctgccaagacccggaaatagttcacccagccccgctgtttgtttccgtcatgctgcgccatacgtccagtttctcctaaccgattcaaaaaattctctccccgctttacaagcgcccggcaaacaggtatgatggtagcatcaaatacttgcccatcggaggatgccatgcgggaactcaccattggaaaaaacgacgccggacagcggctggaccgctttgtggccaaaagcctgcccctgctgccccccaccctgctgcagaaatacatccgcctcaagcggatcaaagtcaacggcaggggtgccaagcgggacacacggctggagtccggcgatattttacaattatatatcaacgacgagttctttgacaagccctctgaggaaaacatctttctcaccgtgttccgtccccagctggacatcgtgtacgaagacgagaatctgctgctggtgaacaagcggccggggctggtggtccacgccgatgagacggaaaaggtcaacaccctcatcaaccacattcaggcctacctgtaccagaaaaaagagtggaatcccaaatgggagaacgcctttgcgcccgccctgtgcaaccggatcgaccggaacaccggcggcattgtcattgccgccaagaacgcggagaccctgcggatcataaatgagaagatcaaaaaccatgaggtggagaagtcttatctctgcatcaccgtaggccgccccaagccagtggaggggaagattgcgggctttcttttaaaagatgaggcgaaaaagcaggtggctttctatcgccgtcccattcccggcggaaagactgccgtgaccctgtaccggactctggagacccggggcccgctgtctttggtagagtgtcggctgctcaccggccggacccaccagatccgggtgtccatggcggagatcggctgtcccctgctgggggacggcaagtacggccggggggatgtgaaccgccgctacggcgagacccggcaggccctgtattcctaccagctggccttccctttccccacggacgccggggcgctgaattacctgcggggcagggtcttcaccgtggcggatgtgcccttccgggacaagtattttcccgcgccggaaactccttaaaaaattcccgtaaaaccccggcgaaatctttgattttgcttgacttttcgccacacatcggatatagtttgttattgctgaatttcgacgagaaaggttccccctcaacagagaaaagaggcgtttcattgtaatcaaaattattatgaaatgggggaggatacatgtccaaagagttgattcgtctgcggaacatccgtatggcgtttgacgacgaagtggttctcaacgatttaaacctctatatcaacgacaaagaattcctcacactgcttggacccagcggctgcggcaagaccacaacgctgcgtattattggcggcttcacgacccctgtgtcgggagacgtcctgttcgacggtgtgaggattaatgacgttccgccctatcggcggcagatcaacacggtgttccagaaatacgccctgtttccccacatgaatgtgtttgagaacgtggccttcggcctgcggatgcagaagcggccggacccgaaggatccctccggcaagcgccgggtaaagatcccggagacggagatccgtcagcgtgtgctggaaatgctggaggttgtcagcctgaagggctttgaaaaccgcaagccggacgccctgtccggcggccagcagcagcgggtggccatcgcccgggccctggtaaaccggcccaaggtgctgctgctggacgagcccctgggcgctctggatctaaagctccgcaaggacatgcagctggagctgaagaaaatccagcagcaggtgggcatcaccttcatctacgtcacccacgaccaggaggaggccctgaccatgtccgacaccatcgtagtgatggacaagggctgcatccagcagatcggcacgccggaggatatctataacgagcccaagaacgcctttgtggcggacttcatcggtgagtccaacatcattgacggcgtcatggtccgggacaagctggtgaagatgtacggccgggagtttccctgcctggacggcggctttgctgagaacgagccggtggacgtggtcatccggcccgaggacatcgacatcgtccccatggagcagggacaactggtggggactgtcacctccgtcaccttcaaggggatgcagtacgacatcatcgtggatttccggggcttcaaatggcttatccaaaccacagaccattcccccgtgggcgcccggatcggcatcaagatcgatcccgacggcatccacattatgaaaaagagtcagtattccgggatgttcggcgattactcctccttctcggaagagtatgaggagatgagcgacgccaactgggaggcggatgaggaggagagcgaggatgaaaaataagctctcattgttcgccgttccctatgtgggatggatgtccatcttcgtggtggcgcccatcatcattatggtggtctatgccttcagcaccgccgccggggacttcacgctggagaacttcgcccgcatgggtacctatacagcggtgttcacccgctcgtttaagctggccatcatcgccacactgatcgctctgctgatcggatacccggtatcctatatgctctccaaggaggggccgcaggtgcagcgcatcgctatggtgctcatcatgctgcccatgtggatgaattttctgctgcggacctattcctggatgtccattctggagaacaacggacttttgaaccagctgtttcagcagatcggcctgatcgacctttacaaccagatcgctatgcactttgcatctgatcccgccgcgtatgtccccatcgatcacttccagatgatcggtacccagggcgccgtagtgctgggtatggtgtacaactacctgcccttcatgatcctgcccatctactccgtgctggtaaagctggaccattccctcattgaagcggcccgggacctgggcgccagcagcgtgcaggtgttccgcaaggtcatcctgcccctgtctttgccgggggtgctctccggcatcaccatggtgttcgtgccctccgtgtccaccttcgccatctcccgtctgctgggcggcggcacccagatgatgctgggcgacctgatcgaacagcagttcctgggcggggcctataatccccagctcggggcggctatcgcgcttgtgatgatggccattgtggtggtgtgtatgctggtgatgaaccgtttcggcgacggtgaggaacaggcggtgatgctgtgaaacggaagcatctgctgggaaaccgcatcttcatggcgttggtattcgtattcctgtatgcgccgattttcattctcatcatcttctccttcaatgccggcaacagcagcgcggtgtggaagggcttctccctgcactggtatgcggagctgttccagaaccgcctcattatgcagagtgtctataccacgctgctggtatccgtgctttccacgctgattgccactgtggcgggcacctttgcagccattggcctggccagtatgcggcggcggtggcgcacgcccctgatgacggtgaacaacattcccgtcatgaatgcggagatcgtcaccggcgtctccatgtgtctgttgttcgtggcctttttcggcctgtggaaggcctttgccgtctggttcaaccaggcgcaggataccttctggatggaggagaacatctatcttggcttcggtacactgctgctggcccatgtgaccttcaacatcccccacgttatcctgacagtgatgcccaagctgcgccagatggacaaaaacctagtggacgcggcccaagacctgggctgcacctggatgcaggccttctggaaggtcattatcccggagatcaagcccggcatcatctccggcgcactgatcgccttcaccatgagcatcgacgatttcatcatcagttacttcaccgccggttccggcgtgtccactttggccatgaccatctattccatgacgaaaaagcgggtcagcccggagatcaatgccatttccacgctgctcttcggcgctgtgctgctgctcatcatcatcatcaatgtccgggaatcccggcaggagcgcctgcgggagcgagcccgcgcatgactatcggtcccacggcctgcgggtcttgagatacgcattcaaatcaacactggaggaatgatcaattgaaaaaaatggtagccttgactctcgccttactgatggcggcgagcctgttcctgtccggatgctccgtgcgcaaggacacctctgactcggaaaattccggcagcagtaacggcagcggcagcggggaccgtgtggtcaacgtgtgcagctggggtgaatatatcgacgagtccctgatcgaccaatttgaagaagcgaccggcatcaaagtcaactatcagaccgcagagagcaacgaggttctctattcccagctgagcatgggcggcgtggactatgacgtcatcgtcccctccgactacatgatctcccagctgatcgaagaggatatgctggccgagctcaattatgataacatccccaattttgagaagatcgacgaccgcttcaagaatctgtcctacgatccggagaacaagtacaccgtgccctacacctggggcaccctgggcatcatctacaacaccgccaaggtgcaggagcccattaccagctggagcgccatgttcgatccccagtacgccgggaacgtgctgcttatcaacaactcccgggatgctctgggcatcgccctgttgtacctggggtactctgtgaataccactgacgaagcggagattcaggaggcttaccagctcatcgccgacgccgtaaagaacggggtgtatcagggaaaggtcatggacgaggtgtttcagaagatggagggcggcaacgccgccattgccacctactatgccggtgactatctgagcatgctggaaaacaacgaagatctcgcctatgtagtgcccgaggagggcagcaactggttcgtggacgccatgtgcgttctcaaaacctcccagcacaaggaggaggcggaggcctggatcaactttatggcctccactgaggcaaacctgcggaatatggactatatctggtacgcctctcccaacgctgaggcgctggagacctatcctgcctactatgaggagacctacggagagcccctggatcccgctctctatgagatcatggccccctcccaggaggtgctggaccggtgtgaggcctacttggtcctccctgctgagacgcgcaccctctataacgacctctggacgcaactcggtatctgagctgtaaaatgcggcaccggaacaccatccggtgccgcttctttttcccttgcgcattccactgctttcctgtacactggaaaggcggaagatattttaccaaggaggaatcctctcatgattttaattggaacaaaatgccgcctggagcaaactgttacggacgcccttaccgccgctaacgtgggttccggtgccctgccggtgttcggcacgccctatatgtccgccctgatggaaaatgccgccatgacctgtctgcagagctttctggaggagggccagggcagtgtgggcacccatctggacatctcccacgacgctcccacccccatcggcatgaaggtgtgggcggaggcagagatcaccgccgtttcggaaaacggcaaaatggtggacttcgctgtgaaagcctgggatgagagcggccccatcggcagcggcacccacacccgggccatcgtcaagaacgaaaaatttctggcaaaatgcaatgccaagctggagaagaagtaattctttccacatggacaaaacaagggaggacccggaatgggtcctcccttttcttctgctatcgcggtgccgtggggaaatcgctcccacggggattaaaacagcgtcagctggctggtctccgccatcccggcgaaggctcccagcgccttcagctgctcaatatgggtcttggacagcttgttgcagcacatggcgaactcctcaacggagacgaactccttcccattccgtttctccaccgtgtcgatggccgccgcctctcccaggccgtggaccgttgtgaagggcggcagcagaccgttctccgtcactttgaacttggtggcatcggactcataaatgttgatggtgtcgaagtggaagccccgcaggtagaactcatagcacacctccagggtggtcagcaggttctgctccaccgccgtggcgtccttgttgttctcgatctcccggatcttccgcttcaccgcatcctttccggcacagcagtactccgcatcaaaggccttggcccggacggagaaaaaggttgcatagaatgccaggggctcatggaccttgaaccaggcgatgcggaaggccatcatcacgtaggccaccgcgtgggccttggggaacaggtagccgatcttggccagggagtcgatgtaccactccggcacgtcgtggtcccgcatggcctccacccagccctcgtcaaagccgcccttcttcaccttgcccttgcggaccttctccatgatcttgaagctcatcttggggtccaggcccttggagatcaggtacagcatgatatcgtcccggcagcccaccgtctccagaacggaggcggtgccgctgacgatcagctcccgggcgttgcccagccacacgtctgtcccgtgggagaagccggagagccgtaccaacgtgttgaagtccttgggctgggtatccaccagcatctgccgggtgaatcgggtgttgaactccgggatcgccacggcgccggtggggcccagaatctcgtcgttctcgtatcccagcactttgctggaggtgaagatggacatggtgtccgggtcatccaggggaatctggcgggcgttgacaccggtcagatcctccatcatgcggaccatggtggggtcatcgtgtcccagcatgtccagcttcaggaggtttgcctccatagagtggtattcaaaatgagtggtgatggtgtcggagtcgtcggcgtccgccgggtgctggaccgggcagaagtcctccatgtccatatcgtcgggaacgaccaccaggccgccggggtgctgaccggtggtccggcgggtgcccacgcagcccagggtcaggcgattctcctctgcccggcccacagtcatgccgttctcctccaggtattttttcacgaagccgtaagcggtcttctccgccagtgtaccgatggtaccggcccggaacacctgggtctctccgaacatctcgatggcgtggcggtgggcccgggcctgatactcaccggagaagttcaggtcgatatccggcaccttgccgccgccgaagcccaggaaggtttcaaaggggatgtcgaagccgtctttgatgtattctgtgccgcacaccgggcagatcttgtccggcatgtccgcgccgcagccgtaggagccgtcctgaatgaactccgcatgcttgcaattcgggcagcggtagtggggcggaaggctgttcacctctgtgatcccggacatataggccaccagggacgagcctacggagcctcgggagcccaccaggtagccgttttccagggaccgctgcaccagcttctgggcggacatgtacaccacgtcgtacttgcccagaatgccgcccagctccacgttcagccggtccacaatcagcttgggcgggtcctcgccgtacagctcatggaccttgttccacaccagggaattcagctcctcctcggagttctccagccggggcgggaacagctcctccggcagcaaggggaaagtctccacctggtcggcgatggcctgggtattggtcaccaccacctcataggccttctccttccccaggtaagcgaactcctccagcatctcatcggtggtcttgaagtagatgggcagcggggcgttggcgtccgggaacttcttggaggccagcaggatgtggcggtacacctcgtcctccggctcccggaagtggacgtcgccggtggcgcagacaggcttgcccaactcctctcccagccggacgatggtgcggttgaactcccgcagctcctcctccgactggacgtcgccgtttcgcagcatgaaggcgttgttgcacaggggctggatctccagatagtcgtagaaagaggcgatgcgtttcagctcttcccagtccttgtggtccgccacggcccggaacagctcgcccgcctcacaggcggaacccacaatgatgccctcccggtgctccagcagcagactcttggggatggtgggcacccgcttgaaatacttcagattggaggcggagatcatctggtacaggtttttcagccccaccttgttccgggcgatcagaatgatgtgcttggggaagcggttggtcttgctgcccaggggccgcagcttctccatctcgcggtttaccgcctggagggtgtggatgccccgctcgtggagcatcttccagaaggggatcagcatatagcccacggtggcggcgtcgtcgctggcccggtggtggttgaagttgggcagctccagccggtccgccacgatgtccagcttgtactttcccagatccggcagcaggttctgtgccagaatcagggagtccacataggtgggctggaagtccagccccaccttccggcagcccgcccggatgaagccgatgtcaaactctgcgttgtgggccgccagggggcggccgtccacgaacttcaaaaattccgccagggcctccttcagttgaggggcgtccttcagcatgtcatcggtgatgccggtgaggccgatgatctccggcgtcagccgccggttggggttgacgaaggtctggaaccgatccgtaatctcaccgtttttcagcaccacggcgccgatctccgtaatggcctcccggtccaccttgaggcccgtggtctcgatgtcgaagcacacgaactccccgtccagggagcagtcctgagggccgtggaccaccacccggtcatcgatgttgttgacaaagtagccctccacgccatagaggatcttgatcttgtccccagcggcgtgccaagcgtccgggaaggactgggccacgccgtggtccgtgatggcgatggcgggatgtccccaccggatagcctgttggaccacctctttcgtgtccgtcagggcatccatattgctcatcttcgtgtggaggtgcagctccacacgcttctccggggcggtatcctgccgctcagtgtgctccgccagctggatgtggtaggggttcagctggatgtccttcccgtcccaggtgggctccatcttgccctggacgcacagccacatgccgggcttgatggcgctctccagtccctgagcctccttctccgtcaggttcttctgaacggtgacggagttggtatagtccgtcatgtcgaagctcagccgccacataccgggccgccgggtctcccggcactcgaaggcgaacaccttccccgccacggtggcattccccatcttcaggtccaggatcttcatgggcaccggctggatgcgaatgggcttgcccatcaggaccttgcctgcggcctgcttctcgcccttactgccggagggggccgccgggaccgaagcagccgggcggctccctgcggctgcggcctgggaagaaggagccttgcaggtgacttccgtcgtcacctgtcggaagccgtatacgcccatcagcagatgcttcagctcctccagctccgcatctcccagctccgccctggtggtgaggcgcagcgccagcgacatgccggcctggtcgatgcaagcgccgttcaccactgcgccggccaaacgaagccgcagctctccggagagctgcagctcagtaaacatttcaaaaaagggtatatctcttgacatagacgccaccttgttaaacaggaatcaaatgctgagaaatcagaaattaggaatgaggaattccggcgtccggcaacgccggacgtatgagcattgtcccaccagaggcggaacacaacaattccgaattcctaacttctcattcctcatgggagtttttcaatttcctccatcagcttgtccaccagctgctcctgcggtactttgtaaaggatttctcctttgcggaaaatcagtccctcacccttgccgccagcgatgccgatatctgccgccgctgcctcgccggggccgttgacggcacagcccatcaccgctacggtgatgttcttcgtgcagttcatgaggccccgctccacctcttccgccatggggatcaggtcgatgcgggtgcgaccacaggtggggcaggcgatcagattcacgccctccttacggagtccggcggccttcagaatcttcttggcagcgaaaatctcctcgatcgggtcggcggtcagcgtcacccggatggtatctccgatccccaggcacagcaggcccccaattcccatggcggatttcacaagccccatggaaggggtgcccgcctctgtcacgcccagatgcaaagggtagtctgtccgctcgctgagcagccggtaggccgccatggtcaggggcacatcggaacacttgacggagatgcagatgtcatcaaaatcgaacttgttcaaaagggccacgtggcccatggcgctctccaccaatgcctctgccgtgacgccgccgtatttggcccgcaggtccttttccagagatccgccgttgaccccaatgcggatggggatggatttttggcggcagatgtccgccaccgccttcaccttctcctccccgccaatgttgccgggattgatgcggatggcgtcgatgccccgctctgcgcacgccaaggcatacttgtagttgaagtggatatccgcgatcagggggatagaaatctgttccttgatccggtccaccgcctctgccgcggcctgatccggaatggcaatgcggatgatctcgcatccggcggcctccagcgcgtggatctgctccacagtggcgcggacatcgtcggtcttggtattgcacatggattgaatagacactggggcaccgccgcccacggccacatcccccaccatcaaacgctttgtcatggcgcttcctccctcaccagggcgtaaatgcaggaatccagcatctccccgtttttgtacacgctccgccgcagagtgccctccagggcgaaccccgccttctccaacacccggcgggaggccgcattcctggcaaatgcctcagcgtggatgcggacgatgtcccaggctgcaaagccctcccggcacatggtttccacagcggcggtcatgatcccgcggccccagaagggctctcccagccagtagcccagctctgcgctcctccggtatacatcgctgcccaggaacaggccgatgctgcccgcagcttcgccgtccacctcaatggcccggcacatctgaccccggccctcctgccggatgcagctctccacaaacgtggccgcatcctgtggggcataggggcagggaaacacgtcccgcaggttggcggcgatctttgcattgtccgcgtaccgggcgatggaggcagcatctgcctcccgccagggccgcagggtaaagtccgtcatgactcgctcctatccgaacagtttgaacacatcattgaatgtcaccaccagcatgaagcccatcagggccacaaagcccacggtgttcaccgccatctcatacttctccgggatcttctttcggaacagcttcatggcgatctcatcaatgatgaggaagaagatcttgccgccgtccagagccgggatgggcagcatgttcatcactgccaggttcaccgccagcatggcgccgaagtagaggatgttctccaccgcggcggcaatggtctctgacgcggtgcccacctgggtgatagtggagacgatgcccaccgggccgctgagatcgtccatgcccgcctgaccggtcaccagcatctgcaggctcagccgcacgatccgcacaaagtcgatggtgttcagccagctggtcttcaggatcgtccagagattggcctcctcaatctggtctcttgcgatatagacgccgtagccctgataggtctccccctctgtgccggtgtaggtgccccatgtgacgtcgttcagctccaccttctcgccgtcccgcaggaccaccaaatccatgggctggccctggtgcaggctcatcagcagggacacgtcactgtacaggtacacccgctccccattgacggaataaaaaatatctccggcctggatagtctggccgttccgctcctcaaactccggcgcggtcccggcggccgccgggatcagaaatccctgggcaccgctatacaccgccagaatgatgaggaaccccgccaggaaattcataaaggagccggcggcaaaaatcaccacctttttccagaagccctgacggcccagagaccgctcgtcgccggagtcctcatcctccccctccatagcgcagaagccgccgatgggcagcagccggagggaatactgggtctcctccgtctccttgtgccagatcagaggccccatgccgatggaaaactcgttgacccgcacgccgcagagcttggcggccaggaagtggcccagctcgtggacggcgatcagtacgccgaaaatcagaatggccgccaggatatacacaatggtcatgcaaaaactcccgtcaaaaaacttgcttcaagcccggtccagcaccgcctgccgcgccgcctggtccgccgccagaatgtcctccagcgccggttcctgctccgccggcacagctgcccgggcctccgccaccaggcggggaatgtcgtggaagccgatcctgcccgccaggaacaggcccaccgcctcctcattggcgccgttcaaaacagcgcaggcggtgccgccctgagccgccgccgcctctgccagctgcagacatggaaatgcatcccggtccggctgggcgaaggtcaggggcgggcaggacagcaggtccagcggctccgccggactttccacccgttcggggtatgtcatggcatatcgaatgggcaggcgcatatccggtgtgcccagctgggccaggaccgccccgtcccggtactccaccagggagtggacgatgctctgccggtggatcaccaccgacacctggtccagcggcagacggtagaggcgcatggcctcgatgacctccagccccttgttcatcagcgtggcgcagtctacggtgatcttgggtcccatggtccagttggggtggcggagggcatccgctttggtcattttgcccacttcttcataggtcatgccgtaaaaaggcccgccggaacaggtcaggatcagccgccggatctcccggcggtcggcgcagccctgaaggcactggaagatggccgagtgctccgagtccacaggcacgatctcggcgccgtgcgtatccgccgcatccatcaccagctgtccggcgcagaccaacgtctccttgttggccagggcgatgcgctttctctcccggatggcggccagggtgggacgcagtcccaccatacccaccacggcggtgacgaccgtatccgcctccgggcagacagcggcctccagcagggcctccgggcctcccaaaaccttggtgtccatgtcggccaggcgtaccgccaggtcacgggccgccgcctcatcggtgaggaccgccagccggggccggaattttcggacctgcgcctccagccgctccacatccatgtgggcggtaagggcggccacacgcagtcccagctgctccgccacgtccaatgtctggcggccgatagaaccggtggcacctaaaattgaaatcgtcttgctcatagcattatcctattctaaacagctgaaaacaatcctaaatcttcccaaatcacccgttcagagcagctgtaaggccagccacacgaagggcgccacgaaggtaacagagtcaaaccggtccaggatgccgccatggcccggcagcaggttgccataatccttgacgccgaactcccgcttgatgacggagaaactcaggtcgccgatctggctgatggtgctgccgataatacccagtgcaaagactgccccccaggagatctgcggaccagctgccatctcgattggcggataaacagtcagggtgtgtgccatgctgtccgcgactagcttaaaaaccgtcatgccgatgacaccacccagcagaccgcctatggctccttccacagtctttttggggctgaccttgggggccagcttgtgcttgccgcacagcattccggcaaagagcgcgaaggtgtcgctgccaaaggagatggccaagggcagaaacacctgcagcatcccgatggcgggcatcatccgaagccgcagcagacaggagaacatcaaggggaacgccagcccggcgaagatagcgcaggtgacagcggcaaaggggatgccctgctcctcgtcataccggtggatagccagggcaaagatcgcaaagatgaacaccgcgcccaacagggcggcgaagggcagcaccggcagggcagtcagctccgtgttctcaatggacatttccccgtacacgcacaccggcaccgccgccgcggcgatcactgtcaggggggtcaggggcttgcccctctctcccgccgccgcgcgcatcagctcccaggcgccgatggcgcacatggccgccagcaatagcatggtggcccaggacggggcccagcccaggatcagtatcaggagcggcaggcccactacggccaccatcacacgcttgaacataggatcagcccttttctcaatttctgtaaaggtttatttctttacgccgccgaaccggcggtctctctgttggtaggctgcaatggcccggtctagctccgcttcgtcgaagtccggccacagggtatccgtgtaatagaactccgaataggcgcactgccacagcaggaagttgctcaaccgctgctctccgctgggccggatgataagctccgggtccgggattcccgcagagtccagatagctggagaacagggcatcatccaactcctccggccgcctctttccggcggcgcagtcggtggcaaaacgccgggctgctcgcagaatctcgtctcgcccgccgtaattcaggcacacattggcctggaaatcgtccttggacaggtgctccgtgatctcgtccgtctcccgggccagggcccgcagatccggggcgataggggtcatgtccccgaagaagtggagccggatgtggtccttctccatggtgtccactgcctccagcagataccgcttcagcagggccatgatggcagagacctccacctctgaccgcttccagttttccgtggaaaaggcgtacaccgtcaggtactttacgccgatgttcttgcagtaggtagcgatgcggcggaacgtctccgctcctgccttgtggccagcggtgcggggcaggccccgcttcgtggcccagcggccgttgccgtccatgatgatcgcaatgtggcggggcgggaccaagggctggtccaccgcaccgttgatactctctggcatgataaattctctcatttcaaaatggattgttggggggatctgtcccattggacgggaaatgcagccatgatgatggctggcccattctctcccccattgtcgtcatcgcaaagtccgctaaacgcagtttccgcctgcggcaaaactgcgcccctcctctccccactgtgcaaaatacagcggagccggtgtgagacggtgcctgtgtatttacgggagaccgatgaaaatcgggggtgcaaaaccgcatttgaccagctgctctttccgcccgttccgctttacccgcaagcggtacgccgcgtctgtaaggcggcagaaccgccaaaaactgcgcagctgctgcgcactggccgagcgttgtggcaagaaacacaggtatttactggatagccagaaccgcacaccgggatgattaatatcttggtacagccgccaagcgggaaagcatcactgccacgcagagggcgctgacagcccagcagaggccgaaaaggcctatattcacagagttggaaatggaggcaatacccagagagagccccagccagttggcaaacagactgcgaatcaagaagaaaaatcccagcagcatggcaaccacgtgcccggcaaacagcccccggagatccttccgatgccgcagactccgccagcccaggaaaaactctatcgcgctgaccgcgatcacacctccgatgaacaggggaatcacttctgcttcaaacgacatttgtacctcctcctttttgtatcgggagaaatgtgtcggctgcttagttccccttttcccaccagcggtcgaacttccaaggaaagtggaagccgcaggcgcggcagtattgggtctcctccatggaaaaccagggcaggatgaagcgcccacagttgggacagcggagatggcgcagttcaatccccctaaaggcgattgccgcagcaactcccatggccaggaataccaaccccagtccgccccggatcccgcccgccagacacaaaagcaaaaccgctgcaaacagtgttcccctggctgccgaataccatttctgttccagtttcatagtcccctctccttcagtcaataacccccagattccacttccgcagctgccggtccaacagcagtgaacagaggaggacgccaatacgacgaccaccccgatgagatctgcaccatccgccacaggacggcagtcggggaatcgcagaaagccatggtgtgcccaaaggccagcccaaatcggcgcttgcactgatacaccggcgcctgtcagcgcggagagccgctgcaccggaacggttctgaagcgttttttctcttttaccggccccccgtggaagcggctccggcgggagcagaatccccccggccgccgggcggcggccccgagtgaccgcaggtcacctcacagaccctgaaagggtgacagcaccttacaaaatgtgcaatgcccccggcgggcagccgtgctcccgccggaggccccggcggcttttacaccgccatcagttccttttcctttttggccagcagcgcatccagctccttgcagctgtcgtccgtcagcttctggagatccttctccgcctgcttcagatcgtcctccgtgatctcggaggctttctccttcttcttgaacgcctccatggcgtcccggcggatgttgcggatggccaccttgccgttctccgcgtacttgtgaatctgcttcaccagttccttgcggcgctcctccgtcagctgggggaagctcagccggatgctggcgccgtcgttctgggggttgatacccagatcggagttctggatggccttttcaatgctcttcaccgccgtcttgtcccagggggaaatcagcagtgtccgggcgtcgggggaagagatggccgcaatctgctggatgggggtggggctgccgtagtagtccaccatgatccggtccagcacggaggcattggcccggcccgcccgcacggaggcaaagtccgcggccacggagtcgatgctcttcttcatcttgccctcataaatcttgtaatcttccttcagcataaataggtccttcctttcacagttgagtgtatggggaggcgctgtcgcgcatgcgtgctctcattccttgacgatggtgcccacgttctcaccgcacagggcccggatgatgttccgcgggtccttcagggcaaacagcagcaccggaatgtggttgtccatggacagggacgtggcggtggagtccatcaccgccaggtgctgggccagcacatcgtcataagtgatgacgtcgtacttcaccgcagtggggtcctttaccgggtcggccgtgtagacgccgtccacgttcttggccagcaaaatcacgtcggcgtcgatctccgccgcccgcagcaccgccgcagtgtccgtggagaagtagggattgccggtgcctgcgccgaagatcaccacccggcccttctccaggtgccgaatggcccgggaacggatgtagggctccgccacagcccgcatctcaatggcggtctgcacccggacgggaatccccttctgctcacacacgtccgccacagccaggcagttcatcaccgtggccagcattcccatgtggtcggcccgggtgcgctccatggcgccgccgctgtttttcgcaccgcgccagaagttgccgccgcccaccaccagacctacctggacgcccatgtccagacactccttgatgacatcgcagacctgaccaatcacctcaaaatccaggccggtatgcttgtcaccggccagggcctcgccgctgatcttcagcaggacccgtttatacacaggcttcgccatgatgaaaacctccgtctgttctgctcacaaaatatcattgatattttagcgtatttttccgcttttgcatagggggtagacaaagtttttccaaaaaagcaggtcctgcggacaggaagaagagaggaccgtggtcctctctttccgcattatcccccgcaggtctggaccagcaggcggatcaggtcctctttccccattcccttctccgcggaaaaggggagcagaatatccgcctccgtcagctccagcgtctcccggaccagttgaagggccggctccacctggctctttttcagcttatccagcttgttggccaccacgatctccggacagcccgtctggcggaaccagtcgtgcatcacaagatcgttggccgtgggcttgtggcggatgtccacgatcagcacgccggtggtgatccggtccgcctcctcctggaagtagctctccatcagcttcgcccaccgctccttctccgcctgggagaccctggcatagccgtaccccggcagatccaccagataggcccggcggtcaatgaggaagtagttcacctgagtggtcttgccgggggaggcgcccacataggcaaggttcttccgtcccaccagccggttgatgacagaactctttcccacattggaccggcctgcaaatgcgaactggggcagaccgtcccgaatgaaatcctcccgccgtccggcagagcggacaaactccgccttggcaaaattcaaagccatacaaacactcctttactgccgcacggcggcgtcacggccgctctcacgccccgccggggcaaaggccgccacatggtccgccacctcttcccggatgggatcccgctctgggcacagagcggcggcgaacacctggtccaccgtttccaccggcacgaaccgcagggcagcccggacggtctggtcgatctcctccagatcccggacgttgtccttgggaatcagcaccgtggtgatgccgctgcggagggcggccatggtcttctccttcaatccgccgatgggcagcacccggccccgcagcgtgacttcgccggtcatggcaatgcccgccttgatcttccggtccgtcagggccgagagcatggcagtggtgacggcgatgccggcggaggggccgtccttgggcactgcgccctctgggaagtggacgtggatgtccttcgtcttgtaaaagtccgctggaatccccagcaccgccgcccggctccgcaggcagctgagagccgcttgagcagactccttcatcacgtctcccaggttgccggtgagctccagcttgccggagccgtccatgacgttgacctccacctccaggatctcgccgcccgcctcagtccaggccaggccgttcaccacgccgatctcctcccggtccgtgtggagatcagggggatagggctggcagtccaggaacttggggagctcctcctctgtcacggtaatccgcttgacagtgccctccagcaggcgcatatccgccttccggcagatggcagccagccgccgctccagcaggcgcacaccggattcccgggtgtagtcccggatgacggcccggtacacgtcgtcgctgatgcggacagcgctcttcttcagtccgtgctctgccagctgcttggggaacaagtggcgcttggcgatctgcagcttctcctcatccgtgtagctggagagctggatcacctccatccggtccagcaggggccggggaatggtgtctgtggtgttggcggtggtgatgaacatgatcttggacaggtccaccgggatctccaggaaatggtcccggaaggtgctgttctgctcgctgtccaacacctccaacagtgcggaggccgggtcgccccggtagtcgttgcccaacttgtcgatctcgtccagcagcagaaggggattcatagacccgctgcggctgatggcctcgatgatccggccgggcatggagcctatgtaggtcttccgatgtccccggatgtccgcctcgtcccgaacgccgcccaggctcaggcgggccagcttccggttcagcgccttggccacgctgatggcaatggaggtcttgcccacgccgggcgggcccaccaggcagaggatctgccccttgacgtccggattcatctgccggacggcgatggtctccagaatccgctccttcaccttttccaggccgaagtggtccttttccagcaccctgcgggcggcgtccacactgacccgctcctttgtggtggtgttccacggcatctccagacacacgtccagatagttgcggatcaccgcaccctcggcggagccgaagggctgcttggccagcttgttcacttccttcagcaggtgctgctccgtctcctccggcagctccagggccaggatctcctggcggtaggattcaatctcgtcctcgtcgccgtcatcggtctcccccagctcgttctggaggacccggatctgggtgcggaggatctggtcccgctgggtgcggaccagctggtcccggaccttgctctccatttcgtgctcaaagcccagcacgttgttctcccgcaccaggaaaccgttgagcttccgcagccgggcgaagggggagaattcctccaggatctcctgcttgtcggtgtagcgcagggcgatgttctgggcaatatagtccgccaggaagccggggtcccggctgtccatcaccgtggccaccacctcctccggcacaccgctggcctgctcggcatactcgccgaacagggcgtaggtctggcggagcagggcctccgtccgggggctcttccgcatggcctcagaggacggctcctccgggatggcctccacattggcctggaggaagggctccgtctgccacaggcggcgcaggtgggcccgctgccgcccctccaccatcactcggacagaggactggcccagccgcaggatctgcgtgatgtgggagaccgtgccaatggtgtacaggtccttttcctccggcgcgttcaccccgatctcccgctgggtcaccaggaagatgtcctgatcggcctccatggcccgctccagggccgcgatggagatcggccgctccacgtcaaaggtcagtgtcatgtgtggaaacaccgtcaggccccggagggccagaacgggcagattccaagtggtcagttccatgtgcttgttcctttctgaggggatggtaaaacaggagagaggggcgcggcagcgtccctccctctcttcattaagacgccgacgcgggggtcgaggagccggaagccggcctgccctctcccttgccggtgttcaatttcacagaatagttgatcttcttggggtcgtgggtcagctcgggaccgctcctgccctccacacagtcctttgtgatgactgctttcaccacagcggggtcggaagggatgtcgtacatcatgggagtcaggataccctccatgacggcccgcaggccccgggcgccgatgttccgctcgatggccttgtcggcgatggcctccagggcctccggctggaactccagctccacctcgtcgtactccatcagcttcttgtactgcttcaccagggcgttcttgggctccgtcaggatgcggaccagatcctcccgcttcaacgcattcaaagacgcgatcaccggcaggcggcccaccaactccgggatgatgccgaatttcagcaggtcgtggggctggacctcgtgcaggatcttgctgatgtccttgtccttctttccctggacgttggcgccgaagccgatggacttctggtccagccgccgctcgataatcttctccagcccgtcgaaggcaccgccgcagatgaagagaatattcttcgtgttcacctggatgaactcctggtggggatgcttccggcctccctggggcggcacgttggcaacggtcccctccacgatcttcagcagagcctgttggacaccctcgccggatacgtcccgggtgatggaggtgttctcgctcttccgggcgatcttgtcgatctcatccacatagatgatgccgtgctccgcccgctccacgtcgaagtccgcggcctggagcagccgcagcaggatattctccacatcgtcgcccacatagccggcctccgtcaaggtggtggcgtccgcaatggcgaagggcaccttcagaatccgggccagcgtctgggcgaacagcgtcttgccggaaccggtgggccccagcagcaggatgttgctcttctgcagctccacatcctcgtccccgccgaagtagatccgtttgtagtggttgtacaccgccacggacagggccaccttggcctcgtcctggccgatgacgtactggtccagcacgtccttgatctcgcggggcgtgggcagctgatcaggcaggtcctccagcgcgctggaagaggtgtcctcaaacccatcgttcaaaatgctcatgcacagctggacgcactcatcacagatgcgcacaccgggtccctggatcatccggtggacctggctctcatgcttgccgcagaaggagcaccgcaggcccttcttgctctcgtcactcatggtattacctcagttttggaatttggtgcttatttcttgctggtgatgatcttgtcgatgaggccgaagtccaaagcctcctgggctgtcatccagtggtcccgctccgaggccgccttgatctcccctgccgtcttgccggtgttgttcgccaggatctcattcaagttcttcttgatccgcaggaagtgctccacgtcgatctccatgtctgtcaccttgcccttggtaccggcggagggctgatggatcatgatctccgcgttgggcagagcaatgcgcttgcccttggcgccggaggacagcagaaacgcgcccatgctggcggccatgccgatgcagatggtggatacgtcgcacttcacgtactgcatggtgtcgtagatggccatgccgtcagtgacggagccgccggggctgttgatatacagctggatgtccttgtcggggtcttgggcctccagatacagcagctgggcaaccacaaggctggcggtggtggcgttgacctcttcccccagaaagacgatccggtcgttcagcagacgggagaagatatcataggaccgttcgccgcgattggtctgctcgactacataagggactaagctcattggtaaaacctccttgatttccgcaccggggaccggcacagatgacagatctgttcctcccaaacccgatgcgtcttccccgccccggtggggcaggtaaggcaaaagcgcccggcccgcctgcgggccgccgcgcctctgccaacgcacacgcctatcttaatatagacgccatgcgggaatctgtcaaatcgatgtagagcgccttccgccggcggaaaaacacaccgctccgccggggccgtcaattcctagtatacccggaattatttggattcagcaggcgtctcctcttctttttttgccgcagccttcttggtggccttcttggcaggcttcttctcctcgccgtcctcgtccgccttcttgcgggtggtcttcttggcaggcttttcctcagcggcctcctcaccctcggcgtcctctgccttcttggcagtcttcttggcgggcttcttctccgccttcacggcggtggcgctgtccaccaccacggcgatggccttctggctcttcagctggtcctttacctgctcagcctggagatacttcttcacggtctccagatccatgccgtactggtcggccatccgctggaactcggcctccacctcttcatcggtggcgtcgatgttctcctccttgatgatggcggccatggccagatccatgcggacctgcttgagagcgggctccttggcgtcggccagcagctgggcctcatccatgccggtggccttcatgtactggtcgtactggagaccctgctgggccagctgcatcttgaagttgtccaggaactggcgggactgggcctccaccatggcgtcgggcacatcggcggtgatgttctcagccacctgctccatcagggcgtcctcgaaggcgcgcttcacggtctcctcccgctcggcggtgatcttcttcttcagatcagccttcaggtccttcagagtgtcgaactcgctgacgtccttggcgaactcatcgtccagggcggggatctccttctccttcacctcatggaccttcaccttgaacaccactgccttgccggccaggtccttgtgatagtcctccgggaatgtgatgtccaggtccttctcatcgccggccttcacgccgacaagctgctcctcaaagccgggcacaaaggtgtgggaacccagctccaggctgaaattctcgcccttgccgccctcaaaaggcttgccctccaggaagccctcgaagtcgatgacgaccgtgtcgccctccttggcctcccggtccacgctcaccagacgggtgttgcggtcggtcagagccttcaggcgctcgtccacatccgcaacggagaccttgacctcctccttgggggcggacagtcccttgtactggcccagggtcacttcgggatacacaggggcggtggccttgaaggtgaagccgtcgcgggtcacctggccctcgatctccacagagggatagcccaccacctggagctcctgctccttcacggcagcctcataggcctcggggaacgcgatattgattgcctcttcgaaaaacacctctgcgccgtacatcccctcgatgatcttccggggggccttgccagggcggaagcccggcacgttgatcttcttgcgcatcttctgatatgccttttcgatggcagcttcaaactccggtgcaccgacctcgatggtcagaacgacctggctcttttcgatcttttcgcagcttttcacactcatcttgtttattcctccgttcatcgccggtcataagccggtgcgaaatggtattttaccatacaaaacctgaaaatgctatacttttttccgttattcacaaattttttttggaacaaatcccagatagtcggcggagatcagggagaagtccgtcccattccacccgccctccagccgccgtttgatggcgtagccgtggaggtggccgtagcagcaccgctccacggggtaggccgagagcagccgcaggatctccgggcactcgtagccctgatacagcggcggatagtgaaggaagcagaagatggaccgtccctccgccgccttcagggaagtctccagtcttcccacctcccggttgaggaccttggcgttgtggggcttctggtcctcctcaaagaaccatccccgggtcccgcacagggcgtagtctccatacagggcgcagttgttatggagaaagtccagggtggtaaggcccttctccgtgaagaagttcttcattttggacaccgtggaccaccagtagtcgtggttccccttcaccagatactttttgcaggggaactggtccagaaagcggaagtccgcctccgcctcattcaggtcgatgccccaggaggtgtcccccgccaggaccagcacatcgccggcggtcagccggctcaaagcatcgccgatgcgctccgtgtaattctcccaggcggggccgaacacctccataggcttgtccgctgtcagggagaggtgcaggtccccgatggcgtagagggccatgcggcacccctcctttctctgtgtcccgtgaggcggagtcagccgtcctcttcggcggctccaactccccggaactctgttgatctatcttgatctgtgtccatctcgattttcacgctgctgacctttccccaaacgcgtccgcccaccttccggacgcctgtcttggtcagcagaatgccgggcagcttgctgccctccgggagccagagggaccctttgtagccttcgccccggatccgcccggcgccaattcgccgccgcaatagggacagcgccgctcctgtgctatggtgctctactcccctttgcgtttttcggttgggtcctccgggtcatcaaagacaatttccctgccgcacctgtcacagaagtgcttttcccccttccgccaccatggcatggcatacccacggccgcagtatgggcagcggaggtttcggacccactggatgcctccgttgaccagcagcacgattcctgtgatccgcagggtgtttttgatccaataggccgtgtccatcacccggtaccggtctcccagggtccggtagggaatcagctcgttgacagccaggaagaaaattcccaaagcaaagaacagcagcaccaatcgggcaaatgcccggctcaaaggcttcacgcaatagcctccctgccctctttcgggtttccaaaatccaaaggcaacagatttacagtctgccgcattaagccgtttcccgcgttgctttgttgcagcgcgatttacttcaaaaactccagcaccacgctgtccataccgggcttctcacaggtgaggtcgaaccgccgggccttgcccttcagggccgccaggcgccggggaatcgccgtgccggtggtttcatgcagctggtccagcagctccacgccgtcgcccgccggggtctccccgatggcccgcagcacgtggtcgcagaacttgtagggggaggcggtggagacgaacaccgtcaccgtcttgtcgccggtggccttgcggtactgttccatgacgctggcggccacggcggtgtgggtatcgatcagatacccgttctccttgtaatacttggcgatggcagcggaggtgcccgcctcgccgcagaagccgccccagaactggtccgccagagccgccttgatggcgtcggacacttcgtacttgccggtcttggcgagggcatccatgtagcccttcacctccgcatcgttttcgccggagaggtcgaacagcagccgctccaggttgctggacaccagaatgtccatagagggactcatggtggtatggaacggacggttcttgtcgtacacgccggtgcggaggaagtccgtcagcacatcgttgcagttggaggcgcagatcagcttcccaaccggcagtcccatgcgctttgcgtagtaggccgccaggatgtcgccgaagttgccggtgggcacacagaagttcaccttgtcgcccatgctgagcttcccgtcccggaccaggtcgcagtaggcggagatatagtagaccacctggggcaggatgcggccccagttgatggagttggcggaggacaggaagtaaccccggtccgccagggtggcccggatggcctcatcggagaaaatgcgctttacaccggcctgggcgtcgtcgaagttgccctccacggcgcagacgcccacattggcgccgtcctgagtgaccatctgggtctcctggaccttggacacgccgtccttggggtagaataccaggatcttcgtctgcggcacgtcggcaaagccctccatcgcagccttgccggtgtcgccggaagtagccaccaggatgcataccgtcttggactctccggtcttgcggagggcggcggagagcagctggggcagcatctgcagggccatgtccttgaaggcgctggtggggccgtgccacagctccaggcagtgggtggtctcgtccaccgtgcggacaggggccacggcgtcgcagtcgaacttctcagggccgtaggcgttctccgcaaatccggacagctcctcataggtgtagtcggtcaggtacaggcccatgaccttggcagcccgctcctggtaccggacattcaccaggctctccaaaaaagcccggtcgatctgcgggatcccgcagggggtcagcaggccgccgtcccggctcaggcccatcttgatggcctccgctgcgtccatgcggacggcggcgtcccgtgtgctgtaatacttcatgtcgctctctccttctgactgtttttcaaaacgcattttccaaatattccagccggagggggcggtgaaccccatccgtataaacctccgccacatcgaaccgggcgggagcgtccaggtcgtgctgactgagatagcaggccgctgcggcccggagccgttcctgcttccgccggtccaccgcctcccgcggcaggcccgcgaagctgccgctgcgcagctttacttccacaaagcagatggtgccgtctctgtcccgggccaccagatccagctctccgtaccggcagcgccattggcttgccagcaactggcagcccctcttccgcaggtactgtgccgctgcggcctcgccccggtcccccagggccttggtggtattcatgtgcgccgggcctcccacttcttcagaaaagtccgccggtgggcagggcaggggccgtaccgatccagcatttcatagtggagcttcgtcccatagcccttgtgtttggcaaactggtactggggatactcccggtccagcacgccggtcacataccggtcccggctgaccttggccaggatggaggccgccgcaatggaggcactcttcccgtccccgcctaccaggcacatgtggggcgccgtgatggagacgctgctgccatggtcccggttgccgtcaatgaggcacaggtccggccgaatggataacccctcaatggcccggttcatagccagcatccgggcgttgaggatatccaaactgtcgatctcctccgccgtcacaaaggcgatgctgtacgcctctgccgtggcggtgatctggtcgaacaggacattccgcttcttcgccgtcagctttttggagtcgttgaggccaggaaaaccgatctcccggggcagaatgacggcagcggcgtacaccggccccgccaggggcccggctcctgcctcgtccactccgcagagggccgtgagaccactattccattgttcacgctcataggtccagaggtccatttccatcctaccaatactccatgacgatcttcttacagccacggcagacccaggcgggaagccatgtccggttgtagcggaacgtcatcggtccgtccagcacaatgccgccatctgcctcgatgttccgcctcgtataaaacgtgcggaggtctttctctcccggcatgaaaaaaagaccgatgctgttcttggtgatgacatggcccttttccatctcttttccgcagacagggcagttcatggatatgcccccctcctcgcagggcaggttccttcgctttccgcgattcccgccaagtgatgtcaatactccagaaggatctttttgcaggcgcggcagacatagccatgtacagttgcgcggtcgctcccccgtatatgatgcgggccatccaaaacaatcccgccgtgctgttccacactgcgcttcgtatcccagaatcccacttttccgccgggcggcaggaagaaaaggccccgccccagctccgtataaaggctcccccgctccatctcttttccgcaagacgggcaattcataggcgcgcttccctcattctgacgctgcaggctgttccgtctcctccggcatttccagtgtgaagcgtcccagcttgccagctctgtactcgtccaacaggattttggccatccgctccgtgtccacctcgccgccggagatcagaaagccccgctttttcccgacggcctccagcaggcggtagccccaggccacgtcctcctcgccgtcctgacgctccggcagggacgggagcttgtagccggtcctcagggcctccggatagttggtgcccaggtacgccatcaggtggcagcccagggtctccatgtccaggatctcgtccttcaccgcgccggtgtaggccaggttcagccccacgctctggtcctcaaacttgggccacagaatgccgggggtatccagcagttccagcccgcggtcgatgggcacccactgcttggcccgggtgacaccgggccggtcctcggttttggcagtcttgcggccggcgatcctgttgataaaggtggacttgcccacgttgggcacgcccaaaatcatcacccggaccacccggttctgccccttttccgcataggcgcgcagcttgtccgcaagaagcgtcttgacagcagcggcaaactgctttgtcccggcgccgctcttggcgtcagactccatcaccgcgtacccctttgcccggaaccaggccgcccaccgcttcgtggcgtccgggtccgcctggtccacccggttcagcaccaccagccggggcttccccgccgtcagttcgtccacatccgggttccggctggacacaggaatccgggcgtccacgatttcgcacactgcatccacatgtttgatctgctcggcgatcatccgccgggttttggtcatgtgaccgggataccattgaatattcatagtcctacctcacgccgccccggcgggcggcgcccaatcaattcttctcaggaagctgtccccgtggctcagtcgatccccgcaatggggccgatgcggccgaagtcccgctgcccggtggcctcgtccgcgccgggaaacagcaggaacaccgccttgccgatgacataccgggtgtccaccgtgccaaggtcgctgctgcggctgtcgctggagtggtttcggttgtcgcccatgacgaaaatggagccctccggcaccgttaggggaaattccgtcccctcctccacataggtgggctcgttgatatagtcctcctccagcagctccccgtccacatagacggcgccggagacaaagtcgatgtccaccgtctggccctccgtggcgatcacccgcttcacgatgggctcctccagaaaggtgtccttccgcagcaccacgatgtcgccgtactcatagtcgttgtccagcatggcgttcagcaccagcagccggtctccgtcctgcagggtgggcaccatagagtggccatccacgccgatgagccggatgacgaaggtaaacagcagcaccaccgccagcacggagcacaccagcgcctgggcccactcatacaggtcccggccctcctccttttccggagacacctcctgcgtctcctgcttcttctctttcttccacatgtctgcaaaacctccgcgggcgctttcgcccctgttgatggaaagccccccgccggaggtctccttgctcttatgtcagcgggccgatcctgccgaagtcccgcttgtcggtgtccgcagtcacgcctgggaacaacaggaacaccgcccggcccaaaatctgccgggtatccaccggccccagctccggatcccggctgtcatcgctgtcgttgcggttgtcgcccataacaaagacgcagccctccggcacggtgacagggaactccagcccctcctccagataggtgggctggcggatgtagtcctcctccagcagctgcccatccacatagacggcaccagcggtaaagtcgatgtccaccgtctggccctctgtggcgatcacccgcttcacgatgggctccccgtccttgaagctctccttccggatgatgacgatgtccccggcctcaaatccaccgcacaggtgggcgttcatcaccagcaggcagtcctgatgctggagcgtctcccgcatggaggggccggacaccagcaccacccgcgccgcaaaggtgaacagcagcaccgttgctgtcacggcgcacaccagcacctgcacccactcgtacagcccgcggagggaaagcgcgtccctgttgagccgttttcctccccgcacgtgaccgcctcctccagcaccgcagtttttcacaataacgtatgctagtatatcaaagaaccgtcaaaatcacaagatgccggggaaattttgtgtgacaagaaaaaagagaggctttcgcctctctttcgtcttggatcacagcttttccttgaccttggcgcccttgcccacgcggccgcgcagatagtacagcttggcacgccgcacagcaccgttgcggaccacctcgatcttgtcgatggagggagagtgcacggggaagaccttctccacaccgacaccgtaggagatgcggcgcacggtgatggtctcggtgatgccgccgtgcttcttggcgatgacggtgccctcgaagacctggatacgctcacgggagccttccttgaccttcacgtgcacccggaccgtgtcgcccaccttgacgggggtcacttccgcttccagacgctctttgttcagttccttaatcagatccatggatgttcctcctaaataataggtgttcatgccgcttctctcaaaggcacatcaacgcactccggcgtgtgcacggcagaggaccaccctttgtagccgtaataggataccacggccaggaggaaaatgcaagtattttttacaaaaaatccgcctttctgccgtgcagttcccgaagagccgccgccagcaggccgaatgcagccggcagcagccacaggctcccgccggtccgcccgatcagccacagtaccaggccgcccagggccagcgccgtcgtgccccccgcccagcaggcgatgcgctccgcggcggagggacccgccagccatgcggccgcgagatacagcgcccggccgccgtccaggggccgcaccggcagcaggttgaagaggcacagtgacagatgggctcccgccgccacccaggcgtgggcgccccccagaaccagcgcgcacagcagattcactgctggccccgccagcaccgccgcgatctcccccggataggacaggcgggcggcggaagtcatcagctccgccccaaagacgctgacccgcagctcccgcacccgggcccccagcagccgcagcaccagcaggtgtcccagctcgtggagcgccgcggcggagaggatcaccgccagcagctgccagccgttcaccagtgtgaaccaggccgccagcagccagaagccgccggaaatccgaatccggtcacgccagcgagacatagtagatgggatttaggtactggctgccctcatggagctcgaagtgcagatgaggcccggtggccacgccggtctcccccacctctgcgatcacgtccccctccttcacagaggcgcctgaggaggcgataatccggctgcaatgggcatacagggtggagtagcccccctcgtgggcaacggtgatgtacttgccgtagctgctgctctcccccacggcggtgacggtaccgtcggcaaagcagccgatctccgtcccagcggcggcgccgatgtcaataccatagtggaaccgctcctctccctccaccgggtgctcccggtagccgaaatcagaggtgagggtgcccatcaccggggtgcagtaatcaaagcccagcagggcctgttccaggcacacgttgtccggcaggttctggtcggagtagaggacgtaggccagggtagacgcctccgccgcgccctgggatgcggtttccgcagtctccgctgtctgatcggcctctgctgtctgcgcggtctctgccgtctgggatgctgctgcgggcagatccagccagccgtcgctgctgccggtcccggtccggaaggcccgcaggggcgcgatggccgcaggaagctggagagacaccgcctctccccctgccggggctgacacctccacggcggaatcctcctgagggtcgaacaccgcctgatacatatcctgaagggccacgtccacatccgcttcgccgctcacggcccgccccacagcggagaacacggcctgcacatcgatgttctgttccagcattccggtgagcttggcattcacctgggccatgcgtcccggcagcaggagcttcaccgccaccagcagcacaaagatgctgccgcaggccaccagctggatcagatgccgccgctctcccggagtcagagtttcccgttttccccgctggaccctgtgcggcgcagccggggtactccgccgccgcctttccgccgcccgatgctgggacgagacggtgccgatccgccgcccaacgtgccgtgccgccatgacgctccctcccctgtcggaatctattccaaactctatgcgccgaccgggcgggatatgcgtctttgggaatcgtctgcccccgccgaaaaagagaccgggaaggggctcccttcccagtctcttgcacttgcccgctttgcggggcgttatcccagcaggcccagcatcgccgcacacagggccgtcctgtcccggatggaggggatgcgcacccgctcttccgtggtgtggatctgttctgcgatggcggagagggcgtccaccgtggggacgccgtaagtggagagataggccccgtcggtggcggtggggtccgcgatctcctccggctcccaacccagcagctccgccgcctctgccgcccggagataggcgctgtgattggcggcgttccgctccatggcggggaacagcgtccggtaggtgacctgcacccggcagccctccaccgtcacctggtccgccatgctgtccagcctggcctggatcaccgggaagtccgcgttttccggaatcccggccacgcagaactccccccgggcctctccggccaccacgccgttgggccgtccgccggagatgggcgccacattgtagtagatgcccttctcatagtcgttgaagctgtatagccggatgatctggtgagccagctccagcacggcgctgcggccctccagatacgccttgcccgcatgggcctcccgccccgccacgtcgacggttcccagaatcaccccccggcgggatgtgacaaaccggggacgtccgtcccgctcccggccgccctcgaacaccagggccagagccgcgtcctgcgcctcccgggcgtagaccttgcggccggaccgggagccggtctcctcgtcacaggtgaaaaggtacgtcagctcccaggggggcagcaggcccgcctttttcaaaatcagcgccccgaacagggagataaggacgccgctcttgcagtccccggcccccaggccgtgggcccactccccttcaatatgaaaggggtgcttttccgcaaagccggggccgaacaccgtgtccaggtgggcggccagcagcacctttccccggggctgttccggccgcacccgggccaccagatgggtccccagaccaggctccgtcacccgctctgtccgggcccccagctcggagagcaccggctccagcagcccggtcacggcggcgttgcccgcctcattgccggtgccgctgtcgatggcgcagatctgttccagcagcgccagctggcggggcagcatctcctccgccccggcccggacgatccgggccagtgtctgtctcttggcatcctccatcggccgtgcctcactccgccagcaggtccaccatgacctccgccggatcgaaggcggcgtcgatcatgcccaccttctggagccagtcgatgttctcctgccacacggacacgtcctgggacaggaagggcgcgtcggccgtctccatgatgggcagcagcacatcaaagcttcgccgttccacggactccgtcaaggggaagttctcctcgtcctggttggccaacaggagccccaatgcctcctccgggtccgcctgcatatcggcaaagcccttctgacaggcccgcaggaaccgagtgtacttgtcccggttggcctccagctggtcctcgccggtcaccagcatcagcgcgtagtagttgggtacgccgtagtccatgacctccatgtagtccacggcgaagccctcctcctccagcgcaggaacctcgtggttgatgaagcagccgaaggtggcgtccacatttccggtggtcatggcgctcatcaggtcaaagcccacgtcgatcaactccacgtcatccagcgtggcgcccacagtctccaacatctggcccaccgccacctcgccgaagcgggtgccggagtagccgatggtcttgccgatcaggtcctccggggtcttgatgtttttctccgccagggcacagacgatgctgatgggctgctggaccacagctcccagcaccttcaccggcacgtcctcattggccttggcgatgatggtgtcctcctgatagtagaagccgatatccgcccggcccgccgccgtcatggtcaggggatcgctggcgttagaggggaacaggatattcacctgcaggccctcctccgcaaagtagcccttctcctccgcctcgtagaggaaagcatggacggcgttgggataccagtccagcaccacgtcgatggtctccagctctccatcgtcctgcccgtccgccgtgtccccgcttccgccggaggagcagccggtgagcagcagaagcgccgtcagcaacagcgcaagtttctgtttcatcatcaatcttcctttctttataaactggatccaggtgattcctgcggggcccgccccgcaggtttcaggactctcccctccagcggacgaaccgcttttccagcaggttcacaacggccaccgccaggatggccgccgcggacagcagcacaataggggcgaacaccccggcgccgtccaactgggtcatcatgcggcgggagaagtagcccaggccgctcttggcccccaaccactcgccgatggccgcgccgatgatgctcatgggcaccgccatcttgacggcggagaagaagtatggcagggcgcagggcaccttgatcttcaaaaagatgtccttcttcgtggcaccgtaagtctccagcagctccgccatctccgtcttggcggagcggagcccgtcgtacactgtgatggtgatggggaaaaaggtgatgagcactgtcaccagcaccttgctccagatgccgtagccgaaccacagcacaaagagcggtgcgatggcggtggtgggaatggtctgggacaccaccacgatgggatagatcatcttgcggaccaggtcgctctcgtccatcaccaccgccagggccaggcccagcaccagagagatccccaggccgatggccgtcaccagcatggtggcgggcagatgaacggtgaagaggacatcccgcagctcccacagcttcgccaggatctgggtgggagacggcaggatataggccgcgtctaatcccatggcccccgcctgccagagaatcaacagggcgaagagaaaaatcatggcaggtagatttgctttacaggcctttttcatggggtcacctgctttcgcagaaggtcgatgagatgctccttcagctccaccatctccggcagtttgaggcaggagcggtcccgcgggaaggacgcggggaccggaatctccgccagctcccggatgggggtgcgctccaccaccagcacgctggaggagaggaacagcgcctcctccacgtcgtgggtgatgaagaggatggtcctcttgtgccgctgccactggtccagcagccactcctgcatggagatccgggtgaggaagtccagggcggagaagggctcgtccagcagcagcaggtcgcagcccgtcagcatggtgcgggcaaaggccgcccgctgccgcatcccgccagagagctcgtctggcatcttgctgccgcagccggcaagtcccacgtcggccagcgccgcctccgcccggtcccggcgctccgcacgggtcagctccccctggatctccaagggcagcgccacattttctcccacggttcgccaggggaacagcaggtccttctggggcatatagccgcagtagtgcttgcgtcccacaatggacttcccctccaccagaatggtccccgccttgggctttagcagtccgttggtcatgcggaagatggtgctctttccgcagccgctgatgccgatgatgcagtggaaggagccgggttccacggcaaagctcaggtggtcgatgatatcgaagtcctcgctggggtactgataggagacgttctgaaattccagcatggtcatcgctccagcgtccaggccatctcccagaagcccagctcataccggctgcagttgatgaagatctcctccagccgctggtattccgcctccgtgcagctctccgccagggtgtccatcagctccaccagcgcgtcgttggttttctggtagtcctcccccgcgtagctgcggatccactcgccgtagaaggggtggtccgccgcgccggggatggccgccaagcgcgtgccgatctccgcatagctccaggagcaagagaggatggcggcgatgatctccgccggcccgcccgcggcggcacaggagagcatgtagtgggtataggacaaattggagagggccggctggacagaaaacacctgctcctccgtgatgcccaaccgggccatgtaggcccggtggaccttcatctccccgcccagaatcgcgtccacattggcggagaaggtccgcatcaggccggggtcccgggccttcactacaccgtaggcgaacacccgggcgtagtcgaacaggtacagatagtcctgcagcaggaaccaccggaacttctccaggtccaggctgccgtctccaatcccccggacaaagggatggtcatggcactgctcccagatgggatgggcggcctcgtacagccgctgtgtcgttctcattcgtattcctcctatccaatggccggtccgcccccatgcaaaaaggcggggtcccctttgggacaccccgccttcgctccaatcctatctcttccgtgcggaagagactccgcacgaatagcttgtgctgcgtccctacgttggcattacccacatcaggtcaggtcgagggaccggcccctcatctcagcctcctcgcggaagctcccttgcacgttttattataaaagcccgtcttctttttgtcaataaatttttcccggttttcggtaaaaatcccgcatttacaccagatgccgctcgatctcctgccgggtgggcagggaggggatcgcccctctgccctgaacacagagccatccgctgacgttgccgtactccagcgcctcctgcaccagcggctccgtcagctgctccgcctgggtgacaccccggaatcgcatctgagacagcattccgccccagaaggcgtctccggcgccggttgcatccgcgcagtgggcccgccgacccgggacagcgaggcgccgcccccggaaatatcctctggcaccctgaccgcccagggtcagcaccaccagcgtcaatccgtaccgctccataagggcgggcagctccgcctcgccccccagcatatcggcctcctcctctgagatcttcagcagatccacgtccggcaggatctcccgcacctttgcggcgcaggcctcctgactgccgttccacatcatgtcccggtaattcacatcaaagctcaccagcctgcccatctcccgacccaggtgcagggccttggctgtggcctctgccgctggggaggcggagagagaacacgacccggcgtggacgatcaccgtgtcccggatgtccgcctcccgtacgtcctcctcccgaaggaacatatccgctccaggcttgcggacaaaggtgaagctccgctccccttcctccgtcaaagagacaaacgccatggtggtgaccgcctcccggcagggctcccgccggatacagcgcaccctgttttcccggagggtgcccagcaggtaccgcccgaagtcgtcatcccccacagagcagcacatggccgcctccaacccgttccgggcggcggcgatggccacatttgcaggggcgcccccggcgtttcgaatatagcttccgggctcactgcccggcaaaaagtcaactagcatctcgccaacgctgtaaaggtccaccagtggtcctccttgtctgaggtggttttgcaatcattcgcatcgattattaaaccatttccagcgttcaatgtcaatcgtttagctgatgtttttataggagaaaaatgtactttttgtgggatttccgatattgcggcaagccgccccgggaaatcacccgttttgaagaggtagctcccccgagaagatccgggcgatcccgccgcaggccgcccccagaagcgctccctcccccaggaagcgcggctttctcaccaggactctgccgcccccatccgctgggcgcaggcgggcaatggcggattccagatccgccacgtgccggtcggtccagcagagtccgtcgccgcccagcaacaccagttcgctgttcagcagattcagggcgctggcgatccctgcagccagaaagtccacggtctcccggaacacccggtctacttccccgctgccggttatccggcagaaatcggcgtaggaagcctccagtcccgttcgatgatacagttttttcagcacctccggcgaacgaacgtacagctccaggcagccacggccgccgcaccggcagggacggccaccggcgcagatggtgacatggcccagccccaggggccgtcctccccggcccctgcacagttgcccgccgctgaggaccgcgctgcccacccggtcccccaggctgacaaacagcacgtcccggcagttccgggccctgccgaacaggctctccaccagcagagcgctctggcaggtgtcctccaggaataccgggaggccgtaccgctcccggactgccggacgcacggattccgagggacacatctgctccccgccgggccgccagggcaggtccgccgccaagccgatggcccgtacaccagccgtcccggacagcatcttgtccaacagcctgagagcggtctcccgccgcaccgcctccggagcgtccttcggcaggtccgtgccagcccgccggaatacccggaggtccagcccgcacagaacactctcacaacggcccgggaggaacgccacgcccgctgccttcggcgcttcgggtgagagccggaggcgcacggggttccgccccggctcctcgctgcacaccacctcgctctctcacaggacatccccgtcgatcatctcacccacgatattggagatggtcattttgctcaagcccgttctcaccaccagatcccgccgggtccggcatgcgccggtggcaaccatgcgcaggaccaatccgcggttgtcccgcctgttgtctccgctgttttttcccgctttctccagcatgacctgtcctttcccgcgatgcctgtcaaacctcccgtgccggagttcgcctccggcattcttcatttgtttactatatgacgctcccagaggcccgtcaagaaaaaccgctcccccacccggaggagcggtataggacatcatctaaattctgtcccatatcaccgtcccagcagggcagccccgcccagcagcaccccatagactatcggctggtggagcatatataccggcagggactgcctgcccaaggcacacaggggcggacaccggagcgcgtccggatccagccgctccatcggcccggccagcaggcggcggagaaaatgccccgccaggaacaggaacagccagggcagcagggagaaataatccgtggagaaaaagtccggcggcggaaatcctatgtacgccgtcagcagattacggtaaagtccctccggtaccgttcccagcgtccagtcctcaaatcccagcgtcccctggttcacgttccgcagcagggtgaacaaggccgcgctggcggcgaggcccacccccacaggtacgtgccgcagcagtttttccagtgggaccatcagcaacatgcaggagccgatcagcgtcagcacgccgaaccagatctgctcctccggcatgaagagcaccgtcaccagcgtcaccacccagccgcagccgaacaccgtcagtcccctccggaggggccgccgccccaggctgaagcaaaatccggagaggaggataaaggtccagcagatgctctgctgccagatgtacgcgccggtgccccggtaccaatcccagtccgcgtggaacagatacaccaagtcccagcaggcgtgataggcgatcatgctcaccagcgtcaggccccgcagggcatccagggaggcgatccgccttctgggccggaccagtgtccgagtcccgctgtctgctgccatcttccgctcctcctctccggcgaccggcggaaccggtcgtctatctcactccggggtcagccccggtgctcccgccggtactccgtggggagctgtcccgtcacatccttgaatgcccgggtgaatttcccctggctctcgtagcccacggcggccgcgatggcggcgatgctcccgccgctctcccgcagcagctccatggccctgcgcacccggtactctttcatataggtggcgatgggcaggccgtacaccgccttgaacacctccttcaaggtggaggtgttcagcagatacctgtgggagagctcctcaatggtgtaccgccggtccaggtgctcggtcagcaatgcgtggatctcctggatacgcgccgtctgctgggagccgtaccgggtcagctcccgcccgccggactccagcccctccaaatacagcagcagctcctggagcttcagccggagatagggcagccgccgcatctccggctgccggtacaggggccggaagatctcctccagctccggtcccgccggaagggcgaaggtcccgcctccgcagaatttttccgccagcctctcggcctggaagtccgcctccgccaagatggggggcggcgactccgccagatgggtcaaatccacgcagatcatcagccccgcgtacatctccgccgggaagtgcatcacagaatccgcgcagcagtccgcactgtggagggacagatcgccctcccccagatagaccgacatgccgtcccgcaggtcccagcccacccggcccaggcggcagtggttgatctccagcgtggaccgggccgcctcgtgccggaaggcggcataggtgcccaggaccgtgttgaaggacgcctccacccccggaaagaccgggtagacctccatccgtccccgtccatccgtctctccctgaaatgtcccggtgaacaaaaccccaggttcggccgcagggcgccccacgatctccatagtcccctgcggcagctccgccagagccatccgcaggcaatccgcttgcttcattccgccgctccttcccacctcacgccgaggggcaggcaatctccaccatcgcctcaatcatgtggtgcagcagctgggcccgctccgtctcggcagccttatagtagacctctttcccgtcccgccggctgacgatcaggccgccggccttcagctgcttcaggtggtgggacaccgccggggagctcatctccaccatggaggagaggttgatgacgcactcttcacagtggcacagcagccaaaaaatccggatgcggctgccgtcccccagctgtttgaagatgtcagccactgtctggaaatcgtccacgctgggcatctgttccagctcccgctccatggactgtccatggtcgtggggcagcttcttttcttccatcggtcgtccctccttctggttttgtattctaccacaccccgcgccattctggaagagcgaaaatatgccgccccgcattggcccaatcggaaggagtttttgcccaatcggaagattctctccctcccccgttgacttggggggccgccccgtgtatgataagagcatagattaaataattgcttaatcgttttgctcaattgctgaagggagacttttatatgaaaaaaacctataagatcgatgtggactgcgccaattgcgccaacaagatggaggaggccgcccggaagaccgaaggcgtccagagcgccaccgtgaacttcatggcgctgaagatgatcgtggaattcgcggaggggcaggaccccaaggccgtgatggagcaggtccgcagaaattgcaaaaaggtggaggacgactgcgaaatctacctgtaagcgcgtttttcaggaaagcaccccctccggaggcggggtgttttctttcccaaaacaattaaacgtttattgaattatcagccgcacggagcggctcagatcggaagtgaacctcatgaataaaaagcagaaaatcatgctgatccgcattctgacagcggcggccctgctggctgtcctgcatgttctccccgtcacaggctggatgcggtttgggctgtacctgatcccctatctgatcgcaggttacgacatcctgcgaaaggccctgaagggcatccaaaaccgccaggtgttcgacgagaacttcctgatggccgtggccactgtgggcgccattgccctggccctgtacgagcggagcggggattacaccgaggccatcgccgtcatgctgttctatcagatcggcgagtggttccagagctatgcagtaggccggagccgccggaacatcagtgagctgatggacatccgcccggactacgccaacgtggagcaggacgggaagctggagcaggtagactcggacgaggtgtccatcggcaccgttattgtggtccagcccggcgagaaggttcctatcgacggcactgtggtggagggcgcctccaccctgaataccgccgccctcaccggcgagtccctgccccgggaggtccgggagggggacgagatcatcagcggctgcgtcaacatgaccgggctgctgaaaatccgtaccacccgggaattcggcgagtccacggtgtccaagatcctggacctggtggagaacgcctcctcccgcaagtctcggtcggaggacttcatctcccggttcgcccgggtgtatacccccgccgtgtgtttcgccgccctggccctggccatcctggtccctctggcccggacgctccttctgggcctgcccgccggctggagcgtctgggtctaccgggccctcaccttcctggtggccagctgtccctgcgctctggtcatcagcatccctctcagcttctttgccggcatcggcggggccagcaacgccggcgtactggtaaagggctctaactatctggagactctgtcccaaaccaaaacggtggtctttgacaagaccggcaccctgacccagggcgtgtttgaggtcaacggcatccaccatcatgagatggagaacgagaagctggtggagtacgccgctctggcggagagcgcttccagccaccccatcagcaaaagcctgcagcgggcctatggccgggagatcgaccgcagccgggtgacggatgttcaggagatcagcggcagcggcgtcatcgccaaagtggacggcgtggaggtagccgccggcaacgacaagctgatggaccggctgggcgtgccgtacatcccctgtcacagcgtaggcaccatcatccacatggccgtcggcgggaagtatgccggacatatcgtcatctccgacgtggtgaagccccacgcccgggaggctgtccaggcgctgcggtccgccggtgttcataggaccgtcatgctcaccggcgacgccaagccggtggcagaccaggtggcccagtccctgggcatcgatcaggtttacgccgagttgctccccgccggaaaggtggaaaaggtggaagaactgctgctggacaactctgagcggggaaagctggccttcgtgggggacggcatcaacgacgccccggtcctcagccgggcggatatcggtattgccatgggcgccatgggctccgatgccgccatcgaggccgccgacgtggtcctgatggatgacgatcccgccaaaatcgcaaaggccatccggatctcccgcaagtgcctgcggatcgtctatgaaaacatcgtctttgccatcggcatcaagctggcgtgtctggtgcttgtggccctggggttcgccaatatgtggctggccatcttcgccgatgtgggtgtgatgatcctggcagtgctcaacgccatccgtgcgctgttcgtcaaaaagctgtgaacgcggaaagcgccccgtccaaggctgcacgggcatgtcccggagtccggcggcagagccccaggcaaaggcagccctccggtcaagcgtgaagggaccaaatccgcacaaaaacccggcgccgggaattcccggcgccgggttctgtatgtacagaccaggtcaaaatgcaaagagtaaatgtcatttcagtaaaattgaacacggccatgacgttccctgcttattggtgaatagcctggaattccgtagggaactgcagcttatgtgatcacaagattttcaaatcatgtgttcttttctttcctggtgttttcaaacacccagaatatagcgcccagaatcacaatcccaccaattatggagcttttgctcagggtctctcccaaaaaggcatagctgaacacggcagtgaacacaacaccggaatactgatagatgctgacctcagaggccggggcctgctgataagcgtatgtcaggaagaactgtccccctgccgcaaagacgccgatcagcaaaagcatcacgaatacctttggagacggaatcaccagattcggcagcatcatcagtcctgcgcagaccgtactcagtgcggaaaagtggaagataatcgcagatgggtgcgtgaaatttttacagtaggacaacatggtgtaagccatgccggataccaccgctgccagcaaagccgccagaagcgggaacgggttggagtcgaaggacggctgcatggcgatatatgcgcccacaagacacaggatcgttgaggcgatcttgacgggagtgatcttctccttcaggaaaataccggcgagcagtgtgacaaataccggagatgcccggttcagcatagctacatccgcttggcgggcgtgaccggccgcatagaagaagagcacgatccccagaaagccgaagaacgaccttccccaaagcgcccagccccctcgtttgatctcctgaaaaacctgcaggttttcccgtcggaccataacagctgcaataatcaggctgacaagattgcggaagaaggtctgctcaaatgtccccacctcttcagagctcaatttgacaaatacctgcatgatggaaaaggacagcgatgagaccagcatcaaatatatagctttggtttttttgtttttcgtaatcagtctctccttttatatggcaacatacagcgtggccgtctgcacgggaaatcagcgcagacgaccggaatacacttccggtcgtctgttccgatcccacccggggcctgcgcagcagaaatcaatagtcgccgttgtaactggttccgtggggcgttgtccagctataatctcccagcttttccgcctttgtctcctcgccgttggccacacgcagaagcagctcgtaaagctcgcggccgctttcttgcaggctcagttccccatacagcatgggagctgcggagtagtcgatcatgtcctccagcgccgtcgcagtctgggggttgcctgtgatcttgatggtcgtcatacatgcgttgccgatggggttgccccgcccagtggtgaagaggcagatatggcatccgctcatggccagcgtggtggacgcataggcatcattggcgccctgtgcctggttgatgccccaggctcccgcgccggggaccggatcaccgcagtccaggatccccaggatccggcgatgtccctgggttttgaagctgcccaggttcttctcggtcatagtggtcagtccgcccgccttattgccgggagtgggattgacctgggagaggcccttaccgcctctgcgggtgcagtcctcattgaagaaatctccgatatccatcaggcgcatgccgatctcataagaagccgctgtggtgggatagccgccgcggccacaaacctccaccgctcttccgccggcggacaggtgcatatcgattgcctcacccaccaccggattggcggacaggccgctggtccagtcagatccgccgttatagccgccgataatcagtccgctgagggggcagggttcgcgcttctgggcctctgcctgccgcttcagatcctccacagctgcaatcccgtcctggatggccttggtgacaccgccgtccgcctggatgctgatattcaccaccggccggccagtcttacggatctcctccgccacatcttcaggatctgtctgctggcaccccagggacagcagtaccacgccaaaagtgttcgggtgcgtgccggttgtgatgaatcctctgcgggtccgctcaaagcgatccggaaactcaccgcaagccgcatcgacaaacgtggcagggacattacaggcagcagagatccgctgcgccgcattgttggagcactgaaccagagagatcaccaccacctggttccggatcccaaaggaaccgtctgcccgcttatagcccatgatcgtctccggcaggcccaactcttcctttttgtatttatggtggatcgtgtaatccatggcatccggtgccatggagcgatagtaagcacgctgttcccggttgatttcctcaaagtcatcgtaaacattgtgctcatgtacccagtctccctttttgatgaactgggtggccacgccgatatgtacaccatacttgatgatctcggctcctttttcgatatcagtgcgggcgattttgtgcccctctttgatatattcgttggccgtgatctcctcaccagccactagtgtgcactcacccgcctggataggctctacggcaactgcgacgttgtcgctctcctcaatcagcatgctttttttgtaaattttcattcctgtttactcctccagtaatttaggattggtgttctcttaccgtaatactgcggcgatgcgatccatgatctcctcgatcagatttcggggtgcagccaggttcaatcgttcaaatccatttccctctgggccgaacatactgccttcgtccatcgccacatgggcctgatacagcatcttttggcgcagtttttcggcatccggctccagtctccggaagtcaatccattggagataggtcccctccagaggggagatcttgacgtctccattccaagtatcttccgcaaactcccgaacgaactggtcatttttctgaatataagccaggcatgaatccagccaggcttccccgtggtcccaggcagcctttgcagcaacgggggcaaaaaagttcggatgggcacgacaataccgtgcgaacatctggtcaaatcgtttccggcgttcctcattggggatcataatgcaggaaaaagaaagccccgccagattgaatgttttggatggagcatggcaaacggcacagttttccgcatagtcctggcccagcgaggcaaacacgatatgctggtggcccgggaagatcagatcgctgtggatctcatctgcgattacaaacacatgatgcctgcggcagatctcgcccactctgcggagctcctcctccgtataaacacggcccaccggattgtgcgggttgcttaaaacaaaggccctgcatctgggggatgccgctttcctctcaaaatctgcaaagtcgatctcatagcgcccatccctgagctgtaacggactgtttacaacaacccgtttctgctgctgtatcgaatcagcgaagggataatacaccggtctctggatcaggacctcatcgccttcctccgtctctgacagcagcaggagattgatggctgtcacgacaccgggggtaaaacggaaccagtccgccgccgcattccagccatttctccgttgctgccagcgcagataggacgcaataacctcatcagtgactttggtatatccatacatgccgttcttagctgcctcaatgatggcttcctgaacctccggaagcgtcttcagatccatatctgcaatccaggcgggcagaacgtcttgggttccaaaagtcttttccagttcagctggctcccacttaacctgcccccacggcaggcggctttcaaagtggtcaaagtcaaacgttttttccatccttacctctttctgatcctaaatcgggatttatcacaggccattaatctccctcacaaaatggcatttgacaaaatgatccttttcgatctcttccagctggggctcattttcaaaacattccggcttcgcatatacacatctgggggcgaagcggcaggactttgtcacgttgataggcgaagtgatctcacccttcaaaatgatctgattatccggcgcattgtacttgggcagcgggatcgcagaaatcaatgcctttgtatagggatgatattggtgggcaaagatctctgcggatccagccttctctaccatctgtcccagatacatcaccgtgatatcatcggagatatgcttgaccacggacaggttgtgggtgataaacagatatgtgagattccgctccttctggagctccatcatcaggttcagaatctgtgcctgaatggacacgtccaaagcagagaccggctcatcgcagaccaccagcttgggatccagaatcagcgcccgggcgatacctacccgctggcggcgtccaccatccagttcatgcggatacaggccataggttctctctgccagtcccaccacatccatgatctcacggacttttttctgctgctcctctttggaattgcagagcttatagatcttcaaaggctctgcgatgatatctccgatggacattctggggttcagagatgcgtagggatcctggaaaatgatctgcatatccttgcgaagctctttcagctgcgccttggtcacgtccgagatatcctttccctgaaagataatccggccgcctgttctctgatgcaggtgcaggatcacccggcccagtgtagactttccgcagccggattctcccacgatccccagcgtctgtccctcccgcagaccgaaggtgacgccatccactgcatggagtgtcccctttttggtggcaaaatactttgtcaggtcttctactcttaaaatctcagccatactcaaacctccgtgtcagaaaaacggttgcagcggaccatgtgagagtccgaaagcttcaccggcttgatttttccggtctggcaggcttctgtcgcatagggacatctggggtggaacttgcatccatccggaaggtttgcggggtccggtaccatgccctgaatcactttcagcgtagatgcgtcgttctcaatatccggcagagagtcaaacagaccgatggtatacggatgccgcttatctgtataaatttccttgagggttccggattccacgatctccccggcgtacaccaccgcgaccttgtcgcagatcttcgccacaacgcccagatcatgagtgatgaggatcagggaggtctgatactcctgcttcaattttttcatcagctccagcacctgcgcctggatcgtcacgtccaaggctgtggtaggctcgtccgcgatcagcagctctgggctgcaggccagggcgatagcgatcatcacccgctgcttcatgccgccggaaaactggtgggggtagtcgtcgcaacgggcgccggggatacccacctgctccagcatctccatagcacgcttccgggcctcggccttcgagatcttgttgtgcagcaggatcacttctgcaatctgatctcctacccgtgtcaccgggttcagggaagtcatgggatcctggaagatcatggagatctttccgccgcggatccggcgcatctgcttttctgagagtttcagcagatcctctccctcaaacaggatcgatccctttacgatctctcctggcggatccggcaccagccccatgattccaagggccgtggtggtctttccggcaccggtctcccccaccaggccgatactttcgcccctctccagagaaaaggtgatgtcattcaccgcctgcacagtttcctcgtctgtcacataacggatttcaaggtcgtgcacttccaatatattttcagccataccgtactcctttcaccgctcacttcttcaatctggggtccaggcagtcccgcaggccatctcctacaacgttgagtgcatagaccaccaccatgatggcaaggccgggaatgaccgtgaggtaaggttctgtccggatgtaccgccggccggtggacagcattgcgccccactccggcagcggagcctgaatgccaaatcccaggaaactcagagcagaagcggaaatgatggcgcccgccatggccagtgtggcctgcacgatcagagaggaaatagaattgggaagaatgtggtggacaatgatacgccagttattggcgccgatggctcgggccgcctcgacaaactcctgttcccgtgttgacataactgctgcccgcaccacgcgcgcgaattttggcgtagaagacaggcccaccgccagcatcaggttgaacaagctggaacccagtgccgtgacaatgcacatggccagcagcatctggggaatggccatgaacagatccatacagcgcataatgatattgtccagcttgggatagtaggctgccaggacacccaaaattccgcctgtaatgacagaaattccaaccgccaggaagccgatggccagagaataacggctgccatagatcaggcggctcaactggtcccggccaaggttgtctgtgccgaaaatatgctctgcgcagggcgcgatcatggcacggctggcatcctgatcatcatatccgtatggtgcgatctgatcggcgaaaattgcgatgagaacgaaaaggatcaaaacgatcagtcccaccagcgcctgcttgttctttttaaaacgtctccagatttcggagagcatactgtgatttttcatgccgccttcttctctcctctcttcttgaaacggaagaacccgctcttggagctctcatacatggtcttcatgcgggggtcaataaacgtgtagatgatatctacaatcaggttcaaaatggccgagacaaacgcgatcagcagcacacatccctgcacggcagcatagtctcgggcattcatggaatccaccaggtactttcccacgccattgatggagaaaatcacctctgtgacaatggagccggccagcagaacacctagctgcagcccgattacggtgacaatggggatcatagcatttttcaatgcatggctcaggattaccatccaataagtctggccctttgccttggccgtgcggatatagtcctgccgcataacctccagcatggagctgcgggttgtccgcatgatagtggcagaggaattcacgcccagcgcaaccaccggcatgatcatctgcgtccagctattcccgtagcccgaagccggaagccagcccagtccaacggagaaaatcagaatcagcatcaggccctgccagaacatcggcatggaaattccaaataaagcgcaccctgtgcacagagagtccagaatggtgttctgtttcagagcagctacgattccgaagaatattccaagtataatgcccagaacaatgctccatgcggagatattgaatgttacagagaagcgcacgagaagttcgttcaaaaccggagttctggagcggtaggagattccaaggtccccctgaaacaggcccagcagtgtccttcccagccgctcccagtaggtcccgttgatccccatctcaatgcggtatgcctcaacagcttccggcgtggcgttatctcccaaggccagataagcaggatcaccaggagaaaaatagagaattgtaaaaacaacaatggttacaccgatcaatatgggaatgatccataagattcgcttgataatgtatttcagcatggttcgttttcctcactcaaccagcgcggcgccccggaggccaccgcttttttgtactgtcatgtaaaaaaataggatgggtgaataattgttgtattatccacccatcccttggatcaaatcaaacccttaatccggagaatcattttacgcgaagtagcaatacttcagcagcggagcctggaatgcgccattgcggaagccctgcagatcgctggtgtagcagtggatatcctcctgctgatagatgggaacgatgacacattcatccagcaccttctgctggatttctgcattcagttcgctgcgctttgcagagtccgcctccatagcagcagcatcaatcagggcatccatctcaggatcgctgtatccgaagatgttgttggcgttatcggtgtagaagaatcggttcgcatagtcaatatcgccgttggtggcagagatgccccaggtataaatatcgaagttgtgctccaccttcaaagcctgagagtttgtggcagcgtccaaagcaacgatctccacatcaataccgatctgccccagtgcattggcaaagaactcaccataggcctgacgcacagccatgtggcccacgtgatatctgcaggagaacccgtcggggtaaccggcctctgccagcagttctttggccttctcaagattatattcatagaccggataatccacatgatagggagagtccacatccgcgatggaatcaggaatattgctgggcagcaggccttccgcgggctgaccgacgccgtccatgcagacctcccatgcaccgtcaatatccagtgcataagcgatagcctggcggacacggacatcgtcaaagggagaattccgcagattgaagctcagatagcagttgtccgtcgtatactcacggaataccacaacatcagaattggcctcggcagcctcgatatccacgccggaaagattgtagcacatatctgcgccgccggtctccacctcgatgtagcggttgccatcttcggaaatcactctgaattccacattcttgatggcaggctggccctccacatagtagtcgtcgaagcccaccagactcacgctgctgccgatagaccattcgccccaggtataaggaccggtaccgatgtccatattggcccaatccccgtttccttcctcatatcccttctggctgaacatcacgcaggtagggaatgagaggttggcgattacaggcatatagggttcgtccatcacgatgacaaaagtcctctcatccaccgcatagctgttttccagatccatatggtcggtaacagaggtgttggagctctcccgcaggcagcgcagagagaagaggcaatcctcggccgtcaaaggctcgccgttatggcacatgacgccttcccgaagagtcattgtcagctcagtggcatcatcgttgaattcccaggattcggccagaagcggcttgtactctccttccggcactgtgcgctcgatcagggtctcgtagacatttgccttgatcttcaaagtatcattggtgctgcttccgttgatagggtccttgtctgccatatctgcctgaacggcaatagtcagagtatctttcgcctctcccccatcatcgccgtttccggcatcttctgtgccgccgccacatgcagttgtcaacatgcagagacacagcacggaggaaaaaatccgcagcaacttttttttcataacatctcttctcctttttcatattttacaatcaccggttttcaccggaaactgccatttttgttgccccctttaaaaccggtcatagctgacgatttcttccatattcttttttgtcttccgggggctgttgtccgcaccatatccgagcgctaccatagatacgacccgcgcagatgccggaacatgcagcaaatctttgaccgcatcttctctaaatgcacagatgatacacgtatctaacccctgttctgccgcttccagcagagcaaatcctgtggccagagacatgtccactacatagccatattgcccgcagggcattacaaaatctgtgcggtccgtagcgcagaacaccaaaagtacatctgcttcctccaccatgggctgtgtctcagcctgctggcggatctgctgcttcaaggcactgtcccgtaccacgatcacccggatattctgatcgttatgtcgggaaggcgtcaggcggacagcctccagaactgcattgagtttttcctgttccaccttgcggggcagatagctccgcacacttcttctagccttcatggcccctatgacatccatgccttttcctccaaaagccgctggtcagcggaccatctcctgaatctcctccagcgtcttgccggccatccccagcttttctgcggtgcgtccctctttccagaagtcccgaccgcagacagcactggcgatattgacaaaggcgtccatcatcggggtggggatgcccaatgcatggcccacggaagccagaggtaccaagccggacatggtatcctccacgatgaaccggtgcttggtattggtcgggttgcgcagagcgcgataggattcgatgctctgaatcagatcatacaggctgtccttcggctccagcttgtaggtcttgaccagcatatcccccagcgccagcgcatccacgcccagcgccctgcatacagcgacacgctccttgtcgcaagcggagatgatatcggcaatatgtggggtgattccctccatgtaatagtcgtagctctgccccagatccatcttgttgatgttcatgaggctggggatggggtgcagcatggcgccggcgccctcaaagccggtctccagcacattggccgcaggctgcaggcaggggaagatgggtcccagcactttcatcaggcggtcgatatcactggcgggcagtgtcgccaccggcacgtggaccttcaggcccgtgtgaaggatattgccgacctcataactgcggcagccatacatcaggtcccccgcctccgcaatgataagatccttgccgcagccatcctcgccgcgcaggatattggcgatctccagagcacctccgcagtggccgggattcagcatgacgatctgcccatccttcagatagggcttgcaggcataggcgatgcttctatgggcatccgtagtagagacgaccatgatcacgtccacgtcatccatgacttcatcgatccggtccgtaataaccgccggtgcggcctcgcaggcaatgacgccggtgaccttgattgttttgagttcctgcagacgatggattttttccttgtcgatgtcatacagcttggcgatatagcccttgctggtgagaatggcggccatgctctgtccgcctgcgcccgctccgataatcgcaaatttcaacatcttgattccctccacatttcattttcctatggaatttgaacaaacgtattttgctttgaaaaaatacccaagggcgtttctccttaggtgttgtttccatttccaaaattaccgcggcttctatgcctgattgaaggtgatctcgtcagctcttttcctgtccgtactgctcctctctgcaaacattgtgttttttgtctgatcctgtcctgttttgcttgtcttaattttatcacattgacaggaaatccgtttatatggtattgttagtactaaatatatgaatttcatatctttacgggcacacttcagggagactgtctctcccgggcgcacgccggatctcctgtccgacttccgcgtttttccggactgtgacaggacattggagagcaatcccaaaggcccctcagcaaactgggcggaaaatgccgaggctgtctaggggggcattattatgtacggagggaggatccaacatgacgttccaacagctcagcttcgtggtagaggtcgccaactgcgaatccatcaacaaagccgccgagcggctctatacgtcccagagcaatgtcagcaacagcatcaaggccttggaggaagaattgggaatccagatcttccttcgaaccaaaaagggcgtttccgtcacggaagaggggcgggagttcttgagctatgcaaacgagatcatagacaaaaaaatttttgtagaagatctgtatgcaaagagccacttccgcaagcagtatttcagtgtctcttccatgcgatccttctttctcagcacgcccatcacaaggctttggccgcagatttcagacggccacggcggctctatctatatcaggctgaaaaaacagtctttttacgatgttctggatgatgtgcagcactgccgctccgacctggggatcgtcttcctgatgaaatcccacagtaatcggatcacgcggctttgcagcgtaaaggacttggattaccatctgttgggggagagccatatcagcatcgtcacgagagcggaccaccccattctgcaggctcaggagaccgttccggtggaagaccgtatgacggactatccctatgtgattgcagaaaaccacgagaatttcggcagattttacgatgatgattccgagtccatctctcaactgtttcagtctcccccaaaatgcatcatctctattaacgacagtgctgccagccaggatattgtggcccaatccgatgcttttttcatcagttctacccgctggcagcatccgcagcactaccatttttcctcggtcccgcttaagggagaagatagtatcctggcccattattatgtcaccaagaaggggcagacgcctcaccctttgaccgctccctatgtggaagaactgaaaaaaatgttccatggtctttaacgaggatattccgacatactgagcaaacagcgacatggagcagcctccttccatcctcaaatctccccttccgaaacacttctctgcccagtctcgtctcggcctcgcatcctgtgccttttattacataaaacctgcttgctccaggcggagattcagaaactgctgatccagagtataacttggaccatccttgctcatccatacccgggatttttctcagattttcttctataaaagaatgatgaatgagattttttctggcgtggagggtgttccggacagctacttttccctgtggatgaccgttggccgcatctaagcgggaactctgctgggctatggtatctatgcggcgatagccccccagaataaggatgtccttccgagtctcgtaaatacggacagcatcgtcccccccctgccctgttccgtaaagagtggtctatccttcagcccgtctggagttcctggcaggcgcaggatatggattttacgggggcaatacacagcaagtaattggctggacataggaatatttacacaggtattgaataagatcggacgccgcaccaatggacttttggtgcggcgtcccaatatattcttcaaaatgacagccccgagatagatttctaatgtttctgagccaattgtttatgaatgtgttttgtctggggacaccggaaattttatatttccgcttctaacgcttctgcaaccgtttccagcagatcacgggcggaagcctctgcgggcaattttctcccgcaggccacagcggatgcagtcggatgcctttctgtaagtctggggcagagccgcataatacgcctcctggttggcagtgtagcccgtgttgttccccaatcgctccggatttctcatgccgcttaaaacagtcaaagccccgtccagccccgcaatgagccggatggaccaggaggaggccggtccggcggtcgcatcagcttggtacagcagcacagcggcctcctccggtaagttcatcagagcacctcccttcaccggctccacgaccgcaatctctttcccgtatctccgggccacctcatcgcacttccggcactggagattgggatccctcccagtccggacagttgcgctgaagctgcaccagctcaactatctggatgatcttgggggatcttctccagggcctccgcagctcttcggaaagaacaactgatatgctgcgccaactccttgtctcgcatttcacggggaaaccggaagctgccaactggatctggtccgggagccggatcgaaccatgactgtgtggtaaaagggatcgtcatgtaacccttgtcatgcttgccctcagagcactttttctctatgaattgatgcgcagcctcgtttacaggggcattggggagatatccacccatcagcaggaaaagttctgtaacgaagcggaattgcggatgtaaatatctatttgaccagactggtaaggcgatgcatcaataccggcaaaagccaccgacgccgtcttggagtggaaacggcggacatcgccaatctccgccataagttgtgagccgagcgatggaccaacaccaaatatcctcatcaccacgggatattccgggcgtgaagatgcccaagatcgcatttgcagttttgcagtttcagggcggccaatgctgcacaggccgtccggagttgagagacagcccgttctgccagaagtctggcagtatcagttttcggcataacaccaaagtgactacgggcagaagcataaatatccaatgccctatcttcgctgaagttgtagctatatttcttacaccacctttggtatttggaaataaatgctttttcacataaaacgcaaacgcactcacagttccaaaatgtcgctgcgaagtccaccatttctcgctgccatcggtacgcggagggcttgaaaacaggcggtttgcgcccggaaaagctgtgtctaacagagagatcaggttgttcttcaacttttgaatacggctggtattgcctggcagcagtttctgcgcatcaatcaggtatctatacctcgccaagataagccagtggccaagaccgtcgtttgccggtttaatggcatccttcttgtcggtcttggcacggcgcaaattggcaccagcgctgcactgactgccgaagcatagaatccggaggcattcagcagtcaggcttccggtaaatgataattacccgtagactccattacaacacggggcttgcctggcagcccgcgaagcagtgatcgttcgctgtctgtatgttgccccattgtggctgaatcttgggaacgaatgaagcacgtctgacgggtgtgcttcacccgttgtagtagcgtccaaataggagaaaactggtaggagccatttcgatggaatcgctcctgtagaaaaggctaaaaacttcaagatataaccgttttctaagagataaaatcagaaacaacatccacgagatgcgggggagaaagctggcgggcagaacaggattcagctagttgatgggcggttccgtaatcgttggaaaaaggggcagtaactgctactgtaatccaacttcggcctattttttctttagcaagaatgccgtaagatctggaagataaagaatgtatcttaaatacctcatacttgtacatgaccagtcacctcagtatccccggattcttttgctgcatgggtatgaacaagagactcctgacgtttagatgcagttattggagtgccagaggcttccatcagatctttcagaaagctattcatatcaatttcgagaaagactgcaagtttgattgcgagaaaaaagccaggcatcttcttaccagattcaattttctgaatccatccatgggaggtcccaaccgcctctgcaagttgagcctgtgtcagttgaaattgcgtacgtttgagaaggacgtgctttgaaaaaattcgtcgtaaagttatttttgtcatgggaaaatccctccttatatagaggattttaaccatgaactataaaaatttggacggacctatagttcttgttggatagagcaacagaaaaacatcggattttgtcgcaaaacacataaaagcaagcccgcttctagcgagcttgcttgcagagatagatcacgtgttaaactgctctgcgaaatagcagtttcgtcacccaatgtcatccaattttcacgtattcttgcctgagcctccttgcaagatgtctctatctactccccctgtttcatggatgctgccggaatcagatatccctcttgcaatacaaccaagaaaatcatataataaatctataaattgtgcattttatataatttcaggatgtggttgcaggatggatacttacgcctatctggcccatctcacagaagacggccggacccagacaattctggaacatctcaaaggcaccgcgtctctgtgttccgctttcgcagctgcttttgacgcagaggcgcagggacagctggccggtatggctcacgacatcggaaaatactccgctgcctttcagcggcggctccatggcgggccgaaagtggatcacgcctctgccggggctttcgagtgtctgaaagctcaacagctggcggctgcttttgcgatctccggacaccacggcggcctccccgacggcggcggccggggagacgccgctggcgccggcaccttttgggggcgcatcaatcgggcgagtcaagggaggctggaggactatcatgcctggcagagtgaattctccctgcctcatgcaaatacccccgcatttgcgggaacaaggctggaggggatgtttttcacgcggatgctcttttcctgcctggtagatgcagactacacagatacgggcgcgtttatggacaacagcccgtatctgccagcatcgtcctcctctatggaggaattgtggcgccgcctggaaacctatgtctccggctggtttcccccaaaaggcgctctgaacatgcagcgatgtgtgattttggaacagtgcatgtcggcgggggcacagtatggaccaggcctcttcacgctgacagtgcccaccggcggaggaaaaaccgtggcatccctgtcctttgcgctggcgcaggccaaagcccgcaggatgaagcgaatcgtttatgtgatcccctacacatcgattatcgagcagactgcccaggcctttcgggagattttgggtgatgaaaatgttctggaatttcactccggtgtgcagttcgaccagcaggaggacgatgcatccagtccggaggccgttccgctgacccggtctgtggagacgtgggatgttcctgtaatcgtcaccacagcagtccaattctttgaatccctttatgcctgccagccttccaaatgccggaagctccacaacctggcccagagcgtcctgatctttgacgaggcccagatgctccccctcccctatctgcgaccctgtgtctgggcgattgcccagctggtccggcactacggcgcttccgctgttttgtgtaccgccactcagcccgctttggaccccatttttcaggaattcgctccggagatccccatccgggagatttgccccatggccgaagcgcactgggagtccttccgccgggtttccttccagcaggcaggaacgctgtcctggatggacctggccgcccgcctgcagcagcaggagcaggttctgtgcgtcgtcaacacccgccgggccgcgcgggaggtcttccaccaactgtccggtccaggcaatttccatctctccaccctgatgtaccccgcgcaccgcaggagaattctggatgagatccgccggcgcctgcgggatgggctgccctgccgggtggtctccacctctctcatcgaggccggtgtcgatgtggatttcccagccgtctatcgggagctgtccggtctggactccatcctccaggccgctgggcggtgcaaccgggagggcaagcgccctccggaggacagcatcgtcaccatctttcagggagaagatccacctccccgtctgtttgagacctccatcggcgccgggaagatcgtcctggatcactgccaggacgtcagttcccgagcggccatacacacctatttctccacgttgctggatttgaaaggcgcggaagctcaggatgcccaccacatcctgccgctgatggaatcggagttcttccccttccgcactgtggcggagcgattccacctgattgaaagccccaccacaaccgtgtaccttcctctggaggagggcgccggacttgtggaattgctgcggagcggtcaatacagccgcacactgtaccgccgcctggggcaatacggcgtgtcggtctatccgcagcatttagcggcattggagcaggcaggggcgctggagcatctggaggacggctccgtggtcctgcgggatattgggctgtatacacagactaccgggctgactctggagcccagcggtggaaatgccctgttcatcggataggccggagaatccattgaaatacctataccaaaatctgtctatggagcggtacgctgctccacccttccacaaacgaaagaaaggagtgcatgctgatgcccatctctttggaggtctggggggactacgctctcttcaccagaccggagatgaaggtggaacgggtcagctatgatgtcatgaccccttcggcagcccgggggctgatcgaggcaatttactggcatccggggctgcggtgggtgatcgactgcatccacgtgtgcgcgccgatccggttcaccaatctgcggcgcaatgaggtgaagtccactctctccgcccggtctgtccgcaccgtcatggaacgcgggaccggagagctgtatctctgtactgccaacgacatccagcagcgggcggcgctgctgctgcgggatgtgcactatgtcattgaggcccattttgatgtgacggacaaagccgctcccggggataacccgggcaagttccaggacattgtcaagcgccgcatccagcgggggcagttctatcatcagccctgcttcggctgccgggaatttcccgcccagttccgttggtgcgaggagccgccgccctgtccggaggagctgaaagggccaagggatctgggctggatgctgtatgacatggattacacgaacccggaggatatccgccccctgttcttccgggcgtctctggaagacggcgtcctgcgggtccctggtcggaacagcagggaggtgcggggatgatcttacaggcactgaccgactactaccgggtactggaacaggccgggaagatcgacgcccccggctgggcgccggtgaaggtgtcctatgcgctgctgctctcggaaaacggcacgctggagcaggtgattgacattcagacggaacagccgcggggaaagaagatggtttccgcgccgcagatcctctccctccccgcgcctgtgaaacgaacggtgggagtggccgccaacttcctctgcgacaacgccggttatctgctggggatcgacagcaagggcaagccccagcggacgcgggagtgctttgaagccagcagatcgctgcacgaacagctgctggcgggtgtagactcccccgccgcccgggcagtcgccgcctttttccgctcttgggaccccgagacagcccgggaacaccccgctctggcggagcatctggaggatattctctccggcggcaacctgatcttccgcaccctggacggctatgtccacaggaacccctccgtccggagggcctgggacgcgttttatcagaccgagggggatggtcctcaggggatctgcttggtcaccgggcagccgggaccggtggaaagcgtccaccccgccatcaaaaatgtggcgggtgcccagtccagcggagcggccctggtgtccttcaacgccccggccttctgctcctacggaaaggagcagaacctcaacgctcccaccggcaagtatgcggcatttgcatatacctctgcattgaacgcgctcctggccgaccgggaacacgtctttcgcgtgggcgatgctaccgtcgtctgctgggccagaagcggagagcggggatatcaggacgtctttcagatgtttttctccgatttctatgacgaaacggacctgaaagggctggttggcgccttgtgtcagggcaatccggtggtctacgatgagacaaaactggaccccagcatggacttttacatcctgggcctgtctcccaattccgcccgcctgtcggtgcggtttttcctccacaatacgttcggcgggtttctgcggaatgtccaggcccattatgaccggctggagatcgtccgcccggcctacgacaaatttgagacgctgcccctctggaagctgctcagtgagaccgtcaaccaaaatgccagggacaaatcccctgctcccgacctggccggtgaagtgctgcgggcagtcctgaccaatacccggtatcccgccacgctgctgaatggcgtggctcttcggatccgggcggagcgggaggtcactcgggggcgggcagccatcgtaaaagcctactaccaaaagcttgcagaaactaccaaacaggaaaatccagacataccagaggaggtcttgcaagtgtccctgaatccggatgcatcgaacgtgccctatacgctgggccggctcttttccgtgctggaagccattcaggcctctgcaaatcccggcatcaacgccaccatcaaggacaagtatttcaactccgctgctgccacgccggccgtgatcttccccattctcctcaacctggcgcagaagcatctgaaaaagctgcgcagctccaacgcagggctggtggtcttctatgaaaaacagctgacagagctttgcagccgcattggggaacagtatcccgcccacatgaatctgccccagcagggttcgttccagctgggctattactgccagacccaggcccgctatcagaaaaaggaggaagcgaaagatgtctgaacccatcaagaaccgctatgaatttgtcattctctttgacgtggaaaatggcaatcccaatggagacccggatgcggggaatatgccccgggtagatcccgaaaccggcctgggccttgtcacggacgtgtgcctgaagagaaagatccgcaattatgtggagacggtcaaggaagacgccgccggctaccgcatctatgtgaaggacggggtccctctcaaccgcagcgatgccgaggcctacaaggcgctggatgtcgatgaaaaaaccgccaaggagaagaaaaaagccgatccggaactggaccgaaaaatccgggactggatgtgcgccaacttctacgacatccgcgccttcggcgcggtgatgaccacgtttatgaaggccgccctgaactgcggccaagtccgtggtccagtgcagctgggctttgcccgcagcgtggagcccgttatcccccaggaaatcaccattacacgggtggccatcactaccgaggcggacgcggagaaaaaggggacggagatgggccgcaagtacatcgtcccctatgggctctatcggtgcgagggctatatctccgccaatctggcccgcaagaccaccggtttctccgaggaggacctgtccctgctgtgggaggccatcctcaacatgttcgagaacgaccactccgccgcccgcggcaagatggcagtccgggagctgatcgtcttcaagcacgacagcgagctgggctgcgcccccgcctggaagctgttcgacacggtaaagatcgcccgaaaggacccggcggacgcctcccccgcccgctcctttggagactacactgtctcagtggacgagtccgcgctgcccgccggcatcacctgtacccgcatggggtgattgatttttctgaggacctcctccccctctccggtctgcaacacttcgcgttctgccggcggcagtgggcactgatccatctggagcagcaatggcaggagaacctgcagactgtggagggcggccttctccaccgcagagcccacgacgaggcgcccgggagcggcggagcgatacgctgatcctccggggattgcaggtggtctcccatcaactggggctttccggccagtgcgacgtggtggaattccacgccacccccaaaggcgtaccgcttcagggggatgaggggctttggcagccgtatcccgtggagtataaacggggaaagcccaaatcccatcaggcggatgaactgcagctgtgcgcccaggccatgtgcctggaggagatgctctgctgctctattccagaaggcgttctgttctatggggagccacgccgccgcacggtggtgttcttcaccccggagctacgggagacggtgcgcagggactccgacgaaatgcaccagctgtaccatcgaggccatacgcccaaggccaagccctccaaatcctgcagcgcctgctctctcaaggagctgtgcctgccccagctggtccggcgggagagcgttcagacgtatctgcgccgcgccatggaggaatcgccatgagacatcttctgaatacgctgtttgtcaacagtgaggacatctacctgtccctggacggggagaatgtggtggccagccgcggcaagcaggagatggctcgctatcccctccacattctctccggtatcgtctccttctcctacgccggcgcctctccggcgctgatgggggcctgtgtccagagggatgtgtctctggcgttctgcacgccccggggacggtttctcgcccgggtatccggggaatcctccgggaatgtgctgctgcggcggacacagtaccggacagcagatgatcccggcccctgctgccggatcgcccgcaacatgatctttggaaaggtgcacaacacccggtggagcgttgagcgtacccggcgagaccacggcctccggatagatgaaagcgcgttttccaacgcctccgcccagctgcgggcgctgctgccccagatcgccgccgaaacctccctggagcagctgcggggcctggagggcgccggggccacgatctactccagcgtgtttgaccagatgatcttaggggagaaaccgctgtttgccttttcgaaccgaaaccgccggccgccgctggacccggtcaacgccctgctgtccttcgcatacagcctgctgactcacgactgtgcctccgctctggagagcgtggggctggacgcctatgtgggatttctccaccgggaccgccccgggcgaacctcttttgccctggacttgatggaggaactgcgtccctgccttgcggaccgcttcgtcctgactctaatcaacaatcgtgtcgtgcacagggacgacttccagttccgggaaaatggggcggtctatctgacggactccggccgcaaggtctttttgacccactggcaggagcggaaaaaagctgaactgacgcacccctatctgggagagaagatcccctggggcctggtcccctatgtacaggcgctgctgttggcccggactctgcgggacgacctggaggaatacccgccctttttgtggaagtgaggcgtccgaatgctggtactgattacctatgatgtgaacacggaggaccccgccggccgcaaacgcctgcggcagatcgccaggcagtgcgtcaactacggccagcgggtccagaactccgtctttgagtgtatgctggacactgcccagtgcaaggtgctgcaggccaaactgctctccatcatggacccggaaagagatagtctgcggttttactatctgggaaagcgctatgaaaacaagatcgagcacttcggcaatcagcgcagctaccaaccggaggcccctctgatcctctgagtgcgaaggggaagcgaacatcgttttcccggcaggttcgcactcaaatatcatcaaatggacaggagatttccgtaaatttaagcgtgcgaactgtgacacagacacggctcctggccattccagtttacgaaattgcacatttgtcacaaaacatacctgtgcctttgtgctgtttcgctgtcgctcccctcacggggagcgtggattgaaatacccttaatccggatccgttgtatccctggcttggtcgctcccctcacggggagcgtggattgaaattcctcccacagcaccgccgtcccctccagcatgtgtcgctctccgcgaggggagcgtggattgaaataaagcggacggccacaccgtccacgactttgacgtcgctctccgcgaggggagcgtggattgaaattcatgaaacaagcctatcccatcatcctgacgccgtcgctctccgcgaggggagcgtggattgaaatatcctccaccacctcatagcccatcaggcgggcggtcgctctccgcgaggggagcgtggattgaaatagctccgtctccagacggtgcaccagagcggagagtcgctccccttacggggagcgtggattgaaatcccggcggctccggaaggggcatccaccacaagagtcgctccccttacggggagcgtggattgaaattttaccgggaactcgctttgatggcgcaggacccgtcgctccccttacggggagcgtggattgaaatttcacggcggcgtcaatggcggcctgctgctcttgtcgctccccttacggggagcgtggattgaaatccgagccggacgaagcgttggatgtgaggtgatcgtcgctcaccgtgaggggagcgcggatggaaattcaatgtccgcagacaggatctgcttggcgctgagaaaatccgcatgattctcatgcagagggagcacaaggtcaacacaagatttgtggctgatatctatgcgtgagatggggttgatctgtgtccgaagtacttcaaaatcggagggactatgcttctgaatcagagttcaagaacaggatcgactcatatattgaattccgcaatacaacatggccttatcgcacattaaaaaattggactccatgccagatggaggaagactaccaaacgtagtggtgccaatcctaagaggttggcatataggggttcagatttcggaaatcttctgttttgtaaatcgatttcaagttttttgtgttttcatgtcccatttctattgcagatatgaaaatggctgaaaaccttgctgtgtcaaggttttcagccataaaacacccccacctaatccgtcagtctcatacaaactattcagattaggcggggggcgttcaaatcattgaagtgtagtagcccacaaaatctatatcccatctatttgttttcatctgcactagcttttcttatcttaactagatcgcttaatcaacagctgcctagctgaaaggatgctatataatgtcttctcgtagcaaaaatccgagaggagaccctctgtttacaagaaagtccaagacatttaaaaccttgtgcttacgcagggcatccgatttgaagaggtacagccgcttttgaacataacggtacatatactcttccatatagtagatagtgtttgtgggaagagcggtttgacgcagctgggggttgttggatataatgtcgctgagccattccacgccgtcttcaaagaacacttgggaaccgatgctgttcaatacccgaccgacagagtacaaaattgccggatgtgctcccgtcctatttactgccgttttataaaagaccgcacagtcctcccggagggagtgccaggttgtgatgccttctctccattcaggtcctgccaaaagatactccgtcaggacatttcctattccaaaactgatggcccgatcctcatccatctgttgctcgaattcgggggcccgttcgaaggcagagaagatgtagtttttcagcaaatcccaaaatccccaaaaggcgctatacctaggtttaatatcttcggcctggataacatcccgcaaaaagcgggtgaattccttgccgtatttcacgtgcttcaccaaatggtccagaaagatgctctgctgctccgcagataggcccagaacatagtcgccgagccactgtgtatatgcgtactctccttcgtagtcctgatagccgtctctgtccgtgtcctcaggtccgagcaatgtaccccagacccggtccccgatttttaatacgaaaacgaaggagccttctacattaccggacggaatcatccgctgcagggcaatcagttggtgaacctcaaggccgctcaaagggatgtcttctaaatcggagacctcctcttgaaacagcgcctggatttcttgactgtgctgctcaaaaaaggtccttgtagaaatgccgttgtagcaaaggacttgggagaaatatcggggtgcgagcaccgcataggtatgcattagctttcgggccacattgggggcggagggccaaaggatggaggccacactgttcagcgcttcattctgtttgccgttatacatcacaagggccagcagcatgaaaagtggagaagaccaatcggcgatgaagtcgtcactggaaaccagacttgccactgcggagataactccattcaactcatagggacctagatggcaatctcgattcaaaaagttcagacaggtcgccagaagtacctcggtgcaaaaggcaagcgttgtctcatttatagccgtccgtcgctcccgtaaaaggactgcacaggcatttacggcactggaaatgtcgtgggagtccgcttctccctcctccagaatctgatagatctcatttaccactggctcgataccgccctcaaactgtgggtactgttgggcagcttcctgattgcctcgaagttttgcatctgcccaaagcattagcggtacatgccgcataaagtcctcataattgcgttgggcctgttcgctgagggctgtgagattttccggcatatctggcaccacagagatcatcactctgtcctgggacaccttctggctactaatctgacgccttcgaaggtcgctccgatagtacgcaaactgatatacctcctcccaggaatcgatgctctgggttgcctcgtcaaatgcggcatacagctgtgtctttctctcttccagctcattctcagacagaatgcctttttcaatctggtagtccaccaaaacttgttcaaattgcttttttcggaagggtagtgcattggtctccatccgctcatggtcgaaccagcgatgagatgccagcgttcctttcagaaaatcggcactgtgctccgcctgcagtcgggcgatgtcgaagacaaagacctccttggtcttcaacagaatacagctgatgggaaagagcttatctggataggcaatcaccacactcagtaccacggcagtaatggctgcgcttgcggatttcctcagcagatactcacagaactggcatatggttttctcctcggtaaactcggccaaatccagtagccatttttccagtgccatcaacacgctctccaacaacttgggtgctacatgagtacctcggtacatcttccacagtctgtcgctgcacacctgtcgctgtaccgtgccgtcagtgaaatggatttcaatctgagaacattcagaatactctgttgccaatttggaagaactgtagcagtttgtggcgtagttcatgatccgcaggatcgtgttcaacgcccggattggtgcctcctgtaataggaaaaacagcggagtttgaagggcgctttccgccttgtatttcatatccaagctgtgggacaggccgaaatagtactccatgctgtcatgagaatagtcattatgttctcgttgagaagagtcgcaccaataacgctccgcaagactgagtacctgctccggaattgcctggcaaactcttccgcattcataaacattggacaggctcttttgcaggagtaaatagttttccttgtaactatcatccgtctgtgtatctgtaaaggattggaagatgtcggtcagttcctgcttcagttccattgcggcagccaaaatcacatcggtaagggtgataaatcgcgagtctcgccgaagggtatagggataccgctcccttttccatatctcacttttcaaatagagggcaatcctccccgccagtcccgttgtctctcctgtttcatatttcgctgtccatgttttcaatgtattagtgacgatgtccagattttgggctgtccaaggaatcaggccacggttattataaatatattgaaagaccgtaaaccaagcccgtcctacagggcaggtgaagcgatacttgttccctgttggcgtggacagtttctttaacagttcccggtcgatgtcacggcaggcggtgttcagtagaaagaccatgcgggtgaacaaagagtatcgttcctgactcagaatggggtcgattgcccggaaacagtccacctgatcagactgcatcagtgcgatcagcgtctcatccttccaagcctgatccagtccgctttggagcatagagatcaaaaaatctgcatagcgacctccaccgctagcaaaaacggattccagccagatgcgatacagcttcctggctcgtagagataggccgaacccctctagaaccttctcggcctctattccctcctggtaccgctgggtcaaaatgtgttttataatcagctcctcatacacatcgtgactcatcatccaccgacgtggagagttgtcgtaaacggcgataattccgctatcctccagcgcggtcagcgccatatagtcatcgttggcactgcttatgtaaatggtggatccccgttgcagcatagagaacacgatgtgcgttaccatctcctctcgtcggacggggaggttttctgcgcgacggtggctgtcacagatgacctccttccagacctgctgcagaaacagctcctcagaggataccaaatccaagccagccggatctagctttaagtacagctttaaatagaagaaatccttcaggaggcttcgaagattctggttttggggaagtgggaagtgatactgctctgagatcgcttctagcacctcatcagctatgctctccacccgaaactcgtcataagcgatgtctttgaggagaatattgcaaaagctgtccttgtatacggtacggatggtgaagatcatcttccagccgtggtcaatgaatttatggacaagggcagcaaatacctgtgggctattaagtgcggagaacttctcagcggattcaattacacagacctttcgcttctcttgactgtagagggtaaataagtcttccagttggtagtttccatacttgcgtaaaaacagactttcttcctccacatccaagtcggtggaagagaacaagaagcaggcaaactcatcgccctgctcctgccgccgagaaatgagatccttcactacgccagatttacccgtccctgcgtcaccatatatgatacagacagctttttccgactcccatagtacatcgagcttctgcatatcataatagattttgatccgctcaccctggcacggaatctccgactgaatattggaacggatggagtcactccggttttggatctgctcaacccactgggaaagacccggcatagggttaaaatataaatctcttactgtgggtagtgccaaaagtatctgctcgatatggcttggcccccgccattcaacagtgatgccaaggctttcgccgtgtgtttcgatattctcttgatatatgggcttctgggtatgagggcgcttgctgacagacatttccttattaatataaaaaataatccggctgattcctgcatatttctgctttgcatccgcaatagcatttttgaaatccacttctttagatgaaatccgagtggaagcatcatagtatttcgcttgaaatccggtcaaaaggccatccggagccatcacgggctgtgtttcgatatatggttgattgaagtaccggaaaataccgtgcgaaagccccatctcgtggcagaacagcgtggtgacaaggccctcaaaggcagccctgggattctgagaaaacttggactcaaaaaccttccagtcaacggggatattcgtcatgtatagccctccctgcggtgccgaatataacgttattacaatttcattatggcataattgtggtagatttacaatgctactctcatagagacatgaatcagatttctgttaatggtatatgcggtgtagtacaattcataatccaaaatagggtagttcctttcatgtgatatgctaattcatatcacatgaaaggagcaaacaccatgacctacacagatcaagagaaaaccgctatcatcacacagtacagacagggcaggccaatccagcaattatgtacagaatgcggcgtctgcgcacggacgatctaccgctgggcgaagatatactgcccagtggttccggacgaaaaacgcacctataccgtcaaagagtatgatgcacttcttcgcagagttgccaaattagaaaacatggtcgctattttgcaaactgtcggctgcacggtccatgctccattgaaggagcggttaggagaactggagttgttatacggccaatacgacgtacacactctttgtgaagctatgaatgtctcccgcggaaccttctataaccatattctccgaaataagcggagcaatgcttggttccaaaaacgcagagaggaatattgcggattgatccgtgaagtatttgatgagtatcgtcaggtgctgggtgctgaaaagatccgcactattcttgttcaacgaggtcatcaggttagcccagaatatgtggcaaagttgatgaaggagatggggctgaccagcatccgcagtactgcgaagcaggattacatgaaacttcatgagccagaaaagaaacggaatgtcctgcgtcaacagttccaggcggacaggctcaatcaaatctgggtcagtgatgttacctgctttaaactgggggagctttatctctatacctgcgtaattctagacctgttttcacgcagggttgttgcctataaagtgtccaggaagaatagcacccagttgattacctccacatttaaggacgcatgggagcagagagctcccgataccggcctcatttttcacagtgaccgtggggctcaatatacctcacatcggttccgacaactgcttcatgagcgcgcagtggtgcaatctttctccaattcgaggaaacctcatggcaacgctgttgcggagtctttcttcgccaccctaaagaaggaagatctgtatcggaaggattacacctcagaggcggctttcaagcgtggccttgcctcctatatcgagttttacagcacccagcgcccacatcgtaccttgaaaaatctgacgccatgccaggttgaagatgcgttcatgagtgacaaatcatgaatccgtatcccagtgacacagctggggggcagattccatcgattgcgcgttttgcgtcttgatttcgccctgtttgcatttgtttggtgacatagtgccctctataataggaacgccagaaaccattgtggcacaatggtttctggcataaaatgaccctacctattctgaacattgacatctttttgttcagatcaggtagggtcattcattctggtccgagatgggagactcgaactcccggcctgatggtcccaaacctatgtctaaaccttcaggaagc

SEQ ID NO: 4913 - DNA, 4044 bp, Unknown
  gut microbiota DNA sequence
tggctgaacgaggactccaccgccatgaccaacaacggcggcaacgataccatcgccgctgtcactgccatgggctatgacgcctactatgtggcgctggaggccctgaaggccgccggctctaccgacaaggccgccgtgaaggccgcgctgcctgacgtgacctacaccggcgtgtccggctccatcgcctttgacgagcagggcgacgccatccgggacaccgcctatatcaagaccgcagacaccgccaacaacgcctggacgctggagacggtccagactgtggaataagcctgccatccggccagcctggcggggtatcccccgccaggcggcttgttcttgcgcgagatgggaccgcctcgaaaggggccgcagcccggcctttttggagacggtccttcccgctcgccaactctgaaagaaaagggggtatccctgtgcaatacggaatttccatcctgctctccggcatctcgctgggcgggcagtacgccctgatcgccatcggatacaccatggtttacggcatcctgcgcctgatcaacttcgcccacggcgacgtgttcatggcggcgggattaatcatggtctatctcagcgcaagcctgcccatcggcgtggcgctgccgctgatgatcctgctgacggtgctgctgggctttgtcatcgaacgggcagcctacaagccgctgcgcagcgcgccccggatgagcgtcatgatctccgccatcggcgtcagctatctgctgcagaatttggccacctatatcaccggcggactgccgcagatgtaccccagcctgcccggcctgtccagtcagatcaccattgccggcacctccaccaaaatggtgacggtgattacgccattcctggtggtggcgctggtagtggtgctgacccagctcatcaaccacaccaagatcggcatggccatgcgggccgcctcccgggattttgagaccgcgcagctgatgggcatcaagatcaacaacatcatcagcttcacctttgtcatcggttccttcctggcggcggtggggtctgcgctgtacttcaccaactatccctccatcgtgccgctgtccggctccctgccgggcctgcgggccttcgtggcggcagtgttcggcggcatcggctccattcccggggccgtggtgggggcattcctcatcggtctcagcgagacggtgatcaagagctccaactggagtgtgttttccgacgcgttcaccttcgcgctgctcatcatcatcctggtggtgaagcccaccggcctgttcggtgagaagtccaccgacaaagtgtaaagggggcgtcacgatgctgcaagaaaaaaagagcaaacggggcgcgtggatcgccctgggctgcgtggcggccctgctggtcctggtgattgtgctggagaacaccatgcagcccaccagtatgctgttcaccgtgctgaagaagggggctgtgtacgcgctggtggcggcctccctgaacctgctgaacggctttacgggcctgttctccctggggcaggcgggcttcatgctgctgggcgcctacacctacgccattctgaccattccctctgccgaccgggagagcgtctactacctctacggcggctcggcagtgaatttctccctgccggagctgttcggcggcggcgccctgggtctgatcctgggtgtgctggcggcgctgatcctggcgggctgtgtggcggcggtgatcgcctggcttatcggcctgccggtgctgcggctgaagagcgactacctggccatcgccaccctgggctttgcggagatcatccgggccatcttccagtgggaccggctgggccctgtcaccaacggcgccaacgcgctgaagagctttcccaccttctccagcttcaacatcgagaacgccaatggggaggtggtgctgcgcctttccacctttgtgcccttcctgctggtggcagtgtgcatcgggatcatggtgttgttgatcaactccacctatggccgggccttcaaggccatccgggaggatgaggtggccgccgaggccatgggcatcaacctggccaagcacaagcggatggccttctgcatcagctccttcttcgccggcgtgggcggcggcctgttcgccatgttcgccaaccaggcccaagccaagaccttcaccacctccatgacctacgagatcctgctgatcgtggtgatcggcggcatcgggtccatctccggcagctgcatcgcctcgttcctgtacgtggcggccagcgagtggtggctgcggttcctggacacggagacgtatatcggcgccttcaaggtgcccttcctgcggaccggcttccggatggtggtgttctccatcatcatcatgatcgtggtgctgttcttccgccgcggcctcatgggggaccgggagctctctgatgtggcccggagcctgcgggcccgcctctccggaaaatcgaaaaagaaggaggcggcgaaatgagtgagaagatccttcgtttggagaatatcaccatgcagttcggcggcgtcatcgccgtgaacaacatgaatctggaggtaggcgagggggagatcgtctccctgatcggccccaacggcgcgggcaagactacggccttcaacgtcatcaccggcgtgtaccagcccaccaacggcgcggtgtggtaccggggggagaagatcgtggaaaactacccccagggcaagatgcgcaagctctacaagggcgagcacgccggggagtacacccacgccctggcccccaccccggacaagattacccggatgggcatggcccggaccttccagaatatccgtctgtggaaggaccagacggtgttcgacaacgtgctgacggccatgcactgccgtgcgacgtgcaatctcctcactgcgaccttccatctgaaccggcaggaggaggcgcggcagcgccagcgggtggaagagctgctggcggaggtgaacctcagcgacgtttccggggagaaggcgaactccctgccctacggcaagcagcggcggctggagatcgcccgggccctggccacggatccgcagctgctgctgctggacgaaccggctgcgggcatgaacccccaggagaccgacgagctgacggccttcatcggggagatccgcacgaagttcggcctgacggtgtttctgatcgagcaccacatggacctggtcatggacatctccgaccggatctatgtgctggacttcggcaagctgattgccgacggcacaccggcggagatccagaacaatcagcgcgtcatcgacgcgtacctgggggtggcggaagatgcttaaaatccaacagctgcgggtgtcctacggcggcatccaggctctccggggcatcgacctggaggtgccggacggcaagatcgtcaccctgatcggcgccaacggcgcgggcaagtccaccaccctgcggaccatctccggcctggtgaaggcggagtccggctccatccagtggaacggggaggagctgctgggcaagcccatcgacaagatcatctccgcgggcatcgccatgagcccggaggggcggcgggtgtttgcggacctgacggtgctggagaacctgaagctgggagcctacctccgcaaggacaaagcggagatcgaaaaggacctgaaatgggtctatgagctgttcccccggctggaggaacggaactggcagtccgccggcaccctctccggcggcgaacagcagatgctggcggtgggccgggccctgatgtcacggccgaagctgatgatgctggatgagccgtccctgggcctggcgccgctggtggtgcaggacatcttctccatcatccgggagatcaaccgccagggcgtgacggtactgctgatcgagcagaacgccaacatggccttgaagatcgcggacctggcctatgtgctggagacggggaacatcaccatgtccggcaccggcgcggagctgctggccaatgagaagatcaaagaggcgtatctcggcaagcacagataa

SEQ ID NO: 4914 - DNA, 4266 bp, Unknown
  gut microbiota DNA sequence
tctcttccaaaaacatctcttttgctttaataacccgttctgttggctttgcggggagcctattgatgtcaaaatcagccatttttcagatagatcctttcctttttcgagtcaccaaaactaaaaccacaggcaacatacattaaaaccatgcgcttttgaaatataacgttttttgttatgattgttttaacatccgcatttgctgctgtcaaggtaaaatgcaagcctcaccccacaaatgctcccttttgcgctggctatattgcacaatctgcaccatggatatacagatgcttgtcagaaaattaaccatattgtcttgctcttaacataaaattgacctcgtcttattttatcataaatgaagtgttttttcaaaatcatcttgacacgctcaatgtatgttgttataatcatgtcaaaaatatgatatataacaaattctaaacggaatatatatcatcataaatcataacaacatgtggagggtgcaaacatggcaacagtagttatcatgccccggcagggacaatccgtggaaagctgcgtcattaccagctgggccaaaaaggttggggacccggttcataccggcgagaccctatttagttacgaaactgacaaagccgccttcgatgaggaggccaaagtagacggcacactgcttgcagtattttatcaggagcaggacgacgtgccttgcctttctgaagtggcggtgatcggcacccccggagaggatatctccgctttcggtcctcatgcagatgtgtcgcccgctgcgccggaaacggcgcaggcagctactcccgcggtggcagccgcgcccatggccgtacaactcactgctcccacagcggctgccggtgtatcccctcgggctagagtggccgcagagcggctccatgtggatttgaccggtgtgacccccactggtcctcatggccgtattctggagcgggatgtgctggcagccggccgcagtacctctgccgcagtggcagccggttctacagctggtataccgggaactgggttaggcggccgggtcacgctggccgatcagcaggctcctgccgccgtcgcgtccgagacatcctccgttctgggatatcacgatgaaaagatctcccacatgcggaagatcattgcggattccatgcacaattctctggctaccatggcgcagctcacccatcatagttcctttgacgccagcagcatcatcgcataccgcaaggaattgaaagccgccgaatctctggagcttcccggcattacctataatgatctgatactctatgcagtctcccgtgttttgaagcatcatcctgttctgaatgcccactggatggatgataagatccgttactttgaccacgttcacctgggcatggcggtggatacgccgagagggttgctggttcccacgattttcaatgcggataccaagtccctggcggaaatcgccaaggaaaccaaagaattggctgctgccgcccagggaggctccattagtccggacctgttgagcggtgccacattcacggtatccaatctgggaacactggatatcgagatgttcacccctgtgatcaatcctccccaaaccggcattctgggcgttgactgcatggtggaccgggtccgtatggccgacgggcacatttccgtttatcccgccatgggcctctccctgacctatgaccaccgagccatggatggcgcaccggcctctcgcttcctgaaagagctcaaaacagttctggaacatttttccgcactgctggcggagtgaattaaggagtgcataggatggaatatgatattattgttttaggcggcggccccggcggatatctggccgctgagcgggcgggacaggcccaaaaaaaggttctgtgcatcgaagaggcccatttgggcggcacctgtcttaatgagggctgcatccctaccaaaaccctgctgtatagcggcaaactgtatgcccatgccaagcacagtcaggcctacggtgtccatgccaaagatgttacactggatcacagcgccgttattgaccgaaaagagcaggtgatccgcacgctggtgggcggtgtgggcgctacactgaaagcctgtcatgtggatgttgtggacgcaaaaggcgtcatcaccggccgcaccgccgatggctgtactgttgaagccggcggtcaaacctatacagctaagaatctcattattgccactgggtcttcctgcgccgttcctcccattcccggcttgaaggaaggacttgcctccggcttcgtgctgactaaccgggaaatgttggcactgcgggagcttcctcaacatctggtggtgcttggcggcggtgtcatcggtctggaaatggcaacttattacgccatggcagatgtagacacgacagtcgtagaaatgcaggatcatatcggcggccccagtgaccgtgacatggtgaaaattcttcagaaaaactgtgaggcagagggcatgcacttcctgctgaacgccaaggttacagagatccgggagggctccgttatctatgagcaaggaggaaaaacctgcacactccctgctgataaggtgcttttgtccattggccgtaaacccaacaccgcaggcattggccttgaaaatgtcggtgtgctgacagagcggggcgctattgtcacagacgagcggatgcagaccaatgtacctggtatctatgccgtaggcgatgccaatggcaaagccatgctggcccataccgcatatcgggaagcggaggtcgctgtcaacaatattctcggaaaacgcgaccgaatgcgctatcaggcgattcccagcgtcctatatacagtgccggagctcagcagcgtaggtgagacagaggaatccgccaaagcgaagggctacgatgttaaggttgtcaagctgcctatgagctacagcggccgctatgtggcggaaaaccagggtggcgacggcatctgcaagctggtcttcgataaacgaacaaagactcttctgggtgcccaggcgctggcaaattactcgtctgagttcatcattgctgcaggcatctgtatggagctggagttgactgtggcggatatgaaggaaattgtgttcccgcatcccactgtggcggagatcctgcgggaagccatctgcaaatattgagccggcataacggcagaaggagagctgaaagatgtctaagcagttatttgtggaccccagagaaatgcgggcacccggcaaaattgagtttactgacattctggaaaatcagtaccagaaaaccgttaaggacgaagtcggaaacttccccagagaggatctgatccgaatctatcgggatatgtgctatatccgggaatttgaaaccatgatccaactcatcaaaaccactggtgagtatcagggcgttccctacaatcaccccggcccggctcatttgggtatcggacaagaggccgcttatgtaggtcaggcctaccacctgtccattaacgacttctcctttggctctcaccggagccacggcgaaattttggcccggggcctgcgagccgtagaaactctgccggaagaacagctccgctccattatggaggactttgatggtggaaaaatcctcagagttctgggaaacagccagctggatatccgggcgctgggccgggacttcctgctttacggcatgacctgtgagacctttggccgggaaaacggctttaaccgtggtttgggcggcagcatgcacgctttcttcacccccttcggcatctatcccaacaatgctatcgtaggcggctccggctctatcgcgcccggtgcggccctctataaactctccaaccacaaagacggcatcgttgtctgcaacattggtgatgcggccaccgcctgcggtcccgtttgggagggcatggtcttcagctccatggatcagatccgcaccctctggggcgatgagttcaccggtatgccgattctgttcaatatttggaacaacagctacggtatgggaggtcagaccaacggtgagaccatgggctatcagactcccgctcggatcggcgccggcctgctgcccagccagatgtacgctgagcgtgtggacggctacaatccgctggctgttatcgatgcttatgcccggaaaaaggacattatcaagcagcacggccctgccctgctggatgtagtgacctaccgcatttccggccactccccctccgactccagcagttaccgcac

SEQ ID NO: 4915 - DNA, 91630 bp, Unknown
  gut microbiota DNA sequence
tctcttcataaaaatttaagaaatttcacagttttttcgtaaaccaagggaatctatactgaatttacgaaaaaaacacggaactgtaactgatttgtaaattgacaattagttgtgtttgtgtatatactaactgtactagtacgggcagtacagtttttttgaatggcttaaaaatttgtcattgacaaatttcaaaattgtgttactgtattattagaataatacaaaaagagacaccgtaacggaccgcactctgccgcgtcttatgtgagacattttacagacatttgacgcaaacgccgtgggatgttgatctggtggcgttatactggaactgaaaaaatgttccggaagttgaagcgttcggcggggctgcgtcgtataggagaacaagacgaaagaagggaacctgttatgaagatcctgattaccacagattggtatacgcctgcggtaaacggtgtggtcacctctgtgaaaaacctgcaacgggagttggagcgccggggccatgaggtccggatcctgacgctgtcccagtcgctccactcctggtcccgggacggcgtcaccgccatcggctccgtaaacgccggacggatctatcccggcgcccgcctccgcaccgccatggcgggccgctgggtacgggagctgatggactggcggccggatgtgatccactcccaatgtgagttcagcacctttttcctggcccgccgcatcgcagaggagctggatgtccccctggtccacacctaccacacggtgtatgaggactacacccactacttctcccccagcgtccggtggggccgatgtgcggtggcggctttctcccgctgggtagctgcccaggtggacggcatgatcgcccccaccggcaaggtgcggggactgttgcagggctatggcgttcgctgcccggtcttcgtggtgcctacgggcatcgacctgcggcgcttccagcaggagggcgatcccatgcgccgggcggttctgcgggccagcctgggcatccctgcggaaaacactgtgctggtgtgcgtggggcgccttgcggaggagaagaacatccaggagctgctgaagctccgggcctccctgggcagccgccctgtgacgctgttgctggtgggggatggtcctgaccggccccggctggagcaggtggcccacgatctgcggctggaggccccggcagtgatctttgccggcatggtgcccccggaggaggtgccggagtggtaccggctgggggacctgttcgtcagcgcctcctccagcgagacccagggtctgacctacatcgaggcactggccgccggcgtgcccgccctgtgccgggcggatctctgcctggagggcgtcatcctggagggagagaacggctggcagtaccacagcactgtggagttccggcagcggctggaggagttcctggccagcccggagacccacgaagcgctgaagcggcgggccgcagagagtgcggagcagttctccgcccagcggtttgcccagcgggtggagcgcatctatcagatgcagctggcccggcgggcggccagctgtgtccagggggtgaccgcatgagccggggcgtggaaaagaccgctctgcaggcggcgtccctcttcggactgattttgtgcgtgctgaccggaatctgggcctggcaggcaggactgctaacctcccaggagcggctgcaggcctttgtggccagctgcggcgccgccggcgggctgctgttcgtggcgttccagatggtgcaggtagtggtgccggtgctgcccggcggcctgggctgcctggtgggcgtggtgctgttcggcccggtgatggggtttgtctacaattatgtgggcatctgcatcggttcgctgttggcctttgccgtggcgcgcaactgcgggcggccgctgttgagcctgctgttttcggaaaagctcatcgccaagtacagcgattggacagagcggaatgaccggtttgcacggctgttcgccctggcgatctttttcccggtggcgccggacgacttcctgtgctatctggcgggtaccacctccatgacctggcggcggttcaccaccatcatcctgctgggcaagcccctttccatcgccctgtacagcctggggctgacggtgctgttccagcagatcacaggctggctggggtaaagacatccgcggacgggcggatcggtaaaggagacacacatgcgcgtttttatctacaatggcggcctgcgcctggtcggcaaaagcggtgtgggacaggccatcctccaccagcgggagatgctgcgccgggcccggatcgacactgccgaccattggtgccagcgggccggggccgtccatatcaacacggtgctgccggattcggtgctggcggctctggcggccaagctgatggggcggaaggtcatttactacggccactccactatggaggatttccgcagatcctttcgaggctcggaccggctggcacccctcttccgcaagtggatcaccttctgctacagcctgggcgacgtggtgctgacccccacggaatactcccgccgtttgctggagagctacggcctcaagccgccggtgtacagcatttccaacggcgtggatacagagttcttcgcgccggatcccacccggcgggcgtccttccgccgccgctggggcctccgggaaggggagcgggcggtgatttccgtgggtcacaccattgcccggaagggactgccggaattcctggagctggcccggcggatgccggaggcccgtttcctctggttcggctggacggatccccatctgatcccccaggagatccggcaggccatggaacaggcgccggagaatgtgaccttcgccggctttgtagaccgggagacgctgcgggaggcatattgcggcgcggatgtattcgccttcatgagtcatgaggagaccgagggcatcgtggtgctggaagccctggcctgcggcattcccacagtggtgcgggacatccctgtttacaacggctggctgcgggagggacagaatgtctacaaggcctccggcacagacgagttccagcagaaggcggaaggacttctgacagggacattgccggatctgacagccgccggccgccgggtggcggaggagcggagcctgtcggtgatgggggagcgcctgcgggaggtctaccggcggatggacattctgccggcagcgcagccggcggcaaaaacgaacctccctcaggcggagagacccgtacagcacagcttcacaccttaattcccggtattcctacgggataaggataccctggcgagggatggttccccatagcgcccgcttccattccggttctgcgggccgccgatgaagagaaaaagcgcctccggcaaaagccggaggcgcttttggcgcgtttactggggcagcgtctggaccacgccgcgggcacagtccacagagaccatggcaccgtccttcaggcgctggacggcgccggcggcgcccacgatcaccgccttgcccaacgtcaggcccacagtggccgcatggccgttggtgccgctctcctcgctgatgacagcggccgcctgccggatatagggcaggaggtcgttggtggtgtagggcaccaccagcacatccccggggcggaacttggcggccacatcctccagtgagcggcagacgcacagggggccggaggcgttgctggcccccacgccgacggcgttgagcagggccccgcccaccagatggaccttgatcatattggtggtgccggagacacccacgggcacaccggcagtaatgaccaccagatcgccctgcttcacgagttctgccttctctgccgcctggatggcgaactcgatcagctggtcggtgttctgggcatagggcatcagcaggggcaccacgccccagtacagggccatctgccgctggacccgctcactgagcaggcaggccaccaccgtggtgccggggcggaaacggctcaccagccgggcggtggcaccgctctggctgacggtgaggatggcatcggcaccgatgtccatggcagtggtgcaggcggcatgggccgtggcggcggcgatggacaggcggctggaacccggcaggttgcgcatccgcttggcgtagttgatgtccgcctcggtccgcagggcaatggcatccatggtctgcaccgcctccacggggtatttgcccgccgctgtctcgccggagagcatgatggcggaggttccgtcgtagatggcgttggccacgtcggtgatctccgcccgggtggggcggggattctccatcatagagtccagcatctgtgtggctgtgatgacaggcttgccggcggccacgcactgggcgatcatgtccttctggatgatgggaatctctgtgaagtcgatctccacgcccatatccccccgggccaccatgatgccgtccgccacggacaggatctccgccaggttgctgaccccctcctggttttcaatcttggcgatgatctggatggaggagtctgcctcatccagcaggcggcggatctcccgcacgtcgtccgccgtgcggacgaagctggcggcgatgaagtcaaagccctgttccacgccgaagaggatgtcctcccggtcccgctggctcatgtagggcatggacaggcggatgcccggcacattgacgcccttgttgtttttcatggccccgtcgttttccacccggcagcggacgtccgccgctgtggtctccagcaccgtcaggcgcaccaggccgtcgtccagcaggatggtgtcgccggccttcacgtccccgggcaggtcggcgtaggtgatggagcagccttgctcatcccccacgatgtcccgggtggtcagggtgaactcctggccggtccgcagcatgacggaacctgcggcgaaggacttcagccggacctccggccccttggtgtccagcatggcggccaccggcaggcccagctccgcccgcagggccttcagggcgtccagacgacccttgtgctccgcgtggctgccgtgggagaaattgaaccgggccacgttcatgccggcctccagcatctgccgcaggacgccctccctgtccgtggccggaccgagggtgcacacgatctttgtctttctcataaataaaaatccacctttcggtcaaaagggatacaaactgtaagacagtttatcacaaagccgcagcgcaaaaaagtggaaaagtgttcaataaacaagagggatccgccaaaaggcccgtcagcgcgggaaggctcacatccccagcttttcccgcagggcggcgatcatctcttgatattcgccctcggagagcagcaccggcttcggattcgtgatggcaaaggaaccgccgaactcgaatccgccctcgtatttgggtacgatatggaagtgcaggtggggattcgtatcgccgaaggagcccaggttgatcttgtcgcagccccacagttccttcactgcaccggaggcccgggccagatcccgggcgaaggcggccagctcctccggcccgcactcgcacagctccttccggtggttcttcagcgccagggcgcagcggcccttgtgggcctgatccttgaagagatagagcacaccggcctccatctcgccgaccttgtacatgatggcctcccggccctcgtgatgttcatcgcagtaaaagcatcccatggctagatctccttttgtcagaatacggaggaaattttccccttattaccatacaacccaaaaccgccgccgtcaagcatcagttcaggattgcgccggggcagaggttctggtatcatcagggtatcaagaacgaagacggaggaggaatcgacatgaaactcggcttggtgacggacagcctggtagaccgctccctggcagaggcagcggccgtctgccggggactggggctggagcaggtggagttgggctgcggcaactggtccccggcgccccatgtggacctgaaagggctgacggcggacgccggtgcccggcaccggctgctggatactctgggggaaaacggcctcacgatctccgccctgaactgctccggcaaccccctgttccccggggagaagggagccggagacagggcggtggcggagggcacgttcctcctggcggagcagctaggggtggagaccgtggtgatgatgagcggcctgcccggcggctgcccggaggaccgcactcccacctggatcgtcacgtcctggccgccggagacggaggaaatcctccgctaccagtggaaggcggccgtcccggtgtggaaggcgctggccgcccgggcccgggaccacggggtgaagcgcatcgccctggagttccatggctggcagctggtgtacaatgtggagacgctccgccgcctgcggagtgaggtgggagacgacattctgggggtgaatctggaccccagccatctcttctggatgggggcggaccccgtggaggtggcccgcgccctggcggactgcatctaccatgtccacatcaaggacgtgcgcctggagccggctgccgggcagaacaccctgctggacaccaagggcgtgctggagttcgccagccgctcctggaacttcgtcacccccggcacaggccacgacgccgcctggtggcgccgctttctggagacgctgcaggactgcggctacgacggcgccctcagcatcgaacaggaggattacaccatcccgctggaggaggccctgcagaaggccgtgtccctgctgcggcaggcgctgcccgcctgaaatacgcaaagccccgcctcacgaacgaggcggggcttttttcagaacaggatcaccgcaggaaattccagtacagggtaatggccgccgccagcaggagctgcacggccaggatcaccggcacgcccacccgaaagacccggtggagcgtcttgtggcggaagaggtacatccccagcagggcacccacgctgccgcccaccacggccagaagcaacagatttttctccggcacccgctggcggaaccgggggtgtttggccaggagcttgtctacgccgaagatcaaaaaggtcacagtgttgatgagcaccagccaggcggccagcagccccaggggagagccgatgaaggcaacgatacggtcattgtgctctgtgggcagatagagtgtcttttcttccataacggccgcctcctgaaacagcactggactggccgggagttcccagccagtccagtgtagcagaagtttcagtttttggcaagcttgctgagttccacagcagtggctgccgccagcttggcgttgttgtacaccagctggatattggaggccagggagtcgccgccggtcagatccttgatcttggccagcaggaaaggcgtggtctccttgccgtggatgccctgagccttggcctcctccacggcctcgtcgatggccttgttgatgacgtccgcgtccatggagtactcctccgggatggggttggtcaccagcatgccgccgcccaggcccatatcctgcttgacataaaaggctttggccagctccgccggggtgtcgatctcatagtccacggcaaagccgctcttccgggtgtagaaggcgggcagctcgcgggtgccgtagccgatgacgggcacgccgtgggtctccaggtactccagggtcagccccaggtccagaatggacttggcgccggcacagaccaccatcacgggggtgtgggccagctcctccagatcggcggagatgtccatggtggtctcagccccccggtgcacgccgccgatgccgccggtggcgaacacggagatcccggccatgtgggcgataatcatggtagtggtgacagtggtggcgccgtccctgccctccgccaccagcacgggcagatcccgacggctggccttggccacggcagggccggtcttgcccaggtagtcgatctcctcgggagagaggccggccttcagccgcccgccgatgacggcgatggtggcaggggtggcgccgtgttcccggatgatcttctccacgttcagggccgtctccacattctggggatagggcatgccgtgggagatgatggtggattccagtgccaccacgggacgaccctcgtccagggccttctgcacttcaggggcgatgtcgagatacttgttcagagccatgataaaaacctccagatttgaattttggttattcgatggggaatggggtgtcaggaattggaaatggggggaccgggaactttaaagcccagcccgcagcttcagcgcttccgcgctcatggcggggttgatggtctccgccccctccatggcgatggcggaggctgccagacccgccttggcggtgcccgtcagatccgtgcccgcaagataggcccaggtgatggctgccatgaaggcatccccgcagccggtggtgttcaccatctccgccggcaggacgggcaggtgcacccgctccccggaacggtcggcggcgaacacgccgtctccgcctagagagatgaatacccggtgaagaccggtggccagcagggcgtccgcggcggcgcgcaggctggcctcatcggtgatggccacgccggagagcagctccgcctcgatgcggttgggcttgagggtgtggagcctgcccagcaccggctgcaacttcaccgccttggcggtggagaccgggtcggcaaagataggcaccgggcagttctctgccagataggcgatgctctccgcgggaatattggtgtcgatcaccagcacctggctgccggacagcagcttctgccgctgagagagcagctggggtgtcagatggcggtagatgtccatgtcactgaccgccagcagcatgtcgcccttctcgtcattgatgaagagataagtggaggtgtgcccctccgggatcaccggggattgggagatgtcgatgcccagttccccgcagctggcggcgatcttctgggcgtacaggtcgtcgccgaaggcggtgaccatccgcacgtccaggcccagaaggctcatgttgtgggcgatgttccggcccacgccgcccagactcatccgcaccgcgccggggttggagtcccggtccaccggcacctccgacggccagccgccgatgtccatgttgacgccgcccaccaccgtgacatagggcgctgtatggacgatgtagcctttgccggtgatgtagcccttcttcatcaggttggagatgtgcaccgccacggaggaccgggtgatgccggccttctccgccagttcctgctgggagatgagagggttttcttcgatccagttcagaatctgccgttcccgctgggtcatggcgccgcctccttgtaagcaaaaattaagatatataatctaatgcttagtttatctgtttttttgaaaaagtcaagacccaatttttagccgtcagccgtctgtgggacggggatgcccgcttcgcctgccgcaggtaccggacagagaggtgctgatggggcgggagcttcatgttctcccagcggaataaaaatcgcgccggaagtggaaccaaaccgccgcctttgccgactatacaggcagaggaggcgatgcttcatgaaaaaatggtgcctgtttttgagcctgtatttctgtatctgtctgctggcagcctgcgccggaggggacgtctccgccggtgcgggggccgattccggcggcacacccgcggaggagacccggaccggaggagagacgacggagcccggccgggtgacggagaccttccggctggtgactgtgggggacggcgatgatccggcttctgtgctggccgggacggacggcggggccggagctgtgtacaccctggacctcttcagtgtggaagacctgactatcgagggatacacccaggaggagatggacctgctggactggtctcccatgcctggcgctctggtggaggtcacctgggacggctccgtcatggagtcctaccccatgcggttcggcacggtggcctccgttcgcatcctggaggacggctttgacgatctgtgccggctgcacctggacgtgctgaacgatctctgggaggtggaccccagcctgaatgatggcatcacggagctgggggtggacctgtccgggacctccctgccggaaagcgaacaggccgcggtggcctatgccttcggctccgcccacgggctgatggctatggagggcacatatcaggacttcgtggacagcgggtatatcgacggggaagcactgttctggaaggacggctgcctgttctccgtcaaagagacccaggatgaaaacccggtgacctttaatctgcccagtttcggtcctggggacgagatgccggactacagtggcgtccgctttgacgcggagaagtggcgcagcggcctgggggcctatttcttcacagactgcaccgctgtccgaaatggcggcggccagtggggcgattacaccgtgggggcggaggcgatcgcctgaaaaccgggaaaacgcccgttccctcttgtaaaactatttgaaatggagtacaatatccatgattatgcagccatttccagcaaaaacaagaaaacgggtgaagtttatgagctatacgaaaatcgcggccatctacgccgacagcgaggcactctccggccagacggtcaccgtgggcggctgggtccgcaccatccgggacatgaagaccttcggcttcatcgagctgaacgacgggtcctgcttcaagaatctccaggtggtcatggaggccgggacgctggagaactataaggatatcgccgcccagaacgtgggcgccgccctgatcgtcaccggcaccgtcgtcctgacgccggaggccaagcagcccctggagctgaaggccgcctccatcgaggtggagggcacctccacctccgactaccccctgcagaaaaagcgccacagcgtggagtttctgcgtaccatccagcacctgcggccccggacgaacctgttttccgccgtgttccgggtgcggagcgtggcggcctacgccattcatcagttcttccaggagcggggcttcgtctacgtccacacccccatcatcactgccagcgactgtgagggcgccggcgagatgttccgggtcaccacgctggaccccaaaaatccgcccatgaccgaggatggggaggtggacttctcccaggacttcttcggtaaacctgcgaacctcaccgtctccggccagttgaacgcggagaacttcgccatggccttcggggacgtatataccttcggccccaccttccgggcggagaactccaacacccagcgccacgccgccgagttctggatgatcgagccggaaatggccttcacagacctgaagggcgatatggatgtggcggaggccatgatcaagttcgtcatccgtcaggtgatggaaaagtgccctcaggagctggcctttttcaacagcttcgtggacaagggcctgctggagcggctggagcacgtggcctcctctgacttcggccgggtgacctataccgaggcagtggcgattctggagcagcacaacgacctgtttgactacaaggtctcctggggctgcgacctgcagacggaacacgagcggtatctcaccgagcaggtgtacaagaagccggtgttcgtcacggattatcccaaggagatcaaggcgttctacatgcgcctcaacgacgatgggaaaaccgtggccgcggcggactgcctggtacccggcatcggcgagatcatcggcggcagccagcgcgaggagcggctggaaatcctggaaagccgcatccgggagctgggcatgaaccccaaggactactggtggtactgcgacctgcggcgctacggctcctgcaagcacgcgggcttcggcctgggttttgaacggctggtgatgtacctcaccggcgtcagcaacatccgggacgtcctgccccacccgagaacggtcggcagtgcggacttttaaaaaataaaatcgactccggcgccctgtccatctgcttggacagggcgccgttttttgcggttgtggggacggagggcggtacccttctgcgcattgccggcggtccgctgcaacagtttttcttgaggagaggcggggccctagtgtatagttaggaaaaactcaaaaggaggaaaaaaatggaaagcgatacaatggaacttctgcgcctgatgctggcgcatctgcggcccaggcttcagggacgggacgaagagtggcaggcgctggagcggaagcagcaagaactgatggccagcttccgggaaacccacggcggggacgtgccgctgctggaggaggtcctggagatggaggacgcctgggctggcgcgggagaacgggcctgcgccgcccacttctttctggggctgcaaatgggcctggacctggggaagctgaactatctgcgggaggaataggcgctgccccggagtgcgcgtgaaagagagcgcccggaccacgtggcccgggcgctctctttcagttagatgaagaactgtgccggatcaggccagcacccgcacgcagcggtcgatgagggtcatgtggaccgcttcgccctctgcgaagcgcttggacagctgggggttgtagacctccacgatgatgggctggtcgcccagcatgacctcgtactccactttggcaccgtagtaagtggcccgggagacacggccggacagggggccctcttcctcagagaggagaatagactccggacgaaccgccaggcagcaggggccgtccttctggacgccctccatcttgccgggggcggggatggggaaggtgtggccgcccacttccaccagggcgttctcgccgtccatgccgcggaaggtgccgtcgatgaagttggccttgccgatgaagttggccacgaaccggctgttgggctgctcatagatctctgtgggcgtgccctgctggcagatgacgccgtccttcatgatgaccacccggtcggagatggccatggcctcggactggtcatgggtgacataaagggaggtgatgcccagccgtttctgaagggcccggagctcgtcccgcatgctctcccgcagcttggcgtccaagttggacaggggctcgtcaaacaacagcacgctgggctcaatgaccacggcgcgggccagggccacccgctgctgctgtccgccggagagctggttggggaaccggcgctccataccggtcagctgcatcagctccatgacggcgttggtgcggcggaccacctcatcctgggagaccttggccactttcagaccgtaggccacgttctcccagatgttcagatgggggaacagagcgtagctctggaacaccatggagatgccccgcttgttgggggggatcttggcaacatcccgctcaccgataaacacgctgccgctggtggggtactcaaagccggagatcatccgcagcgtggtggttttgccgcagccggaagggcccagcagcgtcaccatctcgccgtcctggatgttcaggttgatgtggtccacagccacgaaatccttgccggtatccggctgctggaagatcttggtgatctcttttaaaaccacgccggagctcttttggcccagcgccgacttttccatctgcttgctcattttgtttcctccgttttctcgtgaatgcctgcgcccttgggcaccctggagcggggggccagcagcaggttgatcaatccgttgaaaatgccgataaacaccagcaggattacgaccatcatagtgacgaaggccgcggcctggctgtattttgcctggtcaaagagcgtgtagatcttgctggtgaccagatcccagcggggagagaccaggaagatgatggcgctgacggcagtgatggccttcacgaaggagtacaccaggccggagaagaaggcgttgcgcagcataggcagggagatccggcggaaggagtagccgctgccggcacccagaatggtggaggcctcttcaatggagttgtcgatctgcagcagcgtggtggtgccggactcaatcgccaccggcatattccggaacacgaacacgatcaccaggatggcagcggtgccggtgagcaccaggaagccggtgttgaaggccaggatgtaggcgatgcccagcacagtgccggggacggcgaacatcagaacagaggacacctcgataaaccgtttgccgtagtagtcccgcttggcggtgatgtaggcgatgaccatgcccagcaggccgccgatcagcgctccgatcagacccaggataatggagttccgtaggctgtcccagccctgctgcaaggcgcgggtgtactggtccagggtgagggtgtagtcgtagccccaggtcttgacgaaggaaccaaagaccactgtgccgtagaacaggatgatgaccgcggccaccaccaggcagacagcgaacaggggccatttgatatggggctcatcgatgagcttgcgggcctgggtgggcttgcccgtgacggtgacgaaactctttttgttgacccagtatttgttcagcagataggccagcatggtaggcaccagcatcaaaagcgccagcacggagcccttctgcatgtcatagctgccggtgatggtttgatagacttccacagataaggtggtgaaatcgccgccgatggtggcgggattggagaagtcctccagagactggatgaacaccagcaggcagccggagatgatgcccggcagggacagcgggaaggtgaccgtccagaaggtgtgccaccggctggcgcccatgttgcaggcggcgtcctccaccgatgcgtcgatggaggagaggatgccggagagggtcatataggcgatggggaagaaactcagcacctgcaccacgatcaggctgcccatgccgtagacgtcgttgtccgtgatcttcagcagcccgttggtaatcagcccctgccgcccgaacagaaagatgatggacaggcacagaatgaagggcggggacaggatgggcagggtggcgatggtcttcagaaagcccttgcaggggacgtttgtgcgggtgatggtataggcgaagatgtagccgatgaaggtggcgatcactgccacgatcactcccagcaccatggtgcggccgaacgtctttaaataccgggaggtggaaaagatctccgccgcggtagccagggagaaagtcccggacgcatcggtcaggctgaagagcagaatcttcaccaggggatagatgacgaataaaagcaggagcacgatgaccgtaaggatcgaaatcagcatgatgggctgacgcatgatcatcttggattcgttccgccttttcaggcgggcggcgcttttgccgcccgaaccagcagcgtttgccatttgggttcctcctgttgattttcaagcgtttggcaagaggacttcctccccgccggggaggaagtcctgcaggcatagagagaatcttccggaattactccagattttcagagctggcgatgttcgcctcgaactgcgcgacgaactcgtccttgtgctcggcagcccagacggcatcatagtcgatgacggccacggagtccagcgtcaccagaccctcggccggagtggcctgggagttggtgggcacccggaaggaattgttctcggcatacaggttctgaccctctgcagagcacatgaagtcgatgaacttcttggcgttttcctgctcgtcagcgggaccgcccttgatcagggccatggcacccacctcatagccggtgccgtcggtggggaaggacagctcgatgggatagccctcggtggtgggctgcagaccgtcgtgagagaaggtcagggcaatggccgcctcgcccagggccacgccgttgggagcggcggaaccggacttggtgtactgggacatgttcttgtccagctccttcaggtaatcccacacggcatcctcacccttcagctggatcagcgtggccagaacggtgtaggcggtgccggaggtggcggggtgggccataatgatcatatcctgatacttgggatccagcaggtcatcccagctggtgggataatcataccctttgtccgcgaaccagtccttgttgcaggcgaaggcgatggcgcccacatagatggggttccacacgccgtcggggtccagatagttctccggggtgttggacagctcgggggactgataggcctccagcaggccctggttggaggcggcgatgtagttgtcggtggagccgccgaacatcagggaggcctggggattgtccttctcagcagccacacgggtcagcatctcaccggcggagagccgcagagcgttgaccttgatgccggtggcctcctcaaacgcgttgaagtagtaggccacctcggcctcggggaatgccgtgtagacggtcagctcgttgctgccgctggactccccgccgtccccttcggaggaggtgtcactgttgccgccgccgcaggcggtgagcattcccagcgtcatggccagggtaaggagcagcgcgaatagacgtttgctctgtttcataagagtgtctccttttcaccaattttaggttccggatcctccgggattttagggatattgtagcatctccggaaaagagtgtcaataattggtaacgtttgcacacaggaagaaccccataaggcaaagacaaaaatagaaaaaatgtatttacataagagacaaaaatggtggcggcgctggctttttccggaagttttgttaaaaagcggaaggggaaattggtgaaactataaaatttatgacagcgcttactttcaaacacgtgcccttcaaaaccgtttcgtatccccgggacccggctggactgaaattgcccaaatttttctccaggctttaggcaatcagccgaagatttccgccagagtgtggaagatattgacttctcttccggcttgtgataaacataaaagaaacaatttgggcgctttgggttcgtcgaaatttgtcaagaatgctgagaatggcgccgttcaaacagctttatttaaccatgcaaccgtttccgggaatatgcggcaacatctgccgcagaggtgacctgccgaaagagaggggagagttggcggagccattcctcccctttttattgtttgactgcccggcgcggggcggagagaggagtgtgcacagaatgatggaaggactggcatacctgcgggagatgaacgtggcctccgtcctgctgcgcctgactgtggccatgctcttcgggggcttcatcggactggagcgggagcggaagcgccggccggcaggcttccggacctatatgctggtatgcttgggcgcggcgctgaccatgctgctcagtcagtatgagagctacatggtgacccacgcttggcatgagaccgccatggagatcggcctgcggacggatgtgtcccgcttcggcgcccaggtcatcaacggcatcggctttctgggtgcgggcaccatcatcgtcaccggcaagcaggaggtgaagggactgaccacggcggcgggcctttgggcgtccgcctgtatgggtctggccatcggcgcgggattttacgagtgcgtacttttgggcttcctgctgatcctgctgaccaaccggctgctgcccttcgtggaggatgccatcatcgaaagcgcccggaacatgaacatctatgtggaattccagacgctggacaatctgggggacatcattgcccgcatcaagtctcagggcggacagatttacgaagtggatctggaccggggccgggaggagcggtccaagaatcccagcgcggtgttctccattcggctgcccggcaggcactaccacgtccgggtcctggcggcgatctccgagttggagagcgtctacaccattgatgaaatctgagggaggtgcggagattgctgccgatttttgacggtgtgcgggatgtgaccgtgctgtccaccacgctgcggatgctgctggcggtggtgtgcggcggtctcatcgggctggagcgggagtacaagcgccggccggcggggttccgcacccatatcctgatctgcctgggggcggccatgacgaccctcaccagccagttcctttatttgaacctccattactacacggacatggcccggctgggagcccaggtggtggcgggcattggcttcatcggcgcaggcgccatcatcgtcacccggcgccgccgggtgaaggggctcactacggcggcgggcctctgggcggcggccattgtgggcctgtgcctgggcggcgggttctacgagggcggcatcttcgccacggcgctgattctggcggcggagatgttcctgtccaagctggagtaccggatgctggacaacgccccggaggtgaacctctatatggagtacagtaacaagacctgcctggacaatgtgctgcggctgttccgggatttgaacctgaaggtgctgaacatggagattacccgctctacggagacggagacgcacaatgcctgcgccctctttaccctgcggctgaacaagcggtgccgggtggagcagctgatccccaagatgaacgccacggagggcgtggtgtcggtagaggagttgtaacagcggcgcaagccggaagaataggagagagactatgaaaaaaacgtatgacgtactggtgatcggcccggtgtccctggatcacaacatcgactatcagggcaacgaacgcaaggaggtgggcggcgccgtggtggcctccggctttgcggctgccaaaagcggcaaccgcaccgccgtgtttaccaagctgaatcccgcggatgcggatgtggaggagcggttcgccgggtccggtgcggatgtgtactggaagccgtctcaggccacctgctccatccgcaaccagtatttcaccgccgacaaagaaaagcgggcctgcacctccatgggggtgtgcgatcccttccggttcgatgagctgccggatatcgagaccaagatctatcacttcgccggcctggtgtacggcgacttcgacggtgccctctttgccgaggcagccaggcacggcaaggtggcggtggatgtccagtgcctgctgcgccatgtggaggcggacaggaccatggccttccacgactgggcggaaaagaagcagtacctgccggtgatcgactacctcaagaccgacgcggcggaggcggagatcctgacgggcctcaccgatcgggcggaggccgccaagctcctgcacagctggggcgccaaggaggtcctcatcacccacaacaccgaggtgctggcctacgacggggtgaccacctacacctgtcccatcaaggcacggaacctctccggccggaccgggcggggcgacaccaccttcgccggctatatctcggagcgccagcgggccggggtggaggaggccctgcggtactgcacggccctggtctctctgaagatggagacgccgggccccttccagggcacccgacaggatgtgctggattatatccgggagttttattgagaaggcacaggagccgtccgcagacagcggacggctcctgtacaaaaactccattgacaacgggtattgtccgtgataaggtaacaagtgtcaattatataaaggcaaacgaagtccctagagaaacggcgcaagcctgccgaaggagtgaaactctcaggtgtcccggcacgggatgaggactagggatggatgtggctctggagaagctcagatgagtaccgaaggtgcaaggcgggaaatcccgctgaatctctcaggtaaaaggacagagtaaagggcaggcccttccgcacagcggagggggccggcgctttgttgggctgggcagggtctgtccggcccttttcgtttgcggacaaggagagagaaaacatggacatggatctgttggccgcaaaggtcagcgaactggccggctttgtgtggaacggcctgctgctgtatctgctggtgggtaccggcatcatcttcaccatccgcacccggttcatccaggtgcgcaaattcggcgccggcttccggcggctgttcggcagcgtgaacctcaacggcgagaaggccggcaaggagggcatgagctccttccaggcggtggcaacctctatcgccgcccaggtgggcacaggcaacatcaccggctgcgccaccgccatgatctccggcggccccggcgccatcttctggatgtggctggcggccttcttcggcatggccaccatctacggcgaggcggtgctggcccagaccttcaagaccaaggacgagacggggcacgtcatcggcggacccgtctactacatccggcaggcattcaaggggaccttcggcaagatcctagcgggcttcttcgcgctggctatcatcttcgccctgggcttcaccggcaacatggtccagtccaacgccatcagcaacgccttccaggaggcgctgggcatccccacctggatcgtgggcgtggtgctggcggtggtggccgccttcatcttcctgggcggcgtcacccgcattgccgccgtcacggagaagctggtgcctgtcatggcctgcttctatctggtgggcggcctcgtcatgctgattgccaatattaccaacctgcctcacgcctttgccctgatttttgagggtgccttcaacccccaggccatcctgggcggcgccgtgggtatcggcgtgcgggaggccatgcgctacggcgtggcccggggcctgttctccaacgaggcaggcatgggttctaccccccacgcccacgccatggccaaggtggaaaagccccaggaccagggcgttgtggccatggtttgtgtgtttatcgacacctttgtggtcctgaccataaccgccctggtgatgattaccagcggcgcgctgaacgtgggcgacatggctgccaatccggcggcggagaacatggcccaggtggcgttttccactgtgttcggcagcttcggcaatttctatgtggccatctgcctgctgttctttgccttctctaccatcatcggctggtacttcttcggcgagcagaacgtgaagtatctattcggtgtgaaggctgtcaaggtctacgcctgcattgcggtggtgtgcgtggccctgggggctgtgctggaggctcccctggtctggaacctctccgacctgttcaatgcgctgatggtgttccccaacctgctggcgctgctggccctcagcgggctggtagccaaggcggccaggggaggggacgccctgcgcaaataagcgccccgcccagaaagagaccctccacccgaagttccgggcggagggtctcttcaagcatcccgggcggggagggccggaccgccctggccgtaggggagggtgaagaccgggatgccctccatggccggggcgatggcgtacatgggataaaaaaacgacagaccctccgccgtaagatagaagttctgcgggttgaaatggcgccgcagcagccggcggacgccctcatggtaccgggagatcccagccgtctcctgccgctggatctccgcctccgctgcctccatcagccgccgcttccatccgctgcggcggggaaagaaggcggacagaggcaccggatagccggaggtcagatcccaggtatccccatggcgcagaagcgtggggcgccctgaaaagccgctctcccgggactgggtatacaggctccagaggccgccgtcgttgtaggtgacctgataggtcagctccgcccggaagtggggcaggggcaggctggccgccagagcagcgcggtattcctccgccgccgcaggcaggaggtacgtctcacaatagcgtaggaaggaacggcactggagctggtaataccgccggatgcggcgggagactttgtccgctgctggaactggttccggcagggagatggaggcggagagcacagggatctcctctacggtccattcccgctccgcggtcatggcctctgcgtgcagctgggtgagaggttcgttcataggcgccgctccttccgaaaagatgctgttctgcaccagcctatgccctgccgccgggcggggtgactggacacgctttaaagtgcaagaaattttttctgtccggagccctttactttcacgcggcagagtgttaaaatacatcttggcggcgaagcgccgcaaatctgttggagcctcccagaaagggtactggatatggtaaagatcggcaagaaggaaaagaacggcgagctgtacaaggcaattctgctgctgaaggacgagcaggagtgctatgagttcttccaggatctgtgtaccgtgtcggagctgcgggccatggagcagcggttcgaggtagcctccctgctggacgacggcatgatctataacgagatcctggagcgcaccggcgcctccagcgccaccatcagccgggtgaaccggtccctcagctacggcaccggggcctacgagaagattttcgcccggtacaagaagcgggacaaatgagcagttatgacgccctggccgccagctacgatgccctgacagtggatgtggaataccgccggcgggcagactacctgacgcggcagttccacagaagcgccctcccggtggagacggtgctggacctggcctgcggaaccggcaccatggcctgcctgctggcggagcggggataccggatgatcgccgtggacggatccgaggagatgttgacccaggcggcctggaaggcggcggcgttggagcagccgccgatgttcctgcaccagtccatgccccgcctgcacctgggcatggaggtggatgcggcgatctccaccctggacgcgctgaactacctcacccggacggcagacctgcgggagacgctgcggcgggtataccgctggctgcggcccggcggactgttcctattcgatgtgaacaccccctacaagctccggcggatggacgggcaggtctatctggacgagacagaggacagctactgcgtctggcggaccttctacgcccccggccggaagatctgcacctatcaggtggacctgttccggctgaacgccaacgggagctgggaccgggcctttgaggagcaccgggagcgggcctgggggcgggaggagctggagacgtatctgacggaggcgggcttcggcgctgtcaccgtcaccggcgacctcaccagccgtccaccggcggcggaggaggaccgctggattttccggtgtcaaaagccggtcagaccaagataaaacaggagtttgtacaatgagcgatcagttgatccgggccatctccaaggatggccatatcaaggccacggcagtttccacccgggcgctcacagagcgcgcccgtcagatccacaaggctctgcctgtggccacggcggcgctgggccggacgctggctgcggtctccatgatgggcaacgccctgaaggaggacggggccagcgtgacgctgcagatcaagggcggaggcccgctgggaacgctgctggcggtgtccgataaccagggcaacgtccggggaacggtggacaatcctgtcgtggacctgcctctgcggcccgacggcaagctggatgtgggggccgctgtgggccatgagggtacgttgacggtgatccgggacctgaacatgaaggagccctatgtgggcagcgtgagcctgttgggcggcgaaatcgcagaggacctggcggcctatttcgtggagtccgaacagatccccacggcttgcggcctgggggtgctggtagaccgggaccagagcgtgctggccgccggcgggtatctgatccagctgctgcccggcgccggcgaggatgtcatcgccaaggtggagggcagcctgatggccgcagggccggtgacgggacttttgcggaatgatccggacccggaggctatgctgcggcacgctctgtcggatttcgacctggagatcctggagaggagccccatcgagtaccgctgctactgcagccgggacaggatggagcgggccctcatcagcctggggccggaggaacttcaggccatgatcgacgagcagggcagcgcggacctcacctgccgcttctgtgacaatgtgcagcacttctccagagcagatctggaggccatggtccgggggctccagaaaaaaatgtaaaaaaattaaatttccagttgacagaccgggcgtctttgagtataataacttttgccgtctgaaatgagcggcaatcggggagcatagctcagctggttagagcacctgccttacaagcagggggtcactggttcgagtccagttgttcccaccaaagttatacatggcccggtagttcagttggttagaacgctagcctgtcacgctagaggtcgacggttcgagcccgttccgggtcgccatctcccacgagatggagttccatctcgtgggtccccttggggttgcaattcccctcccgcgccgtgcggcgcggaaaagatttgcccagatagctcagttggtagagcaggggactgaaaatccccgtgtcgctggttcgattccggctctgggcaccacttgcgggcatagctcatctggtagagcgccaccttgccaaggtggaggtagcgagttcgagcctcgttgcccgctccactgagaatgcccacacaagatcgtgtgggcattctcagtggaaaagaaaatttaaaaaagcagtggacatttcggttcaaactgcatataataaaatagaagcaacggtgacatagccaagtggtaaggcaagggtctgcaaaaccctgattccccggttcaaatccgggtgtcacctccagaaaaacaaccacatcgaaaagatgtggttgtttttttgtctaaatgcattcatgggcgcaggggattggattccgcctgtgcccgcttttctttttcagcggaaccatccgcacggcggaaaggctctgccccgcaatcggaccgcaaagaatacggctccgctcgcctatgcgattcgattgcggggacgtgtgcctgcggatgctgctttgacgaaaatggatgggaagatggcggacttttttggggaaaaagatagctaaaacggcgaattctttacgaaaaatatacaagagcctgtgagaaaaacgtgctataatgagttcgaataaacagagatgtgggagaccagcccccgatccgccggcgcgccctccaggctgccgtacgggtctggggcgttttccctagaaggagtgtatatggcacatatcaattcggatattctgcgcctcggcgtggatgtggggtccaccaccgtcaaagcagtggccctggacccggctgacaacagcgtactgttcacccgctatcagcggcataacgcccatcaggcggataccgtccggcagctgctggaggaggcggccggtcactttcccggcatgcggttccgtatcggcgtgtgcgggtccggcggacggcccattgccgccgccctgggggcctgctatgtccaggaggtggtggccaacgcggcggcagtccgggccttgtatccggaggtccgcaccgcggtggaactgggcggacaggatgccaaggtgatcttcttccgctatgacgaggccagcggaaagctccagacctccgacatgcggatgaacggcagctgcgccggaggcaccggcgcgtttatcgatgagatcgccacgctgctgaacgtgccggcggacgagttcgagcaactggctgcccgcgggaagaccgtttacagcatctccggccgctgcggcgtgtttgccaagacagacatccagcccttgctgatccagggggcggagcgggcggatatcgcgctttccaccttccacgccatcgccaagcagaccatcggcggcctgtcccagggactggagctgacggcccccatcatctttgagggcggcccgctgaccttcaaccccacgctggtgcgggtgtttgcggagcggctgaatctggaggaaagggatatcgttcgaccggaccacccggagaccatcgtggcccggggcaccgccatcgccatcgacgagctgttccccggacaggaggacgccatgaccctggcagaggccatggagcggctggacaaggccccggcccagaccgaagggccctccggcaccggcaggcccttctttgccagcgacgaggagcgggaggtctttctccgccgccaccgggcggagctgcgccagccggtggatgccgcggagcggaaggtcctgcgggggtacatcggcatcgactccggctctaccacctccaagttcgtctttatagacgagaacgagcaggtgacggacactttctacgccaacaaccagggggagccgctgaaggtggtccgggagggcctgctggccctggcggagaagtatgagaagctgggcatccagctggaggtgctgggcctgggcaccaccggctacggcgagcagatgctctctgctgcctttcacgccgactaccacacagtagagaccgtggcccacgcccggggctgccgccgcttcttcccggacgccacgtttctgctggacatcggcggccaggacatgaaggccatctggctgaaggacggcgtggtcacgaacatcatgctgaacgaggcatgctcctccggctgcggctcctttttggagaacttcgccgccaccctggggatgccggtggaccaggtggcggacgccgccttccgatctcaggcccctgccgagctgggcagccggtgcactgtgttcatgaacagcaccatcatcaacgagcagcgcaacggcaagcagcctgacgacctgatggcggggctgtgccgctccatcatcgagaacgtgtttacaaaggtggtccgcatcgccaacgtggcggagctgggggatcgggtagtggtccaggggggcaccttccggaacttcgccgtcctgcgggccctggaggagtatctgggccgggacgtgaccctggccccctatcccggcgagatgggcgctctgggtgcggctctcgcggtgaagcaggaggtggaggcccacggctacgccaacggccgctgctccgccttcatcggctttgacgcggtgaaaaacttccaatacacccgggagagcggtgtactctgcccccactgcaccaaccactgcagccggacgatcctgcatttcccggacggtggctgctatgtcaccggcaaccggtgcgaccggggcgccgttgtgatggaggcggcacctgcccataaggcccaggaagtgccggacctgttccggctgcggcaggagctgctgttcaagacatatccggtatcccccgtgcgggaggagcagagccagaccgtgggcctgccccgggtgctggagttctgggacagcatgcccttctggagtaccttcttccgggctctgggatatcgggtgaagttctcccatcccagcagccgcagacagtatgagagcggactgcagtacgtggcgtcggacaccatctgttttccggccaagctggtccacggccatgtgctggacctgtccaaacagggcgtagaccggattttcctgccctatatcctccacatgcccacagagaacaaaggggagaagagcccctacgtctgcccggtcatcatgggctactccatggtggtgcggaacttccagtcccccggggagcacttctccgtgggctttgagacgccggtgttccactggttcagcaagcaggaccggaagcggcagatctgccggtatgccgtggaacactgcggcgccacaaagcggcaggcggaggccgcttaccgtcaggcggagacggccatcctctctttccgccatcagctggtggaggagggaaagcgggtcatcgcggacaccggaaaggcgggcggtttcgccgtggtgctggcgggacggccctatcacacagaccccctcatcaaccacgacctgtccgggatgttcacccgtcggggcatcccggtgctgacggtggatagcctgcccggactggagaaggcggacctgcgccggtcccgtgtggagatcaccaatgacttccacgcccggatgctctccggcgccatggtgacagcggagcagccctgcctggagtacgtgcagatcgtcagctttggctgcggccatgatgccattttgtccgatgagatcatccgcctgctgggggagggcagcggcaagccgcccctgatcctgaaggtggatgagagcgaggccgccgggtctctcggcatccgggtccagtcctttattgagacggtacagctgcgccgctctgcccaggcggagcaggcggcctgccgcctgccggagccctacgcggtgaagtaccgcaaggaggaccggaagctgcggactgtgctggtgccaaatatctccgccccggtgtccactcttctcacggccttgatggaccgggagggtattcgggcggtgagcctgccggtgggcggcgtggagcagatccgggtggggaagaagtacacccacaatgacatctgcttcccctgtcagatggtcatcggcgagctgatcgacgccctgcagaagggaaactatccggaggactccgtggccgtgggcatggccaagctcagctgcgactgccggatggccaattacaccgcgattctgcgcaaggcgctggacagcgccggatttgaaaacgtccccatcctcaccacagaccctggcgacaccaagggtatccaccccggcgtgtccatgctgggggcccggtctgtgctgctggcggcgtgggccttctccatgctggacattctggaggagctgtgccggaagatccgcccctatgagacggcggcaggcgagacgaaccgcgtgttcagcgaatgtgtggagtggattgccgccgcatccaagcaggggctgggcaagatgatcggtgccttccggcgggccatcgaggcattccgggggctccgctatgaccgctcccgccgcaagccccgggtgctggtcaccggcgagctgctggtgaactttcatcccggcaccaacttccacgtggaggagtacctggaacgcaacgacatggaggtcatcctgccccgcatcacctaccagttccgcaaggacttccaggcggccatcagcgagatccgggacttcggtgcccatctggcgccctatcccttcgccctggacggcgccgtggagttcatccagcggtttttggagcgcattgcccggtcccatcccctgtatcacccggcggcccggcctcaggacctgtacagtgacgtggagcacttcatccccaagaccctcacctgcggcgagggctggctgatggcgggcgagatcgcccactacgcccaccagggggtccggtccttcatcatcctccagccctttgggtgcctgcccaaccacgtgtgcggccggggcgtcaccaagcggctcaaggaggagttccccggcgtgcagatcctgcccctggacctggatccggacaccagctacgccaatgtggagaaccggctccagatgctcatcatgaatcagaccgcggaggcggagcattccgcagctagtgtggaaccggcaccccaaaagacccggggcggttcgccccgtccggcgctgtcctctacataagcgcgggcgtcggctgtattttcagactccggagaggaatgcccggtgccgaggttcgacctggatacaaagaaggcagccgttcatgcgaacggctgccttcttgaattttcggttatcgggaatctcgggcatttctggaggcgcggaccggtcggcggtcacttcgcacgtgcaggaggcgtgcgggcgcttctatggacagtggagagcagctcccgcacctgctcccgggagaggcggggcggaagcgtgctgtacaagctccgctccacatcgtccaccagaatgctgtaccgagcctgcatgggcgcatccaacgcgtcccggaggggcccccctgccagacgttccagatactcccggggggtctcctggctttgacggcggcagcggcggcgggcgccccagtgctccagttccaggagggcggcacggggggttccggcgtaccgcagcagaaatgccctgacccgcaggcgctggcccagccgggagagcaggccacggcggcccagacgctgcctgacgagcccgtcgtcatcatcctcctccggcaatctgatgcggctgcggctgcgccagagccagcgcaccagagcagccactccggccaggaccagcgcggccagggacaggagcagcaacgccgtcaccagctgaggggcgatggcggggccggaggcgctttccacaggcagagcggcctcactgccgcctccggcggcggaggacatccctgcggacccggcggagcggccctggaagagagacgtcaggaaccggaatacagcggtcagggcgccctccagaaggctgccgacggcctgaaagatggggatcagctcccccctggcggccagcagcagagcgcaggcggccacagccagcacggccaggaccgctgggaccagcagggccgggagccgcccgaagggagaaccggcccgaatggtgttgcgtccggaggtgcgcatccccaccactgccagcagatccagcgccagcagcgccaacagaaccggcacccggtccagcagctgaggggcgaaggaggccacgatcagatagaacagcccatacaggcccatgtactccccggccccgtggaggtggcggaccgtgacaggcgtgacgccccagtggtatccccggcacagggggaagaggtacaggggcacctgaatcaccagaagaggcggataggtcaggtccagcgtgcggctgagcagggggatccagacggcgcagagaagaacgttcagcagcagaatctgccaaaagcggcggggcttttggagaaagaggctgttgcctgcggtcatcagcccgccagagagcagaaacccccacatggagaagggcggccggccacacaggagctgccacagaatatcggccgtcaggaagacaatcagcagctcggtggccagcggcaggcacttgagggcggtggtctttccatgtctcataggccgcctcctgcccgaaaagcattcaggtccaggacccgcaggagggggtgagactgttccccccaggccagcagggggacgcggtgccgctccagcagcgcacaggtaccggcgtccaggcggcggacatccccgcagatcagaaaggcgccggagagggtgcggaggcgcggcaggatctcgtccgccgtaatggagacagcggtgtctgcggcggccagcagcgtcaggactgcgggaagctgcagccggtcccggcaggtggcaaactgctccagccgcccggcggggcgggagatgagcagagacacggccacctcctcttccatcagctgcgccgccagggagcccaggatctccagggcagattcgaagtcctccggcggcaggcccgcgaaggaggcaccgtccagcaggaacgcggcccggcggggggagattttctcgtagatgttcaccatggcgccctgcccccgggccatcaggcggaagttcagggaccgggcgttgtcccccggctggtaggcgcggacgttccggatcacggtccggtcatcctgaaagccccgggcgccggtctccagctcccagctgttgcgcaggaaccagcgggtggacacggggaccagccggggaaacaccgccagcgtcacgggcctgggcagcgggatttccttctcccggacgcagaggcacaggccgtcgccggagagcagccggatccggtcaaaggacagcaggccccggtgctccgcctggaggcggctggtgtaggacatccgctgatgccccagcaggaaggagacgttcttttcataatagggcttctgcacgcccccctccgggagttccacggtctcccagcggtgctccggccggagggcgccgcccggctccagggggaagcgcaccgtcagccagaccaggggcagccacttggggttgtccagcgtcacccgcagaggacagggctccccggggaagacgcagctccgctccgcctggagggcggcgttcacgccgtccagcacatggcgggcccagaggcgggccgcggcggccacggcggcggccgccagagagaagatggcggcgggcagccgcccgctcaggctgaagcccactccgcaggctgccagggccaggatggagaagcgccccgtgaacaggctggactcggcgaagtccactgcagcggactcaggcgttctggccatgggcaaggacctccccggtctcccggcagggcacctgggccagtacggtctccaccacgccggccgcctccaggccggagagcgccgcctgatgggacagcagtacccggtggggcaggacgtagcgggccagatacttcacatcgtccggggtgacatagtcccggccggagagggcggcataggctttggaggcccggaacaggtcccgggacacccgggggctggcgccgcaggccagctccggctgctcccgggtggcctggaccagctccacgatgtacgccaccaccggatcggacaggcggacctgccggatctcccgggtgaaccgattgacttcctccggggagagcagggggcggaggtccgcaaaggcggctccatctcccacggttcggagcatggcggcctcctccctgggggtggggtagcccatggagagcttgaagaggaagcggtccagctgggcagcgggcagggcgaaggtggtctccgtctccacggggttctgggtggccaggaccatgaagggtggggccaggggataggtgacgccgtctacggacacctgccgttcctccatggcctccagcagggcggactgggtacgggggatggcccggttgatctcgtccgccagcaggatgttggtcatgatggggccgggggtgaagaccatctccccggttttctggctgtaaatgttcatgcccacgatgtctgagggcagcagatccggggtgaactgcacccgcaccatgccgcagcccagcaccgcggagagggccttcaccagcgtggtcttgcccacgccggggatatcgtcaatcagcacgtgcccgccggcaaacaggctggtgagtaccaggcggatctgctcacccttgccgatgatggccttgccgcactctgtctcgatctgctccgccaaatggcggagttccgtgaagtccatagtcgtgcctcccaggttccatgaaatacccctctattatatctaacccgaaagcggaccgcaagagcggatgccagctccgggaagacctgaaaaaatgcgtgaaaaggagggaaccctctggaaaagcggaagcgcctgtgctatgatacgaaacagaaggtcccgcaacaggaccgacgagaatttgggaggaatgcgtatgaagaagacattgtccctgctcctgtccctggtgctgatgctcagcctggcgctgcccgcatccgctgcggagacggagtaccccaccctggagggcggcgtaaccgagatccagaagtatggcaacatcgtcctggacatcgatccggcggacctgaaggacggcggctacacatacggcgacctgctgaccgtcaccgtcaacggcactgggtatgacatgcccctgtgcaccaactactccgatgtggacaccggcgcgctggtgctgcgggacagcgagggtgtgctgatcgccgccatcaacatgggggactttgcgaccagcaacggcctggccgccaaggtcaccgccgaggacggctcctacacctgggagttccccgagggccagtccctggagagcatcaccgtctccatctccatgaaggagcagggcggctactatgaccagtacctcatccaccagctgacccgcaccgacgagcgggcggactacgcctccgacgcggtgttcgccaacttccgcaacgtggctgtgggcgatctgggggagaacgcctttttccgcagcagcagccccgtgaacaacgagctgggccgcgcctcctatgccgatgacctggcagaggccggcggcatccaggcggtcatgaacctggcggattccaacgagctgatcgagggctacatcgccgccgagggcttcgactccccctactaccagtctctgtacgaggcggggaaggtgaaggccctgaacctgggcgtggacttcaccgctgccgacttcaagtccggcctggcggagggcctgcgcttcttcgcggagaatgaggggccctatctggtccactgcaccgagggcaaggaccgggccggctttgtctccgccctgctggagtgcctgatgggcgccacctatgacgaggttgtggcggactacatgaccacctatgtgaattactatcacctggaagaaggcggcgagcagtatgaggcggtgaagaacagcaacatcgtctccatcctcaccaacatcaccggcgctgcggagggcacggatctgaccactgtggatctggccgctgcggcagaggactatatgctggacgccggcctgaccgcagacgaggtgaccgccctgaaggcgaacctggctaaggactacacggtagagaccgaggctcccgcggaggagacgccggaggagcctgttccccaggcccagacctacaccgtggaggcgggagactgcctgtggaacatcgcctatgaggtgtacggcaccggcactcgctggactgtgatctacgaggccaaccgggataccatccgtgaccccggcatgatccacatcgggcaggtgctgaccatccccgctgcctgaaaatgcctgattcgtttttgaaaacagctcccggagcaatccgggagctgtttttttgcctttgtatgcgcttgcaaggattttacatagactttacagagtcctggtgtcggattttacttccggctgtttatactaagaccgtcccttgagcaacagacataggaaaaggagtaatcttcgatatgaaaaaagtattttcgctcttgctgtccctgaccatggtcatggctctgctggccggctgcggcggtgacaccacggctgacgacaccacggatgataccgcttccaacgacgccgcccaggaggagaccgctgagctgagcggcactgtggccaccgacggctccacctccatggaggaggtcatcggcgccctgggtgagcagtttatggccgacaactccggcgtgtccgtcacctacaaccccaccggttctggcgccggcatcgaggccgtgtccaacggcagctgcgacatcggcctggcctcccgcgcactgaccgatgacgagaaggcgggcggcttgactgagaccatcgtggccctggacggcatcgccgtgatcgtcaacgctgagaaccccgtctccgacctgaccctggagcagatcgcctccatctacaccggcgctgtcaccgattggtctgagttcggcagcgacgccggcgccatcgccgtgatcggccgtgagtccggctccggtacccgtgacggcttcgagtctatcaccggcactgaggaccagtgcgtgctggcccaggagctgagctctaccggcgccgtgatcgaggcggttcgtaccacccccggcgccatcggctatgcctccctctccgccgtgcaggatcagaagggcatcacggtcctgactgtgggcggcgtggctccctctgaggccacggtcctggacggcagctatgccattcagcgtcccttcgtgttcgccacccgcaccgatgaggccctgtcggacgcggcccaggccttcttcgacttcgccacctccaccgccgccagcgacctgatcgccaacgccggcgccgtgcccgtggcccagtaagacaacgcttgttttccaccctcatatatacggtcagccgccgtgcccaccactggggcggcggccgttccgctgaaatctggacggacgccttgtccgggaacaaaggagaaccttatggaacatgaaatcgcggggcaggctgtgaaggccgccatggacggcgcgctggtcggcaccgccgacaggaaaaaggagcccatgaccgggaaaaaagccctgaaggccatggagcgggtgatgaatgccctcttctttatctgcggcatggtggctgtggcgttcgtgctcctcatcagcatctaccttatcatctcgggcctgccggccattctggagatcgggcccatcaacttcctgttcgggacccgctggtatgcctctaccggagacttcggcatcttcgccatcatcctcacctccttcgcgggcacggcgggggccattctcgtgggggtgcccatcggcctgatgacggccattttcctgtccaaggtggcgccgcctaagtttgccgccgtagttcatgcggcagtggaactgctggccggcatcccctccgtggtgtacggcctggtgggtatgatcctgctggtgcccgccatccgggtggcctttgacctgccctccggcgccacgctcctggcggctatcatcgtgctggcggtgatgattctgccctctatcgtctccgtgtcggagacggcgctgcgcgccgtgccccgggagtatgaggaggcgtctctggccctgggggccacccatatcgagaccgtgttccgcgtcagcgtgcccgctgcccgcagcggcatcgccaccgccattgtgctgggcatcggccgggccatcggtgaggccatggccatcattatggtggcgggcaatgtggccaatatgccgggcctgctgacgccggtgcggtttttgaccaccgccattgcctcggagatgtcctacgcctccgtgggctccctccaccgcaatgccctgttctccatcggcctggtgctgttcctcttcatcatgctgatcaatgtgttcctcaacgtctttatcaagcggaaaaaggaggactgaccgaacatggaatctcataccctgtccccccggcgccagctgtacgacaagggcctgcgggtggtgctgtacttctgcggcttcctcacctgcgcgctgctggttctgatcatcggctatatcttctaccggggcgtcccattcatcagctgggagctgctgtctacccagtccagctatatcaacgacaccatcggtatcctgcccaatatcctcaacacgctctatatcatcctgctgtccatggtgatcgtgctgcccctgggcgtgggcgccgccatctatctgacggagtacgccaccaaccggcgtctggtggctgtcatcgagttcgccaccgagaccctcaccggcatcccctccatcatcttcggcctggtgggtatgctgttcttcatccagatgatgggattgaagaccggtgtgctggccggcggcctgaccctggtggtgatgatcctgcccaccatcgtccgcaccacccaggagagcctgaagaccgtgccggactcctaccgggagggcgccctggccatgggcgccggtaaatggcacatggtccgcactgtggtgctgcccaacgcggtggacggcatcgtcaccggctgcatcctggcggtgggccgcattgtgggcgagagcgcggcgctgctgtacaccgccggcttcggcctggtgctcaataactttgtgactgcgctggaatcctcctccgccacattgaccgtggccctgtatgtgtatgccagtgagcggggcgagacagacatcgccttcgccatcgccaccattttgatgctgctgacgctggtcatcaacctgtccgccaatctggtgggccggaagctgaagaaaaactgacgaggaggatacgaaatgtccaccatcattcaagtaaaggacctgaatctgtggtacggggcgcaccatgccctccacggtgtgaatatcgacattccggagcatgagatcaccgccctgatcggcccctccggctgcggaaagtccacctttctgaagaccctgaaccggatgaatgacctggtaccgggcatccgcattgagggggaggtcaactacgccgggcagaacatctacgcccccaatgtggacaccacctggctgcgcaagcagatcggcatggtgttccagaaggccaatcccttccctatgagcatctatgacaacgtggcctacggcccccggacccacggcatccgctcccgggccaagctggacgagatcgtggagaactctctccgctccgccgccatctgggacgaggtgaaggaccggctgaagaagagtgccctgggcctctccggcggccagcagcagcggctgtgcattgcccgtgccttggcagtggagccggagatcctgctgatggatgagtccaccagcgccctggaccccatctccacctccaagatcgaagaccttgcagtggaactgaaaagcaagtatactgtcatcatggtgacccacaatatgcagcaggccgcccgtgtctccgacaacacggcgtttttcctgctgggggatctggtggagttcggcaggacggagacactgttctccacccccacggacaagcgcacagaagactacatcaccggccggttcggctaaggagggacgtaaggtgagaaacagatttggcgagcagctggagcggctgcacgtggaaatgatccagatgggcgccctgtgtgaggatgccatctctgccgcggcccaggccctgatgaagggtgacgaggacctggcacgcgccgccggggaggcggagcgggagatcgaccagaaggagcgggaggtggagaacctctgcctgaagctgctgctgcagcagcagcccgtggcacgggacctgcgggagatctcctctgcgctgaagatgatttccgatctggaacggatcggggaccaggcggcggacatcgcggagctgacccggttcgtgcgtctgccggacggccccggccgccagcggatcgaggagatgtccaaggccgtcatccggatggtgacagacagtgtggactcctttgtaaagcgggatctggagctggcccgggaggtctgccgggaagacgaccaggtggacgacctgttcaaccaggtgaaaaaggagctgatcgggctgatcgccgcagacgccgactccggcgagctgtggctggatctcatcatggtggccaagtatctggagcggatcggcgatcacgccaccaacgtggcggagtgggtggagtactccattacggggaatcacccctccaacaactgagcggcctgcgcacaggcgcggcgccgatattgaaaagggggaggggccatgcttacctatgaggatgtgaaaaacaattctgcggtccggacctatatccagagggcggacgagtctctgaccgctctgggctatacggagcacagctttgcccacgtgacggcggtggcggaaaacgccgcctatatcctctccaccctggggtatccggagcggacggtggagctggcaaagatcgccgggtttcttcacgacatcggcaacctggtgaaccgggtggatcactcccagtccggtgcggtcatggccttccgcattctggacaacatggattgtcctccggaggagatcgccaccatcgtcaccgccatcggcaaccacgacgagggcaccggcatgccggtgaacgccgtggcggcggcactgatcctggcggacaagtccgacgtccgccgcagccgggtccggaatccggatatggccagcttcgacatccatgaccgggtgaactactcggtgaagaagtccgtcctgaagatcaacgaggagcacacgctcatcaagctgaagctgtccgtggacacgaagtacggctctgtcatggactattttgagatcttcatgggccggatgctcctctgtcgaaaggcagcggagaagctgggcctgcagttcaagctgatgattaacgagcagcagctgatctgaccggccgccggagggagacaccctccgtccctccagcggggcggagagattgaatggggagggatatctgtgatctatctgctggaggatgacgacagtatccgggattttgtgatctatacattgaacagccagggtatggaggccaggggctttccgctgccctccctgttctggcaggccgtgggagagcagatgcctgccctggtgctgctggatatcatgctgccggaggaggatggactcagcgtcctgaaaaagctccgggccacgccccgcacggccaagctgccggtcatcatgctgacggccaagggcacggagtacgacaaggtggtgggtctggacggcggcgccgatgactatgtggccaagcccttcggcatgatggagctgctctcccgcatccgggcgctgctgcggcggacggagacggagaacggcaccctccgctgcggcattctggaggtggatccggggcagcacatcgtccgggtccggggacaggagaccatcctgacccagaaggagtttgaagtgctgtgcctgctgctgcgcaaccccggccaggtgctttcccgggagcagctgatcgagaacgtctggggctacgcctttaccggcgagagccggaccgtggacgtccacgtgcggaccctccgccagaagctgggagaggcgggcgcttacatcgagacggtccggggctatggctacaagatcagccctgtgaactgacaggagggctggagagacatgacgaaacggatctttcgctccatcctgggcgtgtccctggcagtgctgctggccagcctggtgctgatcgtgggcgtgctccacggttatttccaggatcgggtctccggtgagctggagagtctggcagagtacatcgcccatggggtagaggagaatggcacggactatctcacagaggatctgcccggcagctaccggattacctgggtggatgcggacggcaccgtgctcttcgacaaccggcaggacccggaggagatggggaaccacgcccagcgggaggagatccgggaggcgctgatcctggggaagggacatgcggtccgctattcggacacgctttcccagcagacgctgtatgcggcccagcggcttgctgacggaacggtgctgcgggtgtccagcgcccagtattccgtctgggtcctggtactgcaggcgctgcagccggtggcgctgatgatgctgctggccttcatcctggccatggcgctggcttcccgggtggcgcggcagctggtggagcccatcaacgccatcgacctcaatgaccccgccggcagcgagacctatgaggagctgacgcccctgctgtccaagctccgcagccagcagaggcagatccagcggcagatgcgggatttaaagcgccggcaggaggagttcaccgccatcacggagaacatgagcgagggcttcctggtgatcgaccaggagacgcgggtgctgacttacaattccgccgtgctgcggctgctctacgcgcaggtccccacagaggagggagagagcgtctacgccctgaaccgggaggcgggcttccgccgctgcgtggaggaggctctggccggtcggcggtgtgagcagctgctggaaaaggacgatgattgccgccagatcatcgccagtcctgtggaacaggacggccagatcgcgggtgcggtgctggtgatcctggatgtgacggagaaggagcagcgggagcggctgcggcgggagttcaccgccaacgtctcccacgagctgaagacgcccttgacctccatcctgggtacggcggagatcctgcagaacggtttggtgaagccggaggacgtcccccacttcgccgggaacatccaccgggagacggagcggctcatcgggctggtgaacgacatcatcaagctgtcccgcctggacgagggcggcggcctgggccagtgggagaccgtggatctgtacgaggaggcgcgagccgtcctggagcagctggctccggcggcccagcggaaacaggtgaccacccggctccagggcggcgaggctctggtgcggggcgtaccccagatcgtggaggagatcgtctacaacctctgcgacaacgccatcgcctacaaccgggcgaacggcagcgtcaccgtcacggtggaaaataccgccttcggcccccggatcacggtggcggacaccggcatcggcattccccgggaggcccagggccgggtattcgagcggttttaccgggtggacaagagccattcctccggcggcacgggactggggctctccatcgtcaagcacggggcggcctatctgggtgcccaggtggagctccacagcgaaccgggccacggcagcacctttacgcttacctttccgaaggcgggagcatgagggggggcttgcaatcccggcggaagtgtgctaggataaccggagattgatgaatgattggaggggtgtgaagatgcggatctgaccttcgtgttttggcatagagggttgctgcggcgaagacgcagcgtctttttccatgccattgcagggaaggcagaccgctgatctcacccaggtatcgcacagccccggatgcggggtgaatgccgtatgcccggccgcgggagaggtctgctctcccgcggccgttttttgctgcgcaaaagcacggcgaatcggaaatgacggatgagacgctcatgtgcgcggcatttgccgaagtctgcggtgcgccagaccgcacatgagggtctgcgcaaaggaggaatgcgatatgtccatgatcgacgtctcgaatctgacatttggatacgagggcagtccggagctcatctttgaccatgtgggctttcagatcgatagcggctggaaattgggctttaccgggcggaacggccggggaaagaccaccttcctgcggctgctccagggggagtacccgtacagcggcaccatctccgcctctgtggaatttgagtacttcccctacgaggtggcgaacctgtcccggacgggcctggaggtggtgcgggagatcgcgccggaggcggaggactgggagatccagcgggagctggggcttctggacctggcagagagatcactggagctgcccttttccagcctctccaacggggagcggaccaaggtgctgctggcggccatgtttttgaaggagaatgccttcttgctgatcgacgagcccaccaaccatctggacctggagggacggcggaagctggggagctatctggcccggaagcggggatttctgctggtatcccatgaccgggcgttcctggaccagtgtgtggaccatattctggccatcaaccggaccaatattgagatccagcgggggaatttctcctcctggtgggagaaccgccggaggcaggacgcctttgaactggcccggcaggagaagctgcagaaggacatcgggcggctgacggagtccgcccgccgtgcctccggctggtcggaccggacggagaagagcaagttcggtgtggacaagaccggggccaaggcagcggaccggggctttgtgggccacaaggcggccaagctgatgcagcggtccaaatccatccagcgccgccgggaggaggcagtggaggagaagaagcagctgctgcagaacctggagcggcaggaggcgctggcggttacgcccctgccctgccggacgggtgcgcggctggcggagttccgggacgtagccgtgtgctacaacggtcgcagggtctgccgggagatcaccttcgaggtgctggcgggggagcggatcgccctccagggcgcaaacggctgcggcaagtccagcctgctgaagctgctgctgggggaagagatcccccacagcggcacggtggagaccatgagcggcctggtggtgtcctatgtcagccagaatacggaccacctgcggggcagcctgacggagtttgtccggacccagggtctggacggcagccggttccggaccatcctgcggaagctggatgttccacgggagcagtttgagaaggacctggcagattacagcagcggccagaagaaaaaggtgctgctggccgcaagcctctgcacacaggcacacctgtacgtgtgggatgagccgctgaactttatcgacgtcatctcccggatgcaggtggaggatctgctgctggcctgtcggccgaccctgctgttcgtggagcacgacgcccgcttctgcgacgagatcgccacccggcgcatccggatccagagggaatgactcgaaacaagaagacgccctccgcagttgtgcggagggcgtccgttttcctttgtgattaccagaggtcgggccagaatacctggccgtcctccgaccggaagggctcgggcaccgtgtcctcttccagcatccgggcccggatggcggcggagaggtcctccactgtgccggggccgtagtcggcaaaggacgccgagtccatcaaaatggcgcccgcccgggccatgtcctccagattcacccgctggatctcctcggtatgggaggagcagcagtccgtcagcaccacggtgttgtactccagagcgatggcgtcatagcaggtggtgcggatgcagttgggggtggtggtgccggtgaggatcaccgtccgcacgtccagccgccggaggatcaggtccagctccgtctggaaaaaggcgctccacctgggcttgatgatggtgtagtccccgggctgggggcgcaggccctccggtgcctgggcgctgttgggaccggtggaggcggggcggcaggcccggccgccggcgacccagccggggtaacgggtcagctccacatcgctgccgtcagcgcggtagagccgcttgacaaagaataccggaatgcccttggcccgggccagctccacggcccggacgcagttggggaccatggactgggcgaagcggatccagtgtccgccctccggatgaacaaagccgttttccatatcgatgaccagcagggcggagcgggtgggattgggtttcatcagcagaacctcctgtcagagtttttgaaaaatatgaatgcgaaaggagatacgggtggtgagagactccaggtccgccagacgctttgcacctgtcttgggggtcttccagtaatagggcgtcatctggaacagggcgcggatgtctgcctggcaggggagggtgatggtgccctccaccggcacgatagactgataggcgaacccctcatagggggtctccttttcctcattgggatagggacggtcgtagaggacctgcttcagctcccagaggtggtccggtccgggcaccacgtagaggaagtgcccgcccggcctcagcactcgccggaattcctccagcgccaggggggagaagcagtccagcagaatgtccgccgcgccgtccgccgccggcaggtggaaggaggaggccacagcccacgcaatgcctttctcccgcttggcggcggatcggagaatgggcttggaaatgtcggttcccgccatccggggggattttcccgcggcggccagggtccggaagatgccggaggtgtagaatccctcgccgcagcccacgtcccagatcaccggcgattcgccggaaagagacaaaatctgacaacagagcgtattgagaagtggatcataataccccttggagaggaaatcccgccgtgcggcggccatatcccggtcatctcccggatcggcggagtgcttttgattggggggcagcagataggtgtagccctcccgggcgatgtcataactgtgtccggccgggcagcgataggcccggtctccgcggtccagcggcgccccgcagacggggcagcggaaaagactttccatcacgtgtcctcgcccgtcacatcgttgatccacttccggctccgcagccgcaggataccccaggggcacttgcacacattttccgactggatgcataggcacaccaccgctaccggggcgttgaacaccagggcagtcaggaaggtcagaggtacagcgatgacccactggcagctcaggtcgatgatggaggccatgcgggagtcgccgcccgcccgaagcaggccggtgatgttggtgatgtcaaaggccttcagcggcagcatgaagagatatacgacgcacatggtgacggcgatctccagcgccagcccctccaaatggaacagaggatagagataggggatgaacaccgtaggcaggaggaccgccaggcacaccgacaccacgaaacccactccgaaggagaccgtcagcaggcagcagcccagagagtagacctcctcccggccggcgccctcaccgatccgcttgcccacaatcacggcggtggcgcctgcgatgccgaagcaggccacagtggagaacttgtcgatgttgcccatgatggcgtgggccgccagcatatccgtgctgatggccatgtggcccatgacggcggtcataacgctgacgcccagaccccacagcacctcgttcaccagaacgggggtggcgtatttcaggaagctccgcgccatggccccgccgggccgcagcagcaggcggagcatcaggggcactcggcggtagcggggggcatagaccgcgacgatcacgaactccagcacccgggaggtcagggtggcaatggcagcaccggtgatccccagcgcaggcgcgccgaacttgccgaaaataagaatgtagttcaagcccgtgttggtcagcatggagatgccgaagacgatcatgcccatggcgggattctccgtgctgcgctgcatgccgatgtagacggagctgatggtgttgaagatatagctgaggccaacaatccggagatagggggcgcccaactcaatgagcaggtcgttgttggtcaccagagccatcacatggagggggaagaagaacagcacagcggccacggaaaccgcaatgatgagcccggcgtaaaggctgacgcccatacagcggttgatgctgtcggtgtcccccttgccccagtactggctggccaggacggagagtccgctgagcaggcccaggatgatgatctggagcaggtagatgggcgtgttggcggcagtgacagcggacagctcattctgccccagcatacccaccatgaaggtgtccacaaatcccagggaagtggtgatgagattctgcaggatcagcggcagagccagcaagaacagccgcttgtagaagccgggctcccgatgaagatgacgaaacataaaagacgaaacctcttgaaactgaaaagtaaaattgccttacagcatgggcatccgcgtgtcgtggtggcgccgcagggcgtccgcacaggcgtcgatgtcgcccttgtcagtctccgggccgaagctcaggcggatcaccccgccggagaccttcttggatagcttcaaggccgcgatcacgtgactgggcttgccctgatggcaggcggagccggcggagatgcagacgccctggctgcccaggtcattgacaatattttggctgggccagcccacgagagagatggagaggatatggggcgcgccgccgggagcggagaggattttcaagtcggggatggcagacagccgctctgcggcatagtcccggattttcgccatgcagaggagtttctcctccaaattttcccgccgcagctccacagccctggcaaagcccgcgatctgggccgtggcttcggtgccggcccggaggccgccctcctgcccgccgccggccagcagcggctttggattccggacccggggaccgatgtacagagcgccgatgcccttgggcccgccgatcttgtgggcggagatggtgaggaagtccgcccccagcgtttttgcggagcatgggaccttcaaaaagccttggaccgcgtcggtgtgcagcaacgtctgtgggttcttcaccgccaggccccgggcgatctcagcgatgggatagatgtttcccagctcgttgttcaccagcatgcaggacaccagcgccgtgtcctgccggacggcggcgaggacctgctccgcagagagggagccgtcctgagccgggacaagatacgtcacctcgtatccctgccgctccatccagcggcaggcttccagcacggcgctgtgctccactgcggtggtaacgatgtggcggcccaggtggcggttctgccagcaggcggcggtgacagcccagttgtccgcctccgtgccgcaggaggtgaagaacagctgcttggccccacagcccagtgcgtccgccacggtcttccgccagacttccacccggcgcttcatctccagccccatggggtactgggagctggggttgccgaactgttcggtgagcacctcatacatggcatccgccaccgcccggggaacgggcgtagtggcggcgtggtccagataaatcatgaaaaacgatctccttgcagttgggccttgcccaacagtaaaaattacagtataatcgaaacgcatcaagttattatataaaggttttgcggaaagtgcaaggagattccatgaaagttgccatctataccttgggctgcaaggtgaaccaatatgagactcaggccatggagcaggagctgctggcaagggggcacacgctcacggagttttccgatgaggcggatgcctatattgtgaacacctgctccgtcacggcagtcagcgaccagaagtcccggcaggtgatccacggcgtccagcggaagcaccccggcgccgtggtggcggtgtgcggctgctatccccagacccacgcggacgacgtgcggaagctgggggtggacctgatctccggcaccggcgaccggacgggttttatccgccttctggaagaggccgcggcggagaagcggcagatcgaggccatcgaccagccttttgagcggcgggtgttcgaggtcctgcccgccggcggcctggggggccgcacccgggccatgctgaaggtggaggacgggtgcgtcaacttctgtacctactgcatcattccatacgcccggggacgggtgcggtccctgcccgtccccactgccgtggagcagactcgggccctggcggcagagggctaccgggagatcgtggtgacgggcatcgagatctcctcctggggccaggacctgaagaacggagagaccctgatcgacctactggaggctgtctgcaccgccgcaccggctgtccgcatccggctggggagcctggagccccggaccatcacagaggagttctgccgccgggcggccgccctgccgaacctctgcccccagttccacttgtctatgcagtccggatgcgacgacaccctgaagcgaatgaaccggaaatacgataccactcgatatgcgcagtccgttgcacttttaaatcaatattttgaccaccccgctgtcaccacggacctcatcaccgggtttccggaggagacggaggaggaatttgcccagacgctggacttcatccgccggtgcggctttgcccagatgcacattttcccctactccgtccggcccggcaccccggcggccaagatgcgtcaggtgccgaaggccgtgaaggaagagcgggcccgccaggcggcggcggtggcggaggcgctccaccggaactatctcgcggcctgtgtgggagcggtgtatcccgtcctctttgaacagcccaaggacggcaggtatttcggccacgcacccaactatatggaggtgctggcggacgggacggacctgcataaccaggtgcggaatgtgaaagtcaccggcactgacggagcatccctgctgggtgagcttttggaggactgacatgaagagccatttctttgcctacatctcccggatgcggttcatccagcggtgggccctgatgcgcaacaccgcgccggagaacgtccaggagcacagtcatcaggtggccgtcctggcccacgctctggcggtgatccgcaacgagaagttcggcggccgcctggaccccggcgccgtggcggtggcggcgctgtaccatgacgccagcgagatcctgaccggcgacatgcccacccccatcaagtacgacaacccggccatccgaaacgcctacaaggacgtggaggcggtggcggagggcaagctgctccacatgctgccgccggagcttcagggggtgtacgggcccatcctgacgcagtccgacccggaggtgcggcaggtggtgaaggcggcggacaagctctccgcttatatcaagtgtgtagaggagctgaaagccggcaacaacgaattccggcaggccgccggccagacccggaaagccctggagggctacgaactgccggaagtgacgtactttctggagacctttatggacagcttctccctgaccctggacgagctgcagtgaacaaagaaccgccctggcgcacagcgccagggcggttctttgttcacttgttcagcttggagcagatcagcccgcccaggcggcggacaccctcctcgatcaggtcctccggcgtgttgccgaagctcatgcgcatacagttcttcccctggccgtcccggtcggagaagaagccctctcccgccacaaaagccacgttcacagccgggtctgtggaagactcctgcagcagggcggaggtgtcgatgccgccgggcagctccacccaggtgaagaggccgccgtccggattgctgtgcttggtaccggcggggaaataccggtcgatgctctggagcatcacgtcccggcgcctgcggtacaggtcgcagatcatctggtggtgggccgggtaacagccccgcttgaagaactccgcgcagaggatctggggcagcatggaggtgtgggagttggtggcggacttcacgtccaccagatgctggatggtctccgtatccgccaccacatagcccaggcgggagccgggggagaaaatcttggagaagctgcccgccatcaccacatggcctgtggtgtcgaagtgcttgatgggaggcaggtcctctccgctgtaccggatatcccgataggggtcgtcctccagcaccagcacgtcgtatttggcggccagctccgccacggccttccgccgctccaggctgagggtgcggccgctggggttctggaaggtgggaatgacatagatcatcttgggatggcactgccggatcttccgctccagatcctccgggatcaggccgttgtcatccatggccacacccacgcacctggcctcgaacatatcgaagatctccacggactggacgaaggtgggggcctccaccaggatcacgtcgccggggtcgatgtacgcctggcaggccaggttgatgccctccaggccgccggtgatgattatgacgttgtccacgccgtagtcgatgcccttgggagccagcagctcccggaccaccacctcccgcaggtcccggatcccctcaatggggccgtactgcagggcctccacgccccgggtgtccgtccgcagcacctcgtcggccagctggcggatggtgtccaccggcagggcctctctggcgggggaaccgccgctgaaggagatgatgtccgggttggtcatggacccgaacagtcctttgaccacattggccgtgaaggccattttttccatacgcttggcataaggcaccattctgcgctgtcctccatttcaagggcgcgcccttccggcgcgccgctgtgtgatttgatcgtttcagtataccacaccaggcgggaaaactcaattccccaaaaacaagccgtcccggggcaatgccccgggacgggaggatggtcattccaggggaatttggatgtctcccacctgcacggcggcgacctggctcacgtccagcagatgctggaaggagcaactgaaggacagagagaagggaagcgcctcgtcgggacggctgccggtgctgccgctgagtccgctccgggtcagctcctgtaccggcagggcattgccgtccgtcaggaccagggaggtggccgcccgcagatcttcgagaccctcataaacggtgttaccggtgagctgcacatggatggagaagggggacaggaccgtctggacaaagacaccgtcctgctggtaggaggccgtcagcgtctgggaggatcccgtcggctggaaagtcaccagggccggatggtctgtcacagcggtgtccacgccgtccacccgtaggacagggggcgtcagcagcaccgtcaccggctgggcggtgaagtcggcgctgccggatttcacggcgatatgaaagagataggtgagggtattggtctccatgtcatagccctggctctccgagccgccggagctgccgctggtgtagttgatcaggcggaaatccgccaaactgctcccagctctttccacgtagccgcaatatgaggtgtagtctgtccagtcgatgtccgcccacctgtcctggtcggcggccttcagctcctcccaggaaatgtcgccggtgagatagtaggagatatctggcaggtcgatacaatttgcctgccagtcctcgctttcataggccatctccacgagctcccggtccactgtgtccggcagccggtagtccagaatcagataaaggttcttctcggagaccagggcctcccggatggtcacggccacatcgtcgcagacggagatgacattcaccttctggaaggccttctccgccatgggggtttccgccgcgtcggggccaaagtagccggtgaaaatatcatcccagtccaccagcaccgctgcccccacggacagcgtcagtacaacagccagcaccgcagccagcagcgcctttcggaaaaatccccgggggcggtagacggcggtccgggcctgaggttccggctccgcggacaaaacagcctcccgcagctgttcctccagctccggcgggggcgcgcagtgttccattgactcgtgatagcgattcataagctctcctcccatgtgttccgcagggcgtcccggccccgcttcagccgcattttcaccgtgggcaccgtcacccccaggagccgcgcgatctcccggagggtgtagccctcgtagtagtggaggtgaaggactgtccgctgggactccggcagggcggccacgtggtccaacaggcccagctcctccggcgtgacggcggcggaggcggcctccagcggcagctcggaccggctggatcgcttccaggcgtcccgacactggttcagggccacccggaacagccatcgccgctcgtggtccggcgaggcaaagaccggcgcccggtacagccgcttgcagaacacctcctgcaagatatcctccgcatccgccgggttcttcatctggatcaggcagaatcggtacagggacggcccataggtccggtatacctgctcaaagagctgctccgcttcggtcactggcctcacctccttctgctgtgattacgagtgagcggggcaaaaggtcacaaagaactgcaaaaactccccggcttctgccggggagtttcagttcagggcatccgcctgctgtgtgaagagctccgtcacccgctctgccgtggcggggcaggaggtgagcgccgggtcctgtgccagcagctgctccgccgcctgacgggcctcctgcagcagctgggtgtcgcagcccagatccgccaccttcagccccggcaggccgtgctggcgcgctccgaagaagtcaccggggccccggagccgcaggtcctcctccgcgatctggaaaccgtcagtggtcttggtcatgaccttcagcctctgcctcgtctcctcgtttcggttgtcggagatcaggatgcagtaggactgatgcttcccccggcccacccggccccgcagctggtggagctgggagaggccgaaccgctccgcgttctcgatcaccatcaccgcggcgttgggcacatccacccccacctcgatgacggtggtggacaccaggatgtccgtctcatgggcagcgaaggcggccatgacggcgtccttctccttgggcttcatcttgccgtggacgaaggccaccttgagatccggaaacacctcggactggagctttttggcgtattccgtcaccgccttgcgctcgtcggggagctggtcattctcctctaccatgggacagacgatataggcctggcggccctcgcccaccagcttgcggatgaaacggtacacccgctggtgatagcccccggtgacggcgaaggtctgcaccggctggcggccggggggcagctggtcgatgatggacacgtccaggtctccgtagaggatcagggccagggtccgggggatgggggtagcggacatgaccagaatgtgggggtggtcccccttggcggccagttccgcccgctgggccacaccgaagcggtgctgctcatccgtcaccaccaggcccaggtcgcggtaggccacgctgccggtgatgagggcgtgggtgccgatggcaaagtcgatctccccgctctccagttgctgagtgatggaccgtttcgtcttggcggtggtggagccggtcagcagggcgcaccggatacccaaattttccagcagaggggccaggccctggtagtgctgctgggccaggatctccgtaggggccatcagggccgcctggcggccattcttcaccatgaagtacacgcaggcggcggccaccatggtcttgccggaacccacgtctccctgacagagccggttcatgggcgtgccggagcgcatgtccgccagtgcttcctccacacagcggcgctgggcgtccgtcagggtgaagggcagggcacggtagaaaagctccatgtccacgccgccgcaagggggcacgtggaccacctcccggcgggagcggagccgctccagcccgatggtgaagaggaacagctcctcaaaggccagccgccgccgggccaggtccagggcctccgcgctctccgggaagtggatgttctcataggcgtactcgatgcggcagagctgatgatgctgccgcacacggtccggcagcacgtccggcaggatgtccgcgcaggcgtccagcccctggcggatggaccgggacaaaatcagctggctgactccggcggtaaggggatagatgggcacgatgcggccggtgacctcccgccgcccctccggctccaccacaggattggccatctgatgccggaggagggagccctccgcccggccatagaagatataggtctctccctggtgcaggctgtttttcagccacgcctggttgaaaaaggtcacatccagggtgccggtgtcgtccaccgcccggagcttcaccagatccagccccttgcggatgtgggagatggtgggcggggacgccaccatggcggccacgccggcggtctcgccgggcaccaggtccgcaatgcgccgcagggcagagcggtcgtcgtaggcccgggggaagtaagagatcaggtcccgcagggtggcgatgcccagcttgcccagggccttggcccgctgctccccgatgcccttgatgtaccgcacatctgtgttcaggtccgccatggaatcacctcccgccttgcaaatcactggcctccattatataatggcgccagagaaaaaacaaggagatgggtgcatgggcggatggaagaagtgggcgggcttcgtgatctggtgcgtgctcctgttcggcgggatgatcgcggccggaacggacctgtggcccctgggagtggcggcagttgtcgcaggcgccgtggggctggtcctgtggagccgacgatatgcaacggtgtttgtgtgcccctcctgcggcgcagagttatcgggacaggacttccgatcatccaagtggagcccggatgggagtaaaatcatgtattgccacatttgtggagcgatgtttcccgtagaggaatgccgcagaaaagagccataaaaaagagcccggaatcccgggcactttttttgtaacaaaactactgtccatgcgtcctatggcagagagggaggtgaggccgtgccggattttgaggagatctatcagacgtatttcgccgacgtgtaccgctacatcctggccctcagccgggacgcccacacggcggaggaggtgacccaggagaccttcttccgggcattggcctccatcgaccagttccggggggactgccagctgcgggtgtggctgtgccagatcgcccggaaccagtacctctcgctgtgccgggagcgaaagcaccggggagagctggagcaggagccgggggacgacgggctggagtgcggctttgcggaccgggacgccgccaagcggctccaccggctgctccatgacctgccggaaccctacaaggaggtgttctccctgcggaccttcggggagctgccctttgcccagatcggggagctcttcggcaagacggagtcctgggcccgggtcacctacttccgggcccgccagaaattgaaggagggatttgatggaccagctggaccatgatatcgtacaggacctgctgcctctgtaccacgacggcgtctgctcggacaagagccgggcggcggtggaagaacacctgcaaacctgtcaggactgcagaaaggcattggaagagatggacacgcagctgcccacggaaaaagttgccgttgacgacgcggcggcggtgaaaaaaatctcccgggagtgggagagaggcaagtggaaagcccgcatgaagggcgcgggtattgctgtgctggtgtgcctgctgctctttgggggctggatagcggccacggagtggtttgtgtttccggtggaattggagaatattcagatcaccaacgtgcgtcagctctccgacgggcggattctgtatcacttctacattgatgacgagctcggcctgcggacattggggtttgactatgtggaggtgaacggggaagggcatatgtattgtgtgcccaagcgggcattgtacacggaaaagagagaaacgacctccttggccgactcggagcaggaagtggatttggaggtgtgcggggcctgggcccgcgccagcggtgtggatgaggaactcacccatatctggatcgggcagggggaggacgcgattctcctctgggagaaaggtatggatctgcccgctgccagcgcggcggatgaagcccagtggggcttcagggaagccagcgccgcctattggaaggcgcactacggcggcacggagacggtgccgtgagcgaaatggaagtgacctcgaacaatctgctgaagacggccgcgggcgtgatcccgcatgagtacggcatccgggaggatggcgtcagatggactgcttatcggccgtatatcgccccggacggactctgtatctcctatggaaacccggcagaggacgcaaccaacaagacggtgctggcggcccatcgggagaacgtggaggtgttgctgccccgggccggggagatctgggacctgccgtgacggacctccgcgccgtgtgcggcggccatgcgggaagaccttccgacagaagcaggacggcgagtgcgccggtccccacagtcgtggggagaggactccggagctgcccgcagaggcgccccgccggaagagaaaaaacggcccgccgggatctcccggcgggccgctgctcaatcgcacagcttcgtattcacatagtcatagaaccgataggtgagcccgttctccgtcaccggctcgctgacggctcttacggtccagccgggcagcttgtccagattgggaaagaaggagtccgcgccctccgcggcggcgtccacccgggtcacgtaagcccgtgcgcattgggagagcatagcggcgtagatgctgccgccgccgatgacccacagctggtccggcggggtaccggctgtggcctcccgcatggccgccagactggagacggtctccgccccctcccgggaaaagtccgggcagtgggtgatgacgatgttccgccgcttgggcaggggccgcccgccgggaaaggagtccagcgtccggcggcccaggatgaccgtgccccccagggtgagggagcgaaagcgcttcatgtccgtaggcagggagaagagcagatcattgtcccggccgatggcccagttttgatcgacgacgacgatggcattcacagcgcaggcctcctcaaatagcgatggggatctggtcctcgaagggggcggggatgtagtcctccagggagaagctgtcccgggtaaaggcgtagaagtccgtcacggacgggtccatccggaacaccggcgccggggacggcgtctgggccagcatcttttcaatgatgggcacatggcggtcgtagatatgggcgtccgcgatcacgtggaccagttcgccgggcaccaggccgctgacctgggccagcatgtggaccagcaccgcgtactgcactacattccagttgttggcggccagcatgtcctggctccgctggttcaaaatggcgttgaggacattcccggagacgttgaaggtcatggaccaggcgcaggggtacagattcatctcatggagatcctggtggttgtagagactggtgaggatgcggcgggaggcggggttgtgcttcaggtcgtacagcacccggtccacctggtccatctccccttcgggatactggtgcttgatggagagctgatagccataggccttgccgatggagccgtccggatccgcccactcatcccagatgtggccgttcaggtcgtggatgttgttggacttcttctgccagatccacagcagttcgtccaccgcggtcttccagtaggtccggcggagggtcaggatggggaactcctcctgaaggtcatagcggttgacgatcccgaattttttcacagtgtgggcgggagtaccgtcctcccaatggggacggacgggcaggtctgtgtcccagaccccgtggtccagaatgtcccggcagttttgcagaaagagcgcatcggcacggctcatgggggtccctcctcagcgttgggtatttttttcagtatagcaaatccgggagaaaaacacaatcggcagatgaagccccggccgccaaattgggggcgtcttttcctgtgcctgttgtgaaaatcggctatgtgtggtagaatacctgcaaaacgggccctgcctcatcgggcgcggcgcccggttccacggccgaagagtgacccggcggatgctccggcgggcggaaaaggaggcgggagatgccggaccggaaggagatcaacaagcggggctatctaaaggaggacttccggctgttccacctgaaggacagccgggcccagaaggtggactatcactaccacgcctttgacaagctgatccttctcctggggggaaaggtcacctatgtggtggagggcgtcacctacttccttcagccctgggacctgctgctggtgggacacgacctgatccaccggcccatcatcgacccggcggagccctatgagcgggtggtgatctggctgggacgggagtggctggagcggcgcagcgaccccggcgaggcgctggacacctgcttcgacaccacccgggagcgggggttccacttgctgcgcttcgacgcagagcggcggctccactatatgcagcgcatccagcagctggaggaggccctgcgggaccggagcttcggcgccgcccgcatggcggataccctctgccagcagatgctgatcgacgtgaaccgggatgtgctgcgctcccgcaccgcccaggaggagcgggacagctaccgggtggaccccaagatggaggaggtgctccggtacattctggaccatctgggagaggagctgacggtggagtccctctccaagcggtttttcatcagccggtactatctgatgcaccggttcaaggccgtcaccggctacacggtccaccagtacatcagccagaagcggctgctgcgggccggggagctgatccgcgccggcgtgccggtgatgaaggcggcggagcaggccggatttgaggagtattccaccttcctgcgggccttccgcggcaccttccacatgagtccccgggagttccggtgacgaggatacggcaaaagcccgcccggggagcgatccccgggcgggcttgctgttactgggcctcgccggctgccaggcggaggatagcctccatgtccgcgggctggatcttcacgaagccgccgaaggggaagccgccgggcttctccgcccggtgggccaccatgtccgggatgtctttggccttggctcccagctcgtcaaaggtgatgggcatccccagggagtggaagaagaggcacagcttctcgatgccctggcgggcggtggcctccgggtccgcaaagttcatctcacagccgaagacccgcacggcgaactgggccagccggacgggatcatggggcagcacgtactccatccaggcgggcaggatcaccgcaagacccgcgccgtgggcgcagtcgtagaaggcggagagctcatgctcgatctggtggctggcccagtcctgctcccggcccacgccgcaggagttgttgtgggccagcatccctgcccacatcaggtccgcccgggcggcgtagtcattgggatcggcaatggccttgggggccgcgtccagcacggtcttcagcagggcctcgcacagccggtccgtcagccccacgtcgggagtgttggtgaagtaccgctccatgatgtgggccatcatgtccaccgcgccgctggcggtctggtaggcaggcagggagcaggtgaaccgggggttcagcacggcgaatttcgggcggatgacatccgtcttggggcagccccacttcaggttgccccgctcctgggtgatgacgcagctgtcggacccctcgctgccggcggcggagatagtcagcaccacgcccacgggcagcgtcttctcgatcttggcggcgccggtgaagaaatcccagaaatcccccttgtacagcgcgccgaagccgatggccttggcggtgtcgatgacactgccgccgcccagtgccagcaggaagtccgcgccggtccgccggaccaggtcgatgccctcgtataccttgccgctgcgggggttggcctggacgccggagagctctgtaaaggggatgcccgcggcctccagggaggcggtgacggcgtcataggcgccgttgcggcggacggacccgccgccggtgaccagcagtacccggctgccgccgaaccggcgcaccagcgcgccggtgtttttctcttctccatcgccgaaggtgaagagggtgggggagtagaaggtgaagttgttcatggaaagtgctcctttcatcacggaaattcatgtcaatcggtcggcgcgtcggagaaggtcacggccactgccaggcccgtcgcgcagtcgatgctgtggaagtcccccaaggtcacgccgccgacggcgctgccgtcgaaatctatggggtcctgataggtgtatgtgttgtggccgctatcggagatgtcgaagatctcatagccggaggaggtcaggcgaaagcccatgcggtattcgccgggttcaatgttcccaaagacatggccatatcgcttccagctgccgtccacgtatttccagacctctgtggagacggagtggatgggttcctccacggtgtagtcaaaaaaggccagcgtatcatcgccgcccagcacatccagcaggtcctgtgcatcctgggaaaagacggcagggcgaatggtaggcgcggtctccgcaggaatgtcctggccaccgcaggcggttagcgcggaaaagaacagcaggcagagagtagccgtaaacttccgcttcatggctcagtaccctcggttccggtccaccagtcccgccagcgggcgcccggcggcgtagttctccagatcggcacagaagcgggccacgttttcgccgcaggtgtagcccagggtcatgttgccggagacgtggggggtgagaatgatgttgcgggcgtcccacagaggatcgtcctggggcagaggctccgggtccatcacgtccagggcggcgcctgccagctttccgctgttcagggcctccgccagggccttctggtccagagcggtgccacggcccacgttgatgacgcaggcgtcggcgggcagcagggcgatccgctcccggttcaggatgtgaacggtctccggcgtgctgggcagggccatcaccaggatttttgtgcggggcagcacgtcgtccagagcggagatgggatacacctcgtcgaaggcggggtggagctttccgctgcggctgagacctatgatcttcgcggcccccatgccccgcagccggtccgccacatggcgcccgatatccccggtgcccaggatggtgaattcgttgtcccggatggagcggacgggcagctgattggaccagccgtggccccggacgatctcgatgtactccggcatccgccgcagcagcatcagggtcaccatcaccacatgctcggcgatggtaacgccgtagacgttggagttggtcagcaggcagtccgggttggcgaacaggccgggatccttgcagtagaggtccaccccggcaaaggagcagcagtaccacttcagcgtagcgggagcggcgcgcagaaggtcagcggaatgggcgtacagaacctcgcagtgctggaggcagtccttcgcctcctcaaactggtccaggttgaagaaatggggggtgaagcccgtccggcgggcggtctcccggatccggtccttgtgggcttccgtgaggaattcctgatagatgcagatattgcgattcataaacaatcagactccttttgaatggattgacagagttgctcggcacagtgcatcccatccgcggcggcggagaggatgccgccggcatagccggctccctcgccgcaggggtacaggccccggagagaggactggcaggtcccatcccgtgggatgcgcactggggaggaggaacggctctccaccgccgtcaggacggcgtccggatcgtcgtagccccggagcttctgccccagcagggggagcgccccggcaatggtatccgccacgaagggcggcaggcaccggcgcaggtccgtccaggtgacgccggggcggtagctggggtgcactcggcctgggccgacggagggccgccccgccagaaagtcccccacccgctgggccggggcccggtagtccccaccccccagagcgtaggctgcagactccagcttccgctggaaggcgatacccgccaggggatcttccgccccgccatagtcctctggcgtcacgttcaccagcaggccgccattgatattctccttgtcccgggcgaattcgctcatgccgttggtgaccacccgctccgcctcagaagcggccgccaccacctccccgccggggcagacgcagaaggagtaggccgcccggccgccgggcagatggcaggagagcttgtaggtagacgccggaagcccgggatgcccggcgtactgccggtattgggcggcgtcgcagtccgcctgccggtgttcgatccgcacccccacggcgaagggcttggcctccatgggcacaccccttttatggagcatggcgaaggtgtcccgggcggagtgccctgggcagaggagcaggtgggagcagggaagggtataaacgccctccggcccctccgcggtgatgccccgcagggcgccgtcccggatgtccaggtccgccagccggctctcaaaccggatgtccgttcccagttccagcagacggcggcgcagatttaccagaacggtgtggagataatccgtgcccacatggggtttggcatcgatcaaaatatcctccggagcgccgcaggataacaacgtctccaggataaagcggtggcgggggtcgcgtgtgccggtgttcagcttcccgtccgagaaggctcctgcgccgccctcgccgaattggacattggaggtcaggtccagctctcccgtggcccagaaccgttccacatccgccttccgccgctccaccgggcggccccgctccagcaggatggggcgcagccccgcctgggccagcaccagggcggcgaagagccccgcgggcccggcgcccaccaccacgggaggcaccgccggcgcaggcaggggagacggcggcgtgtacgccggggcctgtgcggcccggctgatcttccggctcctggctcggcggagaatagcggactcctccttgaccgcgacctccaccgtgtagaccaggcggacttcttcccgggcgtccacactgcggcggagtaagcgcagggagagaatgtccttctcccgcatccggagcagccgggcggcctcagcggccagctccgccatgccggcctccggcgggagcttgatggaatcgattcttaacaccttgttcaaagttcctttcagatgtgtttaagataagcatactatacttcagtcaaaggttcaaggaagagcccctgaaaagcttccggttttttccggagcgccgtccaggacaattcaaaaattggaatcagaaacttcatacttttgacacgatcccatgttatcctctgttctaaacaatggatgagcgggatacataataggaggcaatcattatgtataacgacgaacacaatctctatcactacacctaccggaaggacggcagcgaggcggaggcgcattcggctccccagcccggcccggtacaggaccataacagcgggccgcagcagcccgtgcaggagatgaagcctgtgaagaaaaaccgcattggactgaaggtgacggccctggccctgtgctgcgccctgctgggcggcgccgtgggcggcggcattgtctggggcgtcggcagaagcggcgacgagacctcggtcaacgtcagcggccgcaccgtcagtcaggtcgcactgaaaaccgtggacggcaagacggcgatgagcgacgcggaggtttacgccgccaatgtcaacagcgtggtgtctatcaatgtcaccgggaccaacagcaacaacttcttcggtcagccggtacaaacggcatcctccggctccggctttattctcaccacggatggctatattgtcaccaactaccatgtggtggaggatgcccagaccgtgaaggtcaccctgtacaacggcgatgaatacgacgcccagtatgtgggcggggatgaggactacgacatcgcggtcatcaagatcgaggcctccggcctgcaggccgtcaccctgggcgacagtgagaagctgaatgtgggcgaccgggttctggccattggcaaccccctgggggacctgacgttctccatgagcggcggcatggtctccagcgtgaaccgcaccatcaacgtggacggcacgcccttcaatatgatccagaccgatacctccatcaaccccggcaactccggtggtccgctgctgaacagctacggcgaggtggtgggtatcgtgtccgccaaatactccagctacggcagctccggcgagagtgtggagggcttgggcttcgctatccccatcaatgacgtcatcagcatgatccaggacatcatgaccaacggctatgtgagcaacaaggcctatctgggcgccaccatcggcaccctgaccagcggcatggcccagcagtaccgctatgacatcagccagggtgccttcgtatactctgtggaggacggcagtccggcggctgcggcgggcctgcagttgggcgacgttatcaccgccatcgacggcacggagatcacctccctggaggacctgaccgctgccaagaagggctatgcggccggcgatacctccacactgaccgtctaccgccagggtgagaccatcactctggagctgacctggggcgccgtgtctgccgatcagcagtccgctgtgcagggccagacggagcaggatcagaacacccagaacggcggcgggtacaccaatccttacgacctcttcgagtacttcttcggctgatggcgggagactcccgcagccagaaataactctgcggcccggtggcggctctgcggcagatgctgcggaagggcaaaaagccgccggatgcggcgggcggcggagatttcagatagaacgaaaagggcgcaccgcggaaccgcggtgcgcctttccagtatggaagcggcgtccatcgaaatggacgccgcttccgcactgaataaaaatgaagggagagatggaaagcagaatcatttggaggcaggctcctcctctttagcagactgcttgtttttgtgggccttgatggagctgttgatgcagcccagcgccaagacagcaacgattgcgagcatcacatagccgccgacttccatgagaggacacctccttcccgattcggattcgaggatttatttacgaaaagttgtcatgaatataaaaatattaacggattcttaacgacctcttaacgatatcttagcgccaatgagccaaaaaagcaagccccttttcggaaaaatttttcgcgctttccgaaaggggctcagtccagaaaatatcccagggaggcaaagacctcagacagccgctggggggccagaatctcgatcctgcggtaagactggcggaggatgccggcctcccgaaactgtttgaggatgcgggtgacggagacacggctcataccggtgatggccgcgatctgctcgtgggtgtacggaatggagggaccggagctggcgcagcaggtgtgcaggaaataggccacccgcttgtcatcctccagaaagtgggaacagcagatatagtcggacagcatggtgatccgccgcacaaaatgggccatcaggtcctggggaggatagccgtgctcctgccacagcttccaaaagcggtctgccgccagcagatagacctccgccggagagatggcggacacgctgaccatgaccttggcgtgatacaccagggcgctgctgccgaacagattgccgggtcccaggtaaaagagggagatctcatctccgctgggaccgaggcagaaggtgcggagctgccccttgaccagaaagcctgcctgtgcggacagcgcacccttttccagcaggacctcgccgctgcggtactggcgtctgacgccgtatttgacaaaaagctcccccacgtgggggctgatctggatgtcgccggacacggggcatcccgcctcctttcctgagaggattccatatcaacatcaacaaaaatagtagcagattttctcccattccacaagatgcatttgtatcacctgttacaatctggccgccggctctccctttacaataagcatatcccgactgagcggctcggtcagaatgccgcgcggcgcggatcaaaaaggaggagctgacaatgaaggataccatgtgcggccttgtcaaggaggtcaacgccccgtccggcctggtctatcacactgacctgtcgatcccggagatcaatgacgatgaagtcctcatcaaggtccactgctcggccatctgcggcacggatctgcacatcatggaatgggacgagtggtcccagaagcggatcaaggcccccgttaccgtgggccatgagacagccggcgagatcgtggcggtgggaaaaaacgtcacggagcgcaaggtgggcgaccgggtgtcctgcgagtcccatattccctgcggcgagtgctatttctgcaagaacgggatgccacacatctgcaagaacgtgaagctgttcggctgcacccagaacggagccttcgccgaatacgccaagatccgctgggactgcacgttcctgttggaggatgacgtcaccgacgaggcggcctgcatgttcgagcccatgggcgctgggattcacggcgtggaggcggcggaggtcaacggaaagaccgtgctggtcagcggctgcggccccatcggtctgacagccatcagcgccagcaagaccttcggcgctgtcaaggtcatcgcctgcgacctgatcgatgagaagctggaggtggccaagaagatgggcgccgacgcggtgctcaacagcgccaagtgcgacctgccggcggaggtcaggactctgaccggcggcgtgggcgtggacgcggccatcgacatcaccggcgcggagcccgccctcaacagcgccctcaagtgcctgcgggctgcgggccgtctggtgtgcgtgggactgcccaccaagcccatcaccttccacgacatgaccgacgacctggtctatcgggaggtccagctgaccggcgtctccggacggaagatctgggagacctgggaggacttcgccaaggtcatgaagggaccctatttcaagctggatcaggtcatcggtggccgcttccccatgaaggactttgaggccgctctggcgcagatccacagcggcgtgcccggcaagatgatcctgtatccctgatcccgccccgcagaacaggcaggaggagactgtgcccattctgcggcggaccctgacccggcccggagatgctgaacgatcctgaaacacccccgccgcatcgcggcgggggtgttctgcgtcagtccggcagatggaagatatcctccacaggggttttcagcagccgggccagccgcatggccagccccagggtgggatcgtacttgttgttctcaatggcgttgatggtttggcgggtgacgcccagctcccgtgccaggtcctcctgccggagccccgccgccttccgcagctcccgaatccggttttccatagctcacagccccgcgcaccgcagcagcaggccgaaggccagcaggaagactaccagcagcgggacatacagcaggaagctcctggcgccgtcccggtccccggcgcgccatctccccacctgcagggccagaaaatacaggagattctgaaagatcaacaggtacatgggcgcggtgacgcggccggtctggacgcagtcccagatcccccatataaacagggccatcaccgtgaagaaccaggccacccggatggcgttcagggagaggtgaagttccatctcatccatgttccgaaagaatttcatagaactgcctccttgctttgaattgtcaagttcttttgacatttttagaatagtacggcagatgcaaaatgtcaatagtgttttacatttttgcaaagaggatagaaaaacgtcggggaacgcaggctgacccttgcacttttgggcctgaaatggtacaataattgtccgaaaatatcagcaagggagagcgctgcttttatgaaattaggaatcgtgggtctgcccaatgtgggcaaatcgaccctgttcaacgccatcaccaacgccggcgccgagagcgccaactatccgttctgcaccatcgaccccaacgtgggcatggtagcggtgccggacgagcggctggacaagctggcggagatgtatcagccggataagaagaccccggcggtcatcgaattcgtggacatcgccggactggtgaagggcgccagcaagggcgagggcctgggcaacaagttcctggccaacatccgggagaccgacgccatcgtccacgtggtccgctgctttgacgacgagaacgtcattcacgtggagggcagcacggaccccaggcgggacatcgacatcatcaacatggagctggtgatggcggacctggagatggtccagcgccgggtggagaaggccacgaaagccctgaagggcgacaagaagttccagcatgaggtggacgtgttcaccgcactgcagaagcatctggacgggggcaatctggcccggacctttgcctgtgacgaggacgacgcggccctgatcgccacctccgacctgctgaccctgaagcctgtgatctacgccgccaacaccgacgaggcgggcttcgccgatctggagcataaccagtactaccagcaggtgaaggccattgccgacgcggaggacagccaggtgctgcccatctgcgccaagatggagcaggacatcgccgagctggagggcgaggagaagctgatgtttctggaggagctgggagtggaggagtccggcctggaccggctcatcaagtgctcctacgctctgctgggcctgatctccttcctgacctacggcaaggacgagtgccgggcctggaccatcaagaagggcaccaaggccccccaagccgccggcaagatccactccgacatcgagcggggcttcatccgggcggaggtcatcgcatacgatgacatgatcgcctgcggcagcgtcaacgccgccaaggagaaagggctgctccgcagcgagggcaaggagtatgtggttcaggacggagacatggtctacttccggttcaacgtatgatgacggaggcggagagactggcggcctatgaccgcatgtacgccgacctgctgaaggaacgggacaaggtcctggcggacatggacaagctccgcgccgcgggaaggaatcggggaaccacctaccagcagctgttggcccagaagctgacggttcagaacctgatcggccggtttgagatctacggaatcaaagaagtgtgagggacaggcaggcgcaaatgcgcctgcctgttttgcctgcggagagggatctcctgacggcaggccggtcccatgggcaaaagggaccgggcgtctggcaggacagcattccatatagcgggcggccgtccgctgtccggcagaaaaattcccagggggaaacatttcggcccgccccggcgtatataggttgaaagcgcttttcaaacgagagaaaggaggcattgcatggaagaggctgaaatcctgctgcgcaatgccatggaacaccacggtgccgccgtctaccggctggccctgtgccggatgcagagcgtccaggacgcagaggacgtgtaccaggacgtgtttctccggctgctgggccaggaggcatctgcctgggacggggagcatctgcgggcctggctgctgcggtgcacggtgaaccggtgccatgacctgcaccgcttccgcctgcggcgtccggtgctggcgctggcggacctgccggagacggccgcggaagcggacagcggcgccgcagagctgtgggacgcagtggcccacctgccggaaaagctgcgcgtccccatccacctgtattatgccgagggatattccacggaggagatcgccgggctgctggacattccggcggccacagtccgcacccggctccgccgggcccgaaaaagactcaaagacctgctgggaggagacgaccatgaagaagaacgactatcagaatttgatggagcatatccagccccccgccgggctgaatgaccgggtgctgtccgccgcccggcagacggcgggagcgcagaaggagacgaccggccccaaacatctggcgcccggaaagcggcgcccggtgctccgggcggcagtatgcgccgcctgtgcactggcgctggtggtaggttctgtaacgctggggcccattggcggcggagagcccggagagagcggcgcgccggtaacagccctgcccagcttctccttcggcctgacggcttatgccgctgacacgggggagcgttacgaggcgaacgccaacggggggctggccttcagcacagccggtcaagtctcctggtctgccgagggcggccactacaccggctgtctgttccaggtgaccggggagaacattcgaaccatttcccttgccattgaccgagaggcgctgtaccgcagcagaactctgaccaacctctccagagaagaggtgcagaactatctcgatgccgaggccaacggcacggagtaccggctttccagcggcgaaggagtgatccatgccgtttatggcgaggaggaagaggggcccctgaccatggaggtggtgacggatctgggcgctgccgtcacggagggctatgacccggaggtgcgctatggattcctgattccggacaccggcgatatcgactgggacagggatccccgggcggcgaatcaggagagcatcgaccggatggacggcgcccggctgacggtgacggtgaccttcactgacggttcggagcagaccaaaacctacacgctgtccacagggcggctgaaggtggaatatgacgcaaacagccccggcgggatcctcctgccccagctggccggtgatgaagacccgtggctctacggcgtctatgcggtggatgagacggccagccgtttcctccagtggccggtgcagggagccaacaccatcagcctctccaacccctatggtaccccccggtggcagccgggcggcaagacctgtgaaactcacaccggaatcgacattgccgcgccggagggcgaggcagtcctggccgcagcgggcggcactgtggtggagtccggctatgacgtggagcgaggcaattatgtggtgatcgaccacggggacggcctttctaccctatatggccagtgccgggactttacggtggaggagggcgacaccgtccgggccggggagatgatcggtgccgtggggaagaccggcatggcaacaggggcccatctccactttgaggtccgccaggacggagagccccagaacccggtggcctattttgacagcgacgtgcgggacaccctccgcatgggctgaccggtcctctgtgaaaagaacagtgagcgcggcgcggaacaaattccgcgccgcgctcgttttcggctggggtcaggcccggggcctgcgggcagcccgtcgggcctccgcttttttctccaggttggagaccaccagggcgcaggcagcgtcgcccgtgatgttcaccgtggtgcggcccatgtcgaagatgcggtccacgccgatgaccaggccgatgcctgccaccggcagattcacgctctccagcaccatggtcagcatcaccacgccggagccggggacacccgcggttccgatggaggccagggtggcggtgagcacaatggtgatcatttggcccagggtcaggtccactccgtagcaggtggcgatgaacacggcgcacacgccctggtagatggcggtgccgtccatgttgatggtggcgcccaggggcaggacgaagctggcgatgtcccgccgggcgcccagccgctccgtgcactccaggttcaaaggcagggtgcccacggaggaggcagaggagaacgccatggccatggccgggaacatccccttgaagaaggccagcggactcacgccgcccagggcctttaccgtggcagagtagacgatgacggcgtggaggaagtacccgatataggcgcacagcagcaccaggcccagattgcccaggatctggggaccgttttccgccaccaccggcaggatcaggcagaacacgccgatgggggagaggcgcaggatgatgtccatgaccttcatgcagacctctgtaaggctgtccaccagcgccgctgcgggccgtcccttctctccggcggccaggatgccgaagccgaacagcagcgccgccacgatcacctgcagcatggaggcgttggcaaagggggcgatgatgttggaggggaagatgtccaccagcgtgtccatgaagctggcggtctccccgggctcaaaggtgacgccggtggggtcgatgaccgtgaagaagcccttgaacaggttggccaggaacatggccagcacgatggccccggcagtggtgcaggtataatacaccagcgttttgacgccgatggaacccaccttgcggatatcgctcatggagatgatgccggagagaatggagaaaaagacgatgggcaccaccacgaacttcagcaagttcaggaaaatggtgccgaagggcttgatatagctgacggcaaaggtgggatttcccgtgaaggccatgccgaccgcgatgcccagccccagcgccagaaagatttggagggagagaggaatttttttctgcttcatatacgcgctcctttgcttggtgaactgttgtgcagggccattcggcggaaagaccgcccgaaatggccgaaaactaatccagtatatcaaaaaaactgggacggcacaaccctcttttgcaacagagtacccatttccgctgcttagaaacctgatttcaatttctgtttattttgtcaggaaggcggagggtatagatacgatcccggcatggatggcagagatggagaagagaacctggcatctccactgggcggcgtgggaaaagcggcggatccgggctcgaacattgacggcctgtaaaagagtcccccggacagaaaacgacctctcccgatccggagaggccgtttgttcagtcatgggcgtgaggcaggttccagcggaagtgggcggagaggatgcggacggcgaccacaagcgcactgccgcagagcatggcggccatctctcccgccaggggccagaggaccacgcaggccagcgccccggccagggaggcggaggcatagacatgcttgacgaaaatgtagggcgtgtccccggccagcacgtcccgcagcacgccgccgcccacgccggtaaccacgcccacaaacaccagcaggaacagggtggggcgggccgcgtgttcataggcaatgcggatgcccgccacagtgaaaatgccaaggcccgcggagtccataatcagcagcaccaagtcgtagagccgctggtcccacatgaggagccgccggatgcggggcagaaacagcaccagggaggtcagcagggccaccacggcgtagatgggatcctggaaggtgcccggcggcgtgatgcccaagagcaggtcccggatgacgccgccgcccaccgcggtggtgaggcccagaatgcagacgccgaaaacgtccatgttctttttcaggccggtgatggcgccggaggcggcaaaagcgagcgtcccaaccagctccaggatcagaaacagctgttccatggccgtcaccgggcgtcctgccggaccatctccataaaggcggaggccgcggcggtgggcgtcacgtcccgcagggtgcacatgtccacgctgcgggcaggaatggtgaagtcggttttcagcaggcggatgtccccgctgtccagggccttctgcacaaactccagcgtcacaccggccacccccaggccgatccgggccagggataccagaaggctccgggaggagagctcgatttccggcgtcagggtgatgccgctttgcagaaagtactgctccagaaacacccggctgctggccttgcgctccagcaggatcagggggaactccgcgatctcctgccgggtatacacgtggtcgaagtcacagtcgtagccgctgcccgccacaaagacggagtgggtggcgaagcaggaccaggtatgcagcgcggcggggtccgtgggggaggaggcgaaggcgatgtccacagcgccggatttcagcatgctcagcaccttggcgctgcggccgctgacaatcttcagccggatgcccgggtgctggcggtggaaggcctccaaatatggcgtcaggaaaaagctggtgacagtgtcgctggcgccgatagtcagggtgcccagcaacagctgctgggcctgggacagcttgtcctcccctgtggccagcaggcccagggcgctgcggacatactggtagagcatctgcccctcccaggtgagggagacgccccggggactgcgggcgaacaggcgggcctggagcgccgtctccagctgcttgatagactggctcaccgccgactgggagatgtagaggttttttgccgccagggagatgttgcccgtctccgccacctctttgaacactcggtacagctccagcttgaccgccatggatcatccctccagcaatcagaatttcttatagtgtccggaatcattataagggatgactggaggaaacgcaacggcggcggaaaaattttcggtttttctttgcaagcgggatggtttttggtatactaacacattagattgtaaagacgggaggcgcgctatgctgtatcacattctggcagtgggcgacgtggtgatggagcccggcctccgccatctggagcggcacctgcgtcccctccagaagtggaaggccatcgacttcacggtggtgaacggcgagaatgccgccggagtggggctgacccgcgaccaggcggagcggatctacgacgccggtgccgacgtggtgaccttggggaaccacgccttcggcaagagccagattgcggatttcctggaggacgcgccctggctgctgcggcccgccaactacaccggccgggccccgggtcggggctgcggtgtttacgacctgggcggcgtccggatccgggtgctgaacctgatcggccggtgcgacctggcctggggggcggacaaccccttcacggcggcggaccggctgctggagagagacgcggcggacttcaccctggtggacttccacgcggaggcaaccagtgagaaactggccatgggctactatctggacgggcgggtgtccgccctgtgggggacccatacccacgtgcccaccgctgacgagcgggtgtgtcccaggggcacgggctatattacggatttgggaatgaccgggtccatcgagtcggtgctgggcatcgacccccggcagtccgtggagggattcctgggcggcctgccgggccgctaccgggcgccggagggacccgccaagctccagggggccatcttcacgctggacagcgccaccggactgtgcaccgccgtggagcggatcgacgtacggtgaccgggacgatttcaaaccggctggttaaaatttcagatagagaggaacgaaccatcatgtccattgaaaaagtcagagcacatttcaagcccctcggcatcgaagagcgaatccgggagttcgatgtctcctccgccacggtggagctggcggcggtggccgtgggtgtggagggcgcccgcattgccaagagcctcagcttcaaggtggaggacaagcccatcatcattgtggtggcgggggacgccaaggtggacaacagccgctacaaggcccagttccacaccaaggccaaaatgctgacccatgaggaggcccacgagctgatcggccacgacgtgggcggcgtgtgcccctttgccctgccggaggatgtgaaggtgtacctggatgtgtccatgaagcggttcgagacggtgttccccgccgcaggcagcagcaacagcgccgtggagatgacctgcgacgagctggagcggtacgcctccaactttgccgcgtgggtggatgtgtgcaagggctggcggcccgaggagcagggatgatccggtttctgcacggcgcggacttccacctggacagcgcctttggcgccctgccgcccggacaggcggcggcccgccgccgggagagccgggagctggctctccgtctggcggactacgtgaaggaacacggcatcgatctggtgctgctggcgggggatctgttcgacagcgccagccccttccgggagacgggggaacagctggccgccgctctgggacagatgcgggccagggtgttcatctcccccggcaaccacgactggtacggacccggcagtccctgggagacggtggactggccggagaatgtgtacgtattcaaagagaacaggctcacggccgtggaggtgccggagcggaacttggtgatccacggggcggcattctccggcccggaacagccggagagcctgctggcgggtttcaccgccccggcagacggaaagtgtcacatcggcctgctccatggggagctggacggggcggaggcgcggtacggccccatccgccgggaagaggcggcggccagcggcctctgctatctggcactgggccacgtccacaagcggacggcgcccctgacactggggcggacggtctgcgcctggcccggctgtccggagggccgggggttcgacgagctgggggagaaaggtttttacgaggggacgatctccgacggcggagaggtctccctgacctttgtgccctttgcccggcaccggtatgaggttttagaggtggacgtcaccggaaaagagccccgggccgccgtggaggcagctctgccgccggagacggccggggacctgtaccgcatcctcctcaccggcgagaccggagagggcggcgctggcgccgcggccatccaggaggcgctggcggaccggttttacgccctggaggtccgggaccgcacccgtatggcggaggacctgtggcggcgggcggaggaggactccctccggggcctgtttctccgggagctgcgccagcggcggaagcaggcggagacggaagcggaacgggcggagatcgacctggcggcccggttcggcctggcggcgctggaccaccgggatctggggtgagcggaggagcggatgaaatgaatgagatgaagaagattctgctgatcggcactggcggcaccatcgcctcggacgtgacggacagcggccttgcgccggagctgaccacggagcagctgctctcccatattcccgggatctcggacatctgcggcgtggactgcctccagctgctgaacctggacagcaccaacatgaccccggctcactggctggagatcgccgcctgtatccgggaccactacggctgctatgacggctttgttatcacccacggcacggacaccatggcgtatacggcggcggccctgagctatctgatccagggtagtcctaagcctattgtgctgaccggcgcccagagacccatcggatttgattccacggattccaagacaaatctggcggacgccttccgctgcgcggcggaggacctgccgggggtctctatcgtgttcaacagccgggtgatcctggggacccgggccaagaagacccgctccaagagcttccaggccttttccagcatcaatcacccggagctgggcgtcctgcgggacggcgtgctgctgcggtacatccgccaggactgccgggaggccccggtgttttacgaccgcctggacccgcgggtggccctgctgaagctggtgcccggcaccgggcgggatgcggcggacttcctgctggagcggaacgacgccctgattatcgagagcttcggcgtgggcggcctgccggaggcgggcggcttttacgactgcgtccgccgctggatggaggcggggcgggtcgtcgttctcaccacccaggtggagaatgagggcagcgacctgggggtgtatcacgtgggctaccgcctcaaaagcgatctgggggtgctggaggcctacgacatgaccacggaggccgtggtggccaagctcatgtggatcctggggcagacccggcggcgggaggaagtggagcggctgttctacacaccggtggcccgggacatcctctggcccggcctgtaaagacagagggaaccgacgtccggaaaaaggcaggttcccccacttgacaaggaaaaaggcccgtgatatatttatttttactgaaaaaagcattgaaaaggacgctgtccgggactcgacagcagagagggaccgccgctggctgaaagcggaccccgccagagcccggaacacagccaccgccttggagccgcccaccgatatgtaggctgggacgggacctcccgttatagaggacacgagcggcatccctccggggatgcaagcagggtggaaccgtggaatacgattttgtatcccacccctgatttttcaggggtgggatttttgttttctgccccttgaacaaaaggaggatcaaccatgtctgaagaagtgaagaacaacgagtttacctttgagaatccggcgtaccgccagacctactggcacacctgctcccacgtgatggcccaggccgtgaagcgcctgtggccggaggtgaagctggccatcggcccctccatcgacgagggctggtactacgacctggacgcccccttcgccttcacgccggagcacctggagaagatcgaggcagagatgcggaagatctgcaaggagaagctgaagctggagcggttcgaactgccccgggaggaggctttgaagttcatggaggagaaggcagagccctacaaggtggagcttatcaacgacctgcccgcagacgcccatatctccttctacaagcagggcgagttcacggatctctgcgccggcccccatctggactccaccggccgcatcaagggcaacgccctcaagctcaccgcttgcaacgccgcctactggcggggtgattccaaccgggagaccctccagcggatttacggcatcgccttcccgaagaaggacgagctggatgcctacctccagcggatcgaagaggctaagaagcgggaccaccggaagctgggccgggagctgggcctgttcatgctgcgggacgaggggcctggcttccccttcttcctgcccaagggcatgaccttgaaaaacaccctgctggattactggcgccaggtccacaagaagtacggctatgtggagatctccacccccatcatcctcaaccgtcagctgtgggagcgttccggccactgggaccactataagcagaacatgtacaccactgttatcgacgaagaggattacgccatcaagcccatgaactgccccggcggcatgctggtctacgccagcgagcctcactcctaccgggagctgcccctgcgggtgggcgagctgggcctggtacaccggcacgagctgtccggtgcgctccacggcctgttccgggtccgctgcttcacccaggacgacgcccacatcttcatgaccccggaccagatgaaggacgtgatccaggagacggtccgcctgttcgacgaagtgtactccaccttcggcctcagctacaccattgaactcagcaccatgccggaggatcacatcggcactgtggaggagtgggagcataaccaggacatcctgaaaaacgctatcaccgacatgggcaagaccttcgaggtcaacgagggcgacggcgctttctatggccccaagctggacttccatctggccgattccctgggccgcacttggcagtgcggcaccatccagctggacagccagctgccggagcggtttgaactggagtacaccggagaggacggccagaagcaccgccccgtcatggtccatcgggtggttctgggcagcgtggagcggttcatcggcgtcatcaccgagcactttgccggcgcgttcccggtgtggctgaacccggtgcaggtgaaggtcctgcccattacagaccgcgccctggaatacgccgatcagatcgcaaagcagctggatgccgccggcttccgggtggaggtggacggccgcaacgagaagatcggcaagaagatccgggaggccaccctggagaagatcccctatatgctggtagtgggcgaccgggatatggaaaaccagaccgtctccgtccgcctgcggaccggtgaggatctgggcgccatgtccgtggcggattttgccgcccggctgaagcaggacgtggacaccaaggccatctggtaaaaatgcgttcccctcacagcggcccggggccgaacccggaccgctgtgtccgattccgcaacgggcgctcccgcatccgggcagcggaaagatggcgggcattttcggtggttctgcacattgccgggaccgcccggacggtatacaatagaaaaaacatccggcactttttgcagaggaggcggctatgagtcaggagattcactatttggagaccggatcccaggaccctttttacaatctggcgtttgaagagacggtactccgcagccggcggtcgggggagtatctgctcctgtggcagaacgacaacaccatcgtcatcgggcagaaccagaacgccgagggtgagatcaaccgggcctttgtggaggcccatcaaatccatgtggtgcgccgcaccaccggcggcggcgccgtgtaccatgatctgggcaacctgaactactccttcatcaccgacgtgggagacgcggagcggctgaccatggagcggttcacccgtcccattgtggaggccttgcagggattgggcctgcaggcggaggcctccggccgcaatgacatcctggtggaggggcggaaggtgtccggcacagcccagcggctgctccgcgggcgcttcctgtatcatgggacactgctgttcgacgccaaccccggcatggtgtccggggcgctgaatgtggacccggcaaagttcgagtccaagagtgcaaaatccgtgcgcagtcggatcggcaacatccgggagttcctgaagacggatatggatatgcccgccttctggagttatctgaagaaaacattggccggcagcggtctggtggaggatcacctgacagatgaggaactggctgctgtggatgagctgaagcgcaccaagtacgacacctgggagtggaacttcggccgttcccccaagtacaacctgcggaacaagcgccgctgggacggcggcaccctggagccctgtgtggaggtggaccaggggatcatccgccagatcgtgttctacggagattttctggctgtcagccccatggacgaggtgaccggcgccctgatgggcacgccattccggcgggaggacgtgggggcggtgctggaccgcttcccccttcgggactatttcggaaccatcacccgggaccaggtgctggatacaatattttatgtggactgagacagcgtccgcagaatcaaaaagagagacgcgcccggcgcgtctctctttttgattctgtcaggtcaggatttcccgctggaacggctccagcagcagccggacatccggcaccccctggagctggcccgcacccttgacggcggcatcccgatatccccagcggtcatcgtgggagaaggggagatggtataccaccagatgctccggccggatggcctgttcgatgaagtgacggcccttccgaagagtcacccaagggaagttcaaaagggccagatcaatggggcggttgccgatgaaatcccgcagctgcgggtccgccacggcgcagtctccggcgatcaggacccggaaaccgtcatattccaggatacagccgtagtgggggacctcccggtactgtgcaccctcgtgagtcaggcgcatgaagtccatgtgcagcccctccagggtgagatggctgctgggaccggccagcaccagctggcggtcaaactcctgctccggcagcaccagggccacctgcggattttgggcaatcacctgctctgtcagggcgcgggagtaatggtccggatggcagtgggtgaaaaagagcagatccgggctggcgaagtccggatgagcctgaagaatgttccagcgctcaggggtgacagtggagaaccccacaacccgatggtcgtggagcgcgtcggaccagacccgcatggcacccagatgcagggcgaccccggcgttgacgctgagtgtgatttggcaatgggacatgatgtcgctccttgtgtgtacaggatttttacttgcgggacaaacgtctttcagaataaaatttcaaaatgccatgatttgcgtaaggcttgcgtaagaatcggcgctttgcggttttatggttgattataccatactttttccgaaaaatcagcaaaaagtccaaaaataatttatttttctgttaaaattgccatatttttgctgtttgtacaaaattggcaaagagccacagaacaaaaatgggcaaaatgacaaatttccgattgctgattgatattgaattggcaaagtgatatacttgtctccgttaacagaaatttaatatgtatttctgtgaaacaggcggctttgcggcagtttattcatacggcatgatagacaggcaactattcatgcgcaggagacgtataaatattctgttaagacggggcgccacactaactgaagggattgatcgaatgaaaacctacaagacgatcatgaacgggctcaccaaagtcgaggaattcgtgctctgcgtgattaccgtcgtggttacagcgatcacgtttatcaacgtgctctctcggtatgttttccactccaacttcgcgtggtccgaggagctggtcatcaacgtgttcatcctgatgatcatgctgggctgcgccctagctaccagagacggcagcatgattacgctgtccctgatcttcgacaatgtgggcgtcgggggtaaaaagattctgaccgtgattgacacggtcgtgaacctgatcttttacgccatcctgatctacaccggctttaacaaggtgttcgatcagatcagcaccggcaaagagaccttctctctgggctggcccgaatgggtgtttaccatcctgctgcccatcggctccatcttcctggtgctccatgcgatcgagtatctggtcgacgtgatgagcaacaaggccgcctgtgtgaagccggctgagacagagggaggcaaagagactgtatgattaacttgatcctgttcggcagcttcttcgtgatgctgctgctgaatatccccattgccgtcagcctgggtatgtcttccattttcgccctgctcttcagcagttcccccctgacggtcgtccctaccaacgtgtacagcggcatggcaaagttcctgctgctggctattccgttctttgttctgtccggcaacatcatggccaaggcgggcatctccagccgtctggtggcgtttgctgatgactgcgtcggccatcggcgcggcggcatcgccatcgtggctgttatcgtggcctgcttcttcggcgccatctccggctccggtcccgccaccgtggcggctctgggcattatcctgattcccgccatgatcaaccgcggcggcttctccgcccccttcgcctcttccctgatggccagcgcctcctccatcgccatcgtcattccgccctccatcgcattcgtggtgtacgcctccatcaccggcgtctccgtgggcgatatgttcatgggcggctggattcccggcatcatgatgggcctgtccctggtgatcatcatcatgatcgagtgccgcaagaagggcatccaggcatccaaggcaaagtcctcctggggccagcgctggaagtccttccgtgaggccttctggggcttcctgatgcccgtcatcatcatcggcggcatctacggcggcgttttcacccccaccgaggcggctgccgtctccgtggtatacggtctggtggtcggcgtcttcatctatcgtgaggtcaagatgaaggatatgatcgatatcctggtcgactccggcaagaccaccggcggcatcatgctgatcatcggcgcggccaccctgttctcctatgtgtgcacggtgttcggcattgcgcaggcggcccaggctctgctgctggagatctccggcaacaagtacatcttcctgctgatcgtcaacgtgatcttcctgattgcaggctgcttcgtggacgccaactccgccatgtacatctttatccccatcatgtaccccgtagccacccagctgggcatcgaccccgtccacttcggcgtgatcgccacagtgaacctggctatcggccaggtgactcctcccgtgggtgtcaacctgttcgtcgccatcggtgtgtccgagaagcttcagggcctgcgggacaagaccaaggtcaccattgtctctatgtccaaggctgtgtggccccagattgtggcatgcattattgcgctgctgctcatcacctatgtgccctggttctctaccgtgctcttgttcggcaaataagcatctcctgacttggctgtaaccgcgctttgcggtttcagataatacctgctacaactattttaaggaggcaaaacaatgaaaaagtttcttgcactgctcctggcgctcaccatggctctggccctggtggcctgcggcggtggcgatgacgctgccagcgataccactgccgacagcggcgatgatgctgccgcttccactggcgagttcgaggaaatgacctggaagttcgcctgctccgccacggagacctctccctgggtggacggcgccaaggagttcgcccggatcgtgggcgagaagaccggcggtgccatcaccgttcagtactatcccgctgaccagctgaccgccggcaaccagaccgacggcatccaggccctgatggacggtaccaccgagttgtccatgcactccaacctgatctggtcctccttcgaccagcggttcaacgtggtctccctgcccttcctgttcagcagcacggaagaggctgacgcggccctggacggcgccggcggcgaggctctgggcgagattctggagagcacctacaacgtgcacctgctgggcattgcggagaacggcttccgccacatcaccaacagcaagcacgccatcgccagcaaggctgacatgaacggcctgaagatgcgtgtcgcgggttcccagctgctgaaccgctcctatgagctgtggggcgccgactacaccaacgccaactggtccgaggtgttcaccgctctgcagaccggcacctacgacggccaggagaaccccctgcccaccgctgatgccgcttccatccaggaggtccagagctatctgacctattggaccggcgcttatgactgcctgttcttctgcatgaacgctgagctgtacaactccctgtctcccgagctgcaggccatcgttgacgaggccggccaggctgcctgcgagtacgagcgtgagctgaaccgcagccaggatcaggagatcatggacaagtgggccgaggctggcgttgagatcaccgagctgactcccgaggctgctgctgagttcgctgaggcttctgcccccgtgtacgacgagttcgccgacgagctgacccccgagctgatcgaggctttcaccagcgtcactcaggctgatgctggcaccactgagcccgccgcctaattgaagaggcagcctgcgtttccgtataaacaacggttaaggtttcgtaagttgcgttagctgagaggacgtggctgcaggaaactgttgccacgtcttttcagagaacataggtgaaaattttgacgatttcaccgcccagcgcatctgtcccagcaaatttcaaagagtgccgacaggagagtcggcagaagggagtttttcctatggcagcaacaaaggcagcaaaatacaccaaggaactggcggagcacttttatgagaccatgtgcaccatccgcaagtttgaggagagcgtgaagcacgacttcctgaatggtgagattcccggcttcgtgcacctgtacatcggtgaggaggccatcgccactggtgtgtgctccgctctgcggaaggacgatatgatcgagtccactcaccgcggccacggccactgtgtggccaagggcgcggatgtgaaccgcatgatggctgagatcttcggcaagaagaccggcctgtgccagggccgcggcggctccatgcacattgccgacttctctgtgggtatgctgggcgccaacggcgtcgtgggcggcggctacaacctggccaccggcgctgccctggccagcaagatgatcctgaagaacgaccgggtttccgtggtgttcttcggtgacggtgcctccaaccgcggcactttccacgaagccatgaacgtcgcttccgcctggaagctgcccgtgatcttcgtcaacgagatgaactgctgggcttccaccacgccttaccgcaccacctgcaatgtggagaacatctccgaccgcgcggcgggttatcatgtgcccggtgtgatcgtggacggccaggatgtctttgctgtgtatgaggccgccaaggaggctgttgcccgtgcccgtgccggcgaaggccccacgttcatcgaggccaagacctaccgcattgagggccacttcgtgggcgaccctgaactgtatcgtgaccacgccgagacccagaagatctatcacgacaccgatcctctgaagatgttccgcgccaaggccgccaagctgaagctgatgaccgccgaggagtgcgacgccatcgatgccaagtgtgagcagaagatcaaagacgccaaggagtacgctatgcagagcgagtacgccgatgcgtccgagtacatgaagtacgtctacgtggatgactaaggcgaaggaggacaaatacgatgcgtaagatcactttttctcaggccactcaagaggccatggccgagacgatggcgaaagaccccactgtattcgcaatgggcgaggacctggcccgtcagggcggtatcttcggtcagttcaagggcctgccccagcagttccccggccggatcattgatacccccatttccgagacctttatcatcggcggcggcgtaggcgcggctctggccggcgcccgtcccgtggtggacatgcacttcgccgacttcatcggcgtgcccatggacgagatcttcaaccagatggcaaaggtccgctacatgttcggcggccaggccaaggtgcccctggtcctgcgtgcgcccgacggttctgccggcggcggcgctgcacagcattcccagtgcgtggagtcctggttcgcccacatccccggcatcaaggttgtggcgccctccaatccctatgacgccaagatggtgctgaaggccgccatcgagtgcgatgaccccgtgctgtacttcgagaacaagatcctgtacaaggagaaaggcgaagtgcccgagatcggcgaggaggagccttacaccctgggcaaggcccgcgtggagcgtgaggggaaggatgtgaccatcgtgtcctactccatcggcatgaagaatgcccgcggcgctgcggacctgctggccaaggagggcattgaggccgaagtcatcgacctgatcaccctgtctccctgggataaggagaccgtgctgaacagtgtgaagaagacccaccgcctctgcatcgtccacgaggctgtcaagcagggcggcttcggcgcggagatctccgccaccgtcgcggaggaggccatggagtatctggatgcccccatcctgcggtacggcgctcccttctgcccgatccccttcgctcccaccctggagaagatggtgaaagtggttccggaggacctggtaaagggcatcaagggcatgttttaatgcctgttgaaaaggagattttcaagtatggcaactgaagtattgatgcccaagctcggcctgacgatgaccgagggcaccattgaagagtggaaatataaagagggcgacgctgtcaagaagggggacatcctgttctccgtagcgacggataagctgaccaacgacgtggagtgcgaagaggacggcaccctgctgaagatcctgctgccggagggcgagaccgccccctgcaagagcgtgatcgcctggatcggccagcccggcgaggcgattccggatgcctccggtgccgccgcgcccgccgcggccgcgcctgctgctcctgccgctgcgccgtccgcagcctctgccgcggctcctgccgccgcccccacggcccatgcggaccgtcccgccggtgcctacgtgctggcgactccctacgccaagaagctggcgaaggaaaagggctatgacctctcccagatccccggcaccggccccaacgggaccgtggtggccaaggacgtggagaactttgtggccggtcccaagaccagccccatggctgccaagctggctgccgagctgggcgtggacgtcagcaagctggacgtccagggccgcgtgatgaaggcggacgtgctggccgccgccggtgtgggtgcagccgcagctcccgccgctgaggccgttgccgctgttgaaagcaacgacgagaagcctgtgaaggtgaatccgctgcgccgcagcatcgctgccaacatgaccaactcctggcacacctctccgcgggtcacctacacccgtccggtggaggtcacggccatgaaggacctgcgggccaagctgaaggacggcctgaaggagcaggggatcaagctgacctacaaccacatcctgatgaaggtggttgccaaggccctgaccgagttccccgacgtgaacgccagcttcgcggacaatatgctgacccgccacaagcacgtgaacatgggcctggcggttgccaagggcgatggcctgatcgtgcccaacgtgaagaactgcgaggagaagtccctggcacagatcgcccaggagacggaggctctgatcgaggccacccgcaccggcaagctgggcatggaggacatgaccggcggcaccttcaccatctccagcctcgggccctatggcatcaccagcttctctcccatcatcaaccagcctgagctggcgattctgggcgtgtgcgacatggtggatacccctgtggtgcgcaacggcgagatcgtgatccggaccatgatgaacctgagcctgactgccgaccaccgcgtgatcgacggcgtgatggcctccaagttcctcaagcggatcgcggagctgctggagaacccctacatgctcctggtgtgagatcaaacaacccattcaagggaacccggcctgtgccgggttccctttgaggggtcattgtccaaaatttgacgatccaaacaactcaaaggccgaatcagaggcggtttttgggtaagttcatgaaagaaggacagaaattatggcaactgaagttctgatgcccaagctgggtctgacgatgaccgagggcaccattgaagagtggaagttcaaagagggagacaccgtcaagaagggggacatcctgttctccgtggcgaccgataagctgaccaacgacgtggaggccgaggaggacggcaccctgctgaagatcctgctgccggagggcgagaccgccccctgcaagagcgtgatcgcctggatcggcgccgccggagaggcggttcccgatgctgccggcgccgcggctcccgccgcacccgctcccgccgctcctgctgcacctgccccggctgcagcccccgccgcagctggccagaagaccgttatcgtcgtgggcggcggccccggcggctatgtggctgccatccgggcggcccagctgggcgccaaggtgaccctggtggagcgcgagcacatcggcggcacctgcctgaacatcggctgcatccccaccaagtgcctgctgcacagcgcggagctggtgtccgagatcaaggaacagggtgctgacatcggcgtgaaggtctccggtgtggaagtggatttcccccaggtgatcgcccacaagaacgccatcagcaagcagctgacccagggtgttgccggtctgctgaagcagaacaaggtcgcccgcgtggacggcgaggccagcttcaccggccccaagaccctctctgtgaagaagtccgacggctccgtggaggagatg

SEQ ID NO: 4916 - DNA, 678 bp, Unknown
  gut microbiota DNA sequence
gtatttctcaaatgcgggggaggcatcgtgaaagaatcggactgcaaacgctatgaggatctgccgctgtttctgaacacggcaacagtggcaaaacttcttggtgtgtcacaatccagctgctacgagctcatgcacgagccgggcttcccggtactaaagatcggcagcaggatggtcgtacccaaggagcagttcacccgctgggggatgagcatacgggaggtggaaaatcaggtacggaagtggaacctacttctctctgcccgacgagatcttcctgctgggtctgaatgccggtgaactggcagtgtatagttacctcaaacggtgcgaggaccgtaagacgcatcagtgctggcccaacgattgggagatctgtgggtatgagtgaaaacacagtgcgcaagtacatccgccaactggaggaacaggagctcctcttcacagaaccgacagagattatgaccagggccggtcagaagcgcaataggaatctgcaccacaccctccgtcccacccaggaggtggtaaatgcgtactatgaccgtcagttggcgcggctggaaatcacagtaatgcgtcagaaggcagcagcggcccaggccggcatgtgaccgcctgggccgctgtgtgcggaggtgacagcgtgggcagggtacaggcattccgtgtggg

SEQ ID NO: 4917 - DNA, 16629 bp, Unknown
  gut microbiota DNA sequence
accacaaagccggcccgctgacaagcgggccggctttgtgaaatgcccggcggcatcagatttgcgccttctttttctccaacaggcagagcacgcaggctgccaaaacggcgcccagcagcgcgatgtccattacgcgtcccccgttctcttgctgagtcggatgcactcaagggcatagactgtttgcatcgcgccccacaccgccagcaccgccgcgatgggcagcaggccgaagtcaaacacaaagttcaggatcagcagggccacccacaggaagatgcagaccttggtccccaccatataggcccggtagcaggcctggccgatctgggcccgctccgcctcgtcgcagctgtccatccaggtcttctggaatttcatgtcgtaaacgctgccccgtttctccggattgatccggcgctccaggtccacgatcttctgctggagcaccaccagcaccgccacagatgccagaaagaggatcaggtccggcagaaagcggtcgtagatgatggaggcggcgaagaagaaaaagtccaggattatcaccagccccgtcagcagcagagcccagctcagctgctgctccgccgcgtccatggcgtcctcgtcctccccatcccaggcggcaaagcgccgtttggcggcggcatagaggtaccagcccgcccccagcagcaccacggcgctgccgacgatgccccagggcgcacacaccgccagcacccggtccagggcctgccgcaccgtctccgccacgccagcggccccagccacaccggtgaaaaagcccagcacgccgcccagcagcccgaacagcagaattgtcagcaggtatttgggcagcgccctgcggttgtcccgcctcacgttatcgctcatggcattcatcctcctgataggtaaaaatgtcctccacggtcacaccgcagatcctggcaagcttcagcgccagcgtcaccgagggggagtagtccccccgttcgatctggctgatggtctggcgggaaacacccgccagggcgcccatctcctgctggttgacccccagccgggcccggtgctccttcagccggttgtacagcggcatccgctcatcccctttcctgacaatgatccaagtcaaaatgacaattattcttgtcaaatatagcatagcactgacaaggattcttgtcaatgaaaaattgaatctgcgcacaaaaaccggccgcccaatttggacggccggtttttgaacagatgtagggcggcggaaagaacgctcactgccgggagggtgggggaggcgggtcccgccatttctccggtgggactgccttgctcaccagccggtttttcacatagctgcggaacagggcgtagatcacggagcacagcgggatgaagaacagcatccctgtgatccccatgagcttgccgcccagagtgacggcggccagcacccagatggagggcagccccacggaggaacccaccacatgggggtagatcaggtttccctcgatctgctggagcaccaggaacagcacgatgaaccacagcgccttccagggatcgtcgatggcgatgagcagtgcgcccacagcgcagccgataaaagcccccacaatggggatcagggcggtcagggcgatcaggacgcccaccagcagggcgtagggcatccggaagatggtcatggccgcgacgaacagcgtgcccagaatgcaggcctccaggcactggccggagaggaagctggagaaggtccgcccggacagccgcaggacgtccagcgtccggtcggcctgccgcaggggcagcaggccgtaaatcacctggcggccctggcggcccagcttctccttctgcagcaggacatagaaggagaagatcaggctgatgacaaaggtgctgacaccgctgaccacaccgccgatgaacccaccggaggagacaatcccggccccaattgccttggcgatctccagagccttggcagaaagctcctgccattggatctcctcctgcagcttcatcagctgctcctccagtagaggccacaggtcctgcaggttctccgccagggcggtgagctggtgctccagtcgctggaaggcggcaggaatctcccgaatgatggacatgactgcatctgcgatgcccgggccgatcaccaggccagccagggccagcacaccgatcaccgcgaccagggtcagcaccagggccagggggcggcggagctttgcgcccttccggtttctggggaacaggtgccgctcgatggcccgcatgggcacattcaggataaaggccagggcgccgcccagcagaaacggcgccaaaatcccaagcagccagcccagcgccgccaggactgcatccaggcgctgcagtgcgcagtaaaacgccacaccgccgcagaccaccagcagaagtcctttgatcttctgtttgttccattccatgaacggtaaactctctttccggcccggagggcctgtctcaacgggcttcctgctccttccgatactgggcggcagcttccagatactcctccatggccgcccggttgccttcgatctcctccggcttcaggggccgcaccaccttggcggggctgcccaggatcatggacccgtccggggcgtccatttttccggtgaccagggccccggcacccacgatacagtcgctgccgatcttcgcgccgttgaggacaatggcccccatgccgatcagggtgttgtcccccactgtgcagccgtggacgatggccccgtggccgatggtgcagcccctgcccaccaccgtctcctcgtggaggatggcctcgtcctgaatattggtgtccgttcccacggtgatggggcccatgtccccccgcaggaccgcaccgtaccagatgctgacgccctttgccagccgcacgtctccggtgacggaggcgccctccgcaatcagcacgttctcgtcagtctttctcagctcgtatgtcatggtctctcctctttctctctgatttcagatctccggggcgaagttgccgtccacgaacactgggatttcctttccgtcgtgggtaatacccaggatgttcaggtccggcgtgcccaccatgaagtccacgtgggtgatggagtcgttgaggccccgggccttcagctcgtccttgctcatggcctggccgtccttgaggcagggataggcctcgccgaaggcgatgtggcaggccgcattctcgtcgaacagggtgttgtagaacaggatcttctggttggagatagggctgtcatagggcaccagggccacctcgccgaagtagctggccccttcatccacagtgacggcggccttgagggcctcctccccctgttccgcgtgaacctccacgatcttcccgtccttcaccacaaagtggaacttgtcaatgatggtgccgttgtgggacaggggcagggcggagtagaccacgccgttgacgccggtcttcaggggagaggtgaagacctcctccgtggggatattggcgatataggtgcggccagacagagtcacgtcgttacccgcctcccagatgtggtcctccggcagttccacagtcaggtccgtgcccagggagttggtgtagtggagggacttgaagttcagctggttcagcttctccacccgatgggccagggtctcgatatgccggtgccacttgtctacgcacctgccgtcgccggtaatgcgcactgcctggaagatggcctcccacagtttgtccattgcctcgctctccgcaagatccgggaacaccttcttcgcccagctggggatggggatggaggcgatgcaccaggggaagccgccgcacatctggagacggtcgaagtccttcaaggccctcccgctggcctgctgggcccggacgatccggctgtggtccacgcccttgaggttctccggatcgctggcggagatggccaggtacgccgccccctccagggcgtagtcgttgtagaagtgccgccgccacaggggcacggtgtcgaacacctcgtcagccgcatggaggtacttcatccggcccagttcatcgtcgccccagttcatcaccacctcccggcaaccggcctgataggcctccgccgcacagagacgggcgaaaaaggcgcactccacaggcgaggagatcaccagcggctgccccctctggatattcaggcccacccgcaccagcagctgggcgtattccgtcagtttttctttcatggattccatttgattccatcctttccaagggtttcctcacccagagaatattgtagagcatctctcccgtaaagtaaagcgggggccgccgggattcaaaaatcgtttacgattcccccgcccggtcctttcgcagggagatcagcgtggcgttcagctccgcccccatgatgagggtcacggcggtcatatacagccagatcaaaagggcgatggccgtgccgatggagccgtacagcagggagtagtcggcaaagttctccacgtatgtggagtacagccagttcagcgccagccaggcccccagggccgccatagtgccgggccagatgttccgccagggctggcggccgtcctgagacagtgcgtacaggaagaacagggcgaaataccctgccaccgccgccaccgggaaccgcagcttcgcccacagcaccgcccagaaccggggcaggccgaagctgtccacggcgtagagcagcagccggtctcccacggacatcagcgtcagggtcagggcgatggtggcgatcagcaccgccgtgtacagcagcgttttcaccagctggggcagcgcgccccggggcgggcccaggtgataggcgatccgcacggagcgcatcagcgtgttggtggcccgcatggggaagtacagggagaagaacaggccgaacagcagcagcttcacactggggttccggcccacataggtgaggtacaccccgatgaaggacacgatctcccggggcaggaactcctgcaccgcggccagaatggcatccacgtccagctgcagcaggcccagcagggagctgacaaagatcagcaggggaaagatcatgaacagcaggtaaaacgccagagccgctccctgcatccccacattgtggcgcagataccgctgcaccagcagatagatgccccgcagaaagcggttttggggcagctccatccaggctcgcctttgcacgcaggccacctcctctccgtgtgcatccatagtatgcacagaataccaccgatctgttccgcagcggtgcagaattctgtcgggcggcagagactcactcccaagtctgccagatttccggatggtagcccaccgtggcctcccttccattgcggacgatgggggtcacgaacagctccgggtgttccagcagcttctcctcccgggcgtccggggtgatataggccatgtacaggtcctcataggcccggcatttcgtgttcaccagggcgtcaaagcccactttctgcttgacggactggtactcccggggggataatccctttgagggcaggtcgatatactggtacttaatgcggcgctccttgaaccagcgctccgccttcttggagtcgaaggacttagaggaaccgaagatctgaatgttcatgcctgtgctcctgtctcaataaaattggaaattggaatggagggtccggtatgacggacagtattaaacggctgaaggaactggtgggcagctccgacaacatcgtgtttttcgggggggccggcgtttccacagagtccggcatcccggacttccgcagcactggcggcctatatcaccaagaatggaaatatccgcctgaagtgattttaagccatacattttacgaaagcaaccccgaagaatttttccgcttctaccgggccaagctgctggccccggacgccaagcccaacgccgcccataaaaagctggcggagtgggaggcggagggccggttgaaagccgtcatcacccagaacatcgacgggctccaccaggccgccggcagccggaacgtgctggagctccacggcagcgtccaccggaaccactgccagcggtgcgggaaattttacggtctggagcatatcctccgcacggagggcgtgccccggtgcagctgcggcggcatcatcaagccggatgtggtgctctatgaggaggggctggatcaggggacgctggaggcagccgtccgcgccctggcggaggcggatatgctgatgatcggcggcacctccctgaacgtctatcccgccgcggggctgattcgatactatcaggggcacaggctggtgctcctcaacaagtcgccggtggcccgggatctggccgcggatctggtgattactgaccccatcggcgagaccctggcccagctgtgaggcgcttcggcgccggagttcttcaggcagccctccgagggctgcctgttgctttttgaatttgcaagttcgaaaaaagaaaaattcaaaagttttcttattttttcaaaaatattttttaaaacggttgaaaatgcaattttttaatgatactattgcaaatagtacaacggctgcatgccgccgaaaggagcgcgcacccctatggtctggaaagagaaccgtgagaacgcctattgtgagatcacccccgccattctcgcgctgaaggagcagtgggagaagaaaaactacatcgaccccaagctctataaggagtataacgtcaagcgcggcctgcgggacgaggacggccgcggcgtgctcaccggcctgacccgggtgggcgagatccagtcttacagcgtcacggagggggagcacatcatcccccaggacggtatgctttactaccggggcatcgattgccgggagctggtgaagggctccgaggggcgccgcttcgcctttgaagagacggcctatctgctgctcttcggcgaactgcccaccgccgcccaactggaggcattctgccagcagctggcctcctaccggacgctgcccaccaatttcttccgggacgtgattatgaaggcgccgccccgggatctgatgaacaccatgcagcggggcatcctgacgctgttctgctatgatgacaagcccaacgacatcgggctggagaatgtgctgcgccagtgcctgcagctgatgagcaatatgcccgtgctggccatctacgcctatcaggcctggcggttcagtcagggggagagcctgtttatccacgtgcccaagccggagctgtccaccgcggagaacttcctgcggatgctgcgggaggactgcagctacaccgatctggaggcccggaccctggacgtggccctgatcctccacgcggacaacggcggcggcaacaactccaccttcaccaaccatgtggtcacctcctccggaacagatacctattctgccatcgccgcgtccatggcctcgttgaagggtccccgccacggcggcgccaacagcaaggtgatggccatgatggacgacgtgaaggagcacgtgcgggactggaatgacgagggctgcgtggcggactatctcaccaggatcctgaacaaggatgccttcgaccgcagcggcctgatctacggcctgggccacgcggtctataccaagaccgacccccggtgcgaggtgttccgggcctacgtgaatcacctggcggcggaaaagggccgggaggacgagctggccctgtacgccaatgtggagaagatcggcaagcagctgctgatggagcggcagcacaagtctgtgctctccaccaacatcgacttttacagcggatttgtctatgagatgctgggcctgcccaaggagctgtatacgcccctgttcgccgtggcccgtatcgccggctggagtgcccaccggatggaggagctctccgtgggaggcaagctgatccgcccccggtatgagtgtgtggaggagcaccgtccctatacgtccatggaccggcgctgaacaggtcaggcggccgggaccgtcttcggcggtcccggccgaattcctggtccatggaaattttttcgactgatcggggaaaaacagttgacatttggatctcgactggctataataatcaagcagtcttttttaggggacgaacatttgcggctgtgctggaactggtagacaggccagcttgaggtgctggtgtccgaatcgacgtgtgggttcaaatcccgtcagccgcaccatacggtgtctctgaaaagataaccgctctatgcgcgagtggtggaattggcagactcgctagattcaggttctagtgtccattacggacgtgcgggttcaagtcccgcctcgcgcaccaaagagaaagggcttcctatccggaagtcctttctctttgggctccggcagccgaaggcggcccccgcccttcggtgattcaaatgctcggcggaagtgaattccgcctgcgccgaggttttatctacggcaaagcgcccgtgcggcgcaaatgcgccgccggccagaaggccggtggggtgggtctcctataccttttcgagattttaaaatatcgattttgaccgtcccttctcgaaagagagacatctgcggaaagtagatgtctctctttttgaattttggatgcttttggcagggcaccatcagcgccgcggcaacctgtacagccgcctcgtaagcccgtcatgcgtttttgtcccagctggtggttccccaaagagcagccaggtcccgttcgagcttctgcatctccgcctccagctcctcagagacagggtacaggcggatcgccctgaagatataagacatcatcacagtgagcagatgataggtggagtcgtaaaatgtgaagggatgcattttggagcggatatcctgcccgtggacaaacgcgcaggcccattgatacgtctgatagagctccgtttcctgcaggtattcacaaacatgggagaagtagatccggcctttgcccgggatcacggaaaccagccactcgttttcgttgccctttttgaaccgccggattgtttcctccggctctcggttccatgcgctgcaaagtgcatacacagttttgagttttgcctgccgcagcgccccatcctggccggggaggctgcggatcatcccgcagagaaaccagtcttccaaaaggcgggcgctcttttcctgcttcagcactttcccgtagacacagcactccatcagagtccgcgtcatcgccgctgtggaaaacagattcccgcccacaaacatgttgaagagctcgttgatcagctcgcgcatgtgaagacgccactggagcagatagttttgcgggtcatagggctctgggggcagcagcgcatactctgcgtccagctcttggtagcgcttcaaaaaatccgagacctgtttgagataggcgtatacagtcgcctcggactgatattcggtgtggctgaaattctccacatacggggcgtctaggctgtggtccttctcatttctggcgtgggaaatttccagccgttcgggcacatcattccgctgtgggttcttgttcctgtcagaaatcagtgggaaatgaacttccgtaagaaacggaagcagaaatctcaatccgaatcccttttggagctccgcatatccgcgtcaaacctgccctgcgcattgcggtgtccgtcaatgtcaaggtacagggttctcggctttcccggctccttcttttccgcggcgtataccaaggacacaagatcctttgccgccttctcaaaattttcccaccgcataacacggtggtatagcgcgacgcctgcctgatccatgtgatccctcctgttccgattttaagaatcacaagctccagggcccaagcgcaggccctggagcttgtgaccgtcattcccactcgatcgtagcgggcggcttggacgtgatatcgtacacaatccggttgatatggggcacttcgttgacaatccgcacgctgatccggtccagcacctcgtagggaatacgggtccagtcggcggtcatgaagtctgtggtggtgacagagcggagagccagagtgtagtcataggtccggccgtcacccataacgcccacggaacgcatgttggtgagcaccgcgaaatactggttcatggtgccctccagatgggccttagcgatctcgtcccggaaaatgaagtctgccaggcgcagagtgtccagtttgtccttcgtcacctcgccgatgacccggatggcaaggcccgggcccgggaaaggctggcgcatgaccagatactccggcaggcccagctcccgaccaagctgacggacctcgtccttgaagagcatccgcaggggttcgatgatctccttgaagtccacatagtccggcaggccgcccacgttgtggtggctcttgatgacggcggcgtcgccggtgccggactcgatcacatcgggatagatggtgccctggaccaggtaatccacctggccgatctttttggcctccgcctcaaagacacggatgaattcctccccgatgatcttccgcttgcgctccggctcgctgacgccggagagtttggagaggaacagctcctccgcgttggcccggacgaagttgatatcccactttttgaaggcctcctccacctcgtcgccctcgttcaggcgcatgaggccgtggtccacaaacacgcaggtcagctggctgcctacggcctcggctaccagggctgccgccacggaggagtccacgccgccggacagggccagcagcaccttgccgtcccccaccttctcccggatctggcggatggcagtctccttgtagtcgcccatggtccagtcgcccgctgcgccgcagacctcatacaggaagttgcggatcatgtcggtgccatgctccgtatgattgacctccgggtggtactggacgccgtagaagccgcggctctcatcgcagatggccacattggggcaggcgtcggagtgggccaccagagcgaagccctccggcaccttctccatgtagtccccgtgactcatccaggtgatgccctgggcgggaaggcccttgaagagcttgcaggccgaatcgaaatacgtctcggtcttgccgtactcccgggcggagtcgtcctgggcctcggtaacccggccgcccaggttatgggccatcagctgacagccgtagcagatgcccaggatgggcacgccccaggtgaaaatggccgggtccacctggggggatttgggatcatacacgctgttggggccaccggtaaagatgatgccgatgggattcatggcgcggatgtccgccagcggggtggtgtagggctttacctcgcagtagacgccgcactcccggacccggcgggcaatgagctgattgtactgtccgccgaagtccagcacgatgacagtctggtgagacaagggaattcctcctttgtgtaaattcggtttatgagatctctgcgccgccccactccaccagggtgaagccggtacgcaccggggcggccagtgtctggggcggaagctccacggagcggtccagcggcttccaggccatgaagacccgcagcaccgtgtccggcgccgggtctgccgtgagccgggcatggtccgtgtaggaacttgtctggaaggcgatcagattataggcgttcccctccatgtggggcagccagtagacaataaactcgttggcctcccggcggttcagacccagagtggccagggtgtcctccaaaaaggcggcggtgtccctgcctggtacgcagaagccctgggagaagtcatattccgtccggctgacgccctcccagtagaggtaattgtaggtctgaccgaccgcgtccgtcagcgtcccgtcggggctggcggtgaccatccaggaatttccattcatgacgggataaacacaggtcagttccccgtcatagtccagggtaacggtgacatcggtctccgcctccggatagaggtagatgaccggctttgcgtcggctccgcctcccggcggcgtacagctggggagcagcgctagggccagggtcagcagtaccagaaacagtgggggccgtttcatggaaaagtcctcctttttctgatgcgccggaagatagggaacgatcgttccgctatcctatcagacggaaaaaagagacgaatcttacagagtgccgcggaaaatgcagaggatcagtcctcgccccggaagacgatgttgccgggctcggcggactcgatgatggccagggacttcaggttcacacccgcggcccgcagccggtcgccgccgccctggaatcccttttctaccgcgcagccgatgcccaccagcgtggcaccggcggcgttgacgatgtcgcacaggccccgcatggcttcgccgttggccatgaagtcgtcgataatcaggaccttgtcgtcggcggagagccactccttggaaaccagcagcgtcacctttttcttataggtgtaggagaagatgtcgctctggtacaggccgccctcgatgttgtcgctcttggccttcttggcgaagatcatgggcttgtggaagtggtgggccacgatggcggacagggcgatgccgctggcctcggcggtgaggatcatggtgacctcgtccatattgaagtgtttgccgaactcctctgcgatatggtccatcagctccgtgtcgatgcggtggttcagaaaaccatccaccttgatgatgttgccgggcagcaccttgccctctttcacgatgcggtctttcagttcctgcatgggtgattccccctcgatctgtctgtattttgcatggttttatgccaaatttgatctttttctattatctcgaatcctgccggattttgcaactgtttttgcccacaaaaagaaggtgcttcctccggtggatttgcataggacggacaaaacgcggcaaacgccgcgccgtggaaggacacggcgcggcgttgggcattatttcccctccagcttgtcggcggcagcctccagccagctgccctggaaggactcgatgtctccggcgtcggtaagggcggccagggccgggtcgatgggcatctccgccagcacgggcagatggtggcgctccgcagcttcggcagttttgccctggccgaagagatggatctgcttcccgcagtccgggcaggtgacatagctcatgttctccaccaggcccacgatggggacctccatcatctctgccatcttcacggctttctccaccaccatgctcaccagctcctggggagaggccacgatcacgatgccgtccaggggaatggactggaacacactgagggacacatcgccggttcccggcggcatatccacgaacaggtagtcgcagttccacagcacgtcggtccagaactgctggaccacgccggagatgaccgggccccgccagatgaccgggtccgtctcgttgggcagcagcaggttggtgctcatcacctgaatgccggttttggacaccatgggatacaggcccgcctcgctgcctgtggcctggccgtggatgccgaaggccttggggatggagggaccggtgacgtcggcatccagaatgccgacctgatggccccggcggcgcatggtgaccgccagctggctggtgaccatggactttccgacgccgcccttgccggacacgatgccgaacaccttaccgatgtgggcttcgggatggtgctccttcagcagggactggggttcctgccgctcgctgcagctctcgccgcaggtggagcagtcgtgggtgcattcgctcatagtatggatatctccttttttcgctttcgcgtaattgataaacacaggctcccggccccgccgctgcggggaacggggagcattccatatcttatacctctaccgccgcatccgtcaaccgctggacgaaaacttccctgtctccggcaaaaaattccccctcccggctgtggcaggtgaagagcaggatctgccggttcccggcggcctctttcaaaaactgcagggccgcagcgcagcggctgtcgtcaaaattggccagggcgtcgtccagcacgatgggcacctgcttctccggcggcagcaccagctcacagatggccaggcgcaccgccagatacagctggtccagcgcgccggcggagagcagggcggcatcccggaacaccgggtctcccacaggctctgccgagaggcggaagctccggtccagcaccacaccggcatagcggttgtcggtcagtcgggaaaagatctccgctgcccggcggcccagagcgggagagaagcggttctgcagggcggtgttggccccctccagtgcctccatagccagccggagagcgctgtactccgtttccagccgctcctttcgggcagccaggtcctcggcagaagcccgcagcaccgcgggatcgcccgcggcgtggagctggccgtccagacggtccgcggaggagcgggcctccgccagtgcggcgcggacccggcccagctccgtggagatggcctcccggctccggacgggagcggggacatccgcctccggcgtgccgggagcgggcgcctgctggacctgaagctcatagcgcatccgtgcctcccgggcggcggtctccgcctccgccagctccttccgccggacggcacaggcccggagcagctggtccgccgtggggatgtcgaaggcgtcgggagcgaagcgccggacctccagcaggatgccctgttcgttggaggagagactactatataaggtgtccgctgcggcggacttggcgttgacactggcctgggcggcgtcccgggcctcgcacagcttggcgtaatcctcagccagctggcggatggcatccaggtccgcggtgccgaagcgcttcaaccggagttctgcccagccggcctgaaacgcccgctttttcaaaaagagagcgagggcgcacacgcaggagaatccggctagcatggtgagaagcgcaagcagcttgctgtggctgcctgtgagaaaaagtaccgcataggtcacgacgaaacacagtgggacaccaattaaaaaagtcagcacgccggggaccggattccatttgacaggctcgttctcagttcctgcggcctctcgccgggcgctctccggactctgcccggcaaagggactctcattcacagcggcctccgcccgcagcaatgccttcatggcctcgtcccgctccgaccgggccttgtccacggctctccgggtggtctccagattgacgatggcgccgcggagccgggcgatggtctcgttctccgggatttggtcctgctgaagccgctcctgcacctgcgcggcgcggacctctgcctgttccgccgccgatgcggcaccggagagggcctggcggcgctgggcggcctcccagcggttgcagtccgtcagttccgcctgtaggatctccgcccgacgggacagagcttcgacctcggagcgggcctgcaccagctgccgggccagagagttgctctccgacagctgacggtccagttcggccagctccgtctccagagcggggagctgcccggtcctgttatggcggcgacgattcagctgctttttcagggcatccgcagcctctgtataggaggtgccctcctctccggaggagatcaaggccgcgatgcgccgttccagctcggcgtcctggctgatgggcaggttattctgccggataaaggcgctgcgctcaaagacctcccggctgatgcccagcagggtctcgccgcaggcggcaccggtcaggcccggcacaggctcgttggtaccggcgtatacggcactgaattcccccatggggctggtctgccgccgggtggcgcgggtcagagtcagctcccccagttccgtgccgcagtccatccggccggacatggccgcgcctgaccagggagcaaagcggtttttatccgcaataaaaccagcgcggtcccgctcccggctgttgacaccatataaaatagagagcagaaaggcgcaccaggtggactttccagtctcgttgggggcttcgatgatattcagaccgtcccccagctccaaagaccggccctggagtttgccgaaggtggcggtcatacgatgaatccgcagatcaatccctcctactatgtatacattttatttccatggacattataccactgtcgcctccgtttgcacagcttattttcccgacctgcgcaaggggaaaggggacgaaagccggagaaatcgccacagtaatcagaaaaataaaaaaacctcgaaaaaggtattgacaaaaggggaaggatttggtattctaacaaagctgtcggcgcggtgatgagccgggccgggaagaaatgaaaaaagttcttgacagcaaggctgagatgtggtaacctaaacaggttgctgctgatacgagatggatcggatgtcaaaaaacttctgaaaaaagttcttgacaaacgaaatgaaatcgagtataatagcaatgttccgccgggaacggcgtgcaccttgtaaattaaacaacgtaacgaaaaggaagcaccagaaggcgagctcatttagatgagtttgccaaaggacaaagccgtctcactgg

SEQ ID NO: 4918 - DNA, 5798 bp, Unknown
  gut microbiota DNA sequence
gtttagttttaggtatgaaccaatttttttacagaagatggggtataaacgcacttcaagtcaaggcatacggcccgacgtggaaatgctcggagccgatacagccatagaagccaaaagcattcatgacggagttttgcagaatttttacgattccattttttgtgcttccccttgcccttccttttgttggagaagttttccttgtcacgattcgttgtgttaaatactttttgctcgttatgaggatgttgctccatgaagacaattcttttctcctgaaaaacatgaaatgtgagatataaaggcaagcactttacagagaaccccgcatttgataaaatagcaataaatatatcatggaaattttgcggaattgggcatttttgccatattataatgatttgtcggtagaaccgatgcagctgcgagtatataaaaggagatacgccgtgattgatagcaatgccttgattgaaatgatggaatcctcttttgatggtgtttggattaccgatggagaaggcaaagtgctctttgcaaattcagccaatgcctcgctcctgggggtcagcaaagcggaactggagggcagaacgacgcaacagcttctggatgaaaagattttttccaattctgtcattctggaggttatccggcaaaaaaagcagatttcaaaaatcagctacaattatcacacgcggctgacggttctggctacggccacacccattttcgatgatgtcggaaatgtcaaatatgtatttaacaatgtccgggatatcacagccctcaatgaactccagaacagtctgaagagcaaggatacgattatccagcagcagtcccgccaactggagagcatgcggatccgcctgggtgaggggaccattattgcaaacagcaaggcgttcaacgaagttattacattggcacagcgggtggccgcatttgatggagccaccgtactgattctgggtgaatccggaacgggaaaggaaattatttctgaactgattgtaaacaacagcccccggaaagactggccgtatctgcaggtaaactgtggggccattccagaaaatctcatagagtctgagctgtttggctatgagaagggggcatttaccggggcggacaacaagggacacaagggcctgtttgaggccgccaacggagggacggtctttttggacgagatcggcgatctgcccctgcatatgcaggtaaagcttctgcgtgtcttacagcaaaaaaaagtgacccgtgtgggcgggacagaacccattgccttggatgtaagagtgattgcggcgacaaatcgcaatctggaacagatggtcagagagggaacgttccgggaggatctatattaccgactgaatgtggtttcaattttcattccgccgctgcgggagcgccgggaggatatcattccgctgattaaccatttcctcatggtggaaaaccagaaataccacaccaataaatctatctattcagacacgatcgatgcgtttgaaggatattgctggccgggaaatgtccgggagttggaaaatctgctggaaaatttggtgattaccactccgggcgacattattcggcgggagaacttgccactgaagcttcggcggcctcagcaagtatctgcggaggaagaagaggaaacggtttcattgaaaagcgtagtagaacgggcggaatatgcggcaattgaacgcgccatcgaaaaatacggatccattcgcaaggccgctgcagcgctggatgtcaatccgtccactattacccggaaaatgcagctttataaggacatgtcttccagaaaacaaaataagtaaatggttcgaaagagagatgacggggagagggaaacctttctccgtcatctcgtatgcaaaatagcaacgctgatgcaattttgcgcacatgaagagtgcggttgtctgtaatatgcattgtttttgcacgaatatatgcggcatttatagccaatatgcacaatttcgtcccagacttttgtgtgaacctcacgaaaaaattcgttttcggcagaattatcactttggcataaatattgcttaataacagggcggacagcaaccgcaggaggcgggagaaacttagacaaggtggctgacagaaaacggatgcactgctgcgcgacagcaatgtccctattcagcagaatctttttctggtgaaggcggcggcttttctagagtaagacaccgaacgcgctgccccgaaatccggcctcgccccggaacctgtaatttacacaaaaggaagtcatacaaatgcgcaagaatatgctcaaggagaagattcgcaatggcgagagtgccatcggcacctttgtgaagctgacggatccggcggttccggagctgctggccctggcggggttcgacttcttcgtactggatacagagcatgtggcggtggaccgggaacagctgagcaacatcgtccgggcagcggacgcggccggcatcacgcccattgtgcgggttcgggagaaccagcaggtggagatcctgcagaatctggacctgggatatgcgggcgtgcaggtgcccaatgtagataccccggagcaggcccggaacctggtgtcctatgtgaagtatacccccctgggcgtgcggggcctgtcccccagcgtgcgggcttgtgactacggcacctgcggcgtgcaggagtatatcgacaccgccaatgccaacacgatgatcgtctcccactgtgagaccaagacctgtgtggagaatctggacgaggtcctgaaggtggacggcatcgatgtcatcttcatcggacccatggacctgtcccagtcctacggtgtacccggcaagaccacggacccggaggtgaaggcggccatcgacaccatcaccgccaagacgctggcagccggcaaggcagtgggcaccacggcggcttccgccgaggcggccaaggcgttgatcgccaagggcgtgcagtacatcctgctctcctctgacgaagggatcatcgtcaagtggggcaaggagaccatcagccggatccgcggctgagaaggagcgtacataaacatggaaaaggtatttctgaccgagcatatccacccggatgcggtggcgtatctccgggagaatttcgaggtcgtgcagggcacttccacggagagcggcgagatcatccggcaggcgcagggatgctccgcgatcctgatccgctcggcgaagatcacggcggagatcatggacgccatcccgacgttgaaggtagtcgccaagcacggcatgggcgtggacaatatcgcggtggatcacgccacggaaaaggggatcctggtggtcaacgcccccttctccaacctgaacgccgtggcggagcatatcgtgatgctgctgctggcactgtccaagcggacggtgcagatggatcagctgacccgggccggccagttcaaagagcgcaacacctacaagaccatcgagctgaagggcgccacggtgggcatcatcggcatgggcaagatctcccggctggtggtgaagaagctctccggctttgagatgaacattctggccacggatccctatgtgaagcaggcggatgtcgagggactggggatcaccatggcgacgccggaggagctgtatgcaaagtccgatttcgtcatcgtccacacctctctgttcccctctaccttccatctggtgggtgcggagcagttcaaggctatgaagaacaccgccttcatcatcaacgccgcccggggtgccgtgatcgacgaggccgccatgatcgaggccctgaagtccggcgagatcgccggggccggcctggatgtgtttgagcaggagccgcctgctgatgacaatcccctcttctccatggagaatgtgatcgtctctccccacaatgcggcactcagcgacggggcgcttcgggctatggctatggacagcgcccaggggatcactgagtatctcaccggcaaaccggtcacctatcccgtcaacaaggaagtattgaaataattgcattcaaatcaaggaaaaaggagtggacgcaaatgtcttacacaactgtataccgctttcaggacctgaacggctatgagagcgtgatctccaaggccaactcggatatgacctatgagggattcggccgaatccttctcaaccccggccagacgctggagtacaaggtcaccggtgaggagcaggccatcgtgctgcagcagggcgacatgacctgctgggtggagtatgagggcgtgaccgttgtggacggcgccaagggccagcgcggcaatgtctatgacgatctgcccaccgccctgtatgtgccgcccaaagccacagtgaagctgtacagcgagaagggcatggaggcgagagtcttcaccgcctattgtgaggagggcaatgccccctatttctgcccgcctgaaaatattgaagagggagaacccggcgagtacatctacaagcggaagtaccgcttcatcttcggccagcccggcaagcacaacgaccacatcaccaagctgctgatcgtgggcgagaccgtgtccgtgcccggcggctggatcggattcccggcgcaccggcacgactacgagcgccccggcaaggagtgcgtgctggatgagatcttctccttccagatgacctccaccgaggatggcccgggccgcggcggcgtcatgcagcacggctatgatctgacggacgagaacaagaagatctgggacgaggtcaatgtgatcgaggagaacaacaccgccgtggcgctgcccaccggctaccacaccacggtggcactgcccggcacccgtgcgtatctgctgtggggcctggccggcgatacgaagaagtacaaggtccagtttgacgagcggtattcctggcttgagggctgcttatattgaggaactgagaaaggtagtaggatgaatctcgcagaggaaattcggggaacacaagttcctccagatcatctgggaatttgctggcttggccaggccggatttctcctgaaggctcccgacggaacaagcatggtgctcgatccctatctgacggagtgcggcgagcggattcgaggattcaaacgactctcacccatgctgatcgcgccggaagagctggcggtagattattatgtgaccagccatctgcattttgatcacttcgattatgatgcgattccaattgtggcacagtgcacaaaaaggaccttgtttttcgggcctgccagctgtcaggagaagttcattgaactgggcatacaggcccaccgctgccatcgtctggacagaggagaatgctatcaggatgaaaagatcctgattcgggcagtgatggcggatcacggtaccatggcgccggatgctatcgggctcttggtggcgtttgcaggtcatcggctctatttttccggagacacggcgtttcactcggagttgtttcaggagatcaggatctttgagccggatattgcggtgctgtctgtcaatggtgcatttggcaacatgaacgctgaggaaggagcggcggcggcggaattgactggcgcgagatatgcagtgccctgccacttctggacctttatggagcacggcgggcttcccggtcagttttgtgagcagctgctcctaaaagggacttgccagccgctctgcttccggcagggggagattcgaacgatgcaatgtcatacaaatcgggaaagaaagaaggagaccgcctgatgaaagccattcggttcatggatccgggagtaatcgagta

SEQ ID NO: 4919 - DNA, 6195 bp, Unknown
  gut microbiota DNA sequence
ctccgtgccccgaattccctgcctgatgcaaatcgaaacttgcttgggcgattattcgtcgacggacgggcttagagaaacttcactgaacagttcctgccgcttccctttgctcgctgcctcgtcacggaattatcattccgtcgctgattcatatgaaagggattggcgggtcaaagggaaaagacacaaaaaaagcccgtactatctgcacgggcgaaaaaaacgatattagaaccaaggccggacagaatttaacgtttccccggcttttttctgctgcccggagaggcaaaaccctcttgtgggcaggcgccctatgtgataaaatgtaattgcagatatgtaggataaattgttttttgcgattatttgtgtcggaatgataattccgtgattacgatatcagccccagccggtcaagcgttcgctggtgctctgcgccagaagtcagcagatagatgcgcgtcgtttcgatgctgctgtggcccaacaggtcggacagtttgacgatgtcccgacaggcccggtaaaacacggtggcaaacatgtgccgcagattgtgggggaacaccttgcccggcatcacgccggcgtatttgcaaaggctcttcatctccgcccagatctggcggcggcccagttcttttccgcttttggtgcgaaagatcgcaccagaggcggtcttttgcttttgggcatatttgagcagcttgcggcagagtttccccggcagcaggatcacgcggattttgcctttgagggagacttcggccttgccctgccgcacggcttccactgtgatatagcggacttcgctgacccggatgccggtggccccgatggtctccaccagcaagcccagccgctcccggcccagacggcaagccgcgtccagcaggctctgataatcggattttgtcagctcccggccggcatcccggaacagccgccgctggattttcaggaatttcacccggcagtcgtttagatcaaggtacgccaacaggctgtttaaggcagagagcatggcattgatactggcgggggcgtagccctgctccgccagataggctttccactctgcggtcagctccttgcagatttcgcgatcacccagccagcaggcgaatgcccggatatcccgaagatacttttccatggtggctgcgctcttctcctccagcagaaggtgacgggcaaacgcctgtatttgcaggggtgtcagtttgtgttcggacataggggggcctccttgcatgatttcatgccaacattgtacaggaacggcagagacagcaaagcccacagcggtaactgccgctgtgggcttgtgaatcctggtcccgcaatggtaggattgccaccggtttccagaaaatatacgggttgccctatctgcttatcatgggattcttctcttcacgagttatggaagcaaatatgataccatactgctccagaggccgatgggaatatccgaaacacaacgaggctgcgtgcagaaaaatatgcgtaagctgttgattacgagtagattttgcctttgttcacagcatcgaaatgccgatggccggcagagcgggttttccttacgcaattcttctgcccctccggccgcgcaaagtgggtccgggcttccgcatggaactgcccctggctatagccggggacgatgctttccctgccgaaaggtggggggcttttgggatcgtccgccccaaatcctgtaaaaattctttttattcccctgaaacgatggtactctgaaacacgaatatacctgtgaaaggcggtgaggcgatggagcgggaacagacatggatcagggctatccagcggcgaaactcccgggaggcggcggagcagctgatccagacctactatgacgaaatctaccgcttcgtctaccgtcagaccggcagcaaggaggacgccatggacctgacccagtccgtcttcatcgcagtcctgcgggcattgcccggctaccgggcggagcgggcgtccttccgcacctggctgtaccgcatcgccgccaacaaagtcatcgacacccgccggaaggcccggccggtctctattcctattcaggaaatggagctccctgcagcagaggactttgtggcccgcgtccatgaccgggccctgctggagaccatcgaaggctatgtctccggcctggaccccggggagcaggcggtgttccgcctgcggatctacggggaaaagaccttcccggagatcgctgccgccatgggagagccggaggcggcagtgaaatccagatactaccgcctgatcgggcggctgcgaaaggagtttggagcagatggataatcaaaaaatttccatgcccacagaggcggaaaaacagcgggccattgcccggattctggatgcaggcctgccccgccgggtcgcctttggccgggagctgcgggaggttttgcagcgcatcggcccccgcgcgctgctgtttggcgtgggggactgtttggccttgtccctgctgatctgggccctgtgcctgctgtcggcgctttttgtggccggttccaccggctctttggcaccggccctgttcctgttttctcccctgctctatgccgccctctccctgctgactgcctggaagaacctgcagaccggcatttgggagtggacctggaccttccaggtctccgcccggatggtggcggccctgcagatgctgtgcttcggcggggtgtccgtactggtgtgtgtcccggcaaatatgctgttgtggaccttcaccgggcaggagatgcccctgggctggatgctggcactgtctctggccagcctgtttctgtatggcgctctctccctgctgtgccagcggctgcggggacctgccgggtggctggcggcgccgaccggctgggttctgatgggcctgattcccctgatctggccccggacggcggagtggctgacggccatccccaccgtagtgttctgcctgctggccgcggccgggattactctgtaccttttggaactgcgctgcttctgccggcgcccgatggaaggaggcgtctcctatgctctccgttgagcacgtcacgaaaacctatgggaagttcaccgctttggaggacatttccctgaccttcactcccggcgtctacggtctgctggcacccaatggggcgggcaagaccaccctcatcaagatgctcaccaccctgctgttccccaccaagggacagatcctgtgggagggagaagacatccgggccttgggggcggaataccggggcctgctggggtatctcccccagcagttcgggtactatcccagctacacgccccggcaattcctccggtatgccgccgccctccagtgcatcccgaagcgggaggcggacggccgcattgaccacctgctggagacagtgggacttggggatgctgcggacaaaaaaatgaagaagttctccggcgggatgctccagcgggtgggcatcgccgtagccatgctgaacgacccgaagctgctgatcctggacgagcccaccgctgggctggacccccgggagcgggtgcggttccgcaatttgatccacacgctggctgaggatcggatcgtgattctctccacccacatcgtctcagacattgagaccatcgccgggcaaatcgtcatgttcaaggatcaccgcctctactgctgcgacagccctgcccgcatctgcgcccggttccagggcagggtattccagcttcctgccgggatgcccctggccccgggacagttcctgctcagcgaaggacagggggcggatggcccggtgctccgggtgctctgcgagacgccccctgtcaatggaacgccggtaacgccggggttggaggatgcgtttctcgccatctaccgggaggaacagacatgaatctggcggtctatgagtggcggaagctcttccgcctgcccgccctgtgggccttcctggccctgtgtctggcctttaacgggctgctgatcgccacgctctccccctatgaccgggcgttcttcaacgagacttcccaaacggcaaaggccttgggccagcgggttgatgaagactttcttgccgggctggacgctatacccgccacagagaaccgggatttgctgcgtcaatctgtcaccgggatggaggacattttcgagacgtatgacaccggggaactctcggatttctatgccggtgtggtggagaaatcccctctggcagttacctggatgacctggaaatatgatctgctggcgagccgggtggagcacctggcccagactgacgcggcgctggatttgtacgccggcctggccacctacggcagccaccagttcctcttcggcgcgctgttccgggccattctctgtgagagcgccattctggccatgctggggacgctgtatctgctgggctacgaggggatgcaccgcgcagagggcctggcctgcgcctcccgaacgggacggaaactacggcgggtgaaggtcctggcggctctccaggcgtcggcggcgctgtacggcctgctggcgttctgcaccctggtgccctacttcctgctgtacgactacagcggaatctggaatgccagcgtgtccagccagttcaactatttctcggacatgctggtggtccggcccttcctcacctggggggacttcacggtgggtcagtacctggccgctgccctagccctgggcgcggtgctgacggcggtattctccctgctggcgtcggtgtgcggcacgctggtgcgaagcccctatctggcggccttggcgctgtgcctggtgtgcttcggcggactgggactggtctccgttctgggggagctgggctggtgggcggcctatttgattgcctgtttccagccggtaacggtctggctctcctgcagcgcctggttcacggagctgggactgaacgccgtcctcccctggcaggagaccatcgcaagcgggctgaacctgctgcttttgggcggcggagtcctgttggctctcggttggtttgacagaaaggacgtgtcctgatggaacttttgaaatgggagctgcggaagatctggcggcccggcatcctggcggccatcctgctgctgggggcggtatactactggatgttcccacagttctatatcgagcacttttgcaacggtccccagtcggaggcccagttcgatctggcctccgactgggtggagcggtatggccccaccctggaaccggaagaacgggcagaactggacgagcagatggcaggggagatcacggcctttgacacacagatcaccgccatcccggaagctgcggcagcggggctgacggactataaatcttttctctcctttcggggggactacctgaacggcatacgcaacactgatggacaggcagatatggatgtggaggccctgctctaccgggtgtacggcggcaccaactggtaccggatcgaggcgctggcggatactctggagacctatgatacccaggaggatcaccgcgctctgattgtctccaaccgacagcaattggcccagccggaggccatggtccggcgggaggcggagctggcaagctcggatatgacccattccctgctgccgtcctctgtgaaatactccactcaggagtacggcaaggatctggcggtatggtgcgtactcagcatcgtgctcctgctctcccccaccctggtgcgggaccggctgcggaacacccggcccatgcagtgggcctcccggcgggggcggtccgttttgaacgtccagatgggagctgccctgctctctgcgctggtgctggcggtggtgaatataacagtctatgtcattccgttcctggcccaggggcccctgcaatttgccgcctgcggcctggacggcatctgggagtggggcactccctggttcgactggacctacggcacctatctgctggtgctggcggggctgattttggccctgtccctgggggccgccgggctgacggcctttctctcccagtacagcggcaactacatcgccatgctgctgaaggccgttcccctgttcgtggcggtgggggccgtgctgggctcctggcttctggatcggcccttcacgttccgccccctctgggacggctacggcccctgggtgcccaagggtgcggaggcggtggcc

SEQ ID NO: 4920 - DNA, 615 bp, Unknown
  gut microbiota DNA sequence
tgcctgttatgctgcgcaccaaaggccgctttctttgtcaaagaacaataggctttgtcggcctgcaaaagcacatcaacagcggatatgcttttgcggaacgacaaatagcccataacgggaagcgtggaaaggggacacgctccccgcatgggctaaaagattatcctacatgaaaagcaagggtgcgggtaataaggcgcacttgcagcctgttacgcatttcctcgtccacataggaataggtattgcccgcgtcgtctttcagcgtgcgggtacaaagtttcgctatgtaaccctcgtagtgcttcaagatcgcgcacatggcggttgtgtcgccgtttgccgctgcggaaatgacagggaacggcaacagattttcagacttcctaacggtattcatcatctgcttttccctccaaatactgtttgattttcgcaagcgcggatttcctgtgccggaaaaccgtcgtgcgtacaacattcagcagttcgccaatttccgcgtcgctcatatccaagaagtaggacaaaaggataatgtcgcgtttcctttcgggcaaagcgttaagggcttcggcaagcagttcatttttgacgagtacatcaaagccg

SEQ ID NO: 4921 - DNA, 79617 bp, Unknown
  gut microbiota DNA sequence
cacgtccagggtgctggactcacgcaggaactggatgtagttcgccacatccacgtccaggtgggtgcagtcggcgcacaggccggtatgcagacgggccgcgcagcggggccccaggtcacggccgatgttggtggcgccgatcaggaacgcctcgggcttcagatcctcgatcacgtcgcagatgaccttggcataggcatcggtgttgtagacggccagcagggggctctcgcacaccagcaccttgtcggcgccgtagccgcccagctccttggcagcggactcgatgccctcgccgcccagcagcaggccgcacaggttcacgcccagctcgtcggccaggtcgcggcccttggagatcagctcaaagtcggtgggcatcagtttgccctcgcgctgctcgcagaagacccacacatccttgaaagcagcgatatcagcgctattgaaattggacattgttcaaatactcccttctcagatgatgtgcttggcggccagaatggaagccagctcctcgcaggtctctttgccggcaccctccagcatcttgccggcgcccttctggggcggggtgaagctcttgaagatgttggtgggagagcccttcaggccgatggtggtggcgtcgatcaggggatgatccttcagcttctcatagtcaaaggtctccagcggcttgttgtaggtggcatagatgccgtcgatgctcatatagcggggctcgttcagctccttgatgcaggtaagcaggcagggagtcttgaccttgatggtcatgtagccgtcctccagcatccgcttgacggtgatggtgttgccgtccttggtgatgtcggcggcgtaggtcacctggggcaggtgcagcttctcagcgatctgggggcccacctgggcggtgtcgccgtcgatggcctgccggccgcacatgacgatgtcgtcctcctccacaccgatggtggagatggcggcggccaggatctgggaggtggcgtatgtatcggagccgccgaactcgcgggcggataccaggacaccctcgtcagcgcccatggccatcagctcccgcagcatgccggctgccgggggcggacccatggtgacgaccatgaccttgcagccggtggcatccttcagcttcagggcagcctccacggcgttcatgtcatcggggttggtgatggtctgcatggaggcacggttcagggtgccatccgggttcaccgccaccttgccggaggtatcggggacctgcttgacgcaaacaatgatcttcataattcgttcttcctcctcttacaggccgatattgccggagatgaccacacgctggatttcgctggtgccctcatagatctcggtgatcttggcgtcgcgcatcatgcgctccaggggatagtccttggtgtagccgtagccgccgaacatctgcagcgccttggtggtggtcagcatggcgtgctcagagcagaacagcttggccatggccgcctccttggtgaagcgcttgccctcgcccttcagcacggcggcctgataggtcagcaggcggcccgcctcggagcgcatcgccatgtcggcgaaggtgaactgggtgttctggaacttgctgatgggcttgccgaactggacacggcccttggtgtaggccatggcctcttccatggcgccctcggcaatgcccagagcctgggccgcgatgccgatgcggccgccgtccagggtctgcatggcgatcttgaagcccttgccctcctggcccagcaggttctccttgggaacgatgcagtcggtgaacacgatctcggcggtgggggagccgtgcaggcccatcttctcttcgtgcttgcccacggagaagccggggaagctgctctccacgatgaaggcggagatgccgcgggtgcccttggacttgtcggtcatggcgaagaccacgaacacgtcggccacgtagccgttggtgatgaagatcttggagccgttgaggacatagtggtcgccgtccagcttggcctcggtctggcccttggcggcgtcggaaccggcgtcggattcggtcaggcagaaggcgccgaccttgtggcccttggtcagcatgggcaggtacttggccttctgggcctcggtgccgtgggtgatgatgggatcgcagcacaggccgttgtgggtggccacgatgtcgccggtggaggcgcactgcttggacagctcctcgatgcagatggcactggccagggggtcagcgccagcgccgccatactccttggggacgcacatgcccatcacgcccaggttgaacagcttctcgatgttctcccggggatactggctggtcttgtcggtctcggcagcgatgggcttcacttcattctcggtgaattccgccatcatcttccggaccagctggtgctcacggctgagattgaaatccatgatgtcttctccttatattcaaatttggaaaacgcaacgatgtatgaaatattccggcaggtttgcttatgaaattctgttttgcacgaattcacttcgggcaaaacacctctgcccgccggatcgacatgttcgctgtgcgaacgtgagggggaaaccggcgatgcgccgccagcggcagagcaagcgagccggtttcgaggcagcggcgcgcttggcggcccgtcaggggccggggatcgcaatgccgcaacagtgggaccttagttctggatgccggcgatctccttggccatctgcttcttggcctggaggttgccctggcgggcgatcatgatgcgctgggcctggggagagcccgcgccgtgcatggactctgtccggtagccaacggcggccgcgcccaggcacaggttctcgatgaaccgcaggatccgctgacggtcctctgtgctcacaccctcccgggtggcgaagaacttgttgcagatctccccgatagtctcgccgttccggcccaccaccgtgtcggagtggaagtccttctgggacggcatcgtcaccaccaggccgcccgcgatgtcctccgccaggcggacgatctcataggggaaccgagtcacattctgcttgcacacgttggccagcagcaggtcgatctgatagttgcccgccttcgtccggaagccctgagaggagcaggcgatgccgcagcagtacagcgtctcgttcaggtggatcatctcgatcagcttgtccttcaccgcgctggccttctccacgccgttgtactccgctgccagcgccgcagcaccgatcagcgtgtcgcccacgcccaccttgcagccgccgtagctctgccggtggtagcccgcgaaccgctccaccatcatgccggcgaactcatactcgccgttgaggaagatgtactcgttggggatgaacacgtggtccagcaccaccagggcctcctggccgccgaacttcgcgttgcccacgtcgatggacgcgtcctcctccagcttccgggtatcgcagctctgacggccgtagatcatgtacatgccctcggcgtctgtcgggcaggcgaagctcaccgcccagtccttgtccgcctcgcccatggagatggtgggcatgaagatgtgccagtggctgttgatggagccggtctggtggcacttggcgccgcagaccacgatgccgtcagcgcggcgctccaccacatgcacgtacatgtccgggtccgcctgctggctgggggccttggaccggtcgcccttggggtcggtcatggcgccgtccaccgtcaggtcgttgtcctggacgaaggtcaggaacttcttgaagttttcgtgatagcgggtgccgtacttctcgtcgatctcataggtggtggagaacacggcgttgaacgcatccatacccacacaccgctggaagcaggaagcggtcttctggcccagcaggcgctgcatcttcaccttgttaatgaggtcctccgtggactggtgcaggtgggtgaagcggttgatggtgtggcccgtcaggctggacttcaccgtcatcagatcggcatactgggggtcctgggccagagcgtaggtcatggccacgcagttgatgcttggccggatcatggggtggtccacccagttctcaatcttctccccgaacatatacacccgggtattcagtttgcgcaggctctctacatactcctgtgcggtcatcaatgccatttctttttttcctcctcaaaaaaatgggggtcttttacatttcaatgtgttccaggtgagcttcgcctgcccggaactccatggcccgcgccactgggcgcggctccctcgccgtgtgagggagagggggaacccggctcgcttgatccgccgctggcggcgcttcgccggcttcgaggcagcggcgcgatttgcggcccggtcagggctggaaatcgcattgccgcgacggtggaaattctcaggcttccgccagtcccatcagctcatctttgaagatgcgctcgtccataagcttcaggtcctcagcgatcttcggcatgaactccatctgatccagcacctgggtctggaggtcgatgcccggcgcgatctcgatcagagtcacgccctcgggccgcagctcgaacacagcccgctcggtgatgtacagaacaggctgcttcacctgcacggcatacttgccggagaaggtgatgtgctccacctggttgacgaacttcttcttggcgccctcctggacgatcaccagcttgccgtcctcgcaggcagtcttcaggcccttggcggtgaaggtgccgcaatagaccaccttcttggcattctgcgtaatgtcgatgaagccgccggcgccagccagacgggtgccgaacttggacacgttcaggtcgccgttgggtgccgtctccgccaggcccaggaaggccacatccaggccgccgccctggtagaagtcaaactggacgttgtgggggatgatggccatggagttggctgcggcgccgaactgggtgccgcccatgggcacgccggcgatggagccggcctccacagtcagggtcatcttgtcggagatgccctcctccgccgccacgttggcaattttttccggcgcgccggtgcccaggttcacaatggcatcctggggcagctccatggcggcccggcgggcgatgatcttcttggcgtccagcgggatgggtgggatggcgtccacgggaatgcggaactcgccggtcaggctgccgtcatagggcattcccaggcactgctcgttatcctcaatggatcctaccacaatagaatccacatagataccgggaattgccaccagtttcggatccaggctgccgccttggacgattttttccacctggacgatgacccggccgccggagttcttgcaggcctgagccatggcggtgacgtcgatggggccgatctcccggtgaacggtgcagttgccgtactcgtcggcgtagctggcacgcaggaacaccacattgatggggaacgccttgtagagcaaccgctcctggccctcgatctcgacgaccttcaccaggtcctccttggtgacatcgttgagtttgccgccgccgttgcgggggtcggcaaaggtgtacaggcccacgtgggtgatggtgccgatgttgtgggccgcgatgtcccggtacatgtgggagatgacgccctggggcaggttatacgcctcgatcttgttgctcagggccagatcgcccagcttgggggcccggtcccagtggccgccgatgacccgcttgaccatgccctcgtggccgtagtggtcgccgccggtgccgtcccggtggccctggcccgccgcgaagaacagcgtcagatctctgggatggcccgtctccaggaaccgcttctccaatgccttggacagcgcctcagggcaggcgcagctgacaaagccgccggtggcgatggtatcgccgtcgttcaccagcagcgccgcctcctcggcggtaagcacgcgaacttttttcatgcctgacttccctctttatatgtaatgaaatggacggcctcttgccggtctgcgctcacttgttctggaagtgcttctccttgcgcttctccaggaaggcgcccatgccctccttctggtcctcggtggcaaagcacatggcgaacagctcgttctccagggcgatgccgttgtcgatgtccatctgcatcccgcggtcgatgcaggccttggaatacttcacagcgatgggggcgttggcggtgaaggacttggccatctccacagccttgttcagcagctcctcggcggcatagacctcattcaccaggccgatgcgcttggcctcctcagcaccgatctgcttgccggagaagatcaactccttggccttggccacgcccacacggcggggcagacgctgggtgccggagaagccgggggtgatgcccaggcccacctcgggctggccgaacttggcgccgcccttgccctcagcgttggggccggcggccagaatgatgtcgcaggacatggccagctcacagccgccgcccagagcgaagccgttcactgcggcgatggtggggatctccagcttctcgatccggcggaacagggcgctgccccgctggccccacttgcggccggcggccacgtccatggtgctctgctcgccgatgtcggcgccggccacgaaggagcggccctcgccggtgatgatgaaggcgcccagctcggcatccttctccacctcgctgatgagctgttccagctcagagatcacggtggagttcagcgcattcagcgcctcggggcggttgatggtggcgatcccgatattgccgttcttttcatagcgaatggtctgatacatattggaatgtcctccttaatcatattttgctcagcaaactgttggagagtaatcatccaacaatttagttatagcaaaaatcatgccatttttccaggtgtaattctctcattttcggttcgtttttttgtgtaggttgctaaaatccaagtggtaaatcgcttgcttttcccggtgccgtcagccgtttccatacgggattattcatttttgaataacaaatttatcagtgtcttccagcattttccgcagtttgtttgtgaaatacagcagtctgtctgtcgaattttcgtgaaatttcacgagccaaaaatatttcccgcctcttcctattcatttttgaatatgctatactcatttttgaatagagcaaccggcattcagtccggcacaggaggtctgcgcctatggcgattccgtctttttctgctttccacgacgaggggatcaatctggagggacttctggagatcctcagcccggaaaacaacttggtcctggcggacgacatgatggtctcggacggcaacggcatcattctgcgggtcagcgagacctatgagaaaaacttcggttttgcccatgactccatcgttggcaagtccgcctttgatctggaggcggacggcaccttcaccccctgcattacggcggaggtcatccggcgacggaagaagatcagcgccacacagaccatcaaccacacccacaaaaacgtgatgaccgtgggcattcccctgtttgacgccaacggggagctgaaatacgccgtctgcttcaacaccgtgtccatggagcagatcaactccatccaacggaactaccgccggatgcaggactccctgcagcactactcccaggagattgccgagctgcggacccgggccacctccaccaatctgctgttcaaaagcgcccccatgcagcggctgtggacgctgatgcagaacactgccaacacccgggccaacattctcatcaccggagagaccggcgtgggtaaaagcgccatcgccaaggccattcacaagatgagcaaccgtgcaaacgggccctttatcgaggtaaactgcgcggtgctccatgaaaatctcattgagtcagagctgttcggctatgagaagggcgccttcaccggggcctcctcctccggcaagatcggcaagatcgagctggccaaccacggcacgctgttcctggatgagatcggtgagctgcccgcccatatccagtccaagctcctgcagctgattcaggagaagaccattgagcgcctctccggcacccagaagatcgagctggacttccggctgatcgttgccaccaaccgcaatctggaggaggcggtgcagcgcggtctgttccggtccgatctcttctaccggctgaacgtcatccgcatccacatcccccccctgcggcagcggaaggaggacatcgtccccatggcccaccagttcctggcccgcttctgcggggagtacaacaagtccctcacctgcagcccccgctttctggcttttctggagcagtacgattggcccggcaacgtgcgccagctggagaacctgatggagcggctggtaatcactgcccaggaccccattctggacattcctgccctgccgctggagtacaccgccgacgcgtcggcccctgcggagctgcttcccggcggcacgctggcagagcggatggacgcctacgaggcccaaatcatccgggattcctaccagcggtgcggcaccacagtggccgtggcccgggagctgggcatctcccaggccacagcagcccgcaagattgccaaatacgtgaccgcccgggcgtgagaggaggttccggtccatgagtttgatccatctcagcacagagcttcggcaggagctgaagctcaccccccagctcctgcagtccatggagcttctgcagatgaactcccaggagctgctggactatctgaaccaggtcagcgaagaaaaccctctggtggagcagactgatctgtcctccctccacaaagcctatgaggccctgcggcagaaggtccactggatcaatggcggcctgccggaggacggccacggcgccatgccggaccggggcgccgcggaccgggagacggagagcctctccgccttcctttgcgaccagctggagcgccggcgcctgcccaagcccctgctggccctgacccggtatctggcagagctggtggacgaggagggccgcctcagccaggaggacctggacggcgtggcagatctgaagatcccccaggccctgacccagcaagcgctggagaccctccagagcctggaccccgccggcgtgggcgcccggtccctgtcggagtgcctgctgctgcagctggcccggcaggatgctccctcccccctggatatggagatcgtccgccgcttcctgccggacttgggcaagaagcattacagcctcattgcccgggaactccataccacgccagaggaggtccgggcggcggaaaagcggatctctgccctggatccctgccccggccgctccttccagccggcggagcccacactctatgtccggccggatctgttcatcgcggaactggacggaaagctccaggtgatcctgaacgattactaccttccccgggtgtccatcagccagtactatgtgcggcttctgaaggaatccgacgagccggagacccgggcctatctccagcaaaagatgcagcaggccaagtggctgctgaacagcctggagcgccggggcagcaccctccgccagtgcgcggaggcgatcctggagacccagcgggccttttttgccggccagaccacagagctggtccccatgaccatggtgacactggcggagcgactccacctccatccctccaccgtctcccgggccactcgggagaaatacctccagtgccggcaggggacgtaccccctccgctatttcttcagccgcgctctgggggagcagggtccctcccagcagacggtgaagctgcggctgctggagctgatccggcaggaagaccacagccgcccgctcagtgaccagaagctggcggagctgctggcggagcagggcatccgcatcgcccgccgcacggtggccaagtatcggacggagctccgcctgggctccgccgccgcccgaaaacgggactgagggcctactggcccgcagaggcccgcaggatagaaacggaagccccggacggagtttcgtccggggcttccgtgtttttccgatttacaggatccgaaggacctcttcatatcccggcaccgcatccgccgcgccgggccgggacacagccagggcgctggccgccgcggccagggacagtgcctcttccagtgtgccgccctccagcgcccggcgcaggaagtagccggtgaaggtgtctcccgccgcagtggtgtccaccaccgccgttttccgggctgggccccaggcccgccagccccctcgcgctgcagcagcgccctgttctcccaaggtcagcaccacagtggtctccgggtaccgcgccgccagcgtgtccagaatcgcctccggcgcctccgttcccgccagaaaggcgccctccacctcgttcaccaacagccaggacagcgcctccagcggcaggcccaccagcttctcattggcgggagccgcattcatggccgtccgcatcccccggcgggccgcctggtggatgatttcctccacgcagctggtctcattctgcagcagcaccgtgtccccggctgagaactgatccagcaccgccgtcacaaagtccggggtcaggcggccgttggccccgtcgtggagcaggatgctgttctggccggtgctgtccacttggatgatggcgtggccggtactgcctgcggactcctccacaaaccgggtgtggacgcctgcccggtccagcgtctccttcagaaaatgcccctccggcccgatgaggcccgcgtgccaggtctccaccccggcccgagccagagccacggactggttcagccccttgccgccgcactggatctgcagggactgggcgctcatggtctctccgggctggacgaagtggtccacccggtagacgtagtcgatattcagggacccgaagttgacaacgcgcatatccttctcctccctcatgccataaaggtggtgagcagctcttccagggcgcggcggctgtccacatccacgcagatggagacgccgggagcctcgatgggatgctcccgcagatccgccaccaccatgccccggcagaagctgccgccgcactccacccgggcggggatggtccgcaccgtcaccacactgggatccaccgccgccagcatggccagcgggtcgtggaccgggcagtggtccagacagttgttttgcagtcggttgaaccggaagtagaagggcagtgcctgcttcagatagtccacaatgggccggttctccggcgcggcgtacttgtccaggatcgccacatggtccgtggtcagccgcaccttctgggtcacatccagccccaccatagtcaggtcaaagcccgcctggaacacccggtccgccgcctccgggtcccctgcgatgttggcctccgctaccggggacacgtttcccggcgcgtggaacgtgccgcccatgaacaccacccgtttcaacagccggggcagatccggctctatctccagagcctttgccagattcgtcattcgggccagcgtcaccaaggtcagctcgccggggtgctcccgggccattcgggcgatgaacgcccaggccggttcctccagcggctgctggggcgaaggcggcagctccaccccgccgatgccgttgggcccgtggatgtggggatccggccccttccagttccccgccagcggctccgtggctccaaccgccaccggcacctcataaggcacaccggccagtcggatcagccgcagactgttttccgccgcctgccgggctgtggtgttgccgaagccggtggtgacgcccatcacccggacgtccggccgcttcagggcaaacagaatggcgatggaatcatcaatgccggtgtcggcgtcgatcaggatctgcttcagcatattccttcctccctgtttatgtagtctctccgccgtctttggcggcggcaatccggacccccagaccgttgacctccacactctcgtccgccgggaccagcaggtagcgccgtccgtcgatgatccgggcctccaccagatagctccgctccgggtccacctggatagtggcgtcggcggtcttgaccgcgaagtgcttggcgtcgatcaggttggccggggtcagcgccccctcgccaaaggactggccgcaggcggtttggaacgcctccacccgctcctccggcacgccgcagttccgcagcacgccgctcacctcgcctgcggtgacagccagcggctccgggtcccggctctccttgtgttcctggatccgctggcgcaggtagtcgtggacagactgcaccacctccatgctgcacgccccctccagagtgccgcacagggcggactgaaaggtctcccgctgctcggcggcggacatgggcggctctgtgcggaacactgcgtcaatgaactcctgatggagctcgtccggcttccggctgtaaaacagggcgttgtaaaggttggccgtccggtcatcaaaggccgggaacaaaaagccaagctccggctggcccacgatctgcttctccatagagatgtggaactcgttctccccatggaagtatcccagctccggcgtcccatccttcaccgggcagacgcagcagacgaagtagcggaacacctcttcgcaggcatcccggtccacctcgccgtccttgccccggtggggcacatcataggcgtcggcccccagcaggatcagatagttgttctcccccatgtccagggagccggtgacctgctggtaaaaggcatcccgggcctccgcgtccttcagctcggacgtccgcagggcggagagcaggcggtgctcctcgctgtccgccacctgctgggtggaaaacacgatgtcaatcaggttccggcccagggtgccggacagggcctttttcagcaggcccaggtatttttccgcctcctcctggggcatgaggcctagggactggtcgatataggcgatgatctcgcggctgctgttcacatagcagccgtaaacacggctgatggcgctcttctccggccggaaccggcggcgcagctcacccagctctctttggttcatgggggacacctcgctcgttcaaattgatcccagcgggaccgcagtcctgccgggtctctatcttagcacatctccgccgtcttgtcacgccgaaaggggcggacaggaaaaacggcgggaaccgcagtccccgccgtttcacgtttcaaatgcgctccaaaggatgtccgcttactgggcagccatcttccgggccctggcctcagccttgttccggaacacgtcgatggtgaccgccagaatgatgacggcgccgatgacgatgtactgaatgtcgttggaggcgcccatcaggttcaggccgttgcggatgaccgccatcagcagggcgccgatcagggtgccccagatggtgcccttgccgccggtgaaggaggcgccaccgatgatgcaggccgcgatggcatcagtatcataggtggagccggcattgccgttggcagaagccagacgacccacggacaccacgcccgccatgccggccatgaagccggacagggagtagacgaaggtcagcacgttcttggaggggataccggagaggcgcgccgcctcggggttgccgcccacgcagtagatctggcggcccagggcggaccgggtcaggaacacgtggaagatgccgaacacgatcagcaccaggatgaagctgaaggggatgccggggaaggtctcggtcttgaaaagggagccgccgccgatccacatcaggttgtccacgccggtgttggtaaaggcaatggatttcgaccctgtaatcaccagggccaggccccacagcacgttcttcatgcccaaggtggacacgaagggatggggcaggtccaaacgggtcagcagaatgccgttgacaaagccggcaaacgtgctcaccgccaggccggcgatgatcagcagcggcatgctggtgatgccgaagttctggaccagcacgccgatggtgcaggtgcacagcacgcagttggaacccacggacaggtcgatgccggcggtaatcagggcgcacagcatgccggaggcgatcaggcagttgatggaagcctgcttgaagatgttcatgatattgctgatccgcgggaatttatcgggcatcatcacgcagaaaatgagaaccagcagcgccagcgccatcagggtgccgagcttttgcaaaagctcttttccggaattcttctttttcatatcagtctaattctcctccccaggccgctttcatgatatcctcagagttgaagtgcggggtatcacggtcgatattggccatgacccggccgccccgcatgaccaccacgtggtcactcatggccaggatctccggaagctcggaggagaccatgatcacacacttgccggccttgaccaggtcattcatgacatggtagacctcgatcttggcgcccacgtcgatgccgcgggtgggctcgtcgaaaatgaagatgtccgcgtcggtgttgacccacttgccgataaccaccttctgctggttgccgccggagagctgggccgtcacctcgtccagggacggagtcttgatccgcagggactccacattgtcctggccggacttctcaatcttccccttgttcaggaagggtccgttggagaagcccttcatattggccagaatgaggttggtccgcacgtccagggacagcaccagaccctggcccttgcggtcctcggtcaggaaggcaatcttcttcttgatggcgtccttgggcgtccggatatgtaccttctcccccttgacgtagatctcgccgctgtccaacctgtcggcgccgaagatggcccgcatggtctccgtccgcccggcgcccaccaggccagcaaagccggtgatctggccgccgtaggccttgaagctcacgtcatggaggacgccggcctcgttgaggttcctggcctccagccacacgtcgcccttgacgccgaactctttgggatacaggttgtccagcgtccggcccaccatggcgttgatcagggagtcctccgtcatgtcaccgatgtcctgggtgacgatatgttcgccgtcccgcatgacggtgacccggtcgcagagctcgaacagctcttccaatttatgagagacgaacaggatggccacgcccttggccttcaggccccggaccgtctccatcagctggttgatctcctccttgcccagggaggaagtcggctcgtccatgataatcagcttggcgtccagcgacacagccttggcgatctccaccatctgctgctggccggtacccagcttgccgcattccattttaacatcaatttcgggatggcccagcgtggtcagggcctgcttggcttcctcgtacattctggggtagtccagaaggccgtttttcttgacggcgcgtcccatgaaaacgttatccgtgacagacagctgcttgacgatgttcagctcctggtacacgcaggcaatgcccgcctcgcgggactggacggggttgtggaagacgaccttctggccgtccacgtagatctccccctcctcaggagtgtgaacgccggtgagcaccttaatcaaggtggacttgccggcgccattttcgccgatcaggccgtggatctctcccggccggatgccaatagacatatttttcaatgcgacgacaccaggaaaacgtttggtaatgttcttcaactcgacaacatactcgctcatgggattacctcgtttctgtttcctgatttcagcggtccccgccgcccgcggggaggtgcggaacgggaatatggcggcaggaccactgccgccatattccattcattcagatgtgagatctgaggggcacaggctgatcagccctgcatggcagccaggctatccaggtactcctggccgttctcagcggtgaccacggtgacgggagcgttgatgacctcttccacggtctcgcccttgatggccttcagcgcggcctccacggcctggtagcccatctcatagggctgctgggcaacggtggccttcaccatctcgccggccaggatcagatccacggcggaggcgttgccgtcgaagccgacgataatcatgtcgtccacgccggcggacttgcaggcgttcatggcgccgatagcggtatcgtcattgtggcagagcacgatgtcgatctggtcgggataagcgttcagcaggtcctccatggtcttggtggcgccgtcggtggtgttctggccggacagagcgtccagaacggtgacgccggcctcgtcgcaggcggcctgatagccctcgcggcgcatattggaggtgttgtcgccctcctggccatagatgatgacggcgttggcgccctcaccggcctgttcagcggcccacaggccgccttccttcgcggcgtccacgttggaggtgcccacgaagctggtctgaccctcgatgcccacattggtatcgacggacagaacggggatgctgccgatggcgctggcaagcgcaccggaagcggcgccggcgtcattgggagcgacgatgatggcatcgcagcctgcgccgatctgctgctcaatcatagaaacctgctgctcgatctcgctctcagcgccggggcccaccacgttgacggtaacgcccaggtcagcggcagcggcatcgcagccggccttcacatagccccagtactcggaggccagggtcttcaggaccacagcgatctccacatcgctggcagtggcggtatcgccgccgttctcctcggtagcagtgtcatcggtgctggtgtcttcgttggcggtatctccgccgccgcaggccaccagagacagggacatcaccagtgcgaggagaagtgcaaaaaactttttcatcttacttcttttctccttcttaattggtttcctctcacattcaggcagaaatggatctgaactgcgggagtaagaagattttaacatggtgtgcttatacagtcaacgtgttaacgtaaaaaacagctattattacaattttgcggaacttttttgcacaatatgcagaaaattttttatcagctaatcatttacttgacagcgtcggctttttatcaggcgcccggcggcgtccagtttgcgcaaatttttcgcaaatctgccgcacagcctctctatcccccaaaaaccgctcccctgggtgtcgccgcaggcgcgcccgtcctacattatataatataaagaggtgcggacatgcctgttccgcacaaaaaacgccctcccggcttgggagggcgttcggaccatgtattctcagacggagatgattttccaggcgcaccagagcaggagcagcgccataacggcgttgacaaatttgtaataccggctgtacagcgggtacagcagcgcgcccagcgtggcccagatcaggtttccggtggcggcgcaggcagccatgatgacagagaagcacagcacggctggcaccgtatacccatggggcaggatataaccggaataggcggcgatccccagcatcaggatgtggacgttcaggaattgcaggaggaagccgttcacataggacagcggcttgccggaggggccggcctccttcttggcgccggggctgcgcatcagcgtgcggtaggccagatagaggatataagccgcgcccacatacttggccacggggacaatctgcggcaccagctctcccagccaggcacagccgaagccgcacagcagcataacggtgatcaatcccgcccagatcccaaaaatcagcggccagcacttccggatgccgtaccggctggtgctgctgaacagcagaatgttgttgggtcccggggaaaaggtggttgcacaggcatacgccgccagttgtaaatagactgctgtcatgggaactgcccctttctctttatcagatactgtcccgccgcggcgtcagctgaagacgccggccttgcacagctcgatgaactgcttggccacccgggcgctgcgtccgccggagcggaccgcgaatgcctcactgcggaccgccagctgtctggggtccagctccaccccgtactgcttggccagctcctccacaatgtggagataccgctcccggtcggggctgccgaaggtgatggtcagcccaaaccgggcggacaggctcatcagctcctggcgggtgtcgctctcgtggatgtcatcgccctcccggtcggtgagggtctccttaatcaggtggcggcggttgctggtggcgtagacggcgatgttgccggcccggccgcccacgctgccctccaggatcgccttgagggcggcgaagttgtcgtcattggcggtgaagctcagatcatcgatgaagaggatgaacttcagcggattggacgccagggcgtccatcaggtccgggatctgatagagctggttcttcttgacctccaccagccgcagcccctggtccgcgaaggcgttggcgatggccttgatggcgctggacttgccggtgcccgcgtcaccatacagcagcacgttgttggcgggctttccctccagcagggcccgggtgttggcgatgaccttctcccgctcccgctcatagccaggcagctcctccagcctctggggatccgggtgcttcaccggcgccagttgcccctcctccaccgtgaacacgtggtaccgggcgaagatgccgtagcccttcacccccacctcctccatccggcggaggtattcccgggtgatatcggtgggagacacgacccagcccaccagaaattccggaggctcccgcagacccgccgtcaggtcctccagctgcagctgggagagctggtcgaagaaggccagctcccgccgcaggctttcctgaaggacggagctcctgcccaccgcctgcccccggatgcagacgttctcgctctccagcaccgtctcccgcagatagcaggaccagctgtcgctggactggaagagggcggcttcaaatccggcgcaggcggcggagaaatcgccgctgtccccccgcacccgggcggagagcatctcgccgcaggcggccaccaccgggtcctgcagcagccggcggaacaccacaaggcccgtcagccgccggtacatctcttgtacgtgcatgttgcattcctcccgatctcaggccttcagcggaggaccgcgccctcgtcggcgctggtgaccatccgggcgtaacggcccagccagccggtggtgatgttgggggcaggctggacataggcggccttccgggcggccagctcttcctcagatacctgcaacatgatggaggcattgggaatgtcgatggcgatggcgtcgccctcctgcaccaggccgatgggaccgccggaagcggcctccgggctgacgtggccgatggacgcgccccggctggcgccggagaaccggccgtcggtgataagggccacggttttgtccagacccatacccgcgagagcggaggtgggattcagcatctcccgcataccagggccgcccttggggccctcgtaccggatcaccaccacgtcgccggggacgatcttaccggcgtagatggcggcgatggcgtcctcctcgctgtcaaacacccgggcgggaccggtgtgggtcagcatctccggggccacggcgctgcgcttcaccacgcagccgtggggggccagattgccccagaggatctgcagtccgccggtgggggagtagggatcctcgatgggccgaatggcgttgtggttgaggttctggaccccctgaatgttctcgcccacggtcttgccggtgacggtcaggcagtccagatccagaagaccgcgcttggccagctccgcctggacagcagggatgccgccggccgcgtacaggtccggcatgtgggtggggcccgcaggggccaggtggcacaggttgggggtcttctcgctgatctcgttgaacagggccaggtccaccgggcagcccgcctcctgggcgatggccagcaggtgcagcaccgtgttggtggagcagcccagggccatgtcgcaggtcagggcgttgcggatgctgcgggcgttgatgatgtcccgtgcgcagatgttccggcggaccatctccatgatggcggcgccggcccggcggcccagctgcagccgcttgctgtacaccgcggggatggtgccgttgcccggcaggccgatgccgatggcctcgcacaggcagttcatggagttggcggtgtacatgccggagcagctgccgcagccgggacagcagttctgggtgcagtcctccagctgctcggcggagatcatgcctgccttgtaggagcccacagcctcgaacatcttggagaggctgacctcctggccgtcgtaggtgccggccagcatggggccgccgctgcacaccacggcgggcacgttcatccgcaccgccgccatcaccatgccggggacgatcttgtcacagttgggcaccagcacacagccgtcaaactggtgagccatgaacatggtctccacactgtcgcagatcagctcccggctggccagggagtacttcatgcccacatggcccatggcgatgccgtcgcacacgccgatggcgggcaccatgaagggggtaccgccggcggcctcgatgccgctttttaccgcgtcggtcagcttgtccaaattcatgtgtccgggaacgatgtcgctgtgggcgctgaccacagcgatcaggggcttctccaggtcctccggcgtgtagcccagggcgtagaaaaggctccggttgggtgcccgctcggcgcccttggtcacattatcactgcgcataggtcttgctttcctcctttttctacccggcccggaggtgttcccgcctccgggccggtgccttgggtcctcttactttttcagccagctcatcatgctgcgcagctgggcgcccaccttctcgatggggtgctcggccgccatgcggcgcatggccaggaagtgggtcttgcggcctccgttggggttcatctccgccaggaattcggaggcgaaggtaccgtcctggatctccttgaggatctgccgcatctccttgcgggtgtcctcggtaatcaggcggctgcgggtgcggtagtcgccgtactcagcggtgttggagatggagtagctcatcttgccgaagccgccctcgttgatgaggtcgatgatgagcttcatctcgtggcaggtctcgaagtaggccatctccggctcgtagccggcctccaccagggtctcgaagccggcctggatcaagccgcagacgccgccgcatagaacggcctgctcgccgaacaggtcggtctcggtctcctccttgaaggtggtctccaggatgccggcgcggccggcgccgatgccggaggcataggcgagagccacttctttggccttgccggtgaagttctgctccacgcagatcaggctgggcacgcccttgccctccaggtactggctgcggaccgtgtggccggggcccttgggagccaccatgatcacgtccacgttggcggggggcacgatggtcttgaagtggatattgaatccgtgggcgaaggccagggtcttgccctcggtcatgtacggggcgatctgcttgttgtagatgtcggcgcacagctcgtcaggcaccagcatcatcacgatgtcgccggccttggcggcctcctccacttccatcacgcggaaattgggacaggtggcggcgaactcctccgccttggcccagtgggaggagcccttccgcaggcccaccaccacgttgacaccgctctcggccaggttctcagaatgggcatggccctgagagccgaagccgatcacggccacggtcttgccgtccagcaggcccaggttgcagtcagtgtcgtaatactttttgattgccatgttcgtgttctccttttctgtttcttgacgatgtgggtgggaatggttttgccgatgggccctgaacagaacggccgaagtgaaagaaaaaagcctttgcctcttgcaagcaagaggcaaaggcttttgaaacaccttcgcggtaccactcttgttaacggtggaagatccttccgccgccatctcagcaggccccaacaggccctgcacggtaacgggtgcgcccggcactgcctatcagagagttctctttcagcaggctactccaggatgatttcaccagatccgacgcttgttgccttgcaccaaccggcaattctctgaaagcggagcgaagcgggctacttgttcccttcatcatattttaggtatgcaaagacggtaacacactgttccgccccctgtcaagagaaacttgcgctcaacttccccgctcccgcaaagttttattggtttgaccaattccatcccttttcaaacgcgaaaccttatgtattttccccacgattttccgccaagcctgtacagggaccggccagaccagcccaaatctttgcgcttagggttcctctttttgttaaatggaaatattttctaaatatttttgatttcaaaggagaagtgccagaaagtctcataacaggcgtttaaaacttgagaaatccgccgaacatgttcttgcgcggacaaaagtcgttgacgcaaagacgcgcccagtattacaatgtggtcgatacaaacacggacggaggccgcggcgcggtcatccgccaagtctggtttttggagggattcaccatgagcattcagaacgagtatctaagcggcctgatggagcgcgtggtccggcggaatccggcagagccggaatttcaccaggcggtccaggaggttctgacctccctggtcccggtggtggaggcgaagccggagtatatcaaagagggcgtcatggactgcctggtagagccggagcggatcatcaagttccgggtgccctgggaggatgaccagggcaacatccacgtgaaccggggcttccgggtgcagttcaacagcgccatcggcccctacaaaggcggcttacggttccacccctccgtgtacgagggcatcatcaagtttctgggctttgagcagatcttcaagaacagcctgaccggcctgcccatcggcggcggcaagggcggcagcgacttcgaccccaagggcaagtccgacgcggaggtcatgcgcttctgccagagcttcatgaccgagctcttcaagtatatcgggccggacaccgacgtgcccgccggcgatatcggcgtgggtgcccgggagatcggttatctcttcggccagtacaagcggctgcgcaacgagttcaccggcgtcctcactggcaagggcctcagctacggcggctctctggcccgaaccgaggccaccggctatggtctgtgctactttgccgacaatatgctcaaggacgcgggccgcagctttgagggcgccaaggtagccatctccggctccggcaatgtggccatctacgcctgcgaaaaggccacggccctgggcgccaaggtggtcaccatgtccgactccaacggctttgtccacgaccccaacggcatcgacctggcgctggtgaagcagctgaaggaggtggagcgcaagcgcatccgggagtatgtgaccgtccgcccggaagcggagtaccacgagggctgctccggcgtgtggcaggtgccctgtgacatcgccctgccttgcgccacccagaacgagctggatctgtccgctgccaaagccctgatccagaacggctgcttcgccgtggccgagggtgccaacatgccctgcactcccgacgcggtggaagccctgcaggctgccggtctcctctttgcccccgccaaggccgccaacgccggcggcgtggccacctccgccctggagatgagccagaattccatgcgcatgtcctggtccttcgaggaggtggacagccatctgaaggacattatgaccaacctttatcacaacgccgcgggcgccgccgcccagtacggcaagcccggcgacctggtggccggcgccaacatcgccggcttcctgaaagtggctgacgccatgctggcctacggtttggtctaaggagggcatctgcatgagcgactatgtttcccgcgtgtccgccgacctccagcagcggtacgccggccagccggagtatctccaggccgttctcacctggctggagatgattgccccggccctggaggacaatcccatctatgagcgggtggacctgctgacccgaatggtggagccggatcgaatgctgaccttcactgtgccctggatggacgatcagggcatggcccacaccaaccacggctaccgggtgcagttcaacagcgccatcggcccctacaagggtgggttgcggttccatccctccgtcaacccctctatcgtgaagttcctgggctttgagcagacctacaaaaacgccctgacggggctgcctatcggcggcgccgccggcggcgcggattttgatccccggggcaagagcagccgggagatcatgcgcttctgccagagcttcatgacagccctgtaccgtctgatcggcgcagacaccgacatccccgccggtgacatcggtgtgggctcccgggagatcggctatctctatggccagtacaagcggctcaccggaaaggcggagagcagcgctcttactggcaagggcctgacctacggcggcagcgtcatccgccaggaggccgccggcttcggcactgtttacttcttggcccggatgctggaacaccagggcgagaccctggagggcaagcgcctggccgtctccggcttcggcaacatgtcctggggcgtgtgccgcaagagcgcggagctgggcggcaaggtggtcaccctctccgggccggacggctatgtctacgatcccgacggcgtctgcacccaggagaagttcgatttcatgctgtccatgcgcgccggcggcgccgacaaggtggagccttacgccgaccgcttcggcgtggagttcttccccggcaaaaggccctgggaagtgccggtggacatcgtgatcccctgcgccacccagaatgagctggacgtggaggatgccgtgatgattgtggccaacaacgtccgctactatgtggaggcggccaatatgcccgccaccgccgaggccctgcgcctcctgcggctgagtcccaagatcctcaccgcaggctccaaggcctccggatccggcggcgtggtggtttccgccctggagatggtccagaacagcctgcggtacagctggacccgccaggaggtggacagccgcctgaagcagatcatgggcggcatctatgatgcctccgccgcggcggcggaggagtacggtctgggatacgacctgattgccggtaatgacatcgccgctttcaagaagatctccacggccatgatcgcccagggactgtgattctccccctcttcaaaacacacaaagcggccgcccttccgggcggccgctttgtcccataaatttcctttgtagtgggaccggcggtccggcagatgccgggccgccggttttgtttcccgtcccacagcgtccagaacagcccgctgatccggccgttctcgtccccattgatccgctccgcggccggtactttcggcagtcccggtatggcccctcacgggacaggtcccgcggggactccgcatttaatccagttgggcaggcccagcccgtccagctcaaggttttgcctccggcaaaacgcttggacgccgctcccgcggcggtatgaccatgcctcagaacagcccgctgatccggccgttctcatccacatcgatccgctccgcggccggtactttcggcaatcccggcatggtcatgatatctcccgtcagggccaccagaaagcctgccccagcggacactttcaggttccggaccgtcacagtgaagccccggggcgctcccagcagggaggggtcgtcggaaaagctgtactgggtcttggccatgcagatgggcagttccccgaaccccagctctgtcagccgccgggcctgcttctgggcggcaggcgtcagtaccacgccgtccgcatggtaaatccgccggcagatagtctccagcttctcttcgatggacccccccagcgcatagctgtaccggaagtcggatggctgctcacacagccggactacctcctctgccaaagcagttccgccggcgccgcccttggcccacacctcgctgagggccacgctcacccccagctcccggcatttctcctctaccagcttcagctccgccgccgtgtccgtggggaacgcattgatggccaccacgcagggcaggccaaatacgtttttgatattgtccacatgctggagcaggttgggcagtccccgctccagggccgctagatcctctctgcccagctccgctctggctgcgccgccgtggtgcttcaatgcccggaccgtggccacgaccaccaccgcgtcgggcttcagccccgccatgcggcacttgatgtccagaaacttctccgcccccagatccgcgccgaagcccgcttccgtgatggcatagtcccccagcttcagagccatccgggtggcggtgacggagttgcagccgtgggcgatgttggcaaagggtccgccgtggatcagggccggagtatgctccagcgtctgaaccagattgggcttcagagcgtccttcagcagggccgccatggcgccggccgccttcaggtcggcagcagtcaccggggcgtcatcataggtgtagcccaccacgatccgccccagacgggctttcagatccgggatgtccgatgccagacacagcacggccatgacctcgctggccacggtgatatcaaatccgtcctcccggggcacaccctgcatccggccccccaggccatccacgatgctgcgcagctgccggtcgttcatatccacacaccgccgccacgtaatccgcttgacgtcgatccccagggcgttaccctgctggatgtggttgtccaacatcgccgccagcaggttgttggccgcgccgatggcgtgaaagtccccggtgaagtggagattgatgtcctccataggcaccacctgggcatagccgccgccggcggcgccgcccttgatgccgaacaccggccccagggagggctcccgcagggccaccacggcatttctgccgatccgccgcagcccgtccgccagccctaccgtagtggtggtcttgccttccccggcaggggtgggggtgatagcggtcaccagaaccagcttaccgtccggccgatttgtctccttcagaaagcggttgtcgatcttggctttgtatctgccgtattgctctatatacgccccatccatcccgcaggcgtccgcaatatccgtgatgggaaggggcttcgcctcctgggcgatctcgatatcgcttttgatggtcatggctgcctcctgttttccgggctgtccgtgtccagacaccctgctgtttcatgttcgattataccggctcccccgggtaaaagcaacagttctctccaaatccccttattttccaaccttttacaggtaaaacaccggcggcacctgctgcatagcggtctctgcgtccatgtcctttgttatctgtaaatgtgatagccggttgcataagatccgttctagcagtttctcctccgcagatgctataatattgtacagagaagaaggcgcttatatcttaaaaactgtgcattcagacgaacagaggtgtatgaaaagaggaaagagcacataaggaggtacgtatatggaaactctggagaaaaaaggcaaaggttccgcgttgctcccgttcctgctatttattgtcatctatctaggcgctggcctgtacttccaggcacagggtgtagagatggccttctaccagttcccctctgtcacagccatgttcattgccctgctgctggccttctgccagggcaagggcaccatcgatcagaaattcacagtcttcgccaagggcgccgccaacgagaacgtcctgaccatgctgatgatctacatcctggccggcgccttctccaccgtggccagtgccatgggcggcgtggacgccaccgtgaatctgggtctcagcgtcattcccgtgcacttcctggccgccggcgtgttcgtgatctccgcgttcatgggcaccgccaccggcacctccatgggcaccatcagcgccattgttcctatcgctgtgggcgtggcggaaaagggcgggttgagccttcccctgtttctgggcgcctgcgtgggcggcgccatgttcggcgacaacctctctatgatctccgacaccaccattgccgccacccgcacccagggctgccagctccgggacaagttccgggtgaacttcctcattgccctgccggcggctatcatcaccatcatcgtgctgctggtcgtaggccggcctgagaccgtgacggagatgggaaatctgtctttcaacgtcatcaaggtcattccctacctcgccgtgctggtactggcgctgatcggcatgaatgtgttcctggtgctgaccatcggcatcttcgccgccggcatcatcggcctggcccttggcgatctggatatcccactctttgcccaaagcatctggaacggtttcaccggcatgaacgaggtcttcttcctgtccctgttctgcggcggcatgtctgagatgatcgcccacaacggcggcatcacttggctgatcgaaaagctgggccgcatgatgaagggcaacaagtccgcccaggtgggtgtcgcggctctggtgtccctggcagactgtgccactgccaacaatacggtggccatcattgtcagcggccccatggccaaaaacatgagccgtatccacaaagtggatccccgccgcaccgcctctctgctggacgtgttctcctgtgtgcttcagggcatgatcccctggggcgcccagctgctgactgccgccagcctcaccacgatatacggcgtgaccatgaaccccatagacatcctgccctatatgtggtactgctggattctggccgccgtgggcatcctctccattttcattcccttcgccgacggcatctgccgcaaggacccctggaactgggagtacgatgtggcggagtccggcgtggctgccaagaaggcttctctggagctggagcggcaggagtccgcgcagacgcccatctgacctgcgtgtctcttgctaaaaaaagaccgggcgccctgaggcgcccggtctttttctcctctgtcaggtcccctcctgaagccgcctggtgaaggcgatggaatccgccagcgcctcctccagcaggcggacgaactgctccgtcagcggagagggccggctgctgcggatgtggatccagcccaggtggaccgaggtcttccccagcagcgggatcgtgactacgcttccgtccgccagcccctccgacagcaggccgctgccggaggtgaacgcatcggtggacgccagcacgtacatcgccgtggcccggttgttcacgctgatgcactttgccggctttttcagagagaccatggggtactcctcgaaaaagtccgacgccacgccttggtcgtgctcaaacgccacatacggatatccgtccagctcctcctccgttacgctggagcggccagccagcggatgccccccgcgaacatagatacaggggcagacggcggccagttcgtggaattccagctcccgggcgtccagcagccggcagataatcttctccgtcagatccgtcaggcagatgacgcccacgtccgcccggtggtcatagacgtcgtcaatcacaccgtccatccctgtctcccggaggccaaatcgaaagcggttttcaccggcgattcggagcagcctcaaaaatgcatccactgcaaagggataccgctggcaggaaacggaaaagcgcaccggagccgcggcgttgcgtgcctcaccatacaggctctcgatcccgcgcttctgctccagcagggagacggcgtagctgagaaactccttgccctccggcgtgaactccacgccccggttgctgcgggccagcacccgaatgcccagttcgttctcaagctcccgcaccgccgtggaaatccccgactgggacaggaacagcttctgggccgccttgttgatggagccgcatttggagatctccacgatgtactcaagctgctgaaacgtcatagaaagcctcctcttcccctttcgatctcacttttctattataggcattttgagctggttgtcaaatcgttatcaaaaaaactgtcaacgcatcccgcaaaacgcatattaacagctttgcgccctttgtgctattctataagtagaaccaaacaaaagatatcagttatttgagaagttttctgtttaatatcacctgcgtttttcgatggatgcacagattttccccctctcttctctctatccccgcagccgcgtcagagtctctctgatagcgaaaatttgaataccagtcaattttgcccctgcggagcgtctccggaggggccggtgaagaaaggaagatcgactgtatgaacacggagaaaaagttcggttttgccacgcgtcagatccacgccggccacatggaaaacgcggcgggctccttgtgcgcccccatctatcagacctccaccttcgcattctccaccgtccagcagggcggcgcccggttcgccggcgaggagggcggatatatctacacccgtctgggcaaccccactctgggcgctgttgaggagaagctggcctccctggagggcggcgaggccgccatggccgcggcctccggcatgggcgccatctcctccgctctgtggacctctgtggtggccggggacgagatcgtggcggatgagacgctgtacggctgtacatacgcgctgctgaaccatggcatgaccaagttcggcgtgaaggtcaccctgacggacctgtccgacattgagaacctgaagaagaacctcaccgacaagacccgggtggtgtacttcgagaccccctgcaaccccacgctgaagctgctggacatcgagctgatcgccaagacggcccatgccttcaaccccgacatccgggtgatcgtggacaacaccttctgcacaccgtacctgcagcgtcctctggagctgggcgcggacgtggtggttcacagcgccaccaagtacctcaacggccacggcgacgtgatcgcaggcatcgtggtgggcaaggcggacttcatctcccagtgccggatgttcggcctgaaggatatgaccggcgccgtcctgagtccctttgatgcgttcttgatggcccggggcctgaagaccctggacatccgcatggagcgccactgcgccaacgcccagaaggtggcggcgttcttcaccagccatcccgcggtggccaaggtctattatcccggcctggacaccttccccggtcacgagatcgcggccaagcagatgaagctgcccggcggcatgatctccatcgagctgaaggccgaccgcgccgctgttgccgccgcgctgaacaagctgcagctgtgcaccatcgccgtgtctctgggcgatgcggaaactctggtggagcatcccgccaccatgacccactccacctattctgccgaagagctggcagccgccggcatctccgagggcttggtccgcatcagtgtgggtctggaggatcccgaggatatcatcgacgatttcaagacggttttggatacgctgtaattgatcccgctgcggggccgctcctcctctcctacattgggagcagccccgctttcccgcggatccgcgtacctccttttcgccgtcccggtctttccccaccctgccggaggcggccaaaaaggcccggcttctccgccgggcctttttgtgcttctgtacctgctgcctgttgtgcgtctctcctcctgcggcgggcggcccttgagcaggaaaaagcgccgtgcgcatgtgcgcacggcgctttttcctgtttggttcagagaggtaagcgggggggaatgctcagtcctcagccattttgcgatacttggcgtagcggtccttggcgtcctggacggtcttctcgtacaggcgctgggcccggtccgggaagttgatctgcagggaggcatagcggttctcgcccttcagatagtccatcatcttgccgctgtcgggctcgggagaatccagctggaaggggttcttcccctccgcgatccggcggggatcataccggtacagatgccagtagccgcactccaccgccttcttcatctcctcctgcgtgcagctcatgcccgccttgataccgtgctccaggcaggggcagtaagcgatgacgatggccgggccgggataggactctgcctcccggatggccttcagggtctgggcttggtcgtagcccatggccacctgggccacgtagatgtagccgtagctcatggcgatggcgcccaggtcctttttcttgacctccttgccgccggcggcgaacttggccactgccgcagtgggcgtcgccttggaggactgtccgccggtgttggagtacacctccgtatccatcaccagcatgttgatgtcccggttctgggccagcacgtggtcaatgccgccgaagccgatgtcgtaggcccagccgtcgccaccgaaggcccacacgctcttcttggtcagatactccttgttctgcaggacaaaggcgccctcctccgtgggctccgccttctccagggcggcgatcagcgcgtcggacacctcccgggtcacggccgggtcctgccacttggcaagatactccccaatctcagatacggccacacccttttccttcagggctttcagccgcagctccacctccccatggatggacccgtgggcccgcaggaagccgtaggcgaactccgcgttgtcttcgaacagggactgctcccagcagggtccaaagccccggctgtcgcaggagtagggcgtcatgggcatggcaccgccgtaggcggaggagcagccggaggcgttggccacgtacatgcggctgccgaacagctgggtcaccagcttgatgtaggtggtctccgcgcagcccgcgcaggcggcggagaactggaagtagggcttggcgaactgggccgtcttcacgctcttgtcgctgataatgtccttcttcagcagcttctcgttcatcgcgtagttgtcgaagttgggctgctgctccctctgggtctcgaagggcaccatctccagcgcccccttggccgggcaggcggtcaggcacacgccgcagcccaggcagtcgtagggagagacctgcatccggaaggaataggcaggggcgtccttgcccaggcccttggcgggcacggtgacgaaggattccggcgcaccggccttctcctcctccgtcagcagcacgggccggatggccgcgtggggacacgccatggcacagcggttgcactggatgcacacgtcgggattccactggggcaccgtgacagccacgccccgcttggagtatgcggtggtgccattctcccaggtgccgtccaggcagttgtgcctcttgaacagggacaccggcagcttgtcgccgtgctggcggtccatgggcaccacgatctccttgacgaagtccgtgcccttcagctcctccggcgcgccgtccttggcgtccgcccaggcggcggggacctccaccttcgtcatgccggtcagacccacgtccacagcccggttgttcaggtccacgatctcctggccgccctttttgaagtaggagttgtagttgccctgcttcatctcctccaccgccaggtcgatggggatcaccttggtcagctggaagaaggccgcctggagaatcgtgttgatccggttgcccaggcccaggtcccgagccagcttcgtggcgtccatgatgtagaagttggcgtgcttgttggccaggtcccgcttcatcttggcgggcagccgctcctccagctcctccgcgctccagggacagttcagcaggtatgtgccgccgtccttgaggtccgcggtggtgtcatatttgtccacataggtgggcgcgtggacgcccacgaagtccgccgcggacaccagatacgtggcgtgaatgggctggtcgccgaaccgcaggtggctctgggtcagaccgccggacttcatggaatcgtaggagaaatacgcctgggcgtacttgtctgccgccaggccgatggtggtgatggcgttcttgttggcgcccaccgtgccgtcgccgcccaggccccagatcttgcaggatacctgtccgggatagtccagggcgatctcctcataaggcaaggaggtgaaggtcacgtcgtcctcgatgccgatggtgaagctgttcttgggctcctccttggccaggttgtcgtacaccgccacgatctggccgggcgtggtgtccttggaggccaggccgtaccgaccgcccaccaccacgatgtccttccgccccgcctgctgcagggcgctctgcacatccagatacagcggctcacccacggagccggactccttcgtccggtccagcacggcgatcttcttgcaggtggcggggatcgcatccacaaaatgccggatggagaaggggcggtacaggtgcacctgcaccatgcccaccttgcggcccttcctgttcagatagtccaccgtgtccttcaccgtctccgcaccggagcacatgatgacgatgacttcctccgcatcgggcgcgccgtagtagttgaacagcttgtaatcccggccggtgagcttgttgatctcatccatgtagtgctggaccacgccggggatcgtggcgatcttctcgttggcgccctccttgcactggaagaacacgtccggattcaccgtcgtgccccgggtggaggggtgctccgggttcaggccgttcttgcggaacgccgccagctggtcatagtccaccagcttggccaggtcgtcatagtccagcgcctcgatccgctgcatctcgtgggaggtgcggaagccgtcgaagcagtgcatgaaggcataccggccgccgatggcggacaggtgggccaccgcgcccaggtccatggcctcctggggggaggaggacatcagcatgccgaagccggtcattcggcaggtcatcacgtcggagtggtcgccgaagatggacagggcgtgggcactgacagtccggcaggagatgtggaacacgccgggcaggaactcgccgccgatcttgtacataggcgggatcatcagcagcaggccctgagaggccgtgtaggtggtggtcagcgcgcccgcctgcagggatccgtggcaggtgcctgcggcccccgcctcggactgcatctcaatgacctccacgggttttccgaagatgttggtcctccccttggcggaccactcgtccaccttctccgccatcacggaagatggcgtgatggggaagatggccgccacctctgtgaacgcgtaggacgcgtacgccgcggcggtgttaccatccattactactagttttttcttagccatgtctcctgttttcctttcgatctcacttggtctgttctcattgcctcaacaccgtccgctgcccgctccggggcagcggacggcactccagggagcttactttataccgggataggcccgggccacatagtcggcgatcctgcgcaccgcctccttcaggttttcgtcggagttggcgaataccagccgcagatagccctcgcccatgtcgccgaaggcggagccgggcaccgtcaccactcctgcgttctccagcagctcctccgcaaacgcttgggaggtcttgccgaatgccttgatgttggggaaggcgtagaagctgcccgcggacttcttgcaggtgatgccggggatagcgttgagtccgtccaccagaatgtcccggcggcgggtgtagtccgccaccatctggtccacgcacgccgtgctcttcagggcctccaccgccgccgcctgggtgaaggtggacacacaggaggccaccccctcctgcagctgcgccattttcttgatgtaccccggctccggcgctaccagatagccgatccgccagccggtcatggcataggacttggagaagctgttcagcaccatcacgcggtcctgcatctcgggcacctgggccatgctgtacggctggatgccgtcgtatacgatggcgtcatagggctcgtctgtcagcacccacaggtcatgggtcttcgccaccttggcgatggccaggatgtcctccttcgtcagcaccgcgccggtgggattgcagggggagttcagcaggatcgcccgggtccggggtgtgacggccttttcgatatccgccgcttggatccggtagtcatattcctcatacgtggggacgggcaccgctctggcgccgatgctgctggcctgcccgtagtagttggggaagcagggatccggcaccaggatttcatcgcccgggtccagcagcgtcatcatggccaggaacaagccctccatggcccccacggtgatgatgacgtggtctttggtatagccctcccagtactgcttccggtacttggcggccaccgcctcccgcagctctgtggtgccggcgttgggcgcgtaatgggtctgcccctcgtccagggctctcttcgccgcgtccttgatgtactggggcgtgtcgaagttgggttcgcccaccgtcagcttgatcgcctccgggtactgggccgccagatcaaacatctttcggatgccggacgctggatactgcttcgcccgctgggaaatgcgcagttcctgttccattggtaacatctccttttgatcatcttctcacgcgcacccggcgcacccgttccgaaagcgggcacgccgaatgcgcagcaggcagttccttacttcgcagccttgtcgttcacccacagctccgggatggcgttggccgccgcctcactggtgggctcccacttgccggacttcagccgggtcaggtaatcgttgatcagtgcgccgatctgcttgcgcatcaggaagcagaccaccaggttacacacggcgcacacaccgaagaagaagtcgaagagattccacagcacactgagggcgcccacagagccgatgatggcgaaggcgcagcccaggagccggtagggcagaatgaacttcttgccgcccaggacggtcatgcagatctcaccgtagtacacattgaccagcgcggtggtgaaggcgaagaaggtgatgatggccaccacgaacaccgtgccagcgatggcgttgccgaaaccggcgccgaaagcagtggcggtcagggccgcgccggtgccgccctcggtccacacgccggtgcacaggaccaccagagcggtcatggtgcagacgatgatggtgtccacgaacacctcgctgatgccccacaggccctgcttcaccggatggttggcggaagaggaggagtgggccagcggcgccatgccggtgccggcctcattggagtacacgccgcgggccaggccccaacggatggccagcatcacggtggagccggcaaagccgccggtggcagccataggcgtaaaggcgtactcaaaaatcatcgcaaagacgtgcgggatgttgctgccgaactttaccagaataaagatgctgccgatcacataggccagcgccatcagggggaccaccttctccgcaaaggaggagatactcttgatgccgcccaccagcacaacggccatgatgacggcaaagatcacgcccacgatccagccgggaacgtcaaaggagacccgaatcgcctccaccacagagttggcctgcacggcgggcgcaaacaccatggcgcagcccaggatcacagcccagaaaatgcccagccacttccagctcttgcccagcccccggcgcacataccaatagaagccaccgtgccatctgccggtctcaggatcccgctcccggtaggccatgcccagggtgatctcggaaaacttcacgatgaagcccatgagggccacggcccacatccagaatacggcgccagggccgccggtggcgatggccaccgatacaccggcgatgttccccacgccaagcgtggaggccagcgccgtgcagcaggcctggaacggggaaatatcgccctcgccgtcgcccttgtcgaagatcttgccgaacgtgttcttcatggcgtgtccgaacctggtgaattggaagaacttaaagcggacggacaggtacacagcgactgcggatgtcaggatcagaagcggccatccccacagccagttggaaatcgccatcatgatgtcgatgataaacatattctacctcccaaataacttcatgcgctccattttcgattggctgaatcatctgtcgggaagtctttccccgcggcttccccggctcctcctttcctcctatattcgatatgcggccagccgcataacttgcctgatttccaataattccgtatggtggaagcggattcctttgggtagaattgtcaaagctaccggtcttttctggacatgtatccaaaaaagcggcagcttttccgtagaacgggatcattttccaaaatcgtgtcaaaaaccaaagccgcaactgcggcccgacacgaagcatttccacggaaaattacggatcctgttttctttccttatgatttatgatattatatagacaaacatttgtcaaggcagaatgtttctatgatatcgccaaaaaggagcggccgatttatggcaaaagaacaggtatccagcatcctccgcgccctggagattttggagtgcttcatggataacgagacggaatggacgttgaagcgcctggtggcacagctggatctgcccaccaccactgtccaccgccagctctccaccctcacggaccggggttatctggtccaggatcccgtccgcaagagctaccgggtggggccacgcctcctgctgctctccagcaccgtcctcagccactccgatctgcgcagtaccgcccggccggagctggaaaagctgtccgccactgtgaaggagaccatcaacctcagcgtgatgctggaccgggagatcttttatctggacaaagtggagaccttccgctccgtggtgtgcaacacgaaagtgggcacccgagccccggcccacgccaccagcggcggcaagatcatgctggcctttcacgatcccgattatgtggacgcctactgccgggacctgccccagatgcagcggctgacggaccgcaccgtcttctccccggacctgctgcgggagcagctggcccaggcccggatcaacggcttcgccattgacgacggggagatcgaacccggcctgatctgcgtgggcgcccccatcttcggtctggaccagacggtggtggcggcggtcagcatcgccggtcccaccttccgtatgaaagaagagctggacgtgatgactcgtgccgtgaaggccactgccgccaacatctcccgcctgatgggcgggcggccgtgacgcgatctgttttccagctgtcaggagcgggaccccataagggctcccgctcctgctgttttttacttccgcttccggaacagctccggcagtctccagccgcggccctttccccgctccgtggcccgcatctggggaggatggtccagatagaactgctggacggaaaccggcaccgcgccggcctgctccgcccggacaaagcccccgtccggcagcatccgccgggccttcacattgtctcccagaagccgggccagatagtccgagaggaagtcctgcacctcccggctctccaccgggcaggcgatctccacccgccgctcctgatttcgggtcatgatgtccgcagaggataagtacatctgccgcagggcaccctccccgaagcagtagatgcgggagtgctccagaaactcccccacgatgctggtcacggtgatatggtccgtcttgcctggcacgccgggcaccaggcagcagatgccccggacgatcaggtccacccgcactcctgcctgggatgcctccgccagcttgtcgatcagctcccgctccgtgacggcgttggtcttcaggatgatccgcccccggtcgccccgggcgatctccccgtcgatgagccgtaacagcgtctgcttcagggacaccggcgccaccagcagcttgccgtagctgccccgcaaatcgccgatcagcatattctggaaaaaggccacgccgtcggcggcaatggtccgatccgccgtcaacagggagaagtctgtgtacagcgccgcggtcttttcgttgtaattgcccgtgccgatctgagtcacatagctgagccccgtcttctcctttcgggtgatgaggcagatcttgccgtggcacttatagccggcgggtccgtagatcacccggcacccggcctcctccagctcccgggcccaggtgatgttgttgccctcgtcaaagcgggcccgcagctccaccagcaccgtcacggccttgccgttctccgccgcggcgcacaggtgcttgatgacggcggacttccccgccacccggtaaatggtcatctgaatggacaccaccgccgggtccgcggcgctctggcgcagcaggtccagaaacggctgcatggagtggtagggatagaacagcagcacgtcccgctggcggatctgctcccacatgggcacctcccggtccagccaggcgggatatgccggcgcatggggtgggtaaaagagggcgctgtccagactgtccagctggtaggcgtatttcagaaccagcgggcaggtgcacacatagctctgctccgccgtcagcctcagccgccggagcagcatggcctgcagagccggggcctccccctgcatctccagccgcaccggggccagccgctcccgctggcgcagcagcttggtcatctgggcgcgcaggtccaggtcctcctggtccatagcctcatcatagctgatgtctgcgttccgggtgacggacaccaccgcctgctcctcgatctgatagatcttgaagatcttccgcaggtggtgggccagaatgtcctccgtccgcacgaaggcgccgggccgggccggcagaggcaggatgggcggcaccacatccggcacccccacgatgcccagccgccgcttgtctccctcccgcagcagggcggcggcatacagggtcttgttcttcaggtggggaaaggggtggctggggtcgatgatctggggcatcagcaacgggcgcatggcctcccggtaccaggcccgcacatactcccgctcaccgtttttcagctccttgtaggggatatccgccaccccatgttccgccagggcctctatcagctcccggtatacctggtcccgctgccggaccagcggcaccacggcggcatagatccgccgcagctgttccgccggggagaacccgcccttgttttcccgggcgttcggggccactagggctaggtccgtcaggcttcccacccgcaccatgaagaactcgtccaggttgctggtgaagatggagagaaagcgcagacgctccatcagcggcacagaggggtccgccgcctcctccagcacccgctggtcaaaggccagccaactgagttcccggttctgggtgtaactcaggtcccagcgttcagcagcttgtgacacagatatccctccctgacgccgtagggactgatatacagctctcctccgcacagcgcctctgtcagtgcatccatcagcacgatgcccggcagaatcgtgtgcacccggtccgggcagtgccgcaggatctgcttccgcgcctggtggtcccgcttcaacagcagctttgtcagccggcggacctccgcaggcgtcaggatgcggtttcccgccggcttttcataccagtcattggcgattttcagcgccgcccgggccgtgccgcccacgccgcagacccgttccgcccggtgcgccggcagccgggcctccttcagggccgcggccacggtgctgcggatccgctccagctcctttttcttgggccacaggccgtccacgcagcgattgaacagctccagggatccgatgggcaggctctgggcctttttgacctccccggcccggacctccaggacctctgcgctgccgccgccaatgtcgaacatggcgccgtcctgcaagtccgtggccgtccgggcgccgtaatagcccagtctggcctccagctcgccggagatcacatccacccccacgccggtggccgcccgaatctgctccactgcctcctccgtgttgcggatgttccgcagggaggcggtggcaaatacgtggggggcgtccagatcaaactgccgcagcagcgcctgaaagtcccggatggccccgcaggcccgctggattccctccggagagagcacccctccgtggacgtagctgaccagtcccgccatctccttttcggaaaacagcaggtcgaatccgccctccggcagggtgttgtagacggacagtcggatggtgttggaccccaggtccacaatggcgaatttcatgggtatgacgctccttcttcccgcgctccccactgggatgcggcgtttcacgtttatcagattgacagaggcagatgaaattcaaaagcgcggtgctgtaaaatgccggtaaaattcaggctttttcgatggctctggccacagcggccagggcctgggcctccgtgtcatcaaaaaggtgggtgtagatgttgctggtgacggtcatggagctgtgccccagggtgcgggagatatcgaacatgggcacgccctggctgttggccaccgaggcaaagctgtgccgcaggccgtggagggagatcttgggcagcccctgccgccgcaccaccgtcagcaggtcccgggtcagctggtccggcttggggggcgccccgtcctgccgcagcaccacccactccttcgggtcgtcgctgcgccgcctctcccacgcccgccgcagcacctgctgcaggtcctggagcccggtgatgcccagccgccgggcggaggtgcgggtcttgggggacttcagcaccacgctgccgcccacctctgtgcgcacctcccggatggagagcagccccgcctccaggtccacattctcccaccgcaggccgcagatctcgctgcgccgcaggcccagataggccgccagcttcaccggcagctccatcatcgtgccggacacggcggagaacagcagctgcagctgctccggggagtaaaagctgaagcgggcctccttcttcttgggcggcgtcacccggtccatggggctgcgttccagcatctccagccgcaccgccatgcccagggccgtggtcagcatcacatagtgcttgatgaccgtgttgggggacaggccctggttcatcttctcatagagatagccctggatacgcaggggcgtcagctccgccagagggatccttcccagggcaggcagcacatgacagcgtgccatgttgcggtaggcgtacagcgtgctctccgcccggtcccgggccaccacctcctccagccagaaggtcagccactcccccagtgtgcagtccttccccgacaggcgccggtcggcacaggagttcccctccagcgcggcctgggcctcctccctggtgcggtaggtgcgggtatagcgccgtccgtcctgccggaacaccgcgtaatacagctgccgctccgtgtcgtatgcaagattcttctggatcgtctttctgggcatgggtgcattcctctctctttctctctcgttttgcgatgcagacgcatcgcaaaagggccgtgtgccgccgaccacggcgcggcctgaaatttcagcgcacggaccgggacagcccacatgcgcgaaaacttcatgcgccgccggggcagctgattttcgcggcgccccactgcccatgaagttttatgcccttttatcataaacaactcacgctgtccaataggatacccatattcggtcagacaaaacacaattattgtaaatttccgggcccgctccggccctctattcatgtagggccggggcgaatgccccttctgccgcaggctttttcacggcctgcgggacaaaaaagcggctgcctgcggcagccgctctccaagagccgattcacttcgcgtccttcactcccatccggcaggcggcccacaccgcgttgtggtccgagagctcctcccccgcaaagcgagccagggcggagtccggccgggcaaagccacagtccgccgtccgggtagaaagggtgcggctcttggtgggtgtcatcccccgcagcagcagccagtccagccgcaggcccaggcatccgccgcccggcaggggcttgcgccgggttaaaatgggcgtctccggcactgcccggtagcccatggcctccgccgccgtcagggcagcctcatactgcgccacgtcttccagacagcggcgctggagtgccggactccccgcgatctcccggatggcgtccttgtcccggccgtcaaaggtgttggtgttcagatctccccccagcactaccggaatgccgggaagcagttcctccgccgcacggagcaccgcctccagctggagccgccgtccctcgccatgggtgcggttctccaggtggatggaggccacgcccagaggccgaccgcccacatccagctccgccagcaccgcgcatcgcccgccaatccggcgctggcggtcgaagtaccagttgtactgctccggcagccgcacggtccacgcccgccggatgggccagcgggagaacaccgcatttccgtggaagcccttggggtcctccccattcaccagctcgatgaactccaggccgtaggcgtagttccagccgaaccgctccgccagctcccgcgcggtgttccggccgccagagcggacgcagccatcatccagctcattggccagcaccacatccaggggccggacgcccgggcagtcctgaagaaagtcgcccagctcctccaggtggacgccccgctccatattgaacaccagcaggcccagctcctccggcacctccgccggggccggcaccggtgcgccgatctccgtctccgaaaactgggggatcatggccatcaccgtctcctgcgtctcgtggtccagcagcgcacccaggcgctggcgctccgtattggggatacccttcatagtgtccttcctccttgtgttctgggggcgcaggtggagcggaccaccagctccggctggagcaggtccgctgtcggccgccggtccccctgaatctggcacagcagccgctccacggcgatgcgtccctgctgaaatttatgctgcgaaacagtggtcagatggatacggggaatggcggcgtaggagacgttgtcataccccaccagggacaggtcctccggcacccggatcccccgctcttccgccgcctccaaaattctgagggcggtcaggtctgaaaatgccagcacggcgtggggcagcgtccgctccccgaacagtgccaacgcctgttcataggcccactggcgcagttcccgggtgtccggcggcgcgggcagcacccggccggagagcccgtgctctctcagcgcccggcgaaagccccgcacccgctgcacacgggtgagagagtccgcacgcccacccaaaaacaccaggtcccggtggcccagctgcagcagataccggacggcgatggccgcccccgcctcattgtccgccatcacatagctgcacttctccccgtggttcacgcccaggtacacgcagggggtgccctccagcaggtcggcgtgcttggcctggctctcccgggacaggggcgagatcagcacgccgtcgatctgccgggccagaaagttctcgatggctcgaagctcccgtccctcctcctggagggagttgctcaacagcacccggtacccgttttccgctgccgtctcctcaatggcagtggcgatgcccgtgaagtaggggttggacacgtccggcaccactacccccagagtgtgggtggcctgccccgtgagccccttggcggcggcgttgggcacgtatcccagctgggcacaggcggcccggacccgttccttggtctctgcgctgatctccgggcggtcgtccagagtccgggacacagtggccgggctgaccccggccagcgctgccacgtccttaatggtcgtccgccgcatcccgttctccctcctatttgtgcaaacgtttccaatagcacctttaagataccattccggcagggaaactgtcaagtttcttcgtctgttttaccatgtttttgtgggtttttaatatattttctccagtatcttccggaacggcattctggtataatgcttctatgaaaaaagctgcacagcagaaggaggacttttatggcccgcatgaccatcagggacattgcccggctggccggggtctccgtcaccaccgtttcccgggcgctgaacaatgcgccggagatcaactcccagacccgggagcgcgtgctccaggtgtgccgggaacagggctaccgctccaacctgctggctcggagcctagtctccagccggacccgtgtgctgggcgtcattctgccggagctctccggcccttttcacgcctccatcgtgctgcacctggagcgctacgcccaggaacaggactaccagatcatgttgtgctgcggccgggtagggggcagcgaaaccgccgccctgttcgactttctggtaagtcaccgggtggacggcattctgctggtcagtgccagcagcgccgcgcccgatctgctgcggcgccacgcacgggggacgccctccgtgctgctgggggatgtgtccccgaccgctacgctccagcggatcaacgctgtcagcaccgacaactatgtaggcggcgccatggcggccggatacctctcccggctggggcaccggcgggtgctgtatctgggcccccggcgggacagcgtcacccatgtgctccggcaccagggctttctcaccatcgccagggagcggggcatggaggtggagaccgtcttcaaccccggcgccgtctcctccgcccccaacggctaccggctggccaggcaggtgttcgcccgccccttcccgcagacggcggtcttcgctccctctgacgccatggccctgggtgtcctccaggcggcagacgagctgggactggacattcccggccggatctccctgctgggctatgacgatatcgaatacgcctccctgccgaaaatccgcctcagcactctggcccagcccaccggggccctggcagagagcgctgtgcggctgctgctggagctgatcgactccggcgggccgggggaggtcacccacaagctgatcgccccccggctggtagagcgcaacacctgctgctctccgcagcagaggactgcggtctagcggcccgggcatccgaacaaaacaagcccccggcttttcagccgggggctcgcttatactgctcagggaagatagttcagcgggttgcgggccacgccgttgtaacggacctcgaagtggcagtgattgccggtggagttgccggtggagcccacccgtgcgatctgctggcccttgtagacgtggtcgcccacggagaccgtcaggctgctgttgtgaccgtaccgggtcacatagccgttaccgtggttgatctccaccaggtagccgtagccgcccatccagccggagtaggtgactgtgccgccgtccgccgcgtagaccggcgtgccgtacggcccggcaatatcgatgccctgatggttggtggagccaatgccgccgggagaggaccgtccgccgaagcgggaggtgatccggccactgatgggccaccggaacgtgccggtgggcagccaggtgggccgctccttcgtgccctggagccgctgctccgtcacgggctccttcagggtgacagaggagaggatcgtccgctccgtctccacaccgttgacataggtgacgttggccaccacgtcggcggcgccgtactcaccgggggaagtcacctgatagtcgcccttgtacagataggcagagtccgtatactccacatcatacatgacgtcttccacgtagtattcccgctgcttcactgtcactgtaagataggggacggcctccgacagcgtcagcacctcgccgatctggatcttgtcgatgttgtagccggggttcagcgccagcagttccttggaggtcattccgtgatcctccgcgatctcggaccaggtgtcacccgccttcacggtgtacgtggtctcagcggtcttcgtgctgtacagcagctccgccagataccccaggttcatcaccttttccgtgggcacgtactcctgcttgatctccacatcctccgcaaattcgcaggagatggtgttctcgtccgcggtgctgctctggagctggctcagcagctcctccagtgcgccctcatagggggtcgcgcccaccagctcaccgtccacatacagactgtacgcctgggtgaccagaccgatctgctgggacaggtcctcctccagcgtcgtctcgtctaccacgtcctgccgcagcagcaggccggaggaatactgcagcagggagtcgtcgatggtgtagctctcccccagcgtccgggcggtgaccgcctccaggtccgacgcggcctcctccgctgcggattgggagcccacagcggcaatcacctcgccgtcgtacaaaaccgtcgtcccgaaggtgtagacggagaagaacaacccgatggcagcagccacgcagccgccgcacagcagcatcgctggatgcaggcgccagcggtgccccagcttggcccgcagggcagagacccgctcacgccgctgcttccggctggcgcggatccgttcgcccagcagcccccccagagtgggcagcattccccaggccagcagaagcaactgcacaggaagccgctcagactccgggaaccgctttgcctttttctcccgtaccagacgccgccagtggcggcgggtattcttggccttttccgccagcgcctggcagccggtcaccacagggctgatctccccctccgtgtcctgccaggactgcacagcctgccgcagcctccggcgccggggctctgtccgtcgggacggaccagcgggctcctctccccactcggggatcaagggcttcaccgccgtcggtgcggatacgggctccggctgcacctccgggggcgtgggcggacacttcctctcccgctccgcctgtccagcagccagacgcttgccgccgcggcgggactgccgggcggcatgatcgcttttctgaatatgttcgctcatatcgtctccgtaaaatccagcgaaatagttacaatttgttaccgtttgtaatcatacgccatttcccgcttccagtcaagtctaaaattgttaaaaaagttcttcaatttcttgtgtttccatcaatttccgcaccacagcatctggtagggtcccacacttttgccagaagcgccctcccgccggacacaaatttttgtgatgatattttgattttccaattgaccccgacggcgagttgtgtataatgagaatagtctaaatacgttcccaaatctgtacgtttttggaggaaatcagagatgtttgaatttttgatcaaaaagctgaaggcccatccccggaagattgtcttcactgagggcacggatccccgcattctggaggcgtccgcccgcttgctgtccggtaccttcctgacccctgtgctggtgggcaatctcgacgagatccaggccgctgccgaggaagccggcttcaacatccggggcgctgagatcattgatcccgaggccttccccgacatggagaagatggtctccaccctggtggagctgcgcaagggcaagatgagtgaggaggagtgccgcaagctcctcaagcaggccaactacttcggcaccatgctggtgaagatgggctatgccgacgctctgctgggcggcgccacctattccaccgccgacacggtccgtcccgccctgcagatcatcaagaccaagcccggcaacaagatcgtgtcctcctgcttcattctggtccgtccctctgccaccggcgaccgcgaggttctggccatgggcgactgcgccatcaacatcaagcccaccgaggatgagctggtggagatcggcctggagaccgccaccaccgccaaggtcttcggcatcgatcccaaggtggcttacctcagctattccaccctgggttccggcaagggcgaggatgtggacaagatgcgcaatgcctgcagcagactcaaggccctggcccccgatctggatgtggacggcgagctgcagttcgacgccgccgtctctccccgcgtggcccgcaccaagtgccctgactccaaggtggccggccatgccaacaccttcatcttcccggacatcaacgccggcaatatcggctacaagatcgcccagcgtctgggttcctttgaggcttacggccccatcctgcagggtctgaacgcccccatcaacgatctgtcccggggctgcaacgcccaggaggtctactccatggccatcatcactgccggcctgtgcgaggactgattgccgtacatcccattttccatacagcagacagcggcggacgctttcgcggtccgccgctgtttttttgttcattgcaaccggcggttgcggaatcgccaagggaccttgatggacaatcccgccgccctctgctatgatggtcgcagaattgaagcgggaggcgagaccatgaccttgggagaacggctgattcagctgcgggcaaaagcagggctcagtcaggataccctggcggagcagctgggagtatcccggcagtctgtcagcaagtgggaaaacgacgccagcgtaccggatttggagaagttggtgaaactgagtggagtgttcggcgtatctctggatgaactggtgaagggagaggtcccggattcggcggcccccgccgtaaaggccggcgtgacggcagaggaacttcggctccaccggcagaggctggtggggatcgcgttttttctttccgccgtggtgctctattcctatgcgctaaccgggccaatcgcggtgtggccgctactcatgtgcggaaccgcctgtttgttccgcaggaagtttttagccatcatctgcagctggggtgtatggctggcgcttttttcgatttttggccccagtttgatgtggcttccttccggcaactctgtcacctggatggccgccttctggctgaccattgcgttgttgttcctgacggttcaaaccattcgccgtcccccgcccgtccctgtttgctggctgcttctggtcgcctttgcgctccaatatgccggtacccgcagcatttggacgtccatccatcgtccgggtctgctccagttctttctgcttcgtcctggtggaaagttcctgatactgtattggttggtgatgcttcttctggtgtccgtccataccatacgagaattcgttgtttcccaccggcattccaccgggaatctatccaaatcgtaaatttttttgcaataattccttttcgtattaaaaacaaagccgccctgtcgggcggctttgcgctttgctttcgctgcttacttcaggttgaagaacgccttcatgccaggatactgcgccacgtcgcccagctcctcctcgatgcggagcagctggttgtacttagccacccggtcggtgcggctgggggcgccggtcttgatctggcccgcgttgacggccacggcgatgtcggcgatggtggcgtcctcggtctcgccggagcggtgggacacgatggcggtgtagccggcccggttggccatctggatggcgtccagggtctcggtcagggtgccgatctggttgaccttgataaggatggcgttgcccacctgcttctcaatgccggtggccagacgctccacgttggtgacgaacaggtcgtcgcccaccagctggacccgatcgccgatggccttggtcagcatggcccagccctcccagtcggtctcggccatgccgtcctccagggagatgatgggatagttgtcggcaaacttcttccacatgttcaccagctgctgctgggtcagcttcttgccggacttgggctggacatagcacttctgctcctcgtcccaccactcggaggaggcggcgtcgatggcgatcttgaagtcctcgccgggcttgtagcccgcggcctcgatggcctggacaatgaccttcagggcgtcctcatccttcttcagattgggggcgtagccgccctcgtcgcccacaccggcagcgggagtgccgttctccttcagcacagccttcagggcgtgaaacacttcggcacagcggcgcagggcctcccggaaggagggggcggagacaggcataatcatgaactcctggatctccacattgttggtggcgtgggcgccgccgttgaggatgttcatcataggcacgggcagctgcttggcgttgacgccgccgatatagctgtacaggctggcgcccaggctctcggccgccgccttggcgcaggccagggacgcgcccaggatggcgttggcacccaggcgagacttgttgggggtgccgtccaggtcgatcagggccttgtcgatggaggtctgatccaggacattcatgccgatcaggcactcggcgatctcggtgttgacgttctccacagccttttccacgcccttgccgttgtagcggcccttgtcgccgtcccgcagctcgcaggcctcatagataccggtggaagcgccggagggcacggcggcgcggcccatggtgccgtcctccaaatagacctccacttccacagtggggttgccccggctgtctaggatctcccggcccaggacgtcgacaatctcaatgatctgcttcatagaactcgtactcctttattaaaattataagacagaatcatgcgggcgcgttcctcccaagggagggcccaccagggatttccggtgctattatatcggtaatcgtttactctgtcaagcaaaccggatatttccagtgaaaaaagtgcgcactcctgtcacagaaggacggcgctgctgagaatctcaaaggcctcctgacagggcaggcgctttttctccatgggcggcaggctgtcgtcaaaccggcgggcttccgcttcgtcaaacacaaacgccgggctctggcggtatatccagctttttcccgccagggtgccgggctccagttccttcaccagcatcgcggcgggatacgtcccgtcctccagatggacccggtgctttttgcagctttggaagccgcggcccacgtagttgttgggatcgccgaagatcacaatagcctcgtaccccatggcggacgcccgccggaaggactcctccatcagcagcctgccatagccccggcgctgcagtcccggtcggatacagactggtccaaaggtcaggatgcccttctccttccctgcctcgtccaccagtgtgctcttcgtgtacatgatattgccgaccacacggccgtccagctccagcaccaggtccaactccggcagaaaatccgggtggggccggatggcgtgggccaggtagtgctccgtgcatcctggcgtgtagaggttgtaaaacgcctgccggatgatgtcctccacctgctggtaatcgctcacccgctccgggcggatcgtgatgttcttctccatatcggttcctccctgcatgaattggcgccctgcgggcgcagtctgcacagcttgtcctgctctctattatatgtctctttcggctgcacgcaatggtgggcagtgatttttttcgtccggagtgaaagctggcgcgaaaaagcgcctcccgcaaaagcgggaggcgccgaatcgaaaactcacaggaggttcatcaggttgaagctcaggatcaggccggagaacacgatggacaccgtggagcacagcttgatgaggatattcagggacgggccggaggtgtccttgaaggggtcgcccaccgtatcgcccacgacggcggccttgtggcactcggagcccttgccgccgtggtggccgccctcaatatacttcttggcgttgtcccaggcaccgccggcgttggacatgaacaccgccatggcaaagccggtgacggacacgccgcccagcaggcccaccacgccggtggggcccagcaccaggccagtagccagaggcacgatgatggccagcagggccggcaccaccatctcatgcagggcacccttggtgcacagggacacgcaggaggcgtagtccgggtctgccttgtactccatgatgcccgcgatctccttgaactggcggcggacctccaccacgatggactgggccgccttctgcaccgcgctcatggtgaaggcggagaagacgaaggtcagcatggcgccgatgaacatgcccaccagcaccgtggggctggtcagggtgaagttcagcatctcctccgtgttctcctggacgatgttcacgtagctgaccagcagggccagggccgtcagggaggcggagccgatggcgaagcccttgccggtggcggcggtggtgttgcccagagagtccagggcgtcggtccgctcccggacgctctccggcaggccgctcatctccgcaatgccaccggcgttatctgccacggggccgtaggcgtccgtagccagggtgatgcccagggtggacagcatacccacgccggcgatgccgatgccgtacaggccctggttgaaggccgcagtaaaggcgccggcctcatccacgatctccatgctgccgccggcggcgaagtagctgaccagcaccgcagccgccacgatcaggatggaggtcagagtggacttcagacccagggagatgccgccgatgatgatggtggcggagccggtctcggaggcggccgccagctcctgagtgggcttataggtatcagaggtgtaatactcggtgaagtagccgatggcgcagccgccgatcagaccgcagaggatggccacataaacgcccatgtgcccatccagaatgaaataggtcaggggcgccgccaggatggcggagagaacagcggcggtgtaagtgccggtccgcaggctcttcagcagggactgctgggtggcgttctccttagtcttcaccaggaaggagccgatgatggagcagatgatgccgcacacggccagggccacgggcagcagcaggccgccccagccgtagccgcccacagcgcccaaggcgaaggttgccaggatagagcccacatagctctcatacaggtccgcgcccatgccggccacatcgcccacgttgtcgcccacattgtcggcgatggtggcggggttccggggatcgtcctcggggattccggcctcaactttgcccaccaggtcggcacccacgtcggcggccttggtgtagatgccgccgcccacacgggcgaacagagccatgaaggaggcgcccatgccgttcatcaccatgatattgcccagggacaccggatcattgatgccgaaagcatagcgcagcaggaaaaaccagatcgtgatgtccagcatgcccaggcccaccacggtgaagcccatgacggaaccggaggagaacgccacccgcaggcccttgttcaggctctcggaggccgcctgggccgtccgagcattggagtttgtggcgatcttcatgccgatgaagcccgccagcatggaccagatgccgccggtgaggaacgcgaagggagtgaactgcgagagcatcttcccgccggaaccgaaagcaataatcagcaggaggatgaacaccaccagaaacaccttgaacactgtggtgtactggtgcttcagataggcgtttgcgccctcacggatggaggcggcgatcttccgcatcttctcgttcccctccgagaaggacatcacgcggctgcgctgcagccacgcgaagagcagtgcgatagccgccccgacaaatccgatccagaaaaggtcttccatgtttctccgctcctttgcagttgtatttgtatacggtacgtatattttaacatagcccggaaatttttcaagaaaatattaggtaattttgcgtgcagacagctacgttttcgcgttttccacaaagttcctgttttttggctcccacttttcattcatttgggcagattgcctctttacaggacgcctaacctgaaatccggcgaatttttttgtgaaaaatgccctcaaaccgcagtctgagggccgtatacagcaatatggttctgattttgagctgcaacccatccagctctgctcaatagatcaagtggaaatcggtgaagacccagcggtcttccagaaattcataggggaatgcataggactccacccctgtcacggtagagccgccgtctgccagcagatccacctctactatgacagagtatcccgcctggccgtacggcttgatctggatgtccgcctgacccttggactcgtcccgctcccggctggtaggcagaacatacagggccccgtccacatcctgatacaggggatgggctccgccggaggccagcagcgcatccaccagctcctctgaaaacaggccccgcagataggcccgcaggtctgccagattttccatgcccgggtactccaccggatagtaaagccagccgtctatggtctgcgtcttctctccgcagggcagcgtctccaggctgaaccagccgtacgcctcctccgcccggaaataggccgcctggatctcctcgtccgtcaggggacgggcctgaccctccagcctgacggcggacagaccgccctccgcatccggtgcagaggcctccgcaaaaacggaaggcgcttctcccgccgccccctcgtccgcggcgggcccgccgcacccggccagcgcccacagcgccagtgccagaaacagcacgctccacctcttcatagcttcctctctccttctcccaaacgggccgccggcactgcggggcccacagccgcaaggctctcctctctggtatcagcgtatcacagttttcagaaaaatgccattcatttttttacttttttccgttttttcgacagtttttttgaaaaagccgcaaaaatgccgcccggaacattccaggcggcagaggagatcggtctccccggggaactgcatatcgtcagcggagcgaaccacatccgcggaaactgtcaagcgccgggccgaaaaaagaaaaatccacgcctccggcgtggctctccatcggattccgttctcaccgctcgctgtgcttccagccggcgtccgtaaagatcaggtcgtccacatcgtcgagatcccgccaattccaattcatcatactgctccctcctttctctctgaggattacagaattcagtatagcagggtgggcagccgtctgcaagggcaggaatatacagtttacataaaatttttgcaaagtttttgtgcaggattcttctcccagtaggctgaaaccatacggaagccacccgccatttccgtcttctttgtgtatttttccactcgtcatgtccatactatttatggtataatagccgcgaagcggctattatactggccgggcatctgctccgcgcctgcggaggcgcctttttgcagcgcccgcgcttcctacatttggatttgctttttccacgtctcggacgtgctgcgttccgcggcggaggaggccgcgttcaccatgcccaagcatcccaagcgccgcacccggcggaacctggccgtgctggccctgtccgccctgtgcctggccggatttctctactgggacaacaccgctctgcaggtgacccggtttgaccctgtcttttccgatctgcccgccggttttgatggctgccggatcgtggtcctcagcgacctccacggcgcctcgttcggtgcgcacaacgcggacctgctggcggctgtggccgcggagcagccggagtacatcttttttctgggggatctggaggacaagtaccgggggccggaggacggctacccggcggagaccgcccggggactttctgccattgcccccacctactacgtcaccggcaaccacgagtgggccgtgggcggagtgccggcgctgaaggaaatcctcaccgccaacggcgtcacggtgttgtccaaccaattcgtgcccctggagcggaacggggacaccattgtcctggcgggcatcgacgatcccaacggctacgccgaccagaagacgccggaggagctggccgccgaggtctacgccgcctgcggcgaccccttctggatcctgttggcccaccggaacaaccggtttgcgcgccagtacagcctgctgggggcggatctggtgtgctccggccatgcccacggcggcatcgtccgcctgcccgggacggacgggctgttctcccacgacctggacctgtttccctcctataccgccgggctgtatgaagaaaacggctccgtgctgttcgtcacccggggcctggggaattccgggccctccttccgggtgttcaaccgcccggaaatcgctgtgctgacgctgcgccgggcggagggctagttccggcggcaggcttccgagagccgcaggcccagggcaaggccctggcaaaagcagaacagcccatagccccggaccggatcctcccgcagatactccggccactggtccggctccggaccggggacccaggcgaggaagagttcttccatggtatcaggtatttcctgcatgataaatccccttttaaaaaatacagttatatgtgctatcattagaatggtacatagttatctgtgtgtcaaggaggtattgcatgttttccgaaaaaattcgccagctccggaaagatcgccatctgacccaggcagaagtcgccaaggaggtcggcctgtcagcccggggctatcaggacctggagctgggcgccaagccccggtatgacgcgctgctccacatcgcggacttctacggcgtgtccgcagactggctgatgggccgcacggacaaccctgctgtgaatcgctgaaaaaggaactgcgggaggtccaatatgtttgccgataaaattcgagtccttcgtaaagagaaaaagctgacccaggcagaagtcgccaaggaggtcgacctgtcagcccggggctatcaggacctggagctgggtgccaagccccggtatgacgcgctgctccacatcgcggacttctacgatgtgtccgtggactggctgatgggccgcacggacaatccccatgcacaccgatgaaaggatttccaccttatgaccgaattcctcgccggacaatttgatatcgccgtgatcggcgcgggccacgccgggatcgaggcggcgctggccgccgcccggctggggatggaggccatcgtctttaccatcaacctggatgcggtgggcaacatgccctgcaaccccgctatcggcggcaccggcaagggccatctggtccgggagctggacgccctgggtggcgaaatggcgaaggccgccgacgcgtgctgcatccagtaccggctgctgaacaagggaaagggccccgccgtctggtccctccgggcccaggcggaccggcggcgttatcaggagtacatgaagcacaccctggagcagcaggaccatctgacggtccgccagggcgaggtggtggaggtccgcacggagaacggcgcggtttccgccgtggtgctggccaccggggcggtgttctccgtgaaggccgtgatcctggccaccggcacatatctggcgggccgcaccatcgtgggcgagtgcgtggaggaatccggccccgacgggatgcacgccgccggacggctgacggactccctgctgaagctgggcctgcccctgcggcggttcaagaccggcaccccgccccgggtcaacgccaggagcgtggactttgacgagatggagctccagcccggcgatgccttgccggtccccttttcatacggcacccaatccccgccggagaatcgggcggtctgctggctcacctggaccacggaggagacgctccggatcgtccgggagaatctggaccgggcgcccatgtactccggcgtcatcgagggggtgggcccccgctactgcccctcctttgagaccaaggtggtccggttcccggacaagctccgccaccagctgtttgtggagcccatgggcctcaacactgaagaattgtacatccagggcttctcctcctccatgccggaggaggtgcagatccggatgctccgcagcgtgccgggcctgcgccatgccgtgatgacccggcctgcctacgccatcgaatacgactgcatcgaccccctggccctgcgccccactctggagtgcaaggctgtgccgggcctatacggtgccgggcagttcaacggttcttccgggtacgaggaggcggcagtccagggctttgcggccggggtcaacgccgtgcggaagctgcggggcgagtgcgatttcatcctctcccggtcggagagctacatcggcaccctcatcgacgatctcgtcaccaagggcaccaacgagccctaccggatgatgacctcccgcagcgaataccgcctgctcctccggcaggacaacgccgaccagcggctgacccgccgggggtacgacatcggcctggtgccggaggcgcggctgcgggccgtggaggcaaagtacgacgccgtggcccgggagatcgcccggctgacccacaccggcgtctccccctcccccgccctggcctcctttctggcggacaagggcacggcggacgccccggacggctgtcccctggtcgccctgctgcggcggccccagctcacctacgcggacctggcccccttcgacccggaccggccggacctgccggcagacgtggcggagcaggtggagatcagcgtgaagtacgaggggtacatccagcgccagcagaaacaggtggaggacttccaaaaaatggagcggcggcgcctgccgccggatctggactattcctccatccaggggctgcggctggaggcccgtgaaaagctgaacgccgtccgcccggcggacctggggcaggcctcccggatctccggcgtcagccctgccgacgtgacggcgctgatgatctatctggagcggtagtgcggcgcctgcccctgctccactcccagggccaggcccagctggaggcctctggcaaaggccgcggtacaccattggagacgcaggcccgccacctggtcgaacaggccgaggcggatgtcctccggcgcggcggccagcacctcctccagcacatggtcctggaagagcggctcctggcacagcgccgcctctgcgtactcgtcgtagagccattcgtaaatttctttcacaagcgccctcctttcacgatattatatatcgtgtttattgtaacacgagatcttgtatcagtcaatagaaagggacccctctatggatgtgattctgcctattttttcccagcgcctgaagcagctgcgcagggaccgcaagatcacgcagaaggcgatggccgagctgcttggaaaaaccgagcgccattatcaggcaatcgaggccggatgcatcaacgtccccgccacacagctgatctttttggccagatattttcaaacaagcgtggactacctgctgggcctctcggaccagcggtaacgcgctctcccagaacttagaaaaagcaccatgccccgccgcatggaaggaaaggaagctcccgcccatgattatcgacctgacccacaccatcacgccggagatgcccatgtatcccggctccgccgccccctccatcaagcccaccggctccctgacccgggacgggttccgggagacccagttgaccatcgcctcccacaccggcacccacatggacgccccgtcccacatgcttccccggggctctacgctggaggtgctgcccgcctcccagttctgcggccgggccgtggtgctggacgtatcggacctgccgccccggagcgtcatcaccgccgactacctccgggagcagaacgggaccatccgctcggcggatttcgtgctgttctacaccggctgggagcggaagtggggcaccggcgcctattatgacgacgatttccccgtgccggaccaggaggcggccaaatatctggtttcctgcggcctcaagggcgtggggaccgacgccctcagcgtggacaccctgcgggatcagcagttcctggcccacaaaactctgctggacggcggtctggtgatcctggagagcctgtgcctgaaaaaggtcgtggggcgcaccgacctgatgcttttcgcactgcccctgaaatttgagaacgccgacggcgcgccggtgcgcgccatcgcggaattccgggacttcccggaggaaaaggagatggaggcgctttgagaaagtttctggccatcctggtgtgcaagctgggccgcgccgtgggcaagctggtgggcaagggcagctctatgcccggcaaattcgccctgaagatctgccccgatatcctcgcccgggtccagctgcccagccacatcatcgccgtcaccggctccaacggcaaaacctccaccgtggagatgatcgccgccatcctgcgggccgggggcaaaaccgtggtctacaatgaagagggctccaaccagatcgagggcgtcaccacgctggtgctgacccacgcgtctctcacgggccgggtgcgggcggatgtgctgctgatcgagtccgacgagcggtacgcagcccagagcttccggtacttccaccccacggagttcgtcatcaccaatctctaccgggaccagctgacccggaacggccatccggagtgggtgtatgacgccattctcccggccctccatccggagacggagctgatcctgaacgccgacgatcccctgtccagctgctttgcccggggacgggacagggtgaagtggttcggcctggaccgctgcccctccgacaccgcgtcccccaccggcgtgtaccacgacggggcctgctgtccggtgtgccatgcccccatggaatatgactacgtccactacaaccacatcggcgctttccgctgcacgaaatgcggccatcacaagcccgccacggactacaccgccacggcgctggacctgggccggggcaccctgaccatcgacagctccatcaccatccagctggccttccgcagcatctacaacgtctacaacatcctggcggcctatgccgcctgccgggagtgcggcgtggcggcggacaccgccgccggggtcatcaacaactacatcctgaagaacggacggatgcagaaattcaccctgggggagcaccgggggatgctgctgaccagcaagcatgagaactccatcgcctacgacacgaacctccgctacatccgcgccgcccaggagccctgcaccgtcctggtgatcgtggacgcggtgagccggaaatacttcaccagcgagaccagctggctgtgggacatcgacttcgaccagctgaacgccccccaggtgcagcggatcatcctctccggccggtattgcaacgatctggcggagcggttctccttcacggacattccccgggaaaaggtcacggtccaggcggacatccccgccgcggcggcggagctgaaggcggacggcagtgaaaacgtatacgtggtcacctgcttctcggaccgggacaagattctctcccaggtggtaaaggaggcgtgaggacatggaactgaagatcatccacttttatccggatctcatgagcctctacggcagctatgccaatgtgtccgtcctgcggcggtatctggaggccctgggctgcgccgtcacggtacaggccgttgtcccgggggagggcgcagacatcaccagcgccgactttctctttatgggagccggcacggagcgggcccagcggtttgcggcggaggacttcgcccggtatagcgcggcggtgaaggccgcggcagaggacggcaccgccatgctgttcgccggcacagctatggagctcttaggcgcctctgtcaccgacagggacggggacacgtatcccggcatcggtctggcctctttcaccacggtccagggcaagcggcggatcgtaggggatgtgtacggcgttacagccctgtttccggaggccgtggtgggcttcatgaacaagtgcggccaaatccgcggcgtggaggcgccgctgctcaccggtctctctctaggcttcggcaatgaggcggagaagggcccggagggcttccactggaagaacgtgttcgcctctgagctcaccgggccagttctggtaaagaacccccggctgctggaggctgtggcggacgccatctgtacccggcggggcatttccctgccagaggagcggccgtccttcccctatgcagaggcgggctacgccatcacagcagagcagctgaagctgcgtgccgaggcccggcagtgattgcagggagaatccgccaggacggccgcctgtgggcggccgtcctgttttttgcagaggcccgccggggccgtgcgcatccaactccagccacagactgacgcagggaagcgcgaccatgggggacattgcccggaaaacggaccggggagcggttgcaagccgctccccggtcttattttattccgtattgcttaaaacctcattgtgcttatccaccacgctgatctccaaatcccggtaatccgcggtgttcggctcctccgtcacccgcagcagccagggggcctcatactccgtatccagcagctgcccattctgtgtcaccacacagtaaggtgtaaaattctctcccaggatgaaccagtcccccgcccgctgctccataccggtgatctcgatgggcaccatgcccatctccatctccgtgggtctgtagcgggcctcgccctcatagcagtatccttttccatagagggcgtcatattgcagcatccgcaggtccgcccggtatgtaggctcctcccggcaggtctgctggaaggcggtcatcagcccggtggtgatgcccaggcggcccagcacagcggcggagagctgataggccgccaggggctcgtcctgctgttccagcccaaagttgtcccagatgatgtactctgtgcggtagaggctgctgctctccatgttctcggcctccagccccagcgccggcaggtggtcgccgtagagcaccagcaccgtccgctcgtcccgggcctccagctcctggatcagatcccccacaaaggcgtccatctcatgaatctggttcacataatactccaaagcccagcggtacgcctcatcggggcacgcttctaccgtgacggccgggtcctccagctccggctccatggggtatttgccgtggccctgcacagagaccgtgaacaccagatccgcctggtcctccgtcacatccagcgcctggaggatctggtccttcagcacaccgtccttagcccagttggtgggcgtcttctccaccgcaggcatatactccagggcggtaaaatcatcaaagcccagattgggatagacctcgttccggctgtaaaaggccgcccggtgattgtggatggcatgggtcgcgtagccattttccttcaggtcgtaggccacagactccacggtctgatccttcaggcaggtctggaaggggtactccccgggtccgaagaaccggctgctcataccggtaagcacctcgaactctgtattggctgtgcccgcgcccaccaccggcaccgtcagatagccggaggaatacgcctccttcagcgccgtccagttgggcaccggatcctccgacagctccaggccctggatcatggatggatcaatataggactccagctggatgaagatcacattcacatccatctgcggatcggcggagagcgccgccgtcttctcctccaccgaccggacaatatccgccaccgccttctggctgtaattggccgggcggcggatcccccggttcagccaggtctgcagaaagcagtaggaaaagccgtagtcctcgtaggcaaaggccaggttggcaaactggtctgacaggttgcctgtgaaaaaggccagggcgcatccgccgcccatcagggcgccggagaccgccatcgctccgatgccggtgagaatccgggtccgcagcggacagctgctgcggggccccttccagaacagcagcaccagccctgcggccaccagcaccagcgccgcgatcagcagaatgatgtagccggtggagagatagttggggaccgtgtccagccccgtttcaaacaccgtcagatccgccacggtgaagggcgtcatacggttgaggaggatgaacccgttcacgccgccgcagatcagccacaagaaggacaccaatgcgcaccagaacgcccgccgccgcagaaaaaaggcggggcagagcgtcagcagtacaatcaggaaattcaccagaaatgccagcggttcctccgtcataaagcgccaaaagccggcgggcccatctgtgaagctcttgtgattgaacagctccaccacgacagtgaccgctaaagccagcagcggaagatacaggaacgctctgcgttcctgtcgatgccgttcggcatccgcggccgccggcggcaatgtctgttgcatcggaatgaccttctttcttttcatagattttttattatagcgcctttccctctgcaattccatgaattttttgcgaacttttttctttttcttttctaaaatttcatctgattttgaagaaagtctccctgctccatcgtattggaaactgcggcggaaacctcttgacaggcggccccgtttgtattattgtactatcgtaatagtacatcgaaaggagcggatttcatttgcagcagcgatccaagttcattcaaagaaccagcgctctggcgctggcggcggtcctggcactcggcatgggtgttcaggcggccggaccgggcgcatccacagtggatgaccggcgggaggacctgaccatgttttatgagacgctgaaagacagccatccggatctttttgccaacacgccggaggagaccttcctggcccgcaaagcagagcttacagagcatctggacaccgcaagcgacgtagaatttctcttcggcctgcagagtctggccgcgcttgtgggcgactcccacaccagcgtccaggtggcggacagcgtggtggaccagctgaatgcctatcccatggtgctgtcctggcgggacgggcactggtacctgaccacagttccggctgaggaacaggatctgctgggcgcggaggtcaccgccataggcggccgctctatggcagaggtggtggagacctttggccgcgtgctcagtgccgacaacccggtgaagctgcggcggcagtaccggcaggtgtgcaatgtggcggattactacgcctatctgggtctggcaaaggcgggtgagcctctggccctcaccctggctgacggcaagaccgtctccatcgctcccatgccctacctctccctgggagaggcggaaattgtccagctaggcgctgaggtgccccagcccgccactgcccgccagaagtgcaattactgcgcacttccgctgagcgggcaggtctactatatccagtacaacgtctgccaggaggacccggcgctgcccatggaggactttgccgcccaggtgcaggcagacctggaggccggaggttacagccgcgttctcgtggacctgcggaacaacggcggcgggtcagacggcgtaatctggcctctgctgtccgtcctgcggcaggagatggatgatgggaccgaggtggtgggactcatcggagaggccaccttctcctctgccatcatcaatgccgtagagctgcaggaaatgggcatcccgctggtgggagagcctgccagcggcagcgtggaccactttggctccgtcagtggcttttctctgcccaactccggcatccagattggtgtctcctccaaatacatcgacctgggcaccctgctggacgccgacgccggacggggcgtggagtctctggagccggatatcgccgttccccaaaccatggcggataccctggcgggcagagacaccgctgtggagtggctgctggcccatccggagacgctggaacagcgggaatacccggatgcgccgctcacccgggggcggttcgtggggcagctgtatgctgcggccgggtcccctgccgcagcggcggaggccggtttccaggatctgctgggcatcgagtggttcctgccggcggtgaactgggccgcggagaccggcgtcaccggcggtacggcagagggcgcctttgcggccgcccggcacctcacctggcaggaagccgccgtctttctcgtccgcactgcggaggccctggggctggagccggaggctgtccgcaccgcgcctctgcccgatgcgctggcggagggtgcctgggaccaaaccgctctggaactggcctgggaatggggcctgcttccggaagacgcgggcagcgccgccgaaatcgctcgggtccagggcggggccatggcggatgcctttgcggccctgctgtaaccccacgaatcgtctgaccagaaacagcccccggacgctgcggcgtccgggggctgtctcaacctctctgacggcggtgtgccgctgttctctgacgggctgtcttccaggcgcacgtcccggcagagaaaaggaccgcgggataactcccgcggtcctctgatatggtatatgcttactcgctgtacatggccttcagcttcagcaggtgctgatagcgatccatggcagctttctcgttgcgctggaacagctcgccggcgcggtcggggaactcgcgggtcagacggctgtaccgggcctcgttcatcaggaactcctgatagccgccagccggctccttggagtccagcgtgaacttggcaccctcagcggcggggttgaagcggaacaggttccagtagccgcactccacagccttcttcatttccttctggcagttcatcatgccgcccttgatggagtgcatctcgcagggggcgtagccgataatcagggacgggccgggataggcctcggcctcctgaatggccttcagggtctgggcggggttggcacccatggccacctgagccacgtagatatagccgtaactcatggcgatctccgccagggactttttcttgatctccttgccggccgcggcgaactgcgccacctggccgatgttggacgccttggaggcctggccgccggtattggagtacacctcggtatcaaagacgaagacattcacatcgttgccggaggccaggacgtggtccagaccgccgaagccgatgtcgtaggcccagccgtcgccgccgaagatccacatggacttcttggacaggaactccttgtccgccagaatctcagcagccagcttgcaggcgtcgcactggcacagcgtctcgccctttgccttcagctcctcgccgaaggcatggatctccgccttgggattggccagcagctcgtccacagtgcagatgctgctctccagggcggcgatgtatgccttggtggcctcgccgttggcggcgctgtcctccatggtgtccagccacttctggccggcctccttcagagcgggcactgcccaatccttggcaatcagctcccgggtcagatccgccagacggctgcgggtggcctgctggcccagatacatgcccaggccgtgctcagcgttatcctcgaacagggagttggcccaagcgggaccatggccttccttgttggtgcagtagggagaggtggcagccggaccgccccagatggaggagcagccggtggcgttggagatgtacatccggtcaccgaacagctgggtaatcaggcgggcatagctggtctcggcgcagccggcgcaggagccggagaactccagcatgggctgacggaactggctgcccttgacggtgttgtcctgcatgtccttcttctcggacacctgggagacgcagtagttgaagacctcctgctgggcggcctcctgctcctggtccaccatggtcagggcgtccaccgggcactggcccacgcacacggcgcagcccatgcagtccagcgggctgatggccatggtgtacttgtacacgcccttgcccttgccggccttcacgtccacgatcttggcggcggcgggggcattcttggcctcctcctccgtcagagcgaagggacggatggtggcgtgggggcagacataggcgcagttgttacactggatgcacttggtggaatcccaagtgggaacggacacggccacgccgcgcttctcataggcggcggcgcccagctcgaactggccgtccacatgcttgacgaaggcggacacgggcaggctgtcgccgtccatgcggcccacggggtccagaatcgtgctgacctgctccaccagagcggcggggccctcgtgcttgacgggctcggcctcgtccacagcgttggcccagtcggcgggcacatcgaacttcttgtaggcggtggcgccggcgtcgatggccttgtggttcatgtccacgatgtcctggcccttcttcaggtaggagtgggtggcggcgtccttcatgtagcccacagcctcgctctcaggcatgaccttagccagagagaagaaggcggactgcaggatggtgttggtgcgcttgcccatgccgatttccttggccaggtcgatggcgttgatggtgtagacctgaatgttgttcttggcgatgtagcgcttggaggcggcatccagatggtggctcagctcctcgtcgctccactggcagttgatcaggaacacaccgccgggcttcacgtcccggacaatggggaagtgcttggtgatgtaggcgggcacgtggcaggccacgaagtcggccttgttgatgtagtaggaagacttgatgggggagtcgccgaagcgcaggtggctgatggtgacgccgccggtcttcttggagtcgtactggaagtacgcctggacatacttgtcggtatggtcgccgatgatcttgatggagttcttgttggcgcccacggtgccgtcgccgcccaggccccagaacttgcactcaatcgtaccggcgggagccacgctgggagcgggcttctcctccaggctcaggtgggtcacatcgtccacgatgccgatggtgaactcgcgcttcatggaatccttcttcagctcgtcatacacggcgaagacggaggcgggcggggtgtccttgctgcccaggccgtaacggccgccgatcacctggatgtcggtccggccggcgttggccagagcagtgaccacgtccatgtacaggggctcgccctgggagccgggctccttggtgcggtccagcacggcgatcttcttgcaggtggcggggatggcggcgagcagcttgtccgcacgccagggccggtacagccggaccttgatgaggcccaccttctcgccgcccgcattcagatagtcgatgacctcctcagccacgtcgcagatggagcccatggcgatgatgacgcggtctgcgtcggcagcgccgtagtagttgaacagctgatagtcggtacccagcttctcgttgatcttgcccatgtacttctccaccacgtcgggcagagcggtgtagtagctgttgcaggcctcacgatgctggaagaagatgtcgccgttctcgtgagagccgcgcatgttgggccgctcgggattcagggcgtgcttgcggaacgccgccacggcgtccatgtcgcacatctccttcaggtcatcgtaatcccacacggcgaccttctggatctcgtgagaggtccggaaaccgtcgaagaagttcacgaagggaacgcggccctcaatggcggccagatgggccacgggcgccaggtccatgacctcctgcacgttgccctcgcacagcatggcgaagccggtctggcggcaggccatgacgtcggagtggtcgccgaaaatgttcagggcgtgggtggacacggtacgggcggacacatggaacacgcagggcagcagctcgccggcgatcttgtacatattggggatcatcagcagcaggccctgggatgcggtgtaggtggtggtcagcgcaccggcggccagggagccgtggaccgtgccggaggcacccgcctcggactgcatctcgacgaccttgacagtggtgccgaaaatgttcttctgaccagcggcggaccactggtcgaccaagtctgccatgggagaggacggggtgatgggatagatccccgccacttcggtaaacgcatagctgacatacgcagctgcgttgttaccgtccatggacttgaactttcttgccataaacttacctcctataaatgtgctgcccacacgacagcattctgaaccaacatgaacacggtcgcattcccccgaatgctcatgcagtgttattatatcacttgaaatttgccgtgtaaataactgccttgttattttttgcgcaaattttctggtttctgcggaaacgtcaagacttcctggaattttcaggccagttttggaatccggggtttcttatttcgtcgttttgtggtaaactgacttccgtgaaaacggcggttttcgacaattcgcaatcggctcttccggcagcgggcggcagcctggagcgggagggcttctggaggtggtcgtttatggtggtgacggtgcgctccctgggactgaacggcattgccgggtatgcggtcagcgcggagtgcttcctctccggcgggctgcccgcctttgacatcgtgggtctgccggacgccgccgtgcgggaggcccgggagcgagtccgggcggcggtgaagaactgcggggccaagttccccgtcagccgaatcacggtgaatctggccccggccgggcagaaaaaggcgggcacagtctacgacctgcccatctttgtggggctgctggccgcaggacgggagctgccgccgccggcccagcaagcggcgtttatcggggagctgtccctcaccggggcgctgcggggcgtcaccggcgtgctgcccatggccctggcagcccgggacgccggtgtgaaggagctgtatgtcccggcggagaacgccgctgaggccacgctggcaggcggcctcaccgtctacggcgtaccggatgtaggggcgctggtgcgccacttgcggggcgaggagcgcctctcccccgcctcggcctgggtgccggaggcagaggaggccgccgggccggatctgcgggatgtgatgggccaggaaaatgccaggcgggccctggagatcgccgcggcaggcggccacaacctgctgctgatcggctcccccggcgcaggcaagtccatgctggccaagcggctgccctccatcctgccggatatgagccgggaggaggcgctggaggtctccggcatctggtccgtggcggggctggcggacccgcagcaccccctgctgacccggcgccccttccgcagtccccaccacaccgcatccgccgccgccctcactggaggcgggccgctgctgcggccgggggagatctccctggcccacaacggcgtgctgtttctggacgagctgccggagttccaccgggacgtgctggaggccatgcgccagcccctggaggacggcacggtgacagtggcccgctccggcgggacgctgcacctgcccgcccggttccagctggtgtgcgccatgaacccctgtcggtgcggctggcgagggcacccctccgggcggtgtacctgctcggaccgggaggtggccaagtatgtggagaagatctccggccccctgctggaccggatcgatctccacgtcagcgttcccgcggtggaatacgcatccatgcggcggaaagagactccggagagctccgccgatgtgaagtgccgggtggacgcggcccgggctgtccagaccgcccgctttgccggcaccggcgtcacctgcaacgcccacatgaccgcccccatgatcgggcagttctgccgcctggaccacgccggcgatgcgctgatgaagtccgccttcgagcggatgggcctcaccgcccggtcccatgatcggattctgcgggtagcccggaccatcgcggacctggacggtgcggcggacatcaggccggagcatctggcagaggccatccagttccggaataccgatattttgaagggataaccgggtccccgccgcagcccagcgcagcggactttacgggggcaaggcggaagccattccgttccggaaccggacattcccaaaggatcagaaaaccaggcggccccggaatggggccgcctggttcactgtggcggaaataacgtggtcagtgccggttccagagaagcagggccgccagcagcggcactcccagaagcaccgctgccaatattatggcgaagatccgggcccttttgcggaacccctccggcgagtaatccatatctccctttttcaggcggtgcagccagaacgtgttcaggccccagatcaccaggccgatcaccggtacgatcacaaaaaccgaaaaccatccgtctccgttggaaccataatacagcgggctcattctccagattcctccttccgccaatcgccgactctcctctttaccggatgaagttcatcatgggacggggcgtgctctccggcacagggaccctgctctccgccagcaccttcaccatccaggccatatcccggcccaggcgggcggccacctccatgccctcctcgtctttcagggcctcgccggggtccgcgccgtgtacggcgccccagtagtcggaggtgacgatgaccatctccatggcatccatggtgcccagcagctgctgatacgtctccatgccgccgctgcggcgcagggtgcacagggcgccccccaccttgtggtggagctgattcaccccgcagcccgccgccagcatcagccggtccagcacgcacttcatattgccggaaataccgccgtgatacaccggagctgccagcaggatgccgtccgcctcgatgcaggcggcgatgatgtcgttgaccatatcgtcggtctggacacaccggaggctgccggtgttcaggcagtggtagcaggccatgcagggatggaccttcgccccgggctggaacacctggaactccaccccggcggcctccacctcccgccggaccacctccagcacctgggcggtgttgccgttctttctgggactgccgttgatggccacgatcttcataaacttcccctccataatttggtttccccctgttgtccctccattatagcagagggctggacggcgggcaagagctccttttcccccataaaaagagacgccctgacgggcgtctctttggggctctggggaagatcaccagcggtcgttgtcgatgtcccggctgaagatggtcccggtgacggcgtcgatctcaaattcgtactcggtccagccgttgcggatctcgacttcatactgcgcccggccgtcatcccagtcaaactggcacttcaccaccgtggagccgctgggcgtctccgccagggcgatctgctgggcccgctctgcggtgatatagtcaccgctggaagagttgctgccgttcccggaggggcggctggtgccgttgttccagatctggaaattctccagctcccgatcggagctgaggatggcgccggtgacggcgtcgatgtcgtagtcatattcggtggtgccgctgtaaaactccacctcatacttcatccggccgtcatcccagtccaggttggcccgcaggaacacggcgttggcctctttgacaccggcgtcattcagggcgatctgcttggcccggtcggcactgatatagttgccggaggcggaagaggcgccctgctggctggcggtccggtccgcggtggtcagctggaccgtgcgggtggccgagttgaaggacacgtccatacccatggcctcgctgatggcccggacggggacataggtggtgccgttgtagaggaacacggggacctgctttccggcggcatcccgcggggtgaatctggcgccgttgagggtgatgccgatgccgtcctccacctggatgctgcgcttggaggtggcggtggccgtgacgcacagtgctgcgatcaggaccgtcaggaccaaaccggagccgaagcccttccagaaaccgttctgcttcattgttcattctccttttcatgttctgcattcggcgggtctctcccgccccttctgcaccattaacggcgccagaagaggttttattgcaccgtgcggaaaatttttttatttttttcgcgccgctggcccttccctacaaaacaggctttctattcccggaaaaatgcgctataataggggccgatattccaaactgttctgatatggaggtccgttatgatgaatgcttcccctgccccgcaggagatctttttgctgaaactgggcgaggtggtcctgaagggacagaatcgccagtcctttgaggacaagctgctggccaacgtccgccgccgggtgaaaaactgcggcagcttccagtgctccctccggcagagcaccatctacgtggagccccagggagaggactgcgatatggaggccgcctgggacgcctgccgccaggtgttcggcattgccgccgtggcccgggccgtgccctgtgaaaagacagtggacgccattgtggaggccgcccggacctatctggcggacgcctttgccgttgcgaagagcttcaaggtggagagcaagcgggcagacaagatgtttcccatgaactccatccagctgagccaagctgtgggcggcgatctggcggagctgttcccccatgtggcggtggatgtccacactcccgatctgacagtatttgtggagatccgggagaagtacgcctatgttcatactccctctgttcccggcgcgggcggcctgcccatcggcatgggcggccgggcggtgagcctgctctccggcggcatcgactccccggtgtcctcctggatgatggcccgccggggcgtggagctggagatggtccactttgtctccccgccctacacctcccagcaggcccaggacaaagtactggagctggcccggctgctgactgcctggaccgggcggctgctggtccacatcgtccccttcacggagatccaggaggagatccggcggaactgcccggaggagtacttcaccctcattatgcgccggttcatgatgcgcatcgccgaggccatcgccaggaaggccaacgccggcgccctggtcaccggcgagtccctgggccaggtggccagccagaccatgctggccctgggggtcaccgaggatgtgacctccctgccggtgctgcggcccctgatcggcatggacaaggtggagatcatccgcatgtcccgggagatcggggtgttcgacacctccatcctcccctatgaggactgctgcacggtgttcacgccccgccaccccgccacccggccccggctggaagatgtgcggcaggcggaggccgccctggacgtggagtccctggtgcagaaggccctggcggacgagacctgggtgcgggtgaagtccacggatccggcccggatctgatccaatctgttcccggccccgccgcctgtcgccggcggggccgctgtttcaaaaaggaggtctttccatgtcacacaccgcggagatcatcgccgtcggcacagagatcctgctgggtaacatcgccaacaccgacgcccagatgctctctcagagcctgtccaccctgggcgtcaacgtcttctggcacacggtagtgggggacaaccctcagcgcctgcgggaggctctggacattgcccggcaccgggccgacatcattctcaccacaggcggcctgggtcctacctacgacgatctgaccaagcagaccatctgtgcggccttcggccagaagctggtgctgcacgaagatattctggaggacatccgggccttttatcagtccgccctccatgtgcccatgccggaaaacaacacccagcaggcggagctgccggagggctgcaccgtgttcgacaatccggtgggcaccgcccccggctgcgcctttgaagcggacggcgtccatgtgctgatgctgccggggccgccccacgagtgcgagactatgctccgccggtgcgtggagccgtacctccgcgccctctccaaagaggtcatcgtctcccacgatatcatgaccttcggcatgggcgagagctctgtggaccagctgctccatgaccggatggtccgcatggtgaaccccaccctagccacttatgccaagccctgcgaggtgcggctgcgggccaccgccaaggccgccggcgcagaggaggcggaggccatgctcgccccggtggtggcagaggtccgcgcggctttgggagactatgtgtacggcgtggatgtgaagggcctggaagcggtgtgcttccagctgctgaaggagcggaatctcaccctgtccactgcggagagctgcaccggcggccgggtggcggagcggatcactgccctgcccggcgtctccagcgtgtaccggggcggcgtggtcagctactggacctctgtcaaggcggcggtgctgggcgtgccccaggaaacgctggaccagtacggcgccgtgtcggaggagacagcccgggccatggcggagggcgcccggcagatcaccggggcagacatcgccgtgtccgtcaccggcgtggcgggcccggaccgggatgagcgggacaacccggtggggctggtgtacattggcctggccacgccggagggcaccttctgccgccggacggactccggccgccgccggcgggaccgcatccaggagctggccgccaaccacgctctggacgtggtccggcggtatctcaccggcctgcccatcggataagcgcgcacccaagggggcctgtggggcatatactggcctagcccttcagagaggaggcttctgtatatgcactattctcagggggatttctgttatcccccgtgttgtatcattcccactgttacggtgggcagcactgtcacgacaccccccggcacccgggcccgggtaaccgcctcgcccacgccctgcggtgtggagctggactttgccattccaaggggtaatccgggcccggctggaccccgggggccaatcggctgccagggaccggaagggcctcaggggccggaaggaccccagggaccggaaggacctcaggggccggaaggacctcaggggccggaaggacc

SEQ ID NO: 4922 - DNA, 42217 bp, Unknown
  gut microbiota DNA sequence
accggaagggcctcaggggccggaaggaccccaggggccgcaagggcctcaggggccggaaggacctcagggcccacaaggattccagggcccacaaggactccagggtccccaaggacctcagggtccgtcgggtattccggcctatgcgtcttttgtcacctaccagcaggagtttttcaacggcagctcaatctctttgagtgcggcagcaacggatgtgaccggccacattgtgcaggaatctaccactcagctcctcctgcaaccgggagtatatctcatcgcctaccactttgccgccaaccttctgaccgccggatatcttcaaatcacaccgggctacggaggacgcggtcatctggagtacggcgtctacaatcggaccggtatcgacaataccagtgtatccggctctgcctctttcatcatctccgtggaggaggctacccgtttttccctgaacagcaacagcagcgttaccgttcgggacggcgaagccactctggtgattctggctctgcagcccagcagagaggcctgagctgcgcaagaccgggagaccgcctgcaggcggcctcccggcccttttctgccggagtccagagggcggtctcagccgcccagtgccacgtccagcaccatcatcaccaggaaccccatcacaaaaccgcaggtccccgcccggctgtgggcctggggaatcaactcctccaccaccacgtacagcatcgctccggcagcaaaactcagcaaccagggcatcagcgggtccacgccggccgcggccagtgccgccagcacgccgaacaccggctccacggcgccggagagcattccccccacaaaggccctgggacgggaccagccgccctgccgcaggggcagagccacggcggctccctccggaaaattctggatgccgatgcccatggccagggccgccgccccggcaaagccctcccctccggacaccagggcaaaggccagccccaccgccatcccctccgggacgttatgtagggtgatggctgtcatcagcagagtggtctgccgccaagaggcatcctgccaggtccggtcccgccgcagatggggcagcaaggcatccagagcggacaggaagaccacgcccaacagcattccgcccgcggcgggcagccagtccggcagcgccccctctgcggcccggtcgatggccggcagcagcaggctccacacggaggccgccgtcatgactccagcagcaaagcccagcagggtcttttgaaagtggggccggggttccccggcgaaaaaaaacaccatggccgcgcccagagcggtcatcaaaaatgtgaagcccgtacccagggccgcccagccaagagactgcagcatagcaccaacgccttttctctgattcaggcggaacaccgcccgtatgccagtataagcggcaggacttcccggcgtgacagggcttgcatccggggacgatgtgtgatatggtataggcagcaggaaaagctcatataagttcgctgtcatggcgcgaacgtctctacggagccgccgaaggctcttctatgagtgtctgttggaaggggccatcccctgccggcaggcgcttcttttctgtctgaaaaatccggaacggaaacaaaaggagatttgccatgtcactgacgatcatcaagggaactattctgtccgctcccaccctgggacagctggatgccctgccgggcggatatctggtggccgaggacggcctcatccggggtgtgtacgggtctttgcccgagcagtacgccggtgccccggtggaggactggggagacgcgctgatcctccagtcctttgcggatctgcacctccatgcgccccagtaccccatgctggggatgggcatggacctgcccctgctggactggctgaacgcatacgcctttcccacagaggcccggttcgcggacacaggctacgcccgggagatttacagccgcctggcccgggagcttattgcaaacggcaccacgcgggtgtgcatgttctcctctctccacacggacgccacgctgatcctgatggaggaactggagaaggccggcgtcaccggctacgtgggcaaggtgaacatggaccggaacgctgcccccggcctgttggaggagaccacagaggagtccaggcgtgagacgctccgctggctggatgcctgtcaggacttccgcctggtgaagcccatgctgacgccccggttcaccccctcctgtactaatgagctgatggcgtttctgggcaaactggcggcggagcgggatctccccgtccagtcccacctgtcggagaaccaggcagagatggcctgggtgcgccagctccacccgggctgccagcagtactgggagacctatgccaaatacggcctgtggaccagccgcgccgtcatggcccactgcgtctggtccgatgcgcgggagcggcaggccatgcgggacgccggcgtgacagcggtccattgcgccgactccaaccagaacatctgctccggcgtggcgccggtgcgggccatgctgaatgagggcgtgaaggtggccctgggcagcgacattgccggtggggaccacctgcacatgttcgatgtggtggccgcctccatccgggcctccaaggcccggcgggtgctggacaactgggagacggatttcctcacggtgccggagggctggtacctggccacctccgccggtgcggcatacttcgccgagcagccgggctttgccccaggcaatcatctccacgccctggtcctggcggacgatgatcttccccagccccatcccatgacgccccaggagcggctggagcgggcggtgtatctgcgtcagggcggcgccatccgggcggtctggagcgagggacggaaggtattctccgcagagggttgatcaaagagcgggatgctgtgtgtcccgctcttttttgttcccgtcagggaggcctccctggggagtggtatgggccggcacacccctaaaagcaaacgtgcggcgcaccctgaaacggatgcgccgcatctattttgtattgctcacgccccggcaaactgcgccgggtcccgcagggcgtccgccgtttcccggggcacttcagcggtaaacgtcagcagaccgcccagtccttccacgcctacaaagctcccaacgccctccagggtatcggacaggacctccgtggtgacggcgttgctgccctgccgcacctgggtccggaagacctccaggtattcccgctccgcatccgggtcctccccagcgtggagggtagtctcctgccagtagacataagtgtagagagggtctccctccgcattcccgtggtcggcgttctcgccgccggccttgttgatgagggcgtcgatctctgccacggccccgctgtctgtgacggtgtacagctctttaccggcggcgtccagaatctggtagtagtggtccttcactgcctcctcagcggtgtcggccgcagcttgttccccgccgcaggcggtcagcagcagagtcagggaaaggatacaggggattatatgtcttttcatggctgcctcctgtgtttttcagtgggtggggttcgttgagggctctccccgctgccgttcccccggcggtcacggggcatctgggctgcgggtcgatgagggtatcggcccctgcggatgggttggatctccttctgccctcgttcgcccaccgggatgtcagtcaggtatccatttcgcagaaatacagcgtgtcgctgtccgcgtcatacacggccaaggtgacattcagcgaagcccgctccagaaggttttgtccatccccggcgtcactgtggcggtcaatcaggcggtagaagccattggcgatccccggcagcaggggatctccgctgtcatcggtgagataagggcccgcgctgaaaacttcgccgccgtcctctcgggtgacgccataggccagtgcctgggccgtctcgtccaggggaagcggtgtccaggcggcgttcgccgcaatggcgtcggctacctggctgtcaggaaactgcagggcaacgcaggaaatgccgtcgccgtggaagccgccgtgggtgtcagaagaggagatctcctctccggcggacacatcgatgtgcagcgctcgggagatctcctctgccgggtcctcactgccgcaggcggtcagggtaaacagcatcaaggaaatcatgccacatgcaaaaaggaatttcctcatagataacgaaccccttataagattcaaaacagctgcaccacgccgtaggtcagcgtggtgacgatggccccggcaatcaccacgcccaggaagatggcgggcagcgcgtggcgcatccggatgtccagcagggccgccaccagagcccccgtccaggccccagtccccggcagggggatggctaccagaatgatgagtcccggcaggcggtacttccgcaccatccggcccttcaggtgagcccggcgctccagccagtcgatcctggggccgaaaaggcgggtgccccggagccagtcgaagatccggcggatcagcagcaggataaaaggcaccggcaccatattgcccaggatggacaccaggcaggccgcggccggggagagtcccgccgccactcccacaggaatggcgccccggagctccagcaccggcaccatagcggtgccgaaggtcagcaggatcgcttgcatcaggttttcctctacgggcatggcggcctcccttaagatttccggggccgtgggatcactcccacggcccgccggaagcgtatggtccagtttactccagattcaagcgctttttcaaggtaattgtggttacaatatagaaaatcgcaccgtagagcactgtcagcaggagcaaagccaccatcgtgaagtggaccgccgccacgccggtgagctggaaatccagcgtcagcaggaactggtgcaacggcccctcgtccagcaggaccagaacgatggcccccgccatctgcaccacaaactggaacacaaagaagaacgccacggacagggccatcttatggttggcaaagctgtggcccgccgccagagcggcatagaactgcagggagaaactcatgcaggctgccagcatcagcgccagaagctccagcgcgaaaacggtgccgttgacggcgtagtaggcggtcatctgctggaacagcttggggaaaacactcgccaaatccgtcaagaagctcacgttgaaggccgccacaaaaacagacaggaacaccaccacgccggtggcgatgaaccacacggcggagacgatcagcttgctccacacatgctggtgaaccgaggcgggcagagtgaacatgatgtagccctcgtcccccagcagatttttgtagaaccgctggagcatcagaatgaacgccacaatgaacacggcggtaatggccaccacataggccatgaccaccaaagcggccagcatattcagcacaaagttgcctgagtccatcagcctggcggagaaattgaagcccagggccaccgccagcagaaccaggtacaaaggccccatgatgcgggccgtggcacggaattcgtgcttcaagagtttcgtcagcatttgaacacctcccggaacagggcgtccacgctcatgcccttctcctcccggatctcatccacagaggactggagcaccacctggccctgattgatgaaaatgacctcgtccagaaccttttccacatcggcgatcaggtgggtggagataatcactgccgcctcgggattgtaattgccgatgatggtggagaggatgtagtcccgggtggcggggtccacgccgccgatgggctcatccagcagatacagctttgccgcccggctcatcaccatgatgagctgcaccttctcccgggttcccttagacatctgcttgatccgctgggtcaggcggatgttcagatgggtgagcatctcctccgccgccttccgattgaagtcccggtagaagtcgccatagaaatccagcagctgcttcacggacatccaagtggggatgcaggtccgctccggcaggtagctgacgctggcgtggctctcctttccaggggccatatcgcataccagcacctctccctcgctgggggtcagcaggccgttggccagcttgatgagggtggtcttgccgctgccgttggggcccagcaatcccacgatccggcccggttccaccgccaggctcacatggttcagcgccggcgcgttgccgtagtgcttgctcagatctttacattccagaactgccattgtcttctcctcccttggtctcctcctgccgcagcagcgtcaggatctcctcccggccatagcccaggtgggtcatggcctccaggaacgcctgaatgtggcgctccgccaaacttctctttgcagatgcaatcatggcctgatcctccgtcacaaatctacccgtggttcgctggctgtataccagtccgtcccgctccagctccgtcagggcccgctgcatggtgttgggattcaccccggcctccgtagccaggtcccgcacggaaggcagccgctcccccggcgggaacgcgccggagacaatgcccaccttgatctgcgcgatcagctgggaatagatcggcgcgtcattggaaaactgccacttcacagaagcacctcccatttgtgttgttgtactaagcaagtaatacaatagcacattctccagatttgtcaagtggattcgaaaaaaattttggagaggcaaaagcgccgcagcggcttatcgctgcggcgcaagggattcatcggttattcgattttgcggagggaggttctctgatcataccggcagcccaggatgaggatggcgaagcccaaaatggtcaccagaagacagggcaggtcgtcccaaaaagtcacctccacaaattcccacatattctccggcccatactccgccagatacaccagcaacgcagtggaaatactccagaccggccccgtctgcaaaaaccgcagaggcgcgggaagggggagccgcatgttcagcagacccatcagcaccaggagccagcccagatgataccaacgaagccgccctgccaattggcggccccggaataccagaatcacagacacgagaatcagcagcacatggggaatcattgtgggaatatacaccatctgcacgtatttcacccaggcaaaattctcgaggtcctgcgcctgctggtatgtattggccgcaagaacagccaggtcaaccaggttccagacaccccaggccgccagaacccaggccagcagatagcccctgttccggtaccattgcttgacccggacccacaggcccgccgcaggagccgtggtattggccgtctccggctcctctagttcttccagcaataagtaatccgtggacacgccgaactggcggctgatgcggacgagcttctccacctccggcatagcctcgttccgctcccacttgctcaccgcctggcggctcacatccagcagcttggcaagctggtcctggctcaatcccgcccgggtccggagcttttgcagcttctctccaaaggtcatggcgcttccctcccctgccgttttcacacgttcaggataccagacgataccgggacatgccagcaaccaaacctggaatttccgctaccacaggtagcggagcggtgtttccggcgctcaggcgtacattttgtccaggcgggacacgatgtccgccagagtgtcgtggtccgcatctgccacgatggtggccccgcaggcccggacagcgggtacgcagttggcgggggcaaatccctccgccgcccaggtcagcatggacaggtcgttggcctcgtccccggcgcagtagacgtgctggcgggagatgcccagccgctccgccagccgggccaccatgccacccttggtggcgcctctggcggtgacctccagcagtgtccggtcagagaagaagatctcatactcccccgcccagggctgggactgcagaaacgccttgacctcctccaaaacggcgtggtcctcctcaaacatgatctttcccagcggcaggggcacatccagcagggagggcttttccaccacgctcacatgagtgacgtgctcatgctggcgggtatagagattgggccggacggcgtggatcacgttgtcgatgtggtatgcctccaccgccagcgtggggaatcggtccagagtctcctgtccccgccggcgggtgctctcgtccagcagaatggtctccagatactcccccttctgaaaatcatacagggccgcgccgttgcacacaatgcccggcgcgttcatgggcacctgatccgcgaatttgatgaaggccgccagcgcccggccggtggcgatggcaaatctcccgccgccggccatgaaatactccagcgcctcccagttccggcgggacacctccggcacctcggcgcccgtgcgccgggccgtctccgtattcagcagggtattgtcaaaatcgctggccagcagtacaccgtcaaattttcccataaaaactcctccatcctatctctctgaaaaggcagatccgctccatctgcctgctctcccggcatttcaaaagaccgccgcccgaaaaaggggcggcggtccagccggattcactcactcttgggggcggaaccgccgccctcgccgccgtttttgttccggcggcgccccccccggtggtggggcctgcggcggcgcttggcctcgccttcaccgtccggggccgccgccctgttctccccaggtctggcttctgtcggcttgggctgcgcaggcctgctctcctgtttggggggacggggccgcccttccttcttctccggccccctggcctcggccttgggctgctcgaccccctctccgcttttggctccccctctccggcggccgccccgatgccggcggcgtggcttgccgtcgccgctgccgggtgcgccgatcttctcccgcatgggcgcctcttccagctgcgtgtccatatagaagggcggcatcagggccggggcctcctcccggaactcctccgcctccttcggctccacatagcgggcggggcgctccggaatggcgatgccctcccggctgcccttgccgttgcgcagaacgcacacctcacagttgtgatagcacttcaaaggctccggcgcactgtccaggctgaccttcacggtctcccgcagcaggtccacgctcttcacattgccggggccgtccggcgtctgaacaaaggattctgccttgggcatccgcttggctgcgtcctcatagacgttctgctcgtatttcaggcagcacatcagccgcccgcaggtgccggagattttggtgggattcaggctaaggttctgggtcttggccattttgatggacacgggcaggaacccgtccagaaactgggagcagcagaagggtctgccgcagatccccagaccgccgatcatcttggcctcgtcccggacgccgatctgccgcagctcgatccgggcccggaacaccccggccagatcccgcaccaactcccggaagtccacccggccgtcggcggtaaagtagaagacgatcttgttgccgtcaaagctggcggacacgttcaccagcttcatctccagcccgtgggcggcgatcttcttctcacagatgtcaaaggcctcgctctcccgcttcttgttctgctccacggtgcggcggtcgctgtccgtggccatccgcagcatagggctcaggggcttgacaatggcggagtcctccacctcgtggttcccctccgtgcaggtggcgaattccgggccctgggcggtctccacgatcacctggtctcccatcttcacctggttgccgtttggattgaaatagtaatttttacagccgcctcgaaagcggacgctgataacttctgtcaaaggatgccctccaattccaccgcgatggcgcccagcacatggccggttcccacgttgtacgtgcactccccgcgatacttctgtaacagctctattgtgcgcatgatttgggattttgtcaagtttttcgcgagaattggggcgatttcccggcagctttcctccggttcctgtccatattgcagcagcagcgccgccgcgcacagggcccggctccgctccagcagggcggacaggtcctcccgggtgatgcgctttttctccagccgcaccgccagctccgtcacctttccccgcttccgggcggccaggcagcggcacagggcctctgccgcctggacctcttcaccgccgccttccgcagccgggtgcagcttcagctccacgcaccgggagcgcagggtctggagcaccacagcggcattttccgcacagaagagaaaggccgcatagggcggcccctcctccaccaccttcagcaacacgttctggtcctgttccgtcagcagggcgcagtccggaaacacatagaccttccgccgcccctcgttggggcggatgtaggcgtctgcccggatggcgcgcaccacgtccacggcgatgttcttatggtctgggtcccggacggtgatcacgtccggatggatgcccgccagcaccttccggcaggcggggcagacgccgcaggggcggctctccccccccgtgcactccagggcggcggcggcaaagcaggcggcggacatccggtcgccgctgccggtgagcagcagggcgtgggacagggtgccgcgagtggcggcctcccggatgcggatggcggctggctcctccggccgcaggccgaacagggacatggcgtactctccttttcccgctgtgagcacgggctgatctgcagattttccggcggcgccgggtgtttggggcgcccggcggccttccggcgggcacactggagccattgtaccacatggccccgaaaaaggaaagaacgtaaatattttctttgttgcgcaactgttaattgtgtggattgcacaaacatttgtgaaaatactccagctatccccaaatttcttagcatttttatgtattgttttccgaaaaaattcccaatataatgttatcgttatcaaaatgggctaatcgtttaaccgcagattggagtccacccgactttcgactgcggcaggaaagagaggtttggactacatgagcaaaaaatatgtctatttgttcagcgagggcaacgccaatatgcgggagctgcttggcggcaagggtgccaatctggccgaaatgaccaacattggcctgccggtgccccagggcttcaccatcaccaccgaggcctgcacccagtactatgaggacggccagaagatcaacgacgggatccaggcggagatcatggagtatatcaccaagctggagggcatcaccggcaagaagttcggcgatctggagaaccccctgctggtctccgtgcgttccggcgcccgggcctccatgcccggcatgatggacaccatcctgaatctgggtctgaacgaggacgtggtggacgtgctggccaagaagtccggcaacccccgctgggcctgggactgctaccgccgcttcatccagatgtactccgacgtggtgatggaagtgggcaagaagtactttgagcagctcatcgaccagatgaaggaggcccgcggcgtcacccaggacgtggagctgactgccgatgacctgaaggagctggccggccaatttaaggccgagtacaagtccaagatcggccaggacttccccaccgaccccaaggagcagctgatgggcgccatcaaggccgtgttccgctcctgggacaatccccgcgccaacgtgtaccgccgggacaacgacatcccctactcctggggcaccgccgtcaacgtccagtccatggccttcggcaacatgggcgacgactgcggcaccggcgtagccttcacccgcaaccccgccaccggcgagaagaagctgttcggcgagttcctgaccaatgcccagggtgaggacgtggtggccggcatccggactcccatgcccatcagcgagatgagcgaaaagttccccgaggccttcgcccagtttgagaaggtctgcaagattctggaggatcactatcacgatatgcaggatatggagttcaccgtggagaacggcaagctctacatgctgcagacccgcaacggcaagcgcacccctgccgctgcgctcaagatcgcctgcgacctggtggacgaggggatgatcgacgaaaagcaggccgtggccatgatcgacccccgcaccctggacaccctgctgcatccccagtttgacggcgaggtgctgaagaagacccccgtgatcggcagcgccctggccgcctctcccggcgccgcctgcggcaaggttgtcttctccgctgaggacgccaaggcctgggccgagcgcggcgagaaggtggtcctggtccggctggagacctctcctgaggatatcgagggcatgaaagctgctcagggcatcctgactgtgcggggcggcatgacctcccacgcggccgtggtggcccgcggcatgggcaagtgctgcgtctccggctgcggcgccatcaagatggacgaggagaataagcagtttgagctctccggcaagaccttccacgaaggcgactggctgtccatcgacggttccaccggcaagatctacgacggcgccatccccacggtggacgcctctatcggcggcgagttcggccgggtcatgggctgggccgaccagtaccgccgcctgaaggtccgcaccaatgcggacaccccccacgacgccgcccaggcccggaagttcggcgctgagggcatcggcctgtgccggaccgagcacatgttctttgacgcagaccgcattcccgccatccgccgaatgatctgctccgacaccgtggagcagcgtgaggccgctctggctgttctggagcctatgcagcagtccgacttcgagggcatctatgaggccatggagggcctgcctgtcaccatccgtttcctggatcccccgctgcacgagttcgtgcccactgaggaagccgacatcgagctgctggccaaggacatgggcaagagcgttgcggagatcaaggccatcatcgccggcctgcacgagttcaaccccatgatgggtcaccggggctgccgtctggcggtcacctatccggagatcgccgccatgcagacccgcgccgttatcaaggctgcgctgaacgtccaggccaagcatcccgagtggaccatggtgcctgagatcatgatccccctggtgggcgaggtcaaggagctggcatacgtgaagaaggtcgtggtggagaccgccgatgccatcatcaaggaggccggctccaacatgaagtacctggtgggcaccatgatcgagatcccccgggccgcgctgaccgccgatgagatcgccaagcaggcggacttcttctccttcggcaccaacgacctgactcagatgaccttcggcttcagccgtgatgacgcgggcaagttcctggacgcctattacgacaagaagatctacgagaacgatcccttcgccaagctggaccagaccggcgtgggcaagctggtggatatggcctgcaagatgggccgcgccaccaaccccgagctgcatctgggcgtgtgcggcgagcacggcggcgacccctccagtgtggagttcttccaccggacgggcctggattatgtgtcctgctctcccttccgggtgcccatcgcccggctggctgcggcacaggctgccatcaaggacgagaagtaatcttctctctcataaaaaaccggaccgcccaaagagggcggtccggtttctttgtatcgatgcataagtcacttcgctgtgggcatgaagggccgcaggacccctgccacctgggagatcggcatggtctggagatagacatggcccggtccggtgataatggtgttgaagattccctcaccgccgaacaccatgttcttgagccccgggactgcctggatatccatggagcaggtggcatccatggccgccagatatccggtatccaccaccagggactcaccggggtccaggtcgtattccacgatatgcccgtcgaactcggtgaaggcaatcccccggccggagagcttctgcatgatgaagccctcgccgccgaagaagccggagcccagcttcttctggaaaaagacggacagctggacgcccgcctcgctggccaggaagccgctcttctgcaccaccagctcccggcccggaccgatgtcaaaggcccggatgctgcccgggaaactggaggcaaaggcgatcagtccttggccgccctgggcggtgtagcggttctggaaaatggagtcgccggagagcatccgcccaaacgccttccccagaccgccgttggtgctggtctccatcttcatgttgggggtcatccagctcatgctcccccgctcggtgagcatggtctcgccggcctccagctggcagatcaccaccggcagcggtgctccctcgatctgatattccatggtgtgctcctttctcttctcggcccggggccggttttctccattctaccggggccgctgcatcgtgtcaatccaaaccgggcggctttcctggtccctacagaaattttacagccccggcatctaaacggatgccggggctgtgctgcgctcagtactccactacgccggtgtagaccagcttggcatcgccggtgagggtgacggcttcgtcggtgtaatgcaccaccaggtcgccgccctggacccggaccgtgatgtcccgtcccttttcacagaggccgttggccaccgccgccaccaccgcggcacaggcgccggtgccgcaggccagcgtctcaccgctgccccgctcccagacccgcatcttgatggtgctgggatttaccacccggataaactccgtgttgatccggtccggaaaataaggcgcatgttcaaactgcggcccgatccgggccacatccacgccgtccacccgggaacagaacaccacgcagtggggattgcccatgtccacgcaggtgatctcccagggctgcccggcaatctccaccggatagttcaccacctgccgcttcgggatattcagccggagggccgtggtgtccagggtcgcgtagcccatgtccacgcaggcagaggtcaccctgccgtcggtggtgtagacccggacggtcttggtgcccttgtccgtctccagggtcatttcctccttgcggacgataccgttgtcatagaggtacttcgccatacaccgcagggcgttgccggccatggagccctcagacccgtcggcgttgaacatccgcatcttggcatccgccttccgggatccctccatgaggatgatgccgtcggcgccgatgccgtagtgccggtcgcagagggtgacgcacagggactccgggcaggtgatctccccgctgaaattctccaggaagatgtagtcgttgccgcaggtctgcattttggcgaagggcagcttctgccgctccgtccgcagatggcagatatcgacgagctccgtgttctcctggttgtagcggctggccaggatgtccgtcagggcaccggccgtatccagcgaggtcaggcagggaatgcccagctggacgcaccggtggttcaggtggatgaagtcccggatatactccggctccgtagagccggtgaggatcacgtagtcgatcctgccggactccagcagctggaagacccggttgtcccggcccagcttgcccaccacctccacgtccgtgcccaggcgggagatctcccgtgcggtgccgtcggtggcgtagaggcggaagcccatttcatccagcttccgggcgatgttgacaatctccggctgatcccggcggttcacggagatcaatacccccgcgtgtccgctcttctccaccttgtacccggcggagaccaggcccttgaacagcgcctcctgcatattggcgcccaggcccagcacctcgccggtagatttcatctccggggacagggcggcgttggcgtcggtaatcttctcgaaggagaacaccggcaccttcaccgccacgtagggcggacgtttgtacaggcctgtgccatagcccagggccttcaggggctggcccaccatgacccgggtggccaggtccaccatgggtacgccggtgaccttggagatatagggcaccgtccggctggcccgggggttcacctcaatgacgtacagctctccctgatagatcaggtactggatgttgataagcccccgggtcttgagggacagggccagcttttcggagcagtccacgatggtctggagcatcttgtccccgatggaaaagggcgggtacacggcgatggagtcgccggagtggacgccggtacgttcgatgtgctgcatgacgccggggatcagtacatcggtgccgtcagagatgacgtccacctccagctccttgcccatcaggtactggtccaccagcaccgggttctcaatcttgccggagaggatgatctccatgtagcggcggacttcctcatcgttgtgggcgatgaccatgttttggccgccgatgacgtagctgggccgcagcagaacaggataccccaattcattcgctgcctccagcgcctcattcatacccagcacgccccggccggcggcccgcttgatggaaaaccgctccagcagcgcgtcgaaccgctcccgatcctccgccatgtcgatggactcggcgctggtgcccagaatggggatgccgcggctgtccaggaatttcgtcagcttgatggccgtctggccgccgaaggccaccaccacgcccaccggcttctccacggcgatgatgtgcatgacgtcctccgggtacagcggctcaaaatacaggcggtcggcagtgtcgtagtccgtggagacagtctccgggttgttattgacaatcaccacgtcgtagcccagctccttcagcgtccagacacagtggacagaggagtaatcaaactcgatgccctggccgatgcggatggggccggagcccagcaccatgatgaccggcttgccgctgcgggggaaggcccgggactcgcagaaccggtcataggtggagtagaaatagggcgtctccgcgtcaaactccgcgccgcaggtgtccaccatcttgtacaccgcatcccggtgctccggcagttctccgccgccggaaagcctgcggagagcctcatcgggatagcccagccgcttgccctcccggtactgcgcctccgacaggccgtctgcaatggaagcctcgaacgccgccagcttccgcagcttgcagaggaaccaggggtcgattctggtgatgtcgtggatctcctctacggtgacgccggatttcagcgcctcgaacaccgtgaagagcctgtgatcgtccactcggcggagccgctcccggatgggggcgtcgtccccgtggtccggtttccggttcagggtgtccatgccgatctccgcgccccggacagccttgagcaaggccatctcgaagctgggggcgatggccatcacctcgcctgtggccttcatctgcgtgcccagggcccggctggcatcggcgaacttgtcgaagggccacttgggcatcttcaccacgatatagtccagggtgggctcgaagcaggcacaggtcttgcccgtgatgtcgtttttaatctcgtccagggtgtagcccagagcgatcttggtggtgatcttggcgatggggtagccggtggccttggaggccagggccgaggaccggctgacccggggattcacttcgatgaccgcgtactcaaagctctccgggttcaatgccagctgcacgttgcagccacccacgatccccaggtgggtgatgatgtccagagacgccttgcggagcatctggaactccttgtccgccagggtctgggtgggggccaccacgatggagtcgccggtatggacacccaccgggtccaggttctccatggagcagacggcgatcacgttgcccacgctgtcccgcatggtctcgaactcgatctccttccagccgaagatggccttctccaccaaaatctgcgtgatgggcgaggcgtccaggccggtgcccgcgatgatcttcagctcgtcgggatccttggccgcgccgccgcccgcgccgcccagggtaaaggcgggccgcacgatgacggggtagccgatcttctccgccaccgccagggcctggtccacggtctccgcgatgtcggaggcaatcaccggctggccgatctccgccatggcctccttgaagagctcccggtcctccgcccgggagatggccgctgcgtcggtccccagaaggcggacgccctgggcctggagaaagccctccttgtccagctgcatggccagggtcaggccggtctggccgcccaggcccgccaggatggaatcggggcgttccttcttgatgatgcgcttgacggtctccacggtcaggggctccaggtagatctcatccgccatggcctgatccgtcataatggtggcggggttggagttgcagaggaccacgttgatgccggcatccttcagcacccggcaggcctgggcgccggcgtagtcgaactccgccgcctggccgatgacgatggggccggagccgatgaccagcactttctgaatgctcttatccagcggcattaccggtcaccccctttcatcagagctacaaattggtcgaacaggaacgatgtgtccttgggcccggtgcaggcctctggatggaactggaccgtgaatgcccgcaggtccggatagtcgatgccctcgcaggtgccgtcgttggcgttgatgaagcggaccttccccaccggcaggctggtaccgtccacggcgtagccatgattctggctggtgatgtaggtgcggacgccgtccaggtcccggacgggctgattgaccccccggtggccgtatttcagcttgtaggtgccgccccccaccgccagggccgtcagctggtggcccaggcagataccgaacaggggcaccttgcccaggagctttttgatctgctcaatctgatagacgttctctgccggatccccggggccgttggagagcatgacgccgtcaggcttggccgccagcacctcctctgcactggtctgcgcaggcaggacagtgacggtgcagccgcgcttttgcagctcccggacgatgttgcgcttggcgccgtagtccagcaggctgacccggaaccgctcctctccctccgccgggtgggcggatgctgctctacaggtcaccgcctccaccacgccggtgacggcataggtcttcaccgccgtcagatccgccggaacctcatcacagatcgcggcgttcatgacgccgtgctcccggatgatccgggtcagctcccgggtgtccacaccccagagccccggcacgccccggtcccgcaaaaaagcgtccaggtctccctggcagcggaaattggacggctcctcgcaccactcccgcaccacgtagccccggacgcaacacgcgccttcaaaatcctccggaatgatcccataattgccgatcagaggataggtctgcatcacgatctgtccagcatagctgggatccgtcagtgtctccagatagccgcacatgccggtggtgaacaccagctcgcccacggcgtccgccggccccccgaaccggaagccctcaaacacctggccatcctgtaataccagatatcccttcttcatgtcgtcctccctctccggcgcatcgaccggaaaatccctattagatgttattatgcgttttttttctgaagcagtcaatccccccgtgcagtgcggcacggtagacttttccagggatgaaggtattactttttgtgcattttcgcaaaggtcgatctatttcccgccgcactgcctctcttgcaaagcagtaaccaatgggctatgatgcaggaaaagcggctcatctgcacaggcggaagaactgctccggcaaaggagtgcgcctatgatctgtttgcatgcattccggatgcccgcccgggaggacgaagaggcattcttctccgatccccggaaccagcggatctgctataccgccaaagagccctttcatgtattccgctgctgccatctgccgcagcacccacctccccattccccaagagggccggatcatcaccagcgacgatgtcttcggccacctgccggacatccgctgcatcaacggcggcatcgacgccgccccggccccgcctctggacggcgctggacaatgtgcgggtctgccgggcgttctttcggaagcgggaggcagacttccgctccacccgaaaacgcgccgcagtcgggccgcaaggtattttggactgccggacaaagaaatttcttctggcgccgttgtcatgcggtggcccgccatttataataaaggcagcaaaatcagggaggaggcgcatcctgtggcaaagcatctggacaagtttacccagcccttccgggacagccccatccccttcgccctggcggagatactgaccaacggcagcggggagatggtggatctggtgtgccgctttttgaatcctgccgcggcggcgcttctggggctctccccggaggaggtgcagggccgccgcctgtcccagctcgggccagagcgggcgctggagcagctggcgcccatgcaggccgtagctttttccggctcctccgcctccttcccctatgtgaccgccgggggccaaaccctcaccgttacctgctatcaggtgatgtacggcacggtggcctgcctgctggatccccggtcgggggccggagcccagagcggcgcgttgccggagctcctgcccggcgcggatctggagctgaaccgggagggactgcggtgccttgcctgcagccggcagctgtgccagctgacccagtggtcccggcgggcgctgctggaccggggcggcagggccttttccgctctggtggctccggcggactggccggcgctgctccagaaactgctggacgcggcgcgggagaaacggggcgtggatcacgacttccgcctgctgcggcgggacggtggggcagtctgggtgaatctccgggcggaaatcctgtcgacccgccagggggccacggtcttccgcggcgtctttctggatatcgaccgcctccggcgggaggggcaggacctgcaggcggccctttcccggcgggagacggctctgcgggatgcggagacgctgctggaccggatgccggtaggtctctgcctgctgcgccgccgacctgacggtggcgtggagctgctgcgggccaatcaggttctctcccggctgctgggcctctcgcccgcagctctggcccgccgtctggcggaagacccgggcagcggcctgccgacgggcgagcgggaggaactgctggccgcagctgttcggtcccgggagtgcggcctgcccctgcgccgggcctgtcgggtctgcctgggcggcgggcgggaactctgcctctctctccacatgtcctgggtggaacagccggacggctcctggctggcatacatcgcctgtgccgatatctcccaagaggccgcggcccaggccgagcatcagatccgctcccggatgtacgacctgctgttagagcacacctccctcctgacactggactatgaccccgcccgggacctggcccagatccagcggcacagcaccagcggccgcaggacctcccgcaccgtctccggctatctgaagagcctgctcaccgcgtcctacctccacccggaggaccggcggcggctggcaggcgcggtccgtcgggccatcacgcatcccgggacggtctcctgcacctatcgggcggattatgaggacaccggctggcgacgctatcaggtgtcgtggatgagcctattcgatgaagccggaaatgtgtaccgtctgctgggcaaagcggaagatgtgactggccgccgggcggctgcggaacacttccggcagttggccgcccggcaccgccggcaggccagggcctgtctggcctccgcccggctggatctgaccgccggacagacattggacgccaaggccgcgtcccggcacctgctgcgcacgctgttcgaccgtaccgcaggcgcctgcctccagcagatggcctctgccctgccggaggcagaggagcgggcgcggttccaggctctcttctctccggatgctctgtcggatgcctttgcagaaggcgtgttccaattctccatggaccactggatctctaccggaaagggcggcccgtcctgggtccggatagaagcagagatggcggaaaacccggacacgctgcatctggaagtctttttccagctgtgggaccggagcttccgcaggctgcaaagcactctgttggataccctgaccaggcaggattacgagctggtcctgacagcggacgcccgctccggtgcctgccgtgcctatggaccgtccgcaggccgtctgccggagaacgccacctgccggtccctggccgcctggtatttccagcagctgccgccctcccaccagcggaccgccctgcggaaagccctctccctggaggctgtcttgtcccagctggaggcagttccctctgtggagctggtcctcccggccccggaaggagcgccttaccatctgcggtgttccccgctggaggggatgcccggcgtgctgctggtgacttgccgccgccttccggccggcacgccgtcccccgccccataaacgcagaagacccgccgcaggctatcgcccgcggcgggtcttccatgcacgacgcagcttgagcactgccagaaatacctccgtcgggatctgcacacttcccagggagtacatcttctctttgccataccccacaggacctccggttctacggggacccctcatccaatcagagcgggcaggctgagcctgcccgctccaagggtttccttccgaaaccgcttgacgccgctcccgcggcgccgggccgctggcccgggaaggagggcttactcgtccagcttgagcactgcgagaaatgcctccgtcgggatctgcacgcttcccagggagcgcatctttttcttgccctccttctgcttttccagcagcttcttcttgcggctgatgtcgccgccgtagcacttggccagcacatccttccgcatggccttgacggtctcccgggcgatgacccggccgccaatggccgcctggaccggcacctcgaacagctgccgggggatgttctccttcagcttctcgcacagccggcgggcccggggatacgccttgtctctgtgggcgatgaagctcagggcatccaccgtatcgccgttgagtttcatgtccaccttcaccagctcgctggaccggtagccggagagctcataatccagagaggcgtagcccttggtgttggccttcagcgcatcgaagaagtcgtagatgatctcgttcagcggcatctggtagtggagctccaccagattggtgtccaggtactgcatgtccttgaactccccccgccggtcctggcacatgggcatgatgttgcccacgaactcgttgggagcgatgatgttcaccttgacatagggctcctccgcgtgctcgatcaccgccgggtccgggtagttgtggggattgtccaccgtgaccatggtaccgtcggtcttgtacacgtggtagatgacggagggcagggtggtcaccagatccaggtcgaactcccgctccagccgctcctggatcacctccatgtggagcatgcccaaaaagccgcaccggaagccgaagcccagggctacggagctctccggctcaaagctcaacgaggcgtcgttcagctggagcttttccagcgcgtcccgcaagtccggatacttggagccgtcctccgtgtagataccgcagtagaccatgggctgcacgggccggtagccgggcagggcctcggccgtggggctggcggcatctgtgacggtgtcgcccacacgggtgtccttcacgttcttgatggaggcggtgaagtagcccacctcgccggcccggaggctgtcgcaggactccatgcccaggggcagcagatggccgcattcgatgacctgataagtggctcccgaggccatcatcttcacctgctggcccgtgcggagggtcccctccatgatgcggaagtagacgatgacgccccgatacgagtcatactgactgtcgaagatcagcgccttcagaggcgcattcgggtcccccttggggggcggcacgttctttacgatatcctccagcaccgcctcgatgttggtgcccatcttagcggagatttccggcgcgtccatggccggcaggccgatgatgtcctccacctcctgcttggccttggcggggtccgccgccggcaggtcgatcttgttgaacacaggcagaatctccaggtcgtgctccatggccagatatgtgttggccagagtctgggcctccacgccctgggtggagtccaccaccagcacggcgccctcgcaggcggccagagagcgggacacctcgtagttgaagtccacgtggcccggggtgtcgatcagattcagttcatagtcctccccgtcctgggcatggtaggtcagccggacggcccgggccttgatggtgatgccccgctcccgctccaggtccatgttgtccagcagctggctctccatctcccgggcggagacggcgttgcacttctccagcagccggtccgccagcgtggacttgccgtggtcgatatgggcaatgatgctgaaatttcggatgttgctctgttttgtcatatttggatattcctccatcggccgctccacgcaaggcccgcattaagggcccggcgcgcatcgccgttctttcaatcggaatgggggccccataaaatccgagattctatggggtggtgagacgcaagggagcggatgcggctttcgccgccgggcggctctgctccgcctgggagtctcctgtcacaggggtcctccccgggccgccgctttatggggccgcagcatgttctgcgttccactgaatccagaagcgctcgtcccagaactggtcatagtcatagtgtaccacaaattcccgccagttggcgagggtctcctccagattttcctctgtcaggcggccctcctccctttgaagcatggcgagaatctcccggcagacgccgccggagtggtggatatagtcgcagtagttgtccagattcgtgacgatctccgggtccatgagatagccgtagaacttcacattgtcatactgcagcagcgtctgccctgcctggcggatggccgcaaacaccgcctccgtcctcccctcccgaatgaccttgtcccagaagaggatgctgtacgggggcaggaagaaatcgaattccgtgtccgaatgctctgtgacccaccgttccgccaccgccagattggcggccacatcgtcccgataggcatctgcgggcagctcctccgccgcaatctccggccggtcatagttctccagggcggagatatggttccaccactcattccggtcccaggtgaatccctcgtcgatggtgtcgccctctccccagtggttggagagcagggtgtaggcgctgtaatacagcgtatccttgttcagcagatattggatgtcatccagcggattggcgttgtagagatagtccggcatggccgcagtcacaccgctctcatcccggatcagggtgttcacatccaggccgaagatcacccgctccggctcctgggtccgaaagaggacgttcatcacctggtcgaactcgctgtaatacccgtccgggatggtgagccgcaccgcggaggtgccgaaggtctcctgaatccagctggagcggtagttggccgccatggaggtgcccaccagcacggtgtccgcctccacattcttcgccaggcccgccatctggtaccgctcattgaacagcaccggctgccacttgtccggcacccgataatacaggcagggatccaccacgtacacaacggctccgcagaccgccagcagcgccagaatacacgccagaaggccgcagacccagcgtcgatatgcttgcttcatacggccctcctcagaagttggaatagatgaaggtggtgacgccggtaaaggacagcacacaccaaagcgtcagcactgtgagggccgcgccccgccagagcgtaggccggaagtcctccatccgacggatggtgttccggggccagaggacggcgaccatccccgccccatacagcagcaccacccgcaggatgtttttccagggcgtgaaggcgggaatcagcatctgcaccgcgctggtctcctcggcgaaaaggccctccagcagccaggccgccggttttgcaaagccgccggtgacggcccggcccagcagctccagggccccggtacagtccggtgcccggaagaacacccaggcgatgttgacaaagagaaaggtcagcccccaccggaggacaaagggcagccggtcccggcccctgccccaaacccgttccaccacctgggccaggccgtggagggcgccccacaccaggaaggtccacccggccccgtgccagaagccgctgaccaggaagacgatgagaatattgcaatacgtccggatcgcgccccggcggctgccgcccagggggaaatacaggcactcccgcaggaaggtggtgagcgtgatgtgccaccgcttccagaattccgtcacagaggcgctgcgatacggggagtcaaagttcatcggcaggcggagcccgaagagccgggccacaccggctgcgatgtcgcagtagccggagaagtcaaagtacagctggagcgtataccccaaaatcaccagccaggccgccggagcgctgagctcttccagatgtacccagccgttgttcaccacagtgccgaaggcgtccgccagcagcacctttttgatggtgccacaacagatggcgtagatacccgccgcggcgtcggaccagtccggatggaggaatcccttttcccgcagctgggggaaaaagattccgggccgcagaatggggccggaggtaacggtggggaaaaacagcccgtagagcagaagggaatcccccggcgcggggacatattccccggtatagacctccttcagcaaccacagctgctggaaggtaaaaaagctcagccccagcggagcccagcccacctccaccgcgccgccggtgaggaactccgtatacttgaatcccaccagtatggcgatgtgatagacgcaggcaagaaccattgtccggcggcggccgccggaccgggccatccggcggatagcgcatgctgtcacgcagatgcccgccagcaggcaggcaatgccccccagcaccaccgtccatcctccggggcccagaaggtagaataccgcggaggccgccgccagcatcgccgcacccgctcgggggctgcgccgccccgctgtcaggcacaccgccagcgctgcggccagaaagccgaaaaaggccagagactgaaagctcatctggtcttctccgtcaggccgctgagacgggcatccgcggtgctcagcacctgggtcaggctctggcaccgtccggggtatgcggcggtcagggcctcgttggacaggtccgggaacgccgccttttttgccgccagggaccgcaggctccgggtgtactggatctccgagagcttcatgtccgcctccgctgtgcccatggtgcaggcggccgggtccagagagaagtacgcctcgttggcgccggcggtgcggtacagatggcggtacagctggtacaccgcgctgcccagatatccggcagcggcgttgatggccgccttgtcgttcagcttgcccagcaggccgaacagcacccccacagcgccggagagcagcttgctctggagcgtggccagcacgctgccctggaggatgttgcccggttccgtagcgttcaggatctcctgctccgtcagcatgttcccctcccgggacagggtcctgcccaggatgaagtccgcggagacgtggtagtaatcacaggccttcaccacaaaggccaggcccggttcccggatgccgttttcatagtggctcaacagggcctgggagattcccagatcccctgcggcagttcgctgggagacgccccgctcctgccgcagcagggacagggtccgtgaaaattcagttgtggaagccatcgttctctctcctccagagttaaatacataacgtatagtttaacaaatacgatacggattgtaaagaaaaatcccacggattcagacatttttcgggggaaggcgctgcggcgccttcccccgctgtttccttgccgtccagctcagaacaggcccacctgccccagcagcacgtctcccccgatgctgcgcacctggcgggcattctcctcccacaagcggtccgtcaccgccattttgcggatgatgtcctgcaccgtggcctccagcgcagacccggcccggtagtccgcctggaagatataatccacccggccctttgccagcaggtcctccacaccggcgcggttgctggcctggtacacggcgatggcctggccgccgtaggcccgcatcatcttcatgcagggcacgtcggaaaggccgtcccccatgtagatcatactggtgaagggcacccgcttgctgtcatcaggcatggaggcgtttagatcccggtcgttggacacgtccagcacgcccttgttgatccggtagacgaactgggtcttggcggtgaagttcaccgccagcttgggccacacgggcacaccgctctcatcgtagtaaaactcgctggcatagatctccttgaattccccgctgatggacgagccttcaatgatctcccgcaggccggaagagatgatgtagtgctccacctggacaccctggccggcgccgaagtcgttgatccgccggaaccagtcctccacaccggggaacagcacgatgctccgccccttctccaccaagtccgtccgggtgaaaggacggttccgccgcgccgcctcccgcagcatggtgtacatataggccaggatgccgtccatccggttcctgcggccgaagccgttggcctccgcccagaactctgcgggggtcatccccagggaggggatgaaggcgtagtcctgcatatcggtggtgcagagggtcttgtcaaagtcgtacagaaaggccacgatgggctgttgcttcatggctgactcctccaatcaaaagacgttgagcgccgggaccgggaaagaaaaaagcggctcctgcgagccgctttgatcgttcagtcatcgccgccggagtaattgcggccgaacttcagatcgttgagattgatgcggcgggtaggctcatccacaggatcagccgcaaaggggtccccctccggatagtcatcctccgccgccggagacgcctcttccgcttccgccggggccgcttcctcctccacgctctgctcgctgaaagcggccagcaccttttcctcgatctgctggacggcctcctccggctcctgctgggaaatcggctccgccgcctccaccggcagctcgggcagctgctccaggaatttcagctccttctcacagatctccctgctggcggcaatgaactgggccagatcccgctggccctggtgcagccgctcctcggcggcctccacctcctggcgcagctggccgatcttctcccgggcgctggtctccgcttgggccaggatctcgtcccgcttggcctctgcctcgtggacgatggagtccgccatcttctgggcggtcagcagggtggcgcgcatggagtcctcggtggcacggtagtcctccaccttttccaccaggaccttcagcttggccttcagcgccgcgttctccttgtagagcgcggtgtaatcatcggtgagctcgtccagaaactcatcgaccatggccatgttatatccgcccatcactgccttggaaaaggcgtgggtggaaacttcctgtggtgtcagcatagtgcgatgttaccccctcgtgtccgctcagaaatagaggccgttgttctccagctcgtcgatcagatcgccctcgatatccacatgatagggcgtgatgatgtatgtattggcagccaccttcttgatcttgccctcgccggcataggccacgccggacagaaagtcgatcagccgccgggcgatatccttgttggtggactccaggttcagcaccacggtccgcttgtccttcaggtggtccgcgatctcggaggcgttctcgaaccgctccggcttcaccagcaccactttcagctgggtggtggcgtggatattcaccaccttgttgcggcggtcctccaccttgagcttccggtcctcaaaggcgttttgccgcaccggctcctcaaagtcatcatactcctcgtcctcatcctcgtaggggtgggtccactttttcagttcgtccaataagctcataatagcctcccatcggagccgcgctccggtctttttcagttgtaatggcgggcgccgaagatggcgctgcccacccgcaccatggtggcgccggcacggatcgcatcctcatagtcgccgctcatgcccatggacagatattctaattcattatgaaacaatttttggttcatgtcaacataaagtgcctgaacttcctgaaaataccggaaattggcatccctctgcgcgtctgccgggggaatcgtcatcagtccccgcacccggacatgggtccgctccagggcggcctccgctgcggggaggactttctccggtgcaaagccgctcttggcagcctcccggccgatgttcacctccagcaggatgtcctgcaccagcccccgggccgcggccactttctcgatctcgtccagcagctccagagagcccacggactggatcagggccacatggcccaccacctgcttgactttgttgcgctgcaggtggccgatgaagtgcaggggggcgccgtcgtaggcgtgctgctccagcttctgtaccatctcctgcacccggttctcccccagggcgtcgatgccggctgccacggcctcccggcaggcggcggcatcgttcatcttgctggcgcccaccagcaggatctccttcgggtcccggccggcctcccgggccgccgcggccatgttcgcccggatccgggcaatgttctccgcaattgtcatcagcgttccaatactcctttccagcggccgccctgcggccatctctctgtcagctgccaatcacctttccatcatacaggtcataggcggtgatgatcacctcgtcccccgcccggaggcgaatctgctcctgggtcttgctgacctcctctgccgtgtccagcgtggagcgcaccagggcgaagtcatctccgctgtacagcacgtccaccggcttgaagcgggccttcatgcccaccatgcagtagacgccggtctcgctcaccacggactcgttcccgtcctcgtccgtaaccgttcgctcccgcacccgcagggcctccttgggcactcggatgcccgtggtggtctgccgaataacctcggcgctctgctggcgcagcagcgtcagctctgataaataggtgtccccctggaacaccgccaccacccggccgccttccgcctcgctgatatgggtcagcttcacgctcaagtcccggcccacgcccttggcaaagcgcagcttcagtctcccgctctcctgcagggtctgggcctcgctctcctccagggccgtcacatagtaccaggtgtcccccagcaccagtttgcccacccggttggagcgcagggactcgtccggctccagggccgccagggtcctgggcgtcagcgtctccaggctctccggcgttagaatgttctcatatccgtccaccacggcggaatagagccccgcctgcggcgcggtgatctgccggacagagcttcccgcctgggcccgcaggctgctcaactggctctggagctccgccatctgggcggacaggtcctccgtatcggaatacgtgtagtcccgcttcatcaccaggctccgcagctcggctccgcagtcctccgccgtgtccagccggtccgccgccagagcgccccggtagtcgcggatcgtctggaggatctgggcgtccagtcgcagagagacctccgcccccagcgccgcctcctccgcgtactgcaactgttcgatctgggtatggagggattggatctccttctggcggtccagcgtcgcctggtccgcgtagaccagcgccaccacgccgccgtcgctgatccgctcgccctccgcccgctgcagctgcagcaggccgctggtgtcgtccgtcaggatcgcctcgtcccgcaccacatagccggacagcaccgtggacatctccacctgatactggtaggcgatggtggtggtcagcgggtcgccgaaatagcgcaccgcctgaatcgagaaataggccagcacgcccagcgtgaccgctgccagcaaaagttttgtgccaagggttttctctttcatggttacctctttgtctctgtccgcgaagccttcccggccccatgcaggaccctctgcggaggcgcagacctccacaacctccagctccaccgccggacgcaccggcgcgatggcggaggtcgtgtgcttgaaatgattttctgcccgccagttctcatttccccaggcacggcgggctttgcccgccgtgctcaaggttttggtccgcaaaacgtgatcccggcctaagtgccgccctttaggcggcgggcctcaaaacgggtccgcaggccgctcatgcgcccgcgacggccggttcctcaccctccagatccaccggccgcaccggcgcgatggtggagatcgcgtgtttgtaaatgatctgctgccggccgtcgctgtccagcaccaccacaaaggcgtcaaaccccgcgatggtgccccgcatctggaagccgttcatcagaaacatggtgacgggcagcttgtcccgtctggcccggaggagaaacaggtcctgtaaattcgcttttgtctgcatatatgtccgctccttttttctgtatgagtcggacgatttccctgtctcccgtccgctcaccgctagaatacgccagcggcggccaggatttccgtcgaaacctggagggcccgggcaaaatcccggtctttttcccaccagatccagtgaatgtccggatttcgccgcagccaagtcagctggcgcttggcgtattgccgggagcggagcttcacctccgccacggcctcctccaccgtggcggtgccgtccagaacccccaggaactccttgtatccgatggcctggagagccgtggcctcccggggcaggccgctttccagcagctgccccacctcctccagcaggcccgccgccaccatggcgtccacccggcggtcgatcagggtcttcatgtccgcccggtcccggaactggaggccgatccacacggcgtcgtaccggggcggcaggtcccttgtctccgcgttgtgggcggagatggtctttcccgtctcccggtagacctccagcgcccggaggatgcgcttctcatccgccggatggaggcgttccgccgcctccgggtccacctgccgcagctcctccagaagcgggccgatgccctcccgggccagctgggcctggagctccctgcggacagcgccgccggcgtggccgccggcgaaggtccggccctgcaccaccgcatccagccacagcccggtgccgcccaccaggatgggccgctttccccgccgcagaatgtcgtccacgatggggacggccgcccgggcgtaccgggcggcggaccactgttccgccgggtctgccacggcaatcatgtgatggggcacgccctccatctcctcggcggtgggggcggcggtgccgatggtcatgcccttgtaaatctgcatggagtcggcggaaaccacttccccgtcataccgctttgccagcaggacacccagcttcgttttgccgcaggccgtcggccccaccacacagatgatcttctcagccatcgccgtctctcctctcgcctgtcaaggctgttccgcttctgatgcatcgatatactcactgtatacgatccgctcccggatgtaaagggggccctccgcaagcggacagcagaagcaccagtgccagcgcagccggcaatctcccccttacggcagccgcctccttttcagaagtcctccgccagcctgcgggccttctcacaggcctccgtcaaaatctcctccgtcttggcgggatccaggtccagtccgccggcaaacacatagctgaacgccgggatgccgaacatggcgcacagctgcttccagtacaggacacccagactctcgggctgctccagatccccgccggaggtgagataagccagcttctctgcccggcaatccccgtggcagccgtcggcctcgtagtgataggtcaggccattggcggagatgtactcaatatacgtccgcagggccgccgggaaggtcaggtcccagaagggtgccgccaccaccacccggtccgcggcccggaactggcgggccagatcatacaccggcgcatcgaagcaccggatccccgccagggcgtcccggtcgttcagcatctccggcgcaaagggcttcagcgccagcagggcctctggttccacagtctccacctcggcctccggatgcctggcctgccatgcgtccaaaaacgatctcgccagcaccagggtgcgggattcctcccctcgctggctgatgcagccgttgacaaacagcagtttcatgcaaatcactccttctcctccaaaagggtggtaatgatgggcttcccctcccggtccagcaggggcgtcatcccgccggcatggccggtggaatgccacaggtagttgaccccggtctcccggtccatccagacagagttttcctcaaagccggtgctctccacactggtccgcacaaaccgtttttccttttttgccatataggaaacctcctgaaaaattcgtcactcccatctccgccaggaaaaagggctggggaaaaccctgcggtttttcccagttcgttcgccgcgggcgaacaaagaaatctcaatcattttcggcagggcgtgtacctgccgaaaatccgttgacctgtgcgcctcgggcgcacacaccagtgaccgacgtcactggtgtggggggaggtcaaggggggacgcagtcccccttcgaagtctcacgcccgcttgaacatcttctccagctcgtacttcgtcagcttcaccgccaccgggcggccgtgggggcagtatttgatctctccgctctgcacccggtccaccagcacccgcagctccgccggatcgctgacccagccgcccttgatggccgccttgcaggccatggtatgcagcagcgcctcccgcttttcatccggggatcttccggtccgcaggcgctcggcaaactcctccagagtgggcaccgtgtcggcggcgtcgatgtccgccggcacctcccgcaccagcagggcgccggccccgaagtcctcgcaggcaaaaccgaactgctccagcaggggcaggttctccagcagcagcgccccgtcctcccggcttaactccgccgcgatgggggccagcagcgtctgtcgcatggggggctcctgagcatttttcagcttgtcaaaattcatccgctcgtgggcggcgtgcttgtcgatgagccagacgctgccgtcctcgctctcgcagatgatataggtccgcagcacctctccggcaatccgccagggtgcctctttcgtctccagaacagtcgtctggcccggtagatcctccgtcagcttcagccgctccggcgggatggcgggcacaaaggggcggggagcagattccggcgaggtcgtcttttctgcagggacggacactggggcagaggtccagggggcggagggagccgtccgctccgcccgtggggcggtcacggagacaggcggtctgcccagcgcacctttgttgcaggagggtgcaggcgggctgctttgctgcgtgtctggcggcgacgtcacagaggcgggcgcccttcccagagcgccctgggccgcggactctgagcgcttggtctggtaaaaagaggtctgcccgctgtccgccacccgggcgggcgcccgcagctcggtgttccaggcgggccgggccggagccgcgggctggggagcgggctttgcaccgccctgccggaacgtcttggcgtccatggtctggaagaagtcctgccgggaggccgccgggagccgcgcctcctgcgcgggagcggcggcgggagcgccggtcttgcccagggcatctagcaccgtgtggtagaccgcgtcgaacacatcgtgctcccgggcgaacttcacttgagtcttcgcggggtggacgttcacgtccaccgccgtcaccggcagggtgacggacaggacgcagccagggaacttacccttcatgatctggttgcggtagccctcctccagcgccgccgtcagcagctgggacttgatgaaccggccgttgacgaagaacacctgcatggaccgggagccccggcccatcagcggcgcggtgacaaaaccggagaccgtgatgtcccctccgctgccggacaccggcaccagcccccgggcgaagtcccggcccagggcagcgtagacggcggagtccagctttccgtcaccgggggtcagcagggcctccaccccgtccttgatgaacttgaaggagatgtccggatgggacagggccagatgctgcatgaggccgttcaccgccgcagtctccgcactgtccttgcgcataaacttcagccgggcgggggtgttgtaaaacaggtcccggaccgtgatggtggtgccctccggcgcaccggcgggctccactgcgccgggcacaccgccctccagatggagggcggctccctccgtcgtgccggtttggcgggtgaggatgtccacccggctgacggcggagatggcggccagggcctcgccccggaaccccagagtaccgatcttccccaggtcctcctccgtccgcagcttggaggtggcgtggcgcaggaaggcggtggggagttcctccggcgcgatgccgcagccgttgtccgtcacccggatcatgcccatgccgccccggcggatctccaccaccacggcagagctgccggcgtcgacggcgttttccaccagctccttcaccacgctggcgggccgctccacgacctcaccggcggcgatcaggtccgctacgtgggactccagttgttgaatgtgaggcatattggtttcctttctaagctcagagcagcagcacggcgacgatgggaatggtcacgatggacgccgccgtggtcaggaaggtgatctgtgccatgcactcggtgtctccgccgtactccatgctcagcagcgtcccgttcactgctacgggcatggccatctgggtgacagcgatccccagcaccagggagtcgatccccagcgcccggaggaccaggcacagggccaccggcagcaacagcaggcggatggccgtcagcagccacagcttgggagagcgcagcacctgtccggctgacatgcccgccagcagggagcccaccaccagcagggacagcggcacggtgatgtctcccacaaagtccagcatctcgcccaccagggccggcggccgcagccgggtcagcgccagcaccaatcccaggacagaggccacgatgcagggggtgaacagctgcttccagcggaagcgggcggcccctgccagcagcagcgggcccagactgtaagacaagagattgaagggcagcgccagaatggcggcatagaacagtgcgccgtctccaaacagggccaccgctacgggatagccaatgaaccccacgttggggaaggccagggcataccgccacacgcccttctgcccctgtgtgcccggcaggaaccggggcaccaccagggcaaagaccgcctccagcaggtagaacaccacgccaacctccaggatggagaggatggtccccagctccggcagctcctcgccggtgatcaccgccgccacgatcatggcgggcatggtgatgttcagcagcagcttggagaccttctggtccgcctccccgcccaggtaccccagccggttggccgcatagcccgccgcaatggcgaacaggatgaccagcatctcgccaaatacgtcccaaaaattcatctgtccctttctcccctcatcattccggaattcggttcttacgccacaagggtccaagcggagagggcgttggccgccgcatggagaccgatggacgtccacagggtgccggtgcggtcatagacccacgccagcaccagcccgggcaccagatactggagcatcagcaggaaatacgtgatgtcccggttcaccaccgcgaactgccacacatgcagcagggcgaacagcaggcagctgaccaggtatcccaccgccgcgctcttgcgccggagattcccgaacaccagtccccggaagagcacctcctccacaaagggcgccaggaaaatgacgatcagcagcgtcatgtggggcgcgtcctcgatctgggcggagatggtggtgtcgttcaggttggtctggttggataccaccagtcttgtcaggcggtacaccagctcgttcaggccgtacagggccaccagtccgatggccatgaacttgcaggccccgcccaggttctctgcaaagtgccgggaggtccgacccagaaagccgtggaaaatgatgaccgtggcggcgaagaggatgtagtaatacaggatattctgcaatccggtgctgatggtcactcccagcagtccgccgatcaggcggaacagcggggttgtgacaaagggcagcaccagtaggtagatcacaaagagcaccgtgcccgcgatctgttcccccgccgacatataggcggcgctctttcttcttggcatctcgttccctcccggttttcgtccggcttctgtttcagctcgttttccccggcgggcggatccgccggggtcttcttttgatccgctgggcttgggcggcgcgtgtccgcccgccgccaggcccctcatttccgcggaatcccctgtcccggcctgaaggccgctctccgggcgccgtcagcgcgtccggtcccccgcggcagagggcgcatcccgccgtgcctgcccggccgggtgctcagttgagcttctgcttccactcgtagatcaggctcatcgcctcaatgggcgtcagcgtgtccggctggcagcggcggagggcgtccagcacctccccctcgccgatggcggtgagggacacctggtcctcctctttccgggccgctacgtactgaacgccgttctcctcctccagctctttcaggaccgttttggcccgctggaccaccttgtccggcagccccgccagcttggccacctcgatgccgtagctgcggtccgccccgccggggaggatcttccgcaggaagatgatgtcctccccccgggtcttgacggcgatgttgtagttgaccgtgccgggcagggtgttctccagctccgtcagctcgtggtagtgggtggcgaacagggtcttggcccccagcagcttcttgtccgcgcagtactccagcaccgcccgggcgatggacatgccgtcaaaggtgctggtgccccggccgatctcgtccagaatcagcagagagtgcttcgtggcgtggcgcagaatgtccgccacctccgtcatctccaccatgaaggtggactggccggcggacaggtcatcgctggcgccgatgcgggtgaagatccggtccaccacaccgatgcgggcgctggccgccgggacgaaggagcccatctgggccatgaggacgatcagcgccacctggcgcatgtaggtggacttgcccgccatgttggggccggtgatgatggccacccggtcctccttctcccccatgaaggtgtcgttggggacgaagaggctgtccttgagcatctgctccaccaccggatggcggccgtcgtggatctcggtggccccagactcgtccaccgtggggcggcagtagtggttccgcaccgccaccgccgcgaaggacaccagggcgtccacctccgccaccgcggcggcagtccgctggatgcgggcgctctgggcggagatctcctgccgcagcgccgtgaagagctcatactccaatgccaccacccggtccgaggcggtgaggatctcgtgttccaagtccttcagctcctgggtgatgtaccgctccccgttcaccagggtctgcttgcggatgtaggtgtccggcacctggtccttgaaggagttggacacctcgatgtaatagccgaagaccttgttgtagccgatcttcagggtccggatgccggtgcgctccttctccttggcctcgatctccgccaggacgcccttgccgccgttcatgatgtgccgcaggcggtccacctcctcgtggtagccgtcccggatgaagccgccctcccggacggagaacggcggctcgtcgcagatggccgcgccgatgtgtgccccgatctccgtcaggtcgtccagctccccggccagctccgccagccgtccgccggagaaggccgccagctgggcccggagggcgggcagccgctcgatggcggagcggagggacaccatgtcccgtcccccggcggtgccgtagacgatgcggccgatgagccgctccatatctcccaggcccgtcagggcggcgatgagctcctcccgcgccatggtgctctccaccagggcggccacggcggcattgcgcttggcgatggcggtgacggacagcagcggccgctccagccagctgcggagcagccgcccgcccatgggcgtcttggtcttgtccagcacccacaggagggagcctctcttctcccggtcccggagggtctccgtcagctccaggttccgccgggcggtcaggtccaactccataaaccggccctgctcgtagtagtccaggtcgttgatgtgagagaggtccgtcttctgggtctcgtacaggtagtgcagcaatccccccagggccatggccgcggccgggttggtcctgggcaggcggtcaaacgcctcctccccgaactggcggcggatgtttcgctccgcctccgccaggcggaagcggccctcgccgccgttttccacccggcagcggaacttctccgtcagggcgtcggtcagggctttttccgaggcggccccgtcgttcaccaccgcctctgccggggaaaagcggcccagctcgttgacgacgtgctccacccggtccgggccggagaaggccgtcaggtgggtcttgccggtggagatgtcgcagaaggccgcgccggcgttctggctgtcgatgtagatgccgcagaggaagttgctggccttctcctccaggcaggcggcgtcgatcaccgtgccgggggtcaccacccggatgatatcccgcttcaccagccccttggccgttgccgggtcctccatctgctcacagatggccaccttgtagcccttggcgatgagccgggcgatgtatgcctcactggcgtggtaggggatgccgcacatgggcacccgctcctcctcgggcttggcgtgcttgccgtggtcccgggaggtgagggtcaggtccagctcccgggaggccagcttcgcgtcgtcagcgaacatctcgtagaagtcgcccagacggaagaacaggatggagtccggattgtccttcttgatctccaggtactgcttcatcatgggggtgagttcggccaaaagggtcacctcattctctttctatcaaaggatttggattcgttttatgggggtgcgtcccatgggacgcgggaaatcagccatgtggatggctgggctgggcgggccgccgaacggcggccacaggggtctggctcccgccgggggcattgtccatgcgggatgcgccgcgcccggtggaaaagaaaaaatgtct

SEQ ID NO: 4923 - DNA, 199930 bp, Unknown
  gut microbiota DNA sequence
cagacctcctgccgccggcgggggaaggttggcaatcccgcgcggcggtcagagacggaaacgcccggcccttggggaacctttcagcccggggaagtccgggatacacgctgcgtcgattttcgctgccgctggccgggcagttgatgaaagtttcatcacgggctaacgcaatagcttctacaaccgcccgggcagcgcgtagcgaagcggaacgcgcggaaagagaagctggtcaaatgcgttcttgcaccccgaccccctccgcaccatccgccacgggacggcagtatcgacctcacagaaggcccaagcgtgcccgaatgccaggaaaaatcggagcaggcactggtacgccgacccccgtacgcgcggagggccactgcaccggagcgcgcccggcgcctttttctcttacaccgggcgcggcgcgttctctttttggcgcaaccaaaaagagaatggggggcgcattgcccagctggcaccccagctgaatcccccgggcggttgataaccgcccctacggtcctgcaggggtccggcggaaatccggcgggcggacacacagttccgcccctaccgctcccggcagaccagctcatccagcgacaggtcgtagaaatccgccagggcgatcagcgtagacagggtcggttcccgctctccacgctcatacgtctgataggcccgccaaccgatgccgatgatttttgccagctcggtttgtttcaggcccctttgctttctcagttgaagaaggtgttctgcaaacgtcataattcctcttccgctcttgacagacacaaatatgtctgctatgatacgtactataaaagacacaatcgtgtctgtcaaacaaattcaggagtgatcccctatgtccgattacatcgacatcctgctcaccgccctggaggacgagctgttcccctctctgggcaaggactacttcctctccctccagcaggcgaacgacgccttgaccgcgctttccgccaccctcaccgatcagcagcgtgcgctgctggattcctatgaggacgcctccgccgccgcaggcagcgcctatcaggacgcctacgcccgcagggccttcctcctcgcgcgggaggtctaccgttaaacggcctcgccgtacagcgcccaggtgttgctgccggtgacggccacatccgcgaactgcccgatcagggccttgtcccctttcagccgcaccagacggttgccctccgtccgggaggtcagggggtactccgggtcgtcgctctcgccgtccaccagcacccgcaccgttttgcccacataggcggcgtggagcttggcggacatattgttctggacctccaggagcctgtcaaaccacttctgcttctccgcccgggtggccgggtccggcatggccgcggccttggtgccggggcggggggagtagatgaaggtgaacagggcgtcaaaccccacctcctccaccagagacacggtgtccatggcctccgcctccgtctcgccggggaagccgatgatgacgtcggaggtcaataccagcccgggcatgacccgcttggcgtagttcaccagatccaggtactgctgccgggtgtagcggcggttcatctctttcaggacccggtcgttgccggactggaagggcaggtgcagctgcttggccacatgagagcttgcggccatcacgtcaaacagccggggcgtggcgtccttggggtggctggacatgaagcggatgagatattcccccgggatccggtcgatgtccgccagcaggtccgggaagtggtaatccaaatccagatcgttgccgtaggagttcacgttctggcccagcagggtgatgtccttgtaccccgcctccaccagctgccggacctccgccagcacggcctgggggtcccggctccgctcccggccccggacatagggcacgatgcagtaggagcagaagttgttgcatccgtacatgatggagacccaggccttcacgcccttctcccgcaccacggggatgccctcggcaatggtgccgtgctcgtcctggacggaaaagacccgcttcttcgtctcatacacctgccacaaaagctccgggaacttccacagggcctgggggccgaacaccagatccacgtggggataggactttttgatccgctccgacacccggggctcctgggccatgcagccgcacaggcagatcacctgctccggattctccttcttggtgtgggtcagggcgcccaggttgccgaacacccggtcctccgcgtgctcccggatggcgcaggtgttcaggagcaccagatcggcctccttcgggtcctgggtgagggtgaagccgcttgcctccagcatccccatgagcttctgtccgtccgccacattctgctggcagccgaaggtgtccacacaggccgcggggtgagcctcccgggcggcgaacaggccgcggattttctcctcaaactcccgctggcggtccaggtccgcctgggggatcaatacgttttcgcgttccaaatcagttcctccaaatgcagatactttaactaaaatatcatagcacaccagaaaacaaagcacaagcagaaacctccggcaggcagacagcggccccgccgggaacttcccggcggggccgctgttgtgtcacaggtctgccagcagatccggcaggtccgcggggcgggcggccacggcgtccgccgccgccaaatccacggacggggcgccgccccaggcggcggccacgcagaccacctccgccgcccggcccatggcccgcagggccgcctgggcattgcggccgaaggcgatgtccccggcgtggtccccgatgtaggcgaagcgcccctcccgaagccccagccggtccaggcaggccaggaaggcggcggggtccggcttctgacgggcgaagtccacgtccgcgtggcccaccacggcggcaaagcagtccgccgcgccgtgggcggccagggcggcgcggatgttgccgctgtcgttctgggagcagatgcccatgggggccagggcggccagacggggcagaacctccaaaagcccgccgaagaggggcggcagggtccggtccgccagctggcaggggccccacagggcccccgcctcgtccagccggtccgccgggacgcggagggcgtgctggtacagctcccgccagttgcgccagcggtagttggcggcctgataggcggccagggaggaaagcgcctccggcagcgggtccagcagggccgggtccaggcggccaaggacggccctggtgacggcgatgttcttcaccggcgtgttggccagggtgccgtcgtagtcccagagaatggctgtgaacatgggtgccctccttctatcgcttgtctgtgcggcccgctaaatagtccaagctgaccttgtagtaatctgccaatttgaaaaagacttccagcggtatcttgatctttccgttttcgtagtctgagtaggtgttctgtttcacaccgagatactccgcgatcactttctgcggtgtgtccgaatcctctcgcagttccttgactctcctcaaatacatgatgccatcacctcaagcgataacataccgcatcggtgaaagcgatattgacttatatcggtgtagccgatataattttcatgaggtgataaaaatggctctatatgagaaacgggatgacgtgtactgcggctcctgcggccactttacccggcactacatctggcgggacgggcggcaggcccggaacgcccccaacgggtgctttctgcccctgagcctgggccactgcgcccatccccgcatgaaggaccggcgggaggatcagtcctgccccctgtggatcccccgcaccccggaccaggacccgccggacacccggctgccgggtgcaaacgcgccggaccgctgagagcggcccggcgttgttctatcctcggttctccagcttccgcagctgggtctggaacgcctccggcaggtcgcaccacagctccaccagctccccggtccggggatggagaaaccgcagccccaccgcatgaaggcactgcccctggaggcccggcacgggctttttcgccccgtacaccgtgtcccccagaatggggtggccgatgtgcgccatgtggacccggatctggtgggtgcgcccggtctccagtcggcactccacataggtatagccggggaaccgctccagcacggaccagtgggtcaccgcgctccggccgcccgccaccaccgccatcttcttccggtccgccgggtggcggccgatgggggcgtccaccgtgccgctgtcctcccggagattcccgatcacgatgcaccggtaaatccgggccagggtgtggtcctgaagctgggcggagagcttctggtgggcgaagtcgtttttcgccgcgatgaggaggccggaggtgtcccggtcgatccggtggacgatgccgggccgcagctcccccccgatgccggagagggagtccccgcagtggtggagcagggcgttgaccagcgtgccgtccgggtggccgggggccggatggaccaccagccccttgggcttgttcaccacgatcacgtcgctgtcctcgtacaccacatccagggggatgtcctggggcgccacgtccaccggctccgggtccggcagggtaacggacacggcctctcccccgcccaggcggtagtttttcgccaggggctttccggcagcggtgacccgcccctcctcgcacagccgggcggcggcggagcgggtcacatccggcagctgtccggccagccaggcgtccagccgggtgccggtgtcctcaggattcacttggagcgtccgcgtctccatgggccttgcctctcttgtcgtatttctcgtagaaccataggtaatagattaccgccagcacggcgccgcacaccacgcagatgtccgccacgttgaacaccgggtaggagggccagaactccaggtggaacatgtccaccacgtaccccagccgcacccggtcgatgatgttccccacgccgccggacaggatcaggaatcccgccgccacccccagggggtgccggacgatccggcggagcaggaccaccgccaccgcgatcacaatgacggaggtgaccgccaccagcagccagcgcataccggagaagctggaccaggccgccccgtagttgtggacggtccgcagctctaccagcccgggcagaaagggctgggcatcccccagggggatgttgacggtgacatagtgcttcacccactggtccaggcccagcagggccagggacagcgcggcgcaaagggcatacagcatagttttctcctcaaatcagataggttttcaccaccggcacccgccggaggaccagccacaccagaaagccgcccccgaaggccgcggccgccagcaccggcacgccccagacgggcggcagcgtcccggcggagaggcccctgcccgccaggaagtccaggaagaacaggtgcgtcaagtagatgcagaaggacgccttggagacggtctccgccatgggccagcggtcccggttctgccaccgggcggcgcagaagccgtacagccccgccgcctgcaaacagacgccgggggcgctcccctggaggaacacctgatacagcgccccggttttgacggaggccgccagcgtcaggccgaaggtcagcgccgtgcccgccaaatacagccaaacaaaggtccggggcctgtggcggggcgcctcctgagtcagaacatcgcccagcacaccatagcccacggcgcaccaagtcaggttgatggggtactgggcagggatgccgccgacgagggacaggggcgggaagaatttcagcgtgggggccagacaccccagcacgaaccagatccccagagcgtagttcagcagccgccggtccgccgccgccacaaggcggcgggtcaggggcagcaccgcgtacaccagcagaatgatgtggaggtaatagagatggttcttgtgatggaacagcaccagattcagcgccgcctgccggagggccgtccgctccagcacgcccgcagcgcaccagccccgcagcagctccacaccctcataggctgcggcccagaaaagcagggccgccaggatgcgggggatgtacttcgtccacacccgccggacggtgacctccttttccggcggcagcagcagcgcgccgctgcacaggaagaacaccggcaccgcgctgcgcagcaggcagttccagaacagggcggaggtccacccaaaggaccccggcgctcccgcaaagcccccggcggcggaggcatggatcagcagcgtgccgaagatcgccgccgtcttggccgcgtccaccggcacgctgcggcgctgtgtcagcgtctgcatccgaccatctccctcattggacagatcgagcttgccgacaacagtgtacacggtttggcagaaaaaagcaaccgccgcttcacgccctcctgcggcgccgccacaggagccagataacgccggagagggccgtcagcgccccgcccgccgccagggacagccagaagcgcccgctccccggctgccacagcgcgccgcccagcacggtggcgcaggcaatccggggcaggccgcccagcagcccggcggagagatacgtgccgtagggcgtgccggaggcccctagatagaggctcaccacgtcccccggcgatgcccccgccagccgcagcagaaagacggacagccacgggttctccgcctgggcccggcagacgcccgccacccggggaatccgctccgccagggcctccagtcccccctgctcccgccgccccaggaaaaaggggatggtctgggccaccccggtgccgcagaggttcaccgccagcgccagggggaagggaaacagcagtccccccgccgccgtgagggcggacatgggaaagcagacggagaggctcttgagggcgtacagccccaccaggaacgacgacgccagaaccgtctgccggggggaaaaggcggcgatggcctccgccgtcaactgatggcggaacggccagagggcggcggcgcccgctgccagcaccagcagcggcgccccgtaccgccagacatgaaaggcatgtttttccatagccgtcctcccgcccgcgtcagatagggctagtatatgcggcgggcggaaaaagacgaagaggcagccggaaatccggctgcctctttctgcaaatagtgacagaattcccctggcggtcatacaaagggttcgtcctggggcaggacgtccgtggaaagttcggactccccagtggtcccggtgccggtctgcccttccgctgtctgctggccgtcctgctccggcgtctggatggtccagccgccgtcgggcgcgccgggctccgcaggttccgtgggaacgccggggtcctggggctccgtgggctccaccggcgtggtgggctcggtggtgtccgttgggatctgggcgccgccgtcggcgggctctaccgccgggccccggaggatcaccttattgcgggacttgtagtcgctggtggcctcgtaagcggaggagatcagcttgccgttggcgtcgtagacattgcggtatgtccggtacttgtacccggtgtagggcgtggtcttgaccttctccgtgcccggcgccagggtggggtcatcctcatacaccgtctcatagggcgtggtggagaggtgctcgttggtcatcttcacgctggtgccgtccacattggtacccaggatccggaccgtcaggtaattgttttcatagatggtgacgatcttgatggggtacagggagttgttggtgaacttgtagtccggcccgccccaggacaccgtggcgtccatgcccgcggtgatataggcggggacgtagcggtgggcgtaccgctccgtgatctccaggttggaccgcaggcaggccaggtacagcgtggaggaagtctggcagatgccgccgccgatctcgtccaccgtctccccctggacataggcgggagccgcctgatagccccgggcggcggtccgctggcccaccacgtcattgtaggagaacacgtcgccgctgttcatcacatactcgttgatggatgcggcggacagcttcacattggaccggcgggcggaggtgccgcccacatgggtgcgggcctcgcccagcacgtcccggaacagcacctgctccagctcctccgccgtgacggcgggcagctccacctgggcggggacggtgacggtctcgccgggcgcggccgcgtccagcagccgctgggcctcgtccacatcgaagtccgctccggcctcctccggtacgatggcgcccgtctccttgtcataggaggcgttcttcaccacgccggagcaatcgtcgtagatctcctgggcggtgagggtcttggcgggaaggatccgagcgttgttcacaaacacgctggccgccgcgccattgccgctgccagtccatctttcctgtgcagtccgcgcaagatctgcggcggacacggacagtccgttcagggcttttgtgatttcgacggcatcctccgtcacctcgtaggaggcgtcctgggcctcccgggagaactgctcactgagctgttccatttttacctggaagatatcctcctccggctccagcacgacgcccagttgtccatctgctccgaccaggcaggcaagatactcccagcccttgacaaaaaagctgctccggccctgcacggcatcaaatgcggattgggcactgacctcatagtccagttcctctgtgatgcccagctcccgataggtgcatacggcgtcggggtctgcgccgtacagcatatctccctccggcgcggattccccatccccggtctcatcggccagcggtaaataaaactctacggtttcctccggaatctcctgccgcagccgctccgcggcctgctccgctgtgaggcctgccacgtccacaccattgatggtggtgttagggtaaaatatatccagggaattggcataggcgcacaggcccacataggcggcaagcaataccgccacaataactcctatgataattatcggctttttgccgccggttttcagccgcttcggcgcggtggcttcgttcgtattcggttccatgaagcccctcctgttgttctgtcggatcgcccagacaagccgtgctgtcctagcttatgcattcaggattttattttagcacgttttttctggaaaatggattacaatcccgtaacaatcagaagtttcaggcctctttccgacgctgtttcggaatgcggagcgtcagaacgatttcgtcctctgtctcctcccgctccgtccgggcgtccacacctgcgtcccgaatcagccgcagcccccggtccacactgttcaaaaacaatcgcacgtccttgatgatgtacgtccgccgtcctgcgggcggcgcggtctggagggctgccagccgccgctctacatactgctccgtctgggccacattccagtgcttcgccgccgcctggcgcagggcggtcagccgctcgccctcgtcctccagccgcagcaggcagcgggcgtgacgctccgtcaatccgtgttccaccagcagcgcccggcaggccggggacagccgcagcagccgcagcttgttggccagagccgagggggacatgcccagctgggccgccaccgcctcctgggtcatgcccgtctggtggagaaaggcggcgatggcctccgcctcctccaggtaatgcagatccttgcgctgcaaattctccacaagggccagcagggcggaggcccgcccgtccacctccgcctccaggcaggggacggtctccagacccgccagcacggctgcccgcagccgccgctcccccgccaccagctcccagcccgccgcggtccgccgcaccgtcaggggctggaggataccgtggcggcggatggattccgccaactcccggagccccgtctcctcaaaggtccgccggggctgcatgggattggggcggatttccgccgccgggagccacagcaccttccgttccggcctgtccatgggaccacctccgtttcatttcctttattttacaggtcctgtcccaaaaaggcagggggaatctgtcgaggcgtcccccactccgcaggaaaagcggccgcccaatgggcggccgccatgcgaacactgcatattccattaccgggacggttcctccgccaggcgcgcttcgtaggccgcctgatccgcccggccgggcctggtggcccgcagggccttcacgatcagggccgtggtggcctggaggaacaccggagaaaaggccaccggaaacagcacgtctccggggaaataggcctcggccagcaccgccccagcgctgatgttccgcatcccggcgttgagggcgacagtctgcactgtggggaagtccagcttcaacagccgccccgcccaataccccaggaaaaagcccaacaggcacaggaagaacaccacgatcatcacccgcaccagggtcggtgtcaggttccggaggaagggcgcgcagccggtggcattggccgtgatgatgagcagcagggccgccttggcgggcagggacagcttcggcttcagcgtgaccgccacggcaccctttgtcagctggtacagcaccatggctaccagagccggaagcgccaccatcagcagcaggtcccgcatcatgccccaggtgtccagctccaccaccgagcccaccagcagcttcatggtcagggggatcaccaccggggagaggagtgtatccagcagcaccaccgagaggcacagggcggtattgccccgactcatgcccacccacatgagggacgccacaccggtgggcactgcatactccagcaccagcccgatggtaaacagcggcgcgtccggaaagcacagcgtccccagtcccagggtaatgaggggcatcaccacgtggagcaggccgaaaatcaccgccaccggcagagggtggcggaccacctgcgccagctcccggaagccgccgcccaggctgttggaaaaggtcatgaaggcgaacagccctaccgtcaccccgttcaggtgggagagcacctccggaaaggcaatacccagcgccacacagcagagcaccaccggcgccatgtgtccgcccaggaagccatccaggcggccgagcgttttcaaatccgatcccctcttttctagttcctgttcagcggcagagataggaaaaccagccctcagcgctccgtgtctccaggatctcccagccgttttcccgcaggcggtccgccacctcctgcgcccggtcgtcgatgatgccggagcagaggaacagtccgcccggagccagcatgggccgcaccagcggagaaaggccgatgatgacgtccgccacgatattagccaccaccatctgccagccgccgcccagatccgcccgcagaaccgcgtcccccagtacatctccgatccggacggtgtaggtgtcctgcccgatgccgttgagggcggcgttctcataggctacgtcccggcacttgtcgtcgatatccaccgccgcggcggaggccgcccccagcttcagcgccgcgatggagaggatgccgctgccgcagcccaggtccagtacccgctcgccgccgcggatggtcttctccagcgccgtcaggcacaggcgggtggtggcatgactgccggtgccgaaggtgaggcccggatccaacaccagggccacccgcccggcggcaaggcccgcccggaccttgaggtcctcccgcagccactccggcaccaccagcagccggtccccaatctccatgggcttgtaatactgcttccagttgttctcccagtcggcgtcctccaggtcatccagggtcatcagcagggtgccgcagtcgtcccgggtctttttcagctcctccagggcgatgcggacctcccccagcttggcgaagccctcgtcccccgcctccagatagaaggtgatccgggaccggccctgcatctcctgccgcaaatcctcgtccacatagtcccagtactgccggttgttctccaggaagtcctcgaactccgtctcgtcatcgatcaccacaccgtcgatgcccagggcggagagcatcgtctccaccggctccagtccggtgtggtttgtgtcgatatgtacctccagccatttcacagccgtcacctcatctctccgccggagcggaattatatttgatctccagggaaaagcgcccctctgaagggacgcttttccgtccggcctcaccggcggctgcccaggaagaacagggccagcgtgccagggccggagtggttgccgatgaccggccccacgtagttgatatggatgtcctgtacgccgaagcggcggcgcacctcgtccgccacaaactcagcgtccgcctcgcagtccccgtgactgatgaagatagtctgtcccgccgggtcgatggcgctctccgccatgcggtccaccagggccagcagggacgccttccgcccccgggtcttgctgacgggcaccagatggcccgtgtcatccacatgcagcaccggcttgatggacagcatggtgccgaacagggccgccgcagcgctgacccggccgccacgcttcagatggttcaggtcatccacggtgaaccagtggcacaccttcgccttggtctcctccgcaaagacgtggacctggtcgatggtcttccccttccgcttttcctggacgcagaggtataccagcagcccctggcccaaagaggcgctgagcgtgtccaccacaaagatcttccgtccggggtatgcctcccgcaggtcatcggcggcgatcaccgccgactggtaggtggtggagagcgcggaggaaaaggccaggtacagcacgtccctgccgctatccagaatcttccgcatagcctcatcaaacacgcccacgctgatggcggaggtggtcgccagggcgccggcgcggagccgggcatagaagtcctggaagccgatctcccggccgtccaggtagttgtggtacacccggtcctccatattcaggctcaggggcagcacctccagctccagatccgccgccatccgggcggtcatgtcgcagcagctgtctgtcaggatcacaaaatcatccatgctcagtccttctccttttcctttttggcccgttctttgcttttggcgtgggcggcgcttgctgcctcctcccgggcctcctgccgctggcgcagcagcgtcacataccggctgctggccacgccggcggcgtagctcatcagagcaaagtggatggccgcatccgccagctcctcctccccggtgcggtcctccatctcatcggccacggcgttcagcgccttgttgaggctcccgcagaaggcggcgtacccgtcggagatgggccggtccccctgcagctcctcccggatcagcagatccatatcccgggtggacatcacccgcttcaacacacagatagcggtgagataggccaggtggtcccggttgtatttcttcccctccgcccggggcaccaggccgctcttcgtgtagttgttcaccatggcggcggtgaggccgtcatcctcgtcgaaccggatcacctgccggtccatatagctgagcacctggtccatatatagggagaagtccggcagctggtcccagggcaccgggcgctgggtccgcagcctctcccgcagggccgtcagatcatacatgcggatacactccttccgccgtgcggcacggcttttattcagaggtagtataccacgcaaatctgattttgtaaatcacgttttccagggtccggtattgcattttctgttagcagttattttcccacacagaatcgggaaaaaatgcgggagacaatctcctccttcgccgtgcggcctgtcagctctcccagcgcatccagggcctcctccgcgtctgtgagcaccgcatccggggtcattccggtctccagggcctccaaagcccggcggactgcgtccagggcccggcgggcggcgtcttcctgccgccggtcggtcagcaggctgcccgcctcccccgggtccccggcgggaaacagggctgctacggcgtttcccaggtcctccagtccctcgccagtgacggaggacagggacaccacggcggcaggcggggccagggggccctctccggcgggaaagaccgccccagccgtccgcagcccccccgccatatcccgcttagtgaacaccaggagccaaggaactccgcaccgggccacatccgccagcagagatccctcttccgggtcctccggcaccgcaccatccaccaccgccagcaccagctccgcggaggcgatggctctccggctccgctccacccccagctgttccaccgggtcctccgtggcccggatgccggcggtatcgatgagccgcagcaggaccccgccgcagagtacggactcctccaccgtgtcccgggtggtgccggggatgtcggtgacgatggcccgctcataccccgccagggcgttgagcagcgaagacttgcccgcgttgggccggcccacaatagccgtgcggacgccggatttcagtacctgtccccggcggcaggtgtccagcagccgctccagccgcccagcggcggaccggagggcagcggcgatctcctccggccgcacatcctgaatgtcctcgtccgggtagtccaccaccgcgtaaaaccgggaggtgacttccagcagctcctcctggaccggctccagcacccggcgcaggccgccgtccagctgggcggcggcgtttctggccgcggcggcggtctccgcgtcgatcaggtccaccaccgcctccgcctgggtcaggtccatccggccgttcaaaaacgcccgcttggtgaactcccccgcctgggcctgccgggccccggcagcgaagagggcagacagcagctcccgcagcaccacgggggagccgtggcagtggaactctgcgcagtcctccccggtgtagctgcccggccccgggaaccgcaccgcaaggccccggtcaatgacccggcccgcccggtccagcatctctccgaacaccattttccggggctcctgggcggcaaagggacggccgccagccgcccggaacacccgcccgcacagggcgaagcacccgtctcccgacacccggacgattccgatggcggtggcggcgcttccagtggcgattgccgcgatcacatccatctgcctcacgctcccttcccgcggggacggttctcctcgccccagatgcacatagcgtccaaaatggggatgagggaccgcccccgctccgaaaggctgtactccaccttggggggaatctggggatactcctcccgctgcaccaggccgtccgcctccagctccttcagggagaggctcagcgtcttgtgggagatggtccccaggcgccgcttcagctcgttgtaccgcagaacgctgtactccaccagccagtagagaataatcatcttgtacttaccgctcaccagggacatggtgtagccgaagcccgtctcttcaatcccggtgcccgccgtgatgcatggctccattttatgctctccttttggttagtatcttacaccgatgtgcgtactttacaaacagagaatatcataggatactggggacatcaagaaaaaaggagcgattctgatgtcaaagcagattctgattctcaacggcagcccccgcatccacggaaacactgcggcgctgatcgacgcgtttactgccggagcggaggcggcgggccacaccatcacccggttcgatctggccgctctggacatccacggctgccggggctgcctaggcggcggaaaggatccccggcacccctgtgtccagcgggacggcatggacgccgtgtatccggcctacatggccgcggatgtggtggtgctggcctcgcccatgtattactggagcatctccggacaactgaaatgcgcctttgaccggctgttcgcggtggcggagctgggccccgatctggcaaatccggtcaaggacgcggtgcttctgatggcggcggaaggcgacacggaggagaatttcgccccggtgcgggcctattacaaggcgctgctggactgcctgggctggaaggatgcgggcattgtatacgccggcggaaacatggccgccggggatatccaggcccatccggagcagctggaggccgcccggcagctgggcgcggcgctgtgaccgccccgcagttgtcctgacgagaacgagggcgggtgctggggcccccttgtgttttcgggtacgcggtgatataatgcagccatcaaaaccaaatgccgttggaaatcatgatgccgcccgccggttctgctttcacgactgacagccgcgccgaacgagccgcaaagatacagaaacggaggaatacagcatgaaagcgcacgtttttgcgctctgtctgtcgctgtccctgtgcctggggttgcccctgcccgcgttggcctttgccagccccttcactgatgtgcaggagacctccccctactatgatgccattctgtgggccgcagaaaccggcgtcaccaacggcaccacagcgtccaccttctcccccgatgcgccctgtacccgggcccagctggccgtgttcctatggcgggcggccggcgagccgaaacccgcgctggcagaacagcagttcatggatgtgacggatcccagcgcctactactacggagccgtccagtgggctgcagagaaggatatgtggggattcgggacctttgcgccccatgcggtgtgtacccggctggacgcggtattcttcctgtggcgcgccgccggcagcccggatatggagggagaatttccctttgccgacgtccccttcggggacggagacggacacggacagcccctctactggtacgctgaccaggcggtgttgtgggcggtggagaacggtgtcgccagcggtaccacggagaccacattctccccggacactccctgtacccggggtcagatcgccacattcctgtatcgggccgctcaggcagagacttccgcgaagtagggaacgatgaactgcaggcaacgaaaaaaggcggcggctgcctctggcagccgccgtctttcgtccaaagcgtccgggtacacgatgcgcccggacgcttccagttgacagggaatggaacaggatggagacctcgttatttgatccgctcgccggcggcttccttggccttgatctccttcacagcatccttgtgagagaggttgacacggcccttctcgtcaatgtcggtgaccttcacccacatcatgtcgcccaccttgcaggcgtcctccaccttctcgatccggtggtccgccagcttggagatgtggaccagtccgtccttgccgggggccagctccacgaaggcgccgaaggtcatcagccgcaccacgcggccgtagtacagcgcgcccacctccgggacgaacacaatgtcgtcaatgcacttcttggcggcgtcgcagctggcggcgtccacgccggcgatgaagatggagccgtcgtcgttgatgtcgatcttggcgccggtgtcggccacgatcttctggatgaccttgccgccggagccgatgacctcccggatcttggagggatcaatgtgcatggtcagcatcttgggcgcgtacttgctgacctccttgcggggctcggagatggcgggcagcatgatctgatccaggatctcgcaccgggcgtcataggtgatgtccagggcctccttgatgatctccatggtgaggccgtcgttcttcaggtccatctggatggcggtgatgcccttcttggtaccgcccaccttgaagtccatctcgccgtggaaatcctccacgccctggatgtcgatgaaggtggtgaaggagccgtcgtcgtcctggatcaggccgcaggagatgccggccacaggggccttgatgggcacgccggcgtccatcagggccagggtggagccgcagatggagccctgggaggtggagccgttggagctcaacacctcagacaccacgcggatggcgtaggggaactcctccacagaggggagcacgggcaccagagcccgctccgccagagcaccgtggccgatctcccggcggccgggggaacgggcgggcttggcctcgcctacggagtagccggggaagttgtagtggtgcatataccgcttctccgtctcctcccagatggtgtccagcttctggttggcggagagggtgtccagggtgcagacggaaagcacctgggtctggccacgggtgaagaggccggagccgtgggtccggggcagcacgcccacctcggcggccaggggccggatctcgttcttctggcggccgtccacgcggtggccctccagaagccactgcttgacgatcttcttctggaacttgtaggtgaactcctccaggtactggtccatatccggatattcctccagatacttctcgtgccacttctcgatcatggcgttccagcgggcctcccggatgttcttgtcgtcggtgtccatggcggccttggcctcgtccatgaagtccgccacgatcttgtcgaacagctcctggttgaaatccgcgtgaggatactcaaacttgggcttgcccacctcggagaccatctgatcgatcagggcgatgatcttctgattctcctcatgggccatcttgatggcctcgaacatcttgtcgttggggacctcgttggcgccggcctcgatcatgaccacctttttgcgggtggagaccacggtgacgtccaggtcgctgaccttgcgctgctcgctgtcggggttgaacaccagcttgccatccacaaggcccaccttcagggcgcccacggggccgttccaggggatgtcggagatggccagggcggcggaggtgccgatcagggcggcgatctccggcgtgcagtcgtggtccacgctcatgaccgtgcacatgacggacacgtcattgcggaagtcggaggggaacaggggccggatgggccggtcgatgacacggctggttaggatgcccttctcgccggggcggccctcccgccggttgaaggaaccggggatgcggcccacggagtacagcttctcctcaaaatctacgctcagggggaagaagtcgatgccgtcccgggggcggggcgccgcagtgacgcagcagagcacccgggtgtcgccgtagcccaccatgacggcggcgttggccagctccgccagcttgcccacctccatggtcagggggcggcccgccagctccatctcgtacttgtggtagttggggaattgtctcttggtgataatggttgacatgtctggtctcctttttcgtatgatctccgcgggagccaaaccatttagcacttgaagcaacggccggatccccggtccctccttcaactgctaaaagatcggcctgcccgcgggcgttgaaagaatgcgggaagagggtggtgcggcaaaggcgcaccaccctccacattgactcacttccggatgcccagcttggcgatgagggcacgatagcgctcgatgtccttcttctggaggtagtccagcagacggcggcgcttgccgaccatctgcagcaggccgcggttggaatgcttgtcctgggggttgttccgcatgtgctcggtcagcacgttgatccgctcggtgaggatggccacctggacctcgggagagccggtgtccccctcgtgggtgcggttggcgtcgatgatcgcggtcttctgttctttgcgcagcatgaaaatttccacctttcttcatatatacccgcagagctgcgccccgggatcggtgaaagtccacggagcgaagggctggggccgcacatacacgtgctgttgcatgataccacagaaattcccagttgtaaagataaaaatgtggagttttccccggatcggcggaaaattccccgtttttgtcccccgaatgggcttgacaaaccgcttcttctcatgataatctaaccgtactaatacggttaatacagttgcaggggctgcaccgcggccccgcggaagggaaggtgagcggatgatcagcctgaattatcgggactcccggcccatttacgagcagatccgggacggactgcggaagctgatcgtcaccggtgcgctgagcgcggacgaaaagctgccctcagtgcgggcgctggccgcccagctggccatcaatcccaataccatccagcgagcttataacgagctggagggcgagggatacatctactcggtccccggcaagggaagcttcgccgccgcgaacgcggcggcggactccgcccggcgggcggagctgctgacccaggtgcgggagctcctctccgagctgcggtatctaggggtaagccagcaggagctgctgaatctggtgaaggaggcgagtccgtcatgatcgaagtgaatggcctggtgaagcggttcgacggcttcgcagccctggacggcgccgcgctgtcggtgccggcgggcagcgtctacggcctggtgggtcccaacggcgccggtaagtccaccctgatccgccacctgacgggcatcttccgccaggacgcgggcacggtgcgcatcggcggcgaggatgtgtgggagaacgccgccctgaaggcgcggatcgccgccatccctgacgactggtactacttccttcagtcctccattcgggatatgatgcgcttttaccgcggattttatcccgctttttccatggagcggtatgaaaagctgaaggaggtctttcagctggatgaaaaacggcctatccgccgcctcagcaagggtatgcagaagcaggcggccttctggctggccctgtgctgcatgccggactacctgattctggatgagccggtggacggtctggacccggtgatgcgccggcaggtgtggtctctggtgctgtcggatgtggcccagcgaggcaccacggtgctggtttcttcccacaacctgcgggagctggaggacgtctgcgaccacgtgggcatcatggaccacggccgcgtgctgctggagcggtccctggcccagctgcaggacaacatggtaaagctgcaggtggtgttccccgacgggatgacggaggtgccgtcggacctgccggtgctccacgccagccaaatcggccgcatccataccttcatcatgcggatgagcgcccaggaggcagaggaccgtctggcggcgtacagtcccctgctggtggacgcagtgcccctgaccctggaggagatctttatttatgagctgggaggtgcggactatgcagtcaaagacatcgtactttaacgccacgctgttccgcaagaacctgacccggttctggccgctgtggggcctggcgtcctttatcggcgctctgttccctctggcggtgctgctggatatggtgcaccggggctggaacgtcctctccgcaccggacttcaccggtatgtactatgatgcggtgagcgccgtgcccgtcatcaatctggtctacgccgccctctgtgccatggcggtgtggagctatctatacaacgcccgcagcgtggggctgatgcacaccctgcctatccggcgggaagggctgttcctcaccaacttcctctccggcctctccatgaccctgattccctacgcggtcaccggggtcctgtgcgtcgtggtctccctgtgcggcggggcctttgacgccaaggggctggccgtcaccgtcctggcagtgctgggtgagagcttcttctacttctccagcgccaccttcgtggccttcatcaccggcaacgcctttaccatgccgccgctgtacgccctgctccacttcctggcggtgctgctggactggctgatctcctccttcgcccaagggttcatcttcggcttttccacttattacaccggggtggtggaatggctctcccccaccgtgtatctggtcaacaacgtccggtgcgcccggcagtatgtggaggtccagcagacgttccccgatggaacgccttacacctcccgccttttgacctccgcagacctggagagcttctggctgatcggcgtctacgccctggtaggactggcgctggctgccctggccctcatcctctaccgcaggcgccgcagtgagaccgccggcgacgtggtggccgtgggctggctgcggccggtgttccggtacggtgtggcagggctctgtgccctgctgggcggccagttcctctactccctgttctggtatggcttccagcagggggaatactacgacacgctgcccatggtggtctgcctgctggcggcaggggccatcgggtattacggcgcctccatgctgctggccaaggccttcaaggtgttccggggcagctggaagggcctgggcattgtgctggcgggctgtgccctggtctgctgtgtgctgcatttcgacctgctgggtgtggcggaccgggtgccggaggcctcccagatccagaccctggagatccggattgccgacaacacctacacgctcacgccggagaaggacgcggacctgctggagcaggtcagggccctccatcaaacggtggttgccgacgaatcctatgttcgggagatggaggcccgcagatcttccacctggtctgaggatgagacccccaacacggcatacaccggcctgaatctcacctatactctgaaaagcggcacccggatagaccgctggtactccctgctcattacccgggaccgactggcccagccagagacctatgattatctgctggaccagttcgtgaacagcgatactgtaaaagcccggcgcctccatctggatgacgatttctggacggtgagcggcggcagcctgtacattgacactcgtggcgagggctacgaactgggcagccgggagggtgacgccattctcaaggcagtgggccgggatctgaccgccgggaactggggggattacgactggttctccggcgacagcggcagcagctatgccatggacctggggctggactttgaaagtgcagacaaggagcgttacgactggatctctgtccatgtgacccctgccatgacggagacggtggactgcctggagcgcctcggcctggtgacgagggcagatctcgtcacctaccggcagctgtatccggaggactatggggcggacggctcctccatctggcaggaggttccgcacacgggtgagaatgcggtggtctacacggaggacaccacttccgccatggtctccccggcatgaggggggcaagaacgcggcggcgccggaatccccgttttgccgctttatgcctgctgctgatctttgccgctgtgggcgccgccgtctggctgtgggccggccggggccttccgggagagggcgtggaggtgccggactatgtgcaggcggacctcctcaccgtgaacccctggtcccggcccggcacgcccctggagaagatcgatgggattgtgatccactacgtgggcaaccccggcaccacggcgaaggccaaccggaactactttgaatccctgtcctctggggagacggagacatacgcctccagccacttcatcgtggggctggagggtgaggtcatccagtgcattcccctgacggagatcgcctacgcctccaatatccgcaacgaggacaccgtggccatcgaggtctgccacccggacgagaccggggcattctccccggccgcctaccagcaggtggtggagctgacggcctggctgtgccggaccttcgatctggatccggacactgatgtgatccgccactacgacgtgacggagaagctgtgtcccctctattatgtggagcatccggatgcctgggatgccttccgggcagacgttgcagcagagatggagcgccagaccgaagtctcctgacacggagcttcaaaaattttttggtcctccgtgaaacaaaacggcattcttgatcgtcttataaagcagagggagattttacatcaaagggggcctttttccatggagcaaaatccggctgccgccacgctctggcgcatgtgggtggataccaagcggcgcattgtctccttccacgaggagaaggactgccagctgctggagttccgcagccacgagatgtttttgagctgcgtggaccaatacgcctgcaagcaataccgttatcaatgaccctgcggggccttttcgtccatatcccggcggcttcagccgcctaaggaggctttttgatccatgtggcaaaaacgcgggccagcactgctgtgtctcctgctggccaccgcactgacggtctttgccgccgcccgctcccccgccgctccgcccggcgaagtccctcctccgcggacgctggaggaggaatccctgctctatgaagagacgccggtccagattatctccctgttggacctggagccggtggatacccgggcgtctgccaatcccgtccgggtggggggcggtaccctggaccctgtggaccaggcggagatggcatccgttctggcggaatgtacattaaaagacaacaccatcgtcaggctctacgttacagcggagggcctgatcgatggcgcttttttgcgccctggcgccgggtggatccgatttgcccgcctgtaccgcggcgcggaccagggccccaattacgcggaaaccgccgcccttaccgcctgctccggtattctggggcacgatggctttctgctgcggaccgacgggcactgctccggcgtttactcctatgattactactggttcgacactgccggggacttgcaggtcctcaccgccaggatggacccggtggccctggacctggacggggacggaacggcggaactggcctgggagatcgccgagtggcagggcgcgttttccttttacttccggcggacagacggcgccatctgttgtgtgacgccgtccgaatacatcgacgcatcgggcctgttcctggctgcggtggagcaggaggggcccggcccggtccggctgatctaccgctatcacggcacggacggggatcaggaacagttctgcgccgtgacgtttcgggacggcgccctggagattgagatggaccttgtctatgtcccggcctcgctggaagacacagtccccctttcagatcccacagcaggcggggccgccctgccccatgtgtccattaccggccccgacgggtggaccatggacggtgccggggaggcggcctatctggatctctggtcccttctctggaacagcccatatccctcctcgaagggggcggtgatcgtccccaccgatgcgccgctggatgcggagaccacctataccgtcaccttctccgatccgcagaccgggaactccttttcctggtccctggacgccgagggcatctgccgcctggacggcatagagggcaactgccggatggtgtccaccggtgtcggctccctgcccgcatactgtcacgatgtgctggagctctactgccgggccagccgcaccgcccggaactatgacgcgcagggccgatggctgggatgggatttggtcccggatacggtcgccccgggctaaaacgggtatcttttgcaaaaaccgccttgacaaacggcgaaaatgtgatacgatagtccggtaaatggaacattccggcgtggaaaaggacgagtaaccggcatccctcctgcaaagagagccgccgtttggtgcaaggcggacgggagctgcggcgaaaatcaccttggagcctcctgctgaaagacgacgcgagtaagcgtggacgattgatgcccgttacagcatcggcccgtggcagcgggctgtgaggggctgtttcccgcaagggcgcagcagcgagagtggtaccgcagagtgtttgcaaacgctttgtctcttgaaaaagaggcaaggcgtttttgttttctgaagggatgtgtattctggtgaaatgcccaaactgcggaaaggacatggaagagggaactctgcacacccggaattaccctttctggacgcagcaggagctccgattctttcgggcccccacagacaccgtggagctgggccccattggcgatgacaccaccagcgtgtttacacgggatccgttcccggaattttcccatgccatgctctgccgggaatgcggccttgtcaccttcccgtgcagcttgattgaaacctccaaaaaagatagcaaataggagctggaacaggaggagctttatgaagtgtccgtattgtcagcagcaaatgcaggagggctttctcagcagccgctcccccgttttctggtcagaggaggtgtcaggccttccccttcccgccaggaagggagatttgcttctgggtggaaagctggggctggttgtccgcccccgggcttacctctgccggagctgtaaaaccgtcattacccaatatcaataaaaattcagcaaacagaatggaaataggaggaaagatatggactacaacaagaccatcaatctgcccaagaccgacttccccatgcgggcgggcctgcccaagcgggagccggagatgctcaagcgctggcaggagcaggacgtgtacaacgagctgctgaagaagaacgagggcaagcccctcttcaatctccacgacggcccgcccttttccaacggcggcatccacatgggcaccgccatgaacaaggccctcaaggatatcatcacccgatcctacgccatgcggggctactacaccccctatatccccggctgggacaaccacggtatgcccatcgagtccgccatcatcaagcagaacaagctgaaccacaaggctatgagcattccggacttccgctccgcctgccatgactttgcccagcattatgtgggcgtgcagatggacgccttcaagcgcatgggcgtcatcggcgactgggagcacccctacctcaccatgaaccccggctttgaggctgaggaggtgagggtgttcggtgccatgtacaagaagggctatatctacaaggatttcaagcccgtctactggtgcccccacgacgagaccgccctggcggaggcggagatcgagtatcaggacgacccttgcaccactgtgtatgtgaagttccccatgcacgacgattgcggaaagctttccggttatgacaagctgttcttcgtgatctggaccaccaccatctggaccctgccgggcaacctggccatcgccctgcatcccgacgagtcctacgctgtggtgaaggcccccaacggcgaggcctatatcatggccgaggctttggtggagaaggtcatgcacttgggcggcttcgacacctgggaggtggcggagacccatcccggcgccttctttgagaacatgctggcggaccaccccttcctgcccaagacctcccgcctgctgctggcggattacgtcaccatggactccggcaccggctgcgtccacacggcccccggcttcggcgcggatgactacgagacctgcaagcgctacggcgtggagatggtggttcccgtggacgaccagggccgccacacggagtacgccggcaagtacgccggtatgaagaccgatgagtccaaccccgtcatcctggcggacatgaaggagagcggcatgctcttcgccagcgaggacatcatccacagctatccccactgctggcgctgcaagggccccatcatcttccgggccacgccccagtggttctgctccgtggagtccttcaaggaacaggccgtcgccgcgtgcgacgatgtgcgctgggtgcccggctggggcattgaccggatgaagtccatgatccgagagcgcaacgattggtgcatctcccgccagcgcaagtggggcctgcccattcccgtgttctactgcaaggactgcggcaagcccatctgcaccgatgagaccatcgacgccatctccaagctcttcgccgccgaaggctccaacgcctggttcgccaaggaggcggaggagatcctgccggagggcttcgcctgcccccactgcggtgccaaagccggcttcaccaaggagaccgataccctggacggctggttcgactccggttcctcccacttcgccgccatgaagaaggaccagggcttctggcccgccaccatgtatctggagggcctggaccagtaccgcggctggttccagtcggcgctgctgaccgccgtgggcgccttcggccagggcgcgcccttcaaggagtgcgtcacccacggctggaccgtggacggcgagggcagagccatgcacaagtccctgggcaatggcatggacccggcagagatcatcaaccagtatggcgcggacctgctgcgcctgtgggccgccagcgccgactaccacgccgacgtccgctgctctcacgagatcttcaagcagctcagccagaactacctcaagttccgcaacaccgcccggtactgcctgggcaatctggacggctttgacgccgaccagctgacggcgcccgcggagatggaggaactggaccgctgggccgtcacccgcctgaacgccctgatggagaagtgcgccaaggcgtacaacgactatgagttcctggtggtcacccacgcggtgaacgacttctgcgtggtggacatgtccaacttctatctggacatcatcaaggaccgtctgtactgcgaggaaaaggacggcgccaagcgccgcagcgcccagaccgccctgttcctgattctggacaccatgaccaagctgatggcccccatcctgtgcttcacctgcgatgagatctggctctctatgccccaccgcagcggcgacgatggtcggaacgtggtgttcaacgacatgaacaagcccttcaccgactacgccctggatgagaccgccatggagaagtggtccgccgtggaaaagctgcgcgacgacgtgaacgccgtgctggaggccgcccgggccgagaagaaaatcggcaaggccctggaggcccacgtggccctccacgctggggacgacgcggcgtctgccgccctggtgcaggtgatgggcctgaacctggcagagctcttcatcgtctccgactgccaggtctccagtgcggagcccgatgccgcctccactgtgggccagggtgccaacttccccggcctcaccgtggaagtcagcgaggccagaggcgacaagtgcgagcggtgctggatgcacagccccactgtgggcgccgacgcggatcaccccaccctctgcgcccgctgcgccgccgtggtgcggaaactcccccagttctgaccatccgaaaacagcagtcaaaaaggtcccggccattggccgggacctttttccatgtcgattcaattcccccgggcacgttcctttttcagcttccggatatcctctcccgcaaagggcagcagggtatattccccttcaatccgggaggcgatctggggcgtgtaccgccgggccagctctcccggcgtcaggtttgtgctgatgatggtggagcggcgctccatctggcgggtgttgacaatctggtacagggcgctctgaacgaaggatgtggtcatctcggatcccagatcgtccagaatcagcagatcgcagttcagcacccgctccacgtggtcgtcggcctcctcttcccgggtgaacttctgctgctcgaattgtgcaaagatgtggcccgcggtgtcataaaccaccgaatgccccttctcgctgacctcccgggcaatggcggcggagaggtgggtctttcccagtccgggtgcgccgaagagcaggaggttcgccgggcgcttgccgaactggtgggcaaaatccgcgcagatgtcgtagatcatctccatgtgctgccggacggtgatgccgatgttcgggtcatagcggtccgggtaccagtctgtggagaaggtgtcaaagctctggtgccccaggtccagcatccgggacagctccttctgctgctcccgggcgtaatagccccgcaggcagcggcacacccggccgttgcggtagcccgtgtccccgcagagggcgcaggcgggcgtctcctccagagcatcctccggcaggcccatcttctgcagaagctcccgcttctctgcctggaggctcagattttcatcccgcagcactgccaccgcggaccgggggtccgtgccgtggcggagcgcactggtgatgatgcggctcatggtggagcgaagctccccgtcgatctcccgcaggcggggctggcgggcaaaaatccgttcccgccgctcctgatactgggcctgccgcctctggcggtcctcctcgaaccgctggagggccaagcgcatcacctttccgtcatacgccaccgctcatcacctcctgttccgatgcagctcctgcatatatctgcgcatctccgtctccgtgtccctgggggactgctggtcccccctgcgggccgccgggcggtcccccgcctgaatctcctccaccgtgtggaggcccgcctcgttccacttcttcaaaatgccgttgcaataggcccacttcagctcatggcacttcagcaccgttttgtcataggccagggccacggcctccgggccaaagcccatctcctgccaggcgaggatgtacttctcctccgaaggcgcggggggccggtcccccagctgcagcgccttcatatactggggcaggaccccctggcgctgggcataggtccggagataggcatccgccgccgcctgggtgtcgatccccatgcgggcccaggcgtagccctccttttcgatctgcttcatgccggggcggcggccctcgccgaatcggcgctgcacccgctctacacagtggcacaccagcagatagaccacgccttccggcaggcccagatagtccgtcagtcccagcaggatccccacgtccggggtggtcagctttttgcccagcttcacctccacctgccgggtgagggcctggaacgccttgctgtgctccagccgctccgccacgtcggcgcgctgatagacgggccgctcctccgccggggcgggcggcgtctccgcgggggccaccaggcccagctcccgcagggcggtctccgccgcctcgatgcggccgcggtcccaccgcagctccccggccagggaccggggcggtaccgtgccctgccgccgcagcagcgccagatacagcagcgccgcatccccgtcgccccggtccagcagccgcttcaccgtggccgcggacagggtgacgctctcatccccggtatgtaccagacagctgggcatcctccgctcctcccctctttttgaacttcccctattctacacgattttccccggcaggacaagccccggcggaaaaagtccgcacctgccccagcttctggcggaaatgtgaatttttttaaaacctcccgtttttctgtggcgctgtcttttttcctatgatatactataatttatgataatgggcggcatctgccctgccgctgatcaatctaccgacgagggggaagttgtttatggcaaatcgcgtggtcatcaacatctgcggggaggagctcaccttcattgcggaggagtcctcttcttacatgcagcgggtgggcgcctacgtcaatgataaaatggcggaggtcctggacagctccaaagtgggccgcacggatgccgccgtcctcaccgccgtcaacattgccgacgagctcttcaaggcccaggccgcggcggagcagctccggggccagatcaaggggtatctggacgaggccggcagggcccagagcgaggccagcgagctgaagcgggaggtcttccgcctccagcagaagctggacgcccaggcccggaaggaccggggatgaggccggagctgctggcccccgccggttcgccggaggctctgcgggcggcggtccagaacggcgcggacgcggtgtacctgggctggggcgccttcaacgcccgtaggggcgcgaaaaatttttctgatgaggagttcgccgccgccctggcctactgccacgagcggggggtccgggtctttctgacgctgaacaccctggtgacggaccgggagctgccccaggcgctggagacagccgttcaggccggccgcctgggggtggacgcggtgctggtgcaggactgggggctgttcggcctgctgcgccggacgctgccggatctgcccctccacgccagcacccagatgagcctgttcacctccggcggtgcccgggagatcgccgccgacggctgcgagcgggtggtcattgcccgggagtgttcggcggaggacacccgtacgatctgtgaaaactgccctgtggaagtggaggtctttgcccacggggcgctgtgcatgtgctactccggccagtgcgggatgagcgccctgatcgggggccgctccggaaaccggggccgctgcgcccagccctgccgcctgccctacggggttaacgcccccgccaaaaaggcatatcccctgagcctgaaagacagctgtctggccggacggctggaggagatgggggccatgggcgtatcctgcgtgaagctggagggccgcatgaagcggccggagtatgtggccgtcatcacccgcatctacgcccgcctgctggaggagggccgtggtcccaccgccgacgagcgggcggagctggagcaggccttctcccggtccggcttcaccgactggtactggcagggcaaacacggcgctgccatgttcgggacccgtccggagaacgctccggaccccaaggacctctttgaggaggcccgccgggcctatgaacgggacagcctgcggacggtgccggtggatctctcctgctccgtttccgcgggggtgccctgcaccctgactgtgtcggaccgggacggccacagcgtcacggtcaccggcccggtgccggaggccgcccggacccgggccctggatggactggagctggaagcccgcctccgcaagaccggcggcaccgcctaccgctgcgacaccgtggtcaccctggtagatgaggggctgtccctctccgccagtgccgtcaatgccctgcggcgggatgcgctggcggctctcaccgccgcccgcactgcgccgcccaagcgccgggagctgccggtgccgcccctgccggaggccgactgcacagcggaggcgccccggctcaccatttccgtgacccggctggagcagctctcccccgccctgctggagctgggctgcccggcccgggtctatatcccgctggaagaggtctcccggctggaatctctcccgggagaaggcccggagtggtgcgccgttctgccccgggtctggcgggaccgggacgagcctgcgctccgcaccttgctggagcgggcccgggctctgggctttaccggtgttctgatcggaaatctgggccatctgcccctggtgcggggcctggacttccatctctacggcgattacggcctgaatgtgttcaattcccggtccctggcctatctgaaggacaaggagctggagagcgcctgcgtgtcctttgagctgcggttcgcccagatccgggatctgaaaaaggtgctgcgggcggaggccattgtctacggccgcctgcccctgatgattacggagaactgcctggtgcagaacgagaccggctgccgcctggaccggcagggcctttgtgtcccggaggacggcccctgccgctgcggccagcccaatgttctggtcgaccgcaccggcgccgcttttcccctgctacccgcctacggccaccggacggaaatccagaacagcaagccgctgtatctggcggaccggccggagcaccgcaggctgggactggcctatgcccgtctccgcttcaccacggagacagcggaggagtgcgtgtccgtcgtgcaaaactatctggatgccgcgcccgccgcgggggatttcacccgggggctttacgaacggggagttgaataatcaaatggcagcctgtatagatacccgctggttttggacccttttgatccttaccctctgcggagagtttctgcttccctgcctgctggcccggaaggatccagcctatcggcctggaaccatggcggtcagcgttctgggcagaaggggcggtcccgtggcccgtgtctaccgcctgtggctggcgtggctggggatatggcttttgaccactgccgccgtctacgccgtcggcgcggcgccggcctcccggtggctggcggcgggattggccgtgtccctgggcggcttcgccctgggcgccggtatcctggctgccctgtttcccaccgggctcaccaaagatctgtcggatcgctctgccctgatccacggcattgcctctgccctgggctttttcgccctgctgttcctacccctctggcgggcgctgctggcgctggagacagactccccggttatggcgtgggcctgctttgccgccctggggctggcgctggtattcttcacgctgtttgtcctctcggacaaagaccgcttccagggcacggctgtggcccgtgagggtctttgggaacagctctgcctggcggccatgtatgttcccttgttgctggatgcaatcgtccacctgatttccgccccctgagctgtacagccctccgcacggaaccttacactgataaaagcagggatgcatctgtccgcccatcagcgggacttgtctcctgcatccaatggggttaaccgcctgaaagcatcatatttcctatacaattcataaattttattctatattatacaaaccgtatttattttggagtttgacatggaagagatcaaggtaaaatatttcacagatgacatcgacgagctgtgctacgtggagggcaagtccgactggatcgacctacatgcggcggaaaccgtgactatgaaggccggggagttccggctgatccccttgggggtggccatcgccctgccggaggggtatgaagcccacatcgtcccccgcagctccacctttaagaattacggcattctgcagaccaactccatgggcgtggtagactacacctaccggggcgacggtgaccagtggcggatgcccgcctacgccacccgggatgtgaccattgagaaaaacgcccggatctgccagttccgcatcatgaaaaaccagccccggctgaccttcaccaaagtggagcatctggacggccccgaccggggcggcttcggctccaccggaaagtgagggcgcggccatggcaaagatcgtactggcctccggctctccccggcggcaggagctgctccagcgcatcggcatcacggacttcgacatccgggtcccccggacggaggaaacctatcccgccggcctctccccccgggagacggtggagtacatctcccgggagaagtccgacgcggccgccgctctctgcacaccggaggaaatcatcatcactgccgacaccatggtgtttctggacgaccagcgtctcggcaagcctgtggacgaggcggacgccctgcggatgctgacggccctccagggccgccgccacacggtatgcaccggcgtcaccgtccgccggggcggcgagatcctgacggagagcgcgtccaccgacgtgtatttccgccctgccgcggaggcggagctctggggctacatccgcaccggcgagcccatggacaaggccggggcctacggcgtccaggggctgggtgcccttctggtggagcggctggacggtgactttttcaacgtgatgggtctgccggtcctgcgcttgagccggatgctggagcggttcggcgtccatttcttctgctgaccaacgatcaggagggtttcctttgaagaaattttttcgggaacacggcatctgggtcctgttcgccacggcggtgatcgccgtgagcctgtccctcatgtcctttttctccaacacctcctctcccctgtccaatctggcggggatcatcgcctcccccttccggtcggcctacaccgctgtaacaggctggatcacagacaagcagaactactatcaggacgtcaccgccctggaggaggagaacgccgccctgcggcgggaaaacgccatcctcaaggcccagaaccgcctggctcagaccaacaatgaggaaaacgcccgcctgcgggatctgctgaacctgcggccccagaactatgacctggagctggagacggcctccgtcacggagcgcacggtcaccaactggacctcctccctgacactgaacatcggcacggatcacggtgtcgaagtgaacgactgcgtcatcgacgagacgtatgccctggtgggtgtggtcagcgaagtgggactcaactggtgcacggtcctcaccatcgtggacacggacacctccctgggcgcccaggtgttccgcaccaaggacctggggctggcggtgggcgacttctccctgatgcgggagaaccgcctgcggctggactatctgcccgcggactgtcagctgctgggcggcgatctggtggtcacctccggcctgggcgggtattatccctccggcctctctgtcggcacagtggaggaggtgcagctcagcgactccggcgccgcctcctacgcggtgctggaacccgccgccgactttgacagtctggtggaggtcttcgtcatcaaatcctttgacatccagacctgatgggacggatgtccccacctgttcggaaaggaggctccggcattgctggcgcggaatgagaccattttcaaatgggccctgtatgccggggccacggcagtgttcttcctgctccagggggcggtgctccagcggatcaccctctggggcgtcattccctttgtgttccccatcctggtggcggtcctgggtatgtatgagggtcccctccccgcctccgtctacgccctgacggtgggagtgctgtgcgacctgctgctgccggcgtccatcccctgcttttacaccctgatctttcccgcggcggggctatgcgcggcgctgatctcccagagcctgctgccggcaggctttctctgtggggtggtcacctccgtgctctccttcctccttacagacgcctttcactgtatcgtgctgtgggctggggggaaagccgcctgggctgcgggggcccaagtcttcctgcgggaggtctgcgtctccatcctgctggtggtcccggtggtgctgctgttctctgccgtgttccgccgcacccacctggacgactgagaaggaggctgtctatggaccataaggaagcccatcatctgcgcctgtatgttctggcagccctgtttttcattgtggctgcggtctacatcggggtcctgtacgatacgcaggtgaacaattacgactattactacgccagctccgtccgcagcatcgcccggtcggagaccgtggaggccgcccggggcaacatcaccgaccgaaacggcaaggtgctggtgtccagccgctcctcctacaacctgacctttgacgcctccctgctggagaaggacgaagatgccaacgagtccctcctgcggctgctgcagttgtgtcagagccgggggatcaactgggtggattctctgcccatctcccgctccgcccccttcgcctacaccatcgactccctggacagcgccgccaggagccgctttctcacctatctgaaggatctggacgaggccgcgaacgccctggccgcctatctgctggagcatcctgccctgctggagaccacggacgaggagggcaacagggaaaaccccgccgacgacatcctggcggatgaggagctggatcaggccagcaaggcccaggccctgctggaggagctgacctccagtcagctgaccggcgccatgctggaagggtccggtctctccgccacgcggctgatcgccctgatgcggaaggatttcggcctctccgcctctttttccgtggaggaggcccggctggtgctgggcgtccagtacgagatccgcagccgaaatctcgccaggacggacccctatgtgctggcggaggacatcgacgcggagctgatctccctgctgaacgacggcgactacgccggagccaagatcaccccctcctccgtgcgggagtacgagacgacctacggggcgcatatcctggggtatctcggaaaaatcaacgacagtgcggaaaaggaggccctgggcgagggatataactggaacgactatgtgggcaaggacggcgtggaggcggcctttgaatcccatctcaagggcaccgacggcacccgggtggtctccctgaacgaggacggcaagatcaccggcgagtattactccaaggagccggtgcccggcaacaccgtggagctgaccatcgacctggacctccagcaggcggcggaggacgccctggccgccaccatcacccggatgaccggggaggatggggatgagacccggggcggcgccgtggcggtggtacaggtgggcacgggggaagttctggccctggcctcttatcccacctatgatctctccacattccgacagagcagcatctacgcggctctctacaatgaccctgcccgccccttcacaaaccgcgccaccaacgggacgtacgtccccggctccaccatcaagcccctgacggccgtggccgcgctggagaaggggatcattactcccacccaggagatctactctcccagccggtgggtctatcccaacgaccccacccacagcggcgccaactgcgccggcggcaaccacggtctcatcaatgtgacggaggccatcaccaagtcctgcaactacttcttcgcggagatgggataccgaatgggcatggacaccttccgggagtatctgcaggccttcggcctgggagagcacaccggcattgagattggtgattacgccggtaccttgcccagcaatgaggcgggccacgaccagaccccctgggccaccttcggccaggccaaccagctctactcgcccctccagcttgccaactacatcgccacactggcctccggcggacagcactgcaaggcccacctgctgaaggccgtgaagtcctatgacaatacggaggtcctggctgtgggcgacacggcgcccaccaacgtggtctccatgcaggattccacgctggaggcggtgaaaaagggcatgctgggctacacccagcccggcggctctgtttacaatgccttccggaactgcgtggtcactgccggcgccaagaccggcacctccgagctgggcggcaaccagaccgaaaacggcgtcttcgtctgcttcgccccttatgacgatccggagatcgctgtggccatcgtcattgagcacgccacctggggctccaatctggccaccacgggcgtggatattctcaacgcttactttaccgccgacgagaccggcagtgccgtcaccggcgaaaaccaactgcttccgtaaggagacgcatccccatgagcgaaccctttgtctttgatccccgctgcgacctgtgcaaggagcccttcggcgccgtcccctgcggaacggcggtcacctttcactgccgccccctggccacggagggcttttcccactgcgcactggtcctctcctgtgagttttccggcacacagcgggagcaggaactacccctggagggccccgcaggcgagcggctttgcttttccgccacactgaccgcgccggagctgcccgatcttctctggtatcacttccgcttctggcgggaggacggcaccggctgtctgctggacaagaccggctaccgcagtgacggacaggccgtgtcctggcagatgacggtctaccaggaaagccgtacgcccggctggtttggggcaggtgtgacataccaaatttttccagatcgtttctgccgtctggtacccgtggaccctgcgggtctggttggccggcgctgggtccacgaggactgggatgacacgccggagtggcggccggatccggatggggagatccgcaaccgggacttctttggtggcactctggcagggatcacgtcgaaactggacgatttgaaggcccttggtgtcaccacgctgtacctctgccccattttcgagtccgcctccaaccaccgttataacacagcggactatacccgcattgaccccatgctgggcacggaggccgatttccgtgctctctgcgcccaggcccgacagcgggggatgcgggtgattttggacggcgtgttcaaccacaccggatcccagagcatgtacttcaatgccgacggctattaccccaccctgggcgcagcccagagccaggattctccctggtacagctggtaccggttccaccactggccggattcctacgactcctggtggggcatccgcactctgccagcggtggaggagtcctctccctcttatgtggatttcatcattgacggcaaggactccattatccgccggtggctgcgtgccggagcttccggctggcgactggatgtggcggatgagctgccggactggtttctggagaagatccgcgccgccatggaggagacggcccctgacagcatcctgatcggcgaggtgtgggaggacggctccaataaaatcgcctactcccagcggcggcggtatctgctgggcagtgagacccacgggctgatgaactaccccttccgcacggcgctgctggcctatgtctccggcggggatgccgatgactttcgggaggccatggagaccctgcgggagaactatcctccggcggccttttactccgccatgaactttttgggcacccacgataccccccgcatcctgacgctgctgggtgcggaccgaacgccggacaccaaggcggagcgggcctcctaccggcttttgccccgggagcgggcagcgggcatcgccaagctgcggctggcggcgctggtgctgttcaccttccccggctctcccatgatctattacggggatgaggccgggatggagggctttgaggaccctctgaatcggggaacctacccctggggccgggaagaccgggacctgctggcgtggttcacccggctgggtgccctgcggaatgcgtatccagccctgcagtccggcaccatctcctggctctacaccgcaggtcctttgttgatttttgcccggcagaacggtgaccagcggctgaccacagccgtcaacgcctcaccggactcccacactgtcacactgctgtgggaaggcgctggccccactgatctcctcaccggagatactcttccctgttccggcggtgttctgcacttgcagctgccgccctggggctgccgtcttttgctgtgaccggctgcggatgtttcacgtgaaacatccgcggctctttttctgccgtttgtttcacgtgaaacattttctcttccttttctctgcttttccgcttttctccttgcaacggccgtccacgcttgctataataaatgagcataagcatttctaccttattgggtattttcagaaagtaggtgcccacgtggcaaaaaccattgcgattgtgaatcaaaaaggcggcgtggggaaaacaaccacctgtgtgaatctcgccgcggccttgacggaggccgggcagcgcatcctcctgtgtgattttgatcctcaggccaattccacttctggaatgggcgtggacaagacggtctccaagggaatctacgatgccctgattggcgaagttccggtggaggacgccctggtgcacaccaaatacggcgatgttctcccctccaacaaggcgctggccggcgccgggatcgaactgatcggcatggagcgccgggaattccttctgcgggacgcgctggacaaggtaaaagatcgctacgacttcctgttcatcgactgccccccctctctggaactgctgacgctgaacgccctctgcgccgcggacgccatcctggtaccggtgcagggcgaatactacgctctggagggcctcagtgacctgatgaacacggtgcggatcgtccgcaggtccctgaatccccggctggagctggacggcgtgctgctgaccatgtttgacgggcggaccaatttggccttgcaggtggcggaggaagtgaagcactacttccccggcaaggtctatgccactgtgatcccccggaacgtgcgcctcagcgaggcgcccagccacggcaagcccatcaccgcctatgatcggacctcccggggcgcggaggcctacaccgcctttgcagcggagtttctgaaaaagcaaagcgcctgattctctggaaaggagcgttcccatggcatccaagaaaccctccggcctcggccggggtctcggcgccctgctgggcgacgacgtattgaaggcggagagcaccggcagcctgtacctgcccatttcccaggtggaaagctgttcctcccagccccgcaagcactttgacgaggcatccctggcagagctggccgactccatccgagagcacggtatcatccagcctcttaccgtccggaagctggcctccggctactatcagatcatcgccggagaacggcgctggcgggctgcgcggctggcgggccttcaggaagtgcccgtcattgtcatggaggccgatgaccgcaaggccgccgagctggccatgatcgaaaacctccagcgggaggatctgaaccccatagaggaagccgctggcttccagtccctgatggaaacgtatcacatgacccaggaggaggccgcgtcccgagtgggcaaatcccgcagcgccgtggccaacgcgctgcggctgctgtccctgacgccgccggtggccaagctggtggaggagggaaagctctccgccggtcacgctcgggcgctgctgcccctctcccccgccctgcaggaaaacgccgctggcgccgtgatctccggcggcctctctgtccgccagacggaggccctggccaagcggctgagtctggaaaagccggaaaaagcccccgcgccgaagggaatcgactatgccgcggaggcgcagaaggagttgagctccaagctgggccggggggtgcggatcgtcaccggccgcaaaaagggccggattgagctggaatactacggcattgacgacctcaacgacctgctggaggccctggcgatgctccgggcaaagcaaatgaaaaccccctgattgggaaaggatgatctgccatgaaatttgaaaagcgcagcggagacgaagcggagacaccctcctctgctccggaggaaacgccctccaccgggaaaaagcccgttgtcatctatatcatgatcctgttcatcgtggcctttctgctgatggcgctgtcctttctaatgcaccagcggagcaactccgaggtgcttggggagcttcaggactccgtcactgccatgcaggaggtacaggccacgcaggacgccctgctggacctgcaaaaccagctggatgaagcccagaccaccatcgacgcgctggagtcctccgcagaggaaactgacgccgccttggcggaggcccagcgggagaaccaggcactgctggctctgtacaccattcagcagcagtattctgcgggagatctggcgggctgtcaagccagcatcgacgcctttgaggcgtctgaataccgggacgcactgcctgagactgctgaagagggtgtcacccctccctcccagcggtatgcgcagctgaaggaagcagcagaggcccgttgagcagtcaacggctggccattgtttcacgtgaaacatgcaacatcaataaattgaggagagaatcatcatgctggatatcaaatttatccgggagaatccggatgccgtccgtgaaaatatcaaaaagaagtttcaggatgccaagcttcccctggtagacgaagtcctggacctggactccaagcgccgggccgccattgcggaggcggatcagctccgctccaaccgaaacacactcagcaagcagatcggcatgctgatgggccaggccaaaaaggaccccgccaagctggcggaggccgaggctgtcaagcagcaggtgaaggaacaggcggaccgcttggcagagctggagaaacaggagacggagctggaggaaaagctccatcacaatatgctgctgatcccccagatgatcgattcctccgtgcccatcggcaaggatgacagcgaaaatgtagaggtccagcggttcggagcatgtgaagtccccgacttccccattccctaccacgtggatatcatggagtccttcaacggcatcgacctggatgccgccgggcgggtctccggcagcggcttttactacctgctgggcgacattgcccggctccatgaggcggtgctggcctacggccgggacttcatgatcgacaagggcttcacctactgcatcccccccttcatgatccacggcaacgtggtggagggcgttatgagccagacagacatggacggcatgatgtacaagatcgaaggggaggacctgtacctgatcggcaccagcgagcactccatgatcggccggttcattgaccagatcctgccggctgagagcctgccccagacccttacctcctactccccctgtttccgcaaggagaaaggtgcccacggcatcgaggagcgtggcatctaccgcatccaccagtttgaaaagcaggagatgatcgtagtctgtaagcccgaggagtccaaggactggtatgagaagctgtggcggatgtccgtggagctgttccgctctctggatattccggtgcggcagctggagtgctgctccggcgacctggcagatctaaaggtcaagtcctgcgatatcgaggcctggtctccccgccagcagaagttctttgaggtgtgctcctgctccaatctgggggacgcccaggcccgccgtctgcgcatccgctataaggatgaaaatggcaaaatgcagctgtgccacaccctgaataacacctgcgtggccccgccccggatgctgatcgccttcctggagaacaacctccaggccgacggcactgtccgcatcccccaggtcctgcggccctatatgggcggcaaggaattgctggtccccgcggaaaaatccaatttgtaattttttgttttatttatacaaatcgttgaacccgtttccagccgttggagcggcgcgcagccctgctccggatcattcggtgcccctccagcggctccattcgggtcaaatctctgaaagccttgggctccaatggttacagcatacgtacacaggcgcccattcatttcacacaggagagtcccatgactgaacttaccaaaaagaccaccggcttcctggcggagtttcgccaattcattgccagaggaaatgtgctggatatggcggtgggcgtcatcatcggcggcgccttcggcaaaatttccacctccctggtcaacgatatcctgatgcccctgctctccctgctcaccggcggcgcggacttctcccaatggcaatgggtcctgcgggaggcggtgtatgacgccggcggcagcgaagtgcgcgccgctgttgccatcaattacggctcttttctctccactattctggacttcctcatcatcgcctttgcggtcttctgcctcatcaaagctatcaaccgcttccaccgaaagaaggaggccgctcctcctcccccgccccagccctcgcaggaggaagtgctgctggcggagatccgagacctgctgaaggagaggacatgatggaacagcgcctgcaatcgggtcttgccgccctgaacctccctgtggagggaatccctgctctggtccggtatggggatctgctgatcgagaccaacaaggtgatgaacctcaccgccattacggacccggaggatgtggccactctccactttttggacagcgccgccctgctgaccctggagtccttttccggaaagtccgtggtggacgtcggcaccggtgccggttttcccggtctgcccctgcgggtgctggagccctccatccgcctgacgctgctggactccctgaacaagcgcatccagttcctggagacggtgtgccgggagctggacctccccgatgtggcctgcgtccacgcccgggcggaggaatttgccgcggagcaccgggaaacctttgatttagcggtctcccgggcagtggcggccctgccggtgctgtgtgagctgtgcctgccgctggtaaagcccggcgggaagttcctggccatgaaatccgtggagtcagacgcggagctggccgcctcacagcacgccattgcgatcctgggcggcgccgtggaggcggtccgggactatgccatccccggtacagatgtgcgccaccggctgatcgtggtggaaaaagtgaaaaaaactccggaaaaatatccgagaatgtttgcaaaaatcaagaagaatcccttataatacatttgtgagcagttgaaaggaagtgccgcctgatgacgtctccaggacagtgcattgccgtcgcatccggaaagggcggcaccggaaagacctcctttacggcgggtgtaggcgcggctctcgccctatccggccggcgggtgctgtgcctggactgcgacatcggtctgcggaatctggatctggccctgggcctgtcggaccggacgctgatggacttctcagacgtggcgcagaaccgctgttccctggaactggccgctgtggaacaccccaagatccccggccttttcctgctgaccgcgccggcgcgtccccatggtcgcccggtgacggagatccagatggcagatctgctgcgggaggtacgcaggcggtttgacttctgtctgctggacgcacctgcgggcctggggcggggctttcagctggccacctgcgccgcggaccgctgcgtggtggtgaccactgcggacgcctcctccctgcgggacgcccagcacaccgtcatggagctggatcgcttcccatcaggcgccctgcacctggtggtgaatcgggtgcgcaaaaagctgctgcgccagctccacgccaccattgacgatgccatcgacaaggccggcctgccgctgctgggagtggtccccgaggatgacgccctgccgctgtgtatgaaccggggtgtgcccatcctgctggcggacggccagagcgccgcgactgcctaccgcaacattgcgaaacgcctccagggggaacgggtccccctgctgcggatcagatagagaaaggagtctttcatgaacatcgccctcatgtcccacgacaacaagaaggagctgatggtgcagttctgcaccgcctacgccggcatcctgtcccaccacaacatttacgccaccaacaccactggccacatggtggccgacgccacgggcctgaatgtccactgcttcctgtcctacgcccacggcggcagccagcagatcggcgcccggatcgcatacaacgaattcgacctggtactcttcttcaacgaccccaacaacgaggctatggtgggagatgtttcctatatctcccggctgtgcgaccagaacaacatcccctttgccagcaatctggccacggcggaggcgctggtactgggtctggcccggggcgatttggactggcgctgcatcgtcaatccctccaaccgtcccatcgcttgacatttttccccaaagcgcatacaatcaccctgttgattcatttgcaccgcgcggatgccgcagcagtactccaatcgccggccccacagagaggggcgcaccgctgagagcggcccggccggcctggacgaaggacagcggcggagcgggggcggagacgcccacggcaccctccccgtagcacaggaggcaaaaaggaggctctataggccttgaatttgggtggcaccacgaagcggaatcgctctcgtcccaaagccgcgggacgggagcgttttatcattttgcgcccgcggtgcatcccgggcagcgacccgcatcccacgaaaaaggagttttgacgatggctaaaatgaccccacggacactgtccggctttatggaactgctgcccggaccacagcagcagatggagcggatcatggagatcctccgccgtacctattccctctatggctttacccccctggacaccccggtgatcgagtccagcgaggtactgctggccaagggcggcggcgagacggagaagcagatctaccgcctccagaagggcgacgcggatctggcactccggttcgacctgacggtccccctcgcaaagtatgtggccctccactacaacgacctgaccttccctttccgccggtatcagatcggcaaggtgtaccggggtgagcgggcccaacggggccgcttccgggagttctatcaggcggacatcgacatcatcggagatggcaggctctccatcatcaatgaggcagagatccccgccatcatctacaagaccttctccaccctgggactgaagcggttccagatccgggtgaacaaccggaagatcctcaacggcttctacgccatgctgggcctgacggagaaatccggcgacatcatgcgcaccgtagacaagctggacaaaatcgggccggaaaaggtgaaggccatcctcaccggcgacctcaccgtggctccgtccgacgccgacgagatcctgaagtttatcgccatctccggcggaaacgacgccgttctctccgctttggagggctaccggggccggaacgaaatcttcgaccagggtcttgaggagctgaacacggtggtccggtatctggcggacttcggcgtcccggcggagaatttcgccgtggacctgaccatcgcccggggcctggactactacaccggcaccgtctacgagaccaccctgctggatcaccccgagatcggctccgtctgttccggcggccggtacgacaatctggcggagtattacacggaccgccagcttcccggcgcgggcatctccatcggcctgacccggctgttctatgtgctgggagaacagggtatgctgaatccggacctgcccaccgctccggcggatgtgctgatcctgcccatgacggaggacctgtccgctgccatctccctggccaccctgctgcgggaaaacggcatccgcgcccagctccactgcgaggaaaagaaattcaagcagaaaatcgcctatgccgacaagctgggcatcccctatgtgatctttctgggggaggacgagatcagctccggcgtggtggcctgcaaggacatggccaccggcgagcagacaaagctggaacccgccgccaccgtctaccgcattaaggcgggtctcgcggaacgggaaaagggcaccgtcatccagaagtaattccctgccccacagagatactttaacgccgaatttcacctgcggagacaaccaaatcgcatctcaagcagtccaagcagaaatattttctataaaaaatacaagcagtatttactagaggtgtttctatgaagaaccggaagcgtgtctgggtgcctttgttggtcctgctgctggtcgccgcgatctggtacagccgcccggtaacattgccggacctgatgaagggccaggaactccaagagatcaacgtcctgatccgctccctgggggactggacccaagagccagagaccgccacggtgtcggtgcccctcacttccccagagggggcggccctactggaacagctccaagacctctccttctgccgttctctgacagacccgctaatcaagccccttgctcaggcggtgaatgccagccatgggtccgtctcctatgagtcgggagactggatgttctccctctccctcgccggtacagatggcgattttgctgtgctgaactttaccgtccgggagtggtcctatgctgctccgggacaggcggacttctacggctgcaccgtcccggacggagaggccgttggcaggggccttggggaacagctctgggctctggcagcgaaatatgatctcaattcgtaatattttttatataaatttctatttgtaatcacatttccacacagaaaggaatccacaatcatgacacagaatcgcacccatacctgcggagagctgcggctctccgacgccggcaaggccataaagatctgcggctggctggaaaacctccgggaggtaggcagtgagctggccttcgccgtggtccgggacttctacggcaccactcaggtggtggcggagaccgccgacatggtggccctgctgaagtccatcaacaaggagtccaccatctccgtggagggcaccgtccgagagcgggacagcaagaacgccaagctgcccaccggcgagatcgaggtggtgcccggcaaaattgaggtgctgggccgctgccagcacaacgagctgcccttccccatcaaccgcagccgggaggccgacgaggccacccgcctgaagtaccgctatctggacctgcggaacccggcggtgaagaacaacatcatcctccggtgccaggtagtggccgccctgcggcaggccatgacagagcatggcttcctggagatcaccacccccatcctgaccgcctcctccccggagggtgcccgggactatctggtgcccgcccggaaccaccccggaaagttctatgccctgccccaggcgccccagcagttcaagcagctgctgatgacctccggctttgaccggtacttccagatcgccccctgcttccgggacgaggacgcccgggcggaccgctcccccggtgagttttaccagctggacatggagatggcttttgcctctcaggatgacgtatttgccgtactggaggacgtgctgccccccatctttgccaagtacggcaaatacgaccgggccagctccgcgcccttcatgcgtatcccttacaccgaggccatggagaagtatggctccgacaagccggacctgcgcatcgacctgacggtgcaggacgtcaccgacctgctgggcgcctgcggcttcggccccttcgagggcaacgtggtgaaggccgtggtggtcagcgatttccacgagacccggaaattcatcgacaagaccctggcggatgtggaggtggtctccggcggcaagccctactggttccgcctggacgagaacggtgagatcgtgggcggcatcgccaagtttgtccagcccatcaaggagtctgtggtctctgccctgggtctgaagcccaacgacttcgtggccctgtccgccggcaagctgggcgctgcccaaaagaccgccggcacgctggtaaagactctgggcgccgccgtccccggtcacatggacaaggagcagtacgccttctgctggattgtggacttccccatgtacgagatcggcgaggaatccggcgagctggagttctgccacaaccccttctccatgccctccggcgggctggaggtcctgctgaaggcggagcggggcgagatcgatcccctcagcatcaccgccgaccagtatgacctggtgtgcaacggcgtggagctcagctccggcgcggtccggaatcatgacccggagatcatgattaaggcctttgagatggtccggctgggcgaggaggacgtaaaggccaagttccccgccatgtacaacgccttcacctacggcgcgccgccccatgcgggcattgcccccggcgtggatcgcatggtgatgctgctggccggggaggactccatccgggagatcatccccttccccatgaacaagaacgcccaggatgtgatgatgagcgcccccagcgaggtcacgcagaaacagctggacgagctccacatcgccatcgtcaagccccaggactgacctgtaaatccggaataaaaaagagacggaccgcatttctgcgttccgcctctttttttccactttccgacatcatcccacgcataccaccttcatgactccggaggtcaaagcctgtcaaaccgctggccctgggtattgcaccagaaacggtcctccgccagaccggagacgtaataggtcagcggcccggagaaatcgccggattcgtggatatctatctccaacgacggacaccagcccatgccgccgcggtcccgcagccgggcagaaaaggccgtttccccatagtagtccaggtaggggattaccacccgacaggtgccgctctggaagatcagcagctcctgcaaggtgctgtcacaccagatgccgtcaaacgccgccaaatccgcaggccaggcagagggctcctcctgccagagcgtggtctccgtccccagaagcctggtgaaaaagggggacagggaccggaccgccgcccggtaggtctcttctcccagctccggcgcctcacctgctttccgcaggctgtccgccctgtccagaaccgctgcaaatgccactgcggaggctgccggttccgcctccatctcctccaaaagggccaggaccacgtcctcctccgggatcgtctgtccagagcccgcccagtccagcagggtccgtgccgccgtctccggtgtctcctccagcacttgtacagccaccgtctcccaggtggtctccgagaccgtcccctccccctggggactccccagcagggcgatcattgccatcagtagagccgccatccgcatgttgtcacacgctcccttccatttttgccagcataccacggggtccgtttggattccaccacaaatcagtaacagtcttttctttcgggcctggatgtgatacacttcatatcatcactccacagcagaaaggagctcttatgaaacgactttttacaattctgctggctgtcctctccctgttgagcctgactgcctgcggcggctcccccacagaggagacttcccaggaacccttagtggacattcagccccaggagccggaggcgcccccggaacccacgccggaggaactggccgcccaggaggtggaggacctgcttgcctccctgaccctggaggaaaaggtcggccagctgttctttgtccgggtacccgacacagacgcggtctccgacgtgagcacctatcatctgggcggctacatcctcttcggccgggatacggcggacaaaactgccgatgctttgatccagaccattcagagctatcaggacgccgcggctgtggacaccggaatcccgctgctgatcggcgtggacgaggagggcggcacggtggtgcgggtcagctccaatccccatctgcgggcctccaagttcccctctcctcagaaagcttatgcctccggcggcatggaggccgtgctggcagatacccgagagaaggacctccttctctccgccctgggcttcaacgtgaacctgtccccggtggcagatgtgtccaccaaccccgccgactttatgtatgaccgcaccttcggccaggatgcggccgccacagcggactatgtggcccaggtggtctcgcagatggcggaggacggtatgggcagcgtcctcaagcacttccccggctatgggaacaatgtggatacccacaccggtatcgccgtggaccagcggccgctggagtccttcacgtcctccgacttcctccccttccaggcgggtatggagagcggcggcggaaagaccgctgtgctggtctcccacaatatcatgactgctgtggatggagatctccccgcctccctgtccccgaaggtccacggcctgctgcggacggacctgggctttgacggcgtggtgatgaccgatgatctggccatggaggcagttgcagcgtacagcgccgacggggccgtggcggtgatggccctggaggcgggaaacgatctcgtcatcaccaccgactaccgcacccagatccccaaggtcctggaggcgctggaaagcggcgccctgtccgaggagaccatcgacaccgcctgccgccgggtgctgacctggaagcagaatctggggctgctgtaacatacctcccggtcccatcccctgacgaaaggaagttttccacatggaaacggaaaaactctattaccaagatccctacctcaccgccttcaccgcccgggtgctctcctgtgaaaaatccaaatctggctgggccgtagtgctggaccgcaccgccttctacccggaggggggcggacagccggcggaccacggcactctgggcgcagtccaggtcacggatgtccatgaaacaaagggcgtgattttccacacctgtgacggccctgtggagatcggcacccaagtggcgggggccgttgactggccccgccggttcgaccacatgcagcagcactccggggagcacattctctccggcctgctgtgctcgctgtaccactgtgacaacgtgggtttccacctgggggccgacacggtgaccatcgactacaatgccgagctgacctgggaacaggtcatggccgcggaaaaggccgccaatgaggtgatctggcaggacactccggtggacatcaccttccccgcgccggatgcgctggcccgtctgaactaccgcagcaagaaagcgcttaccggccaggtgcggatcgtggccttccccggggcggactgctgcgcctgctgcggcacccacgtgcgccgggccggtgaggtggggattatcaaggtcctctcctgccaaaagtttcgggagggggtgcggctggagattctctgcggatcgcgggcctaccggtatctctcccaggtatacgaccaggaccgcgccgtggcccagctgctgtctgtaaaaccccaggacaccctggccgccgcagaacggcaggcggaggagctggccgccgccaagcagcggatgacggagctggaggatcagctcttctccctccgggcccaggccctgacagaccggggagatctgctgcttttggagccccccacgcggccggacggagccagaaagctggcagacgcagccgcaaaggcctccggcggtctggcggcggtgttcgcgggagcggagtcctcctacgtctatgcccttgtccaggccgatggggcggacatctctcccctggtgaagcggctgaacgccgctctttccggccggggtggcgggcggaacggctttgcccagggcagcgtgcaggcggaccggaccgccatctatgactttttccgcaaggaggggattgaatgtcctacgtgctgatcgaacagaatcttgaggaagaggacgagccccggttcatctacgcggaactggacagcgggcgccgggaggtccggcgggtggaattctaccccaatggcctctgctttgcctacggcggcgactacggccgggaggaggctctctctcctgccccctacccggaggacctgcggacgctgaaccgccccggggaagtcaccgcccgcgccatcactccggccgcgttttgggagatctggggacaggcccaggagcggccggacggctttatggggatgtttgcctgatgagaagaagcatttgttttgccgggggctgcttctggggcatggaggccctgtatcgccgcctgcccggcgtactggatgtcaccgccggctatgccaacggagacacggcagatcacgccaactatgacgatgtctgcaccggccgcaccggcttccgggaggcggtgcaagtggcgtatgaagacgggactgtctccctgccccacctgctctttgtcttttttgccgccatcgacccggagactcccaaccgtcagggaccggacgtgggcagccagtaccagaccggcgtatactggatggacccggcggacgagggcatcatccgctccatcgctgccctggaggccgcggccgttcccttcttcgccgtggagctgaaggccctggcatgtttctatccagcggaagaattccatcagcggtatctggaaaagcacccacggggctactgccacgtggccccctggaaactggccgccctgccggacttccccttttccacaaagacctatacccgtcccgcaaaagagctgctgcagacctggaaagaagccggagaagtgtctttctgacgggcgggggaaactctgttttccacaggctgaccatatttgtgtaaataaaagcgccgcaggcggatgcctgcggcgctctctttgattcagcttccgtcactggacgggctcgttcatctctgcagtgatatactgttggccgtacatggcgtcgtacagcacatcctcccgcagctgcagcagctcccgggcctcgtcggagagagccgcctcctccacgccggcgctgggcgtccccgtgccatccacaaagtacagctccgtgttggtgagacacacctggctcaccttctccagcagcgcccagtaccgggtgaccggctgaccggtcagctccagcagctgggggccaatggcggtgatgctgctgtcccgccgggtgcctgcctgcccctggagcaaggccgcatcattggcccagatcagatagtccgtggaatacaggtcgctgatctcctccggggtccagcctaccgtgtcgttatccgggcagaggcccaactttgtgtacactgtgtccccgtccgtcatgaacagattgggcctgtgatccccgaagaacaccacgatggtaggctcctcgctctcccgcagggcgtctgtcagatctcccagggcctgatccgcccgggtgatgccctccagcatgacccggacgatggccatatcctcctcgccgagactttcgctggtgacgccgatctgacactcatagttgaatttctccgggtcaaagggctggtggttctccatggtgataccgtagagaaacgcccgctccccgctgctgttgatgtcctccatccggtccagcatggcctggaagaagtaactgtcccgcatgtaatacccgccgtagatgcccccctcccagggaaagtccagagcctggatatctgcggagaacagaaggtcggaaaagcccagcctgggataggtcaccgttcgattatacaggctgtcgttatacccatggagcatctccgcccggtagccgctcttggtatactgctccggcagggcgtcgaatttctcataggcgtcatcctccaggaagcagatgttcgtcccagcaccgaagtccagctccgtaacgccatacagcatggacatctccagatagccggtgccgtagcccagatagtggctgtggaatgtgccgctgatgccctcgctctccagggcatggaaattctccaggggatcccgttcatactgaaggcccggcagccgggtcagatcgtagaaggactccgactgggccacgatgatgttgggctgcaccgccgctgcgggggcgtcggcgctgtcctctgtcaggatctcgtcgatccgggccaggacctgctccatgtaggcttcgctgtatccctccgggctcttcttggcctgaagaaagcagtcccgccagagactcagcgtcaaaccgtaggtgtcgtggctgttggccgcagccaggcgggtgttcacatccacctgaaaaaccgcccccgccgcctgggctccctgtgtggaaaacagcccaatggtcagggccagggaaacggaaaaagtgacaaagcggcaccgcccggtgagcagcgtcagccgccgcaccagaatcagaatccccacacacatccccagggcgatcatcgccatccagaaatccaccggcgggcgcagctctcccgccacaccggccacctctcccacctgtgccgccaggccgaagtccgccagcaccagtggcgtgccgttgatagctgtcttgaaatagtccaccagggacagcaccagtccggcaacccccaccagtatagcggaaagccacaatctacccagcagcgcccccagggtgaacaccacagcgccgtaaaggacgccggtcagcagcagataggtgggccatttcacgaaccactcccacacgatggagagggaaccggtaaccacccactggacggccaccgccacagccagccccatgcaaaggctgccgcccagaaacatgacccagcgcagccacaccggccccaacgcccggggccgcttctgtctcttcaacacttctacctcatttcccaggttataaaaagggtcgcggggatttcccgcggccccgataatctccgatcagtatgccagtttctccgccagatagctcttcagctggtcgacgggcagccgcacctgccctcccgcaaaagcactgcttttgcgggacccctgtcccatctcattcctcggacggaatgaatccgccctccggcgagattttgcctccggcaaaatgctcggacgccgcgccgcggcgttctggagcaggatcgacacaggcatcaatatgccagtttctccgccagatagctcttcagctggtcgataggcagccgcacctgctccatggtgtcccggtcccggacggtaacgcagttgtcaccagccttatccgcatcgcccacggtgtcgaagtccaccgtgatgcagtagggcgtgccgatctcgtcctcccggcggtaccgcttgccgatggaaccggtgtcgtcaaagtccaccatccagtccttgctgagctccgcctggatctcacgggccttttcggagagcttcttagaaaggggcagcaccgcgcacttaaaaggcgcgatggccggatggaaccgcatgacggtgcggacgtcgttcttttctgcatccaccacctcttcatcgtaggcttccaccagcagggccagggtcatccggtccgcgcccagggagggctccaccacataggggatatagtgctcgttcttctcctgatcgaaataggtcagatcctggccggagtgctcctgatgctgggtcaggtcgtagttggtccggtccgccacaccccacagttccccccagccgaaggggaacagatactcaaagtccgtagtggccttggagtagaaactcagctcctcgggctcgtgatcccgcagccgcagattctcctccttgatgttcaggcccttcagccagtcgtggcagtacgtccgccaatactggaaccactccagatccgtgtccggcttacagaagaactccagctccatctgctcgaactcccggatgcggaaaatgaagttacccggggtgatctcgttgcggaaggacttgccgatctggcacacgccgaagggcaacttccggcgggtggtccgctggatggcgggaaagttgacaaaaatgccctgggcggtctccggccgcaggtacacctcgttggcggtgtcctccgtgacgccctggtgggtcttgaacatcaggttgaacttgcggatgtcggtgaagtcgctcttgccgcagccagggcagggcacctggttgtcccggatgaatgccaccagctcctcctgggtcatggcctccacgttcacgtccatgccgtgctcctgcacatagctctccaccagcttgtccgcccggtggcgcatcttgcaggccttgcagtcaatcagaggatcgttgaaggtggatacgtggccgctggccacccacacctggggattcatcaaaatggcggagtccagtcccacgttgtagggattctcctggacgaatttcttccaccaagcccgcttgacattgttcttcatctccacgcccaggggaccgtagtcccagctgttggcaaggccgccatagatctcactgccggggaatacgaatccccggttcttacacagggccacgatcttctccatggtcttctcggtgtttttcatgttccattctcctttacggcggcccggacagaaaaaacgccccgagccggttttcggctcagggcgaacaatcagtccgtggttccacctgaattcgcgcctggctgacgcgcactcttcacccggtaacggcggggaccggcagggcatttccgccccgcggctccagggtgcctgttcttccgcctccccgcaagggctcacaccagccgccctctctctttgccggggtatgggggatacttctccctgtcactgccttttggatatcgtgagaactgtatcacgttttcatcagaatgtcaaggccgagtcccacagaagccgcaccaggcagggcactctctcacccggaccctggtctgatcccttatccgaagcgcagaaaaaggccgccctatagggcggcctttcccaatttactttttctcccgatcgtaggccacgatcacccggcggttgggctccgttccggtggagtgggtcgtcacattgggcacatcctgcagcgccgtatggatcacatgccgctcataggcattcataggttccagtgtcacgctgcggcggtacttggtgaccttggcggccaccttccgggccagatgctgaagactctgctcccgcttttcccggtaattctccgcgtccagctgcacccgcacccggccgctgccgctgcggttcaccgcatagctggtcagctgctggatggcgtccagagtctcgccccggcggccgatcagtgcgcccagattcttgccctccaggatcaccttgtagcggcccttctccagcagatagatgtggatctccgcagcactctccatctgctccagcaggccggagaggaacttacggatggcctgggccttctcgtcatccacttcttcgcccagtgtctgcacgggagcggactgccgggtcttctcctccggggcgggcgccggcgcctccgccggcttgcgctcctgtctgggcggcttttccgctttggggggcttaggccgctcttcctgcggcttctccttgggggcaggcgcgggggcgagaatctcctcttcctcctccgggccgtagctcacccggaccttggccgggcagctgcccagacccaggaaaccggactttgctcgctccaaaatctcaacggacacatcgtcccggtccaggccaagctgccgcagggcattctggatggcctcatcctcggtcttgcccgttacatcaataaactgtctcatggcgtaacaagctccttactgatcatcatagcggtcctccttgtaggaccggccgcgggcatagggccggtctcccacacggcccgcttccgtggtgctggtggccgcctttttggccttcagggccttggcctcctgcgccgcctgccgcttttccttcaggctcttcttctgtgcggcatgctgacgctgctgctcctgaagcagcttggcctcctccatccgcttctggcggtccgcctggatcatctcctgccgggcgtcctcctcttcctgcagcttcttggtgtagaacttgcccaggaccatctcctggataatggagaacgcgctctgggcagcccaatacacgcccagggcggcgggcacgatgaaggcgatgtagatagacatcagaggcatcatccacatcatcatcttggtggagccgttggcagccgcagtctgggcggactggctcatgctgaccttgctcagcaggaagctgaacacaccggaaatgatgggaatcagaatcagtcccaccgcggccagcgtgatgcccgtggagaggctgctgacagcgctccagggcgtctggatcaggtcaatccccaggaagtggtagtcgatgttcacccagccgggatgctctgcaatgaagtcggggaactggctgttaatgatgttggaaatggcgatctgctcatagccggggctggccacgatctcaataccggcgccttcaatcagacttctggccgcattcactaccgccagaccggcgtccttgccgccgaagttcatgaagtagacaatgggctcccggatgatatagtacagggccatcagaatgggcaggggcagaaagctccacaggcagccgctcatgggattgaagccctcttcctggtagaacttctgcatctcctcctgcatcttcagctggttgttggcgtatttcttctggatctcctgcattttgccggacatgcggctcatccgcaccatgctcttcttagacttcatctggaagggcagcaggatcagcttgatgaccagcgtgaacaggatcagggacacgccgtaggaccctgtcaggttgtaaaacagccgcagcagggccgcaaacgggatacaaattgcgtatccgatggttgaaaacatagatgcttcctccaaattgtaatgggacccgggctttcagcgcccgcagagcggagcatttccgctttcggcctgtccgcattccgcagtgccggctgacagacggccggacagcagcacagggtccggcagaggggcttgtcccctcctctcatgggaccggatcatatcctcccttgtgaaacggattacagcgcaggatacgccggaacgccagccagccgcccttgagggcgccgtacttctcaatcgcctccagcgcatattgggaacaggtgggaatataccggcagcaaggcggccggtacggggagatggccacccggtaaaatttcaccagggccagcaggacctttttcatcatgaccggtcctccagcagctccagcttcctgcaaagacgcaggaaggtatcgttcagctccttccaggaggcagtcagggtccgtcccctggctaccagaatcatgtcgtacccctggcggagccgtccggaattgagccggtagacctcccgcaggcggcggcgggcccggttgcggaccaccgcatgacccagcttgacggataccgtcacgcccaggcggttgtgccccagccggtttttccggcagtaaagcaccatccctccgcccacggcggaggcgcccttctggtacagccggcggaactcataattctctttcagggtcactgcccgcttcatgctgccacctgccttctcccatttgacacatctgacacaaactcaacgagggacggaggaatcacagaattcccgccgtccctgaagacgttgttcaagtgtctcccgcacggtccgtttctcagtaggacagacgggcgcggcccttggcgcggcgacgggccaggaccttgcggccgttggcggttgccattctcttgcggaaaccgtggaccttctggccgtgcagcttcttgggctgataggtacgtttcgttgccatgttgagacacctcctgtcagaattgcggcccttttgagggcggcacttactcgacaccgcctaaagggcggcgcagtaaacagatcaagaccgcatgatcgcggcgcaaccgatattatacagactgtttgaaaatatgtcaactaaaacttaaaagttttgcgaaatttccgtatttttttcttttttcagttgcgattctcgaaaatttcaaaatctggtgtcccatgctgtccaaagccgctatatcttgttgcctgtgcaggcggatctccttggttcttattattagaataagtgttgtaatttccggctgtctttggtataataaagcgtactgccatgtctattttttactagagagaggtgtttccttttgaattccgtcgccgacgtgtgggacaatgtactatcccagctgaagggcgagctctcggagaccaccatcgccacctggttcgacgaattggaggctgtggacatccagggcaatacgtttatcctccactgttccaacgactttaaaaaaggctatatcgagtccctgttcatgaaaaacatcaaggcctcccttcacgacattttctccacggattttaaagtgaagattctggacgacctggattacgcagagctcaaggataactgcccgcaccgccagagtgagcggttcacttccgcggagttcacattcgagaccttcgtggtgggcccttccaacaagctggcttatgccgcctccgtctccgtggcggagcatcctgctcagaactacaaccccctgctgatctacggggactccggcctgggcaagacccatctgatctatgccatcgccaacgtcatccgccggaacgacccccggtccaagatcgcttacgtcaagggcgacgacctgaccaacgagctggtggatgctatccgggagggtaagactgcggagatgcgggagaagtaccgtcaggcggacctgctgctggtggacgacgtgcagttcatcgccggcaagaagcagacgcaggaggagttcttccataccttcaacaccctgtacgagtccggccggcagatcgtcctgacctctgaccgtccaccctctgagatgacccagctggaggaccgcctccgcacccgatttgagtggggactgctggtggacgtagcgccgccggattttgagacgcgtcttgccatcgtgaaaaacaaggccgccctgctgggcatggagctgccggacaaaatctccgcctacatcgccgaaaacgtcaccgccaacgtccgccagctggagggcaccatcaacaagatcctggcctacaaggatctgctgggcaacgacacggacgaagaaaccgtcacccgggccatccaggacatgctgcgccgcagcaacgagtatgtccccacgccggaggccatccttgagtatatctccaaatattacagtctggacgagtccgtgatccggggccagcagcgggtgcgggacgcggtctccgcccggcagattgccatgtacctgatccgctccatgacgaatctcagtctggatgagatcggcaaggtctttgataaccgggaccactccaccgtcctctactccatccagcagatcgaaaagaagatgaagaaggacgctgcgtttgccgaaatggtgaaggagatcaagacgaatatcaactccaagcggtgaccagatttctccacatcttccgtggaaaagaaaaacttccctgtggaaaatggtctttcaaaaaagtccgtggaaaaatccccggatccttccacatcccctgtggagcctcaaaatccgacagcgcaagcctttccccgccttttccacagcttttttccctacggctgctttttctaaaaaatacatttctttctttttcaaaagagcgattccgacccatatcttcaaaccccgactagagaggaagtgcatgcatgaaattctcctgtgaaaaggcccttctgcaaagcgccatcgccgtcaccagccgcgccgtggcccagaagagctccattcccgcgctggaagggctgctgctccacgcggacagccggctgaccatttccggctacaacctgcagaccggcatccgtacgaaggtctccgccgatgtaacggaacctggcgagattgttttaaacgcccgcctcttcggcgacatcattcgccggatgcccgacgatgtggtggttttcaccgcggatgacaaacagctggtccatctctcctgcggcgatgcggactttgatatcctgggcctctccgcggcggattacccggagctgcccatggtggaggatgatttttccgtctccatccaacagaagctgctgcgtgccatgatcgaggagacggccttcgctgtctccaccaatgagagccgccccatccatactggtgccctgttcgagatcacggaccagggcctgactatggtggcggtggacggattccgtctggccatccggcgggagccgctggaaaagatcgacggcggcgccttttcctttgtggcgccgggcagcgccctgggcgaggtgaaaaatatctgttccgacgtggaggatctggctgccgtgaccctgggcaaaagtcatattctatttgaggtaggagacacggagttgatctgccgccggttggagggagagttcctggattataagaatgccatcccacggaagaatcccatctccgtcatcgcggacaccaaggccctgatcgagagcattgaccgcgtcagtgtggtgatctccgaaaagcagaagagtccggtccggtgcctgtttgaccacgacaaggtgctgctctccgccaagaccggaaacggcgaggccaaggatatctgccgcttgtccggtgacggcggcgggctggagatcgggttcaacaaccgctatctgatggaggctctccggtacgcgccggcggacacggtgaagatcgagctgaataccggcgtctcccccgccatcatcgtccccacggagggggaggaaaacttcctctatatggtcctgccggtgcggctgaagagcgcggagtgagcagatggagacgatcacgattcacacggagttcatcaagctccaggacctgctgaaattcgccaatctggtgtcctccggcggcgaggcaaaggagcggatccagggcggcgaggtcaccgtcaacggcgagatctgcaccatgcggggcaaaaagatccgccccggagacgatgtggccttccagggcgcccattatacggtggcctatgcggattcttgagctggagctgcagcatttccgcaactactccggccagcgggtatcctttgacccggactgcaatgtgatcttcggggagaacgcccagggcaagaccaatctgctggaggctatcgtctacctctcctgcgggaaatccccccgggccaggacggaccgggagatgattgccttcgatgcgcccgccgctgtgctggaagccgggatctccgcccgagaccgggagttccgcacccgggtggagctgtaccgggaccggcggcggaagatgtgggtgaatcaggtgcctgccaaaaacagcgccgccctgagtcaggtataccacaccgtattcttctgcccggatgacctgtatctgatccgggagggggccgccgcccggcggcgcttcatggacaccgcactctgccagttgcggccgagatacgcggccgctctggcggagtaccaccggctctatgaccacaagacccgcattctgcgggacagtgaggagcggccggatctcctggagctgctgccggactttaacgaacggatggttcgtttcggcgcagtgctggtccactaccgccggcagttcgcggaggcgctgaaccgctatgccgctcgccaccatcgggagtgctccggcggaagggagcgcctggagatcacctatcagactgtttcctccgtcacggacccggcggcggaggtggaggtcctcacggagcagctccgggcccacatggaatcccaccagggggcggagcgggcctcccggatgtgcctctccggcccccacaaggacgatctggtcatcaccatcgacggccgggaggccaaatcctactcttcccagggtcagacccgcaccgcggctctggcgctgaagctggcggagcgggaaatctaccagaacgccaccggcgaatacccggtgctgttgctggatgacgttctcagtgagctggatccccgccggcaggagttcgttctcaaccgcatcgcggggggacaggtgttcattacctgctgcgaagatgatcggctgccggtccttctgggcgggaaggtgttccatgtgaaacagggcgccatcgggtgaagaacaccgcgaccaagcgtgagcgcaggagccctgcagtacatcagctgtctgcgggaagtggattttctctttttgacagcagaaaacagagtgaaagcagggaaaggcagaatggactggatttggtatcatgcgctgcccctcattgtctttggcgtcccgctcattggatttctgtgggagctgctggtggggctgctctgccggaaaaactgctggctgctgtctcttccggtgctggcgggcgcattgggactggctctctgtctgctggcacagtcctccctttcgctgtccttcctgctggggttctgggcagcttatggatgtgcgctcctctttggatggagcctttcccagttgcggaccacaggggatctccgctggaaaaagtggatatgccggggaatggcgctgtgctccggcgcggcgctggctgtcggcttcggcgtactgatcttgcacgagatgcgggcggccaattacaccatggtggaggaagtcatcagtgaggaaaatgcgctgtccgagatcccggagctggccattacggatacggaccggaagattctctccgctctggaggcgagttcttctgttcaggcagccatcggcgaaggggataaagtcacaattaacggcttggttccggcggaacacgcggatgtccagaagattttgtcagaatttctggaggaagggcagtatcagttttccgaggtcggcaccatcgcgcagttcggcgaaatcggcactttgtactatgatattttcgaccgggaagagggcatcaggatcattacagaaaagctgagtaccggggactttcgaaagacagtcgccgtttacagcggagatccagaggaaaaattgtccgtggtcatttatgaaaattatgaaggaacgttccaaaagatagtccggcagcgcctgtggttttacgatttactccaggttccagagggggcatgaacgatgtacctgcatatcggccaaaacgaaatccttcccgaccgccgggtcatcggcatctttgacctggacaaatgcagttacggcaagcggacccgggagtatctggcggccgcggagaaagagggggtggtgctggatgtgtccggcgagatccccaagtccttcgtggtgtgcgatcacccctatcaccggcagatcgtgtacctcagccagctgaattccaccaccctccagaagcgggcggagagcggaaacctggaatgagccagggggagatcccatggcggcatatacgacactggtaaaccttccccactttttatcctcgttcacatccctggagacaggaactctggtgctctttctggcggcagtgttcacggtgcagctggtcctgctgcaaaattacagcaggcgccggagacggctggtccagcccgctgcttctggtgtacagtgcgttccttctgctgctgtattttgcctggatggcgctgttcaccgccctcctggctctgctgacatatctgattttgaagaaattacgcacttgattccaacttacatggttcagggcaaggagaaacgggccggaggcggctccggcccggctcttcttgccttggaacggatatgaatatcctgaaaggagaacctgcatggcagaaaatgaactgttgaactccactgcggtggacacggccaacgagtacgacgcatcggaaattcaggtgctggaaggcctggaagccgtccggaagcggcccggcatgtatatcggctccacgtccacctccggcctgcaccatctggtctatgagatcgtggacaacgccatcgacgaggcactggccggctactgcaccgacatcctggtgcgaatcaacgagggggacaccatcaccgtggtggacaatggccgtggcatccccgtggacatccaggcccagaccggcaagcccgccctggaggtagtgtacaccgtcctccacgccggcggcaagttcggcggtgggggctacaaggtctccggcggtctccacggcgtgggcgccagtgtggtgaacgccctttccgaatggctgacggtccaggtccaccgggacggacatatctatgagatgaagttctccaggggcaatgtgacccagcccatgaccattgtgggagatacagaccacaccggcaccactgtcaccttcaagccggacccggagatgttcgaggatacggagtacaattacgataccctccacacccggatgcgggaggaggcgttcctgaacgctggcctgcgcatccgcactgtggacgcccgccccggacgggagcaggaggacaacatgtgcttcgagggcggcatccgggagtttgttacctggctgaacaagagcaaggatgtgcttcacaacgacgtgatttacatgtccggagcccgagaggactccgtggcggaagtggccatgcagtataacgacggctacaacgagacgatcctctccttcgccaacaacgtccacacgccggagggcggcatgcacgaggagggcttcaagcgggctctcaccaatgtgctgaacgcctacggccggaagatcaagctgctgaaggacgacgagaaggtctccggcgaggactgccgggagggcctcacctgcgtcatttccgtcaagctgacagaggcccagtttgagggccagaccaagtcgaagttgggcaacagtgagatccggaccctggtgaataacatcgtctccgaaaagctggagatcttcctggaggagaacccccaggtgggccggatgatcctggataaggctctcactgccaatcgggcgagagaggccgccaaaaaggcccgggaatccatccgccgcaagacggctctcggcggcgccgccatgccggataagctgcgggactgcaatgagaacaatccggagctgacggagctctatatcgtcgagggagactccgcaggcggctccgccacccaggggcgggattcccggttccaggccattctccccctgtggggcaagatgctgaacgtggagaaggcccgggcagacaaggtctacggcaacgacaagctccagcccgtcatcacggccctgggcgcgggcatcggggatgagttcgatctgaacaggctccggtatcacaaggtcatcatcatggccgatgccgatgtggacggcgcccatatccgtactctgctgctgaccttcttcttccgcttcatgcggcccctgatcgaggagggctatgtctactccgccgttccgcccctgtataagctgacccgtggcaagaccacccgagtggcctttgacgacatccagcgggagaagatcgccgccgagatgcggggcgacaaccccaacgccaagatcgacatctcccggttcaagggcctgggtgagatgaacccccatgagctgtgggagaccaccatggaccccaccacccggacgctccggcgtatcacgctggatgacgccgtggccgcggacgagacctttaccatcctgatgggcgagaaggtggagccccggaaggaatttatcgagcgcaacgcccaatacgcggtcaatcttgactattgatccgtagggcggctgccctcggccgcccgtccgatcagatatgcctttgcgggccggcgagggcgccggcccctacaaaaaggagatacgatacatgagcaaaaagccccaatacgatcctgaggagatccggtaccccgaacagaagatcgtggagtcaccgctggtccccgagatggagaaatcctacattgagtacgccatgagcgtcatcgtgggccgggctctccctgacgtgcgggatggcctgaagcccgtccatcgccggatcctctacgccatgtacgaggatggcctcacggtggacaaacccttcaaaaagtccgccacctgcgtgggcgacgtgctgggccggtaccatccccacggcgatgccagcgtctatgacgctctggtccgcctggctcaggatttctccatgcgctatcccctggtggacggccacggcaacttcgggtccgtggatggcgatcccccggcggcctaccggtacacggaggcccggatgtcccggctctccgacgagatgctgcgggacattgaaaaggacactgtggactgggaccccaacttcgacgagacccgcaaggagccccgtgtcctgccctcccggtttcccaatctgctggtgaacggctccagcggcatcgcggtgggcatggccaccaatatcccgccccacaacctgcgggaggtgatcggcgcctgcatctgcgtgctggacaatccggaggctcagctcagtgatctgatgcagtacgtcaaggggccggacttccccacccggggcatcatcatgggtcgcagcggcatccggcaggcctatgccaccggccggggccgggtggtgatccgggcccggcatgagtttgaggagttcggcaaggaccgcacgcgcattgtcatcaccgagatcccctaccaggtcaacaagcgtatgctcatcaagagcatggccgaccaggtggaagacaagcgtctggacggcatctccgacatccgggacgagtccgaccgggacggaatgcgcatcgtcatcgagctgaagcgggacgccaatccccaggtggtgctgaaccgcctgttcgcccagacccagctgcagaccagctttgccatcaacatgctggccctggtgaataaccagtctcagcccaagatcctctccctgcgccacatcattgacgagtatctggccttccaggaggaggtcattatccgccgcaccaagtacgacctgcgcaaggcccaggagcgggcccacctgctggagggtctgctggtggctcaggacaacatcgacgaggttatcaaaatcatccgcagcagctacgacaacgccaaggagaacctgatgtcccgcttcggtctggacgatgtccaggcccaggccattctggatatgcggctgaaagcccttcagggcctggaccgggagaagctggaggcggagtacaaggagctggaggaaaagatcgcctacttcaaccagctgctctcctccgacgagctgctgcgcaaggtgctgaaggaggagctccaggccatctccgacaaattcggcgatgaccgggtcacggagatccaggatgtggaggatgagatcgacatcgaggacctgatcgaggaggagcagtgtgtcttcaccctgacccaggcgggctacatcaagcggacacctgccagcgagtacaccgcccagtccaagggcggcatgggcaagaagggcatcaccacccgggaggaggactacgtggtggatgtgtttactgcctccacccatgactatatcctcttcttcaccgacaccggcaaggtctaccggaagaaggggtatcaaatccccgagtccggcaaggctgccaaggggaccaacatcgtcaacatccttcaggtggagcagggcgagcggatccaagccatgatccatacccggtccattgaggacgacggccgcttcctcttcatggttacccggaacggcacggtgaagcgcctgccggccaatactctgaagaatctgcggaacaacggcatccgtgccctgcggatggaggagggtgaccagctgatcgctgtccgggagactgacggcagccagaagatcctcatcgccacccatgacggtatggcagtctgctttgacgagaacgatgtgcggcccatgggccgggacgccgtgggtgtgcggggtatccgcctgcgccagggcgactacgtggtgggcgccgcccgtgccaaggccaatcatgcggtgctggccatcacggaaaacggctacggcaagcagacgccggtggaggactatcggatcaccaaccggggcggcctcggcatcaagaactacatggtgacggacaagaccggccccgtggtgggcatcaaggtggtggacggcacggaggacctgttgctggtgacccaggcaggcattctgatccgcaccccggtggacagcatccgcaccgcgggccgggccactcagggcgtcatcgtcatgcggttcaaggaggagggggatcacgtgatctccctggcgctcacagaccatgaggagggcagcgccgaggccgaggaataagaccgtccggagccggggcgaaaacgcttctgccggaatgtttatcagaacacagggggagctgttcccgaggagacggctcccccattcaaaaccatcttccaaaaggatttcatgatgaaaacagtcaccatctacaccgacggcgcctgctccggcaatccgggccccggcggctggggcgcgattttgatgtacggcccccacagccgggagctctccggcggagaggccgccaccaccaacaaccgcatggagctcaccgccgtgatccaagcactgtccctgctgaaggagccctgcatcgtggacctctggtccgattccaaatatgtgatcgatgggctggagaagggctgggccaaaggctggaaggctaggggctggaaaaaagctgacaagaagcccgccctgaatccggatctctgggacaggctgctgtccctgacagaggttcattccatccgttaccattgggtcaagggccacgcggagaatgcgtacaacaaccgctgtgatgagctggcggtggcggagagccagaaatacaagtagtatgtcttctgtaccccgcagaacggggcaggcgccgtacaagcggttcgacgacggcaaagccacggcggagtcggaatttcctctcgccgggcaaatcaaaaaaataggtcccccaccggctctgccgggcgagggaccatgcggagagcgcatacagcaaccactgtgatgagctggtggcggccggagatcctgatagcccccgcttccttctcatggggagaaaaagtgagagaaacagacctatcttccaaaaaaagacaagtttttctaaatttttccgctgtttacgaaaacagaaaaaaacattcacaatctgttcataagaaaaacataatttagaaaaaattttcggatatctttataatcaagcaaagggtcctcccaaacccgatgcgttttctccctcctaaaaacacacacagcacaaaggaccgccacatggcggtcctttgtgtgtttacggctggatcagctccttgctgagatggacgatgaagtcctgcacattggtgacgatgccccgggcggagaggcttccccggtcactgagtttgttcacggcaaattctgagatatccacgcagtagaaatacacctgccgcacggttccgtctgccagcacccggtaggagggggtcatgtttccggcggcgatggtgtgaagggcagtggccatgcagatcaccgtggtggcggagcggatctctgcccgcatggcgtcctgagcggcatagacgtctgccagcaccggcggcagaggcccgtcgtcccggatggagcccgccagtatgtacgggacgccgtgccgttcgcaggtgtgcagaatgccgttttcgatctgctccgctttcagaaaggcgggaatcgatccgtggagccgcacccggttgatggtgtccagatggttgtagtgcccgttgggctgactttcctgcgtgtagatgttctgccccagagcagtgttgaggtaggctgcctccagatcatgggtggccagcgcgttgcccgccagcacggcatggacaaagccgcctgcgatgagccgggagaaggcgttgcgtgcgtcgtggtcaaaggcgaaggcgggccccatcacccagactaccttgccgtggtcccgttcgtggcgcagcagttcatagagctcgtcatagtcccgggaaaaggcggtctcccgggagcggccctgccggaaggcaaacacatctctggcaacccggcgctcccggaagccgtccgggtggacgaggatcccctcctctccctgttctgtgcggccgacggccaccagatctccctgccgcaggcggcggaattcccggacgtcgatgcggccccgatcccacacagccacgcagtccatccggctctcccgggccagatgccactgccctgcgattttgaagtattccggaaagatgctcatggcgtggaaattctccggcgccacgccgtcccggggcgccgggtgaaagacggcgtccggtgcgttttccagtgcgggtgtggaaaagaccggcggaaaataggggcgcagctgaaacggcataatggcgttcctcctttgaaagatggtgccgctgttccacccggatgcagagaagaaaagcccggggaccgctcctcgcaatacctgcggagcggtctccaggcccatcggcattcccatccggcaagagggcgcgggaggtttgattgcattcagaatatcagaatgccgccaaaaaaacaaggccctttcttgtaaatccgggccgtcgggtgtagaatatccaacatacaggtttttccttcaaggaggcttttcaacatgagagacggttttatctccgtggccgcaggtacccccaaaatccgggtggcggactgccgctataacgcggaacagatttttaccctgatgcgggaggcggacaagcagggggtgaaggtgctggctcttccggaactgtgcctcaccggctacacctgcggagatctgttcctgcaggacacgctgctccggggcgccgaggagggccttcagaccatcctggaggctacaagaaatctggagatcgtgacggcccttggcctgcccgtgtgggacaaatgggacaacaaattgtataactgtgcggctattatacaaaaaggagagattttggggctgattcccaaggtctatctgcccaattatggggagttttatgagcagcggtggtttgcatccggcagcggcgtggagcacgggattgagctgtgcgggcagcatgtgagtctctgtacgaaccagacctttgcctgcgacaccatgcccaacttggtgatcggcgtggagatctgcgaggatctgtgggccccggcgccgccctccgtggagctggcccggaagggcgccaccgtgattctgaacctctccgcatccaatgagctggtgggcaaggcggactaccgccgctccctggtgacaggccagtccgcccggctgatgtgcggttatgtgtacgcggatgccggagagggagagtccaccaccgatgtggtgttcaccggccacaatatgatcgcggaaaacggtaccctgctggcggagcggcggttcgccaccggactcaccgtcagcgagatcgatgtggaccggctgatccatgaccgccgccggaccaacaccttcaccttcggcaaggagccgccggagatctggcggtgcggcttcacgctgccggtggaggagacccggctcacccggtacgtctccccatctcctttcgtgccggaggatgccgcgggccgggcggagcggtgtgaggagatcctgcggatcgcctccctgggtctgaagaagcggctggagcacaccggcgccaagacggcggtggtgggcctctccggcgggctggactccaccctggccctgctgatcacggccctggccatggggatgctgaatcggcccgccagcgacatcgtggccgtcaccatgccctgcttcggcaccactgcccggacgaagtccaacgcggagctgctggcggagcggatgggtgccacgctgaagatcattgacatctcccaggcggtgcggcgacattttaccgacatcggacagaacatggagaaccatgacgtcacctttgaaaacggccaggcccgggagcggacccaggtcctgatggacattgcaaaccagaccggcggcctggtgatcggcacgggagatctcagtgagttggccctgggctggtgcacctacaatggcgaccacatgagcaactacgccgtcaactgctccatccccaagaccctggtgcggcatctggtggcctatctggcccgggacaacgcggagaaggacgaggccctccatgacgtgctggaggatattctggacacccctgtctccccggagctgctgcccgctgtccaaggggagatcagccagcggaccgaggatctggtggggccctatgagctacacgacttcttcctgtactacatgctccgctggggcttcccgccccggaagatctaccgtctggcgctgtatgccctggggaagacctacaccccggatgtgatcctgaagtggctgaagaccttctaccgccgcttcttctctcagcagttcaagcgcagctgtctgccggacggccccaaggtaggttctgcggcactctccccccgcggcgactggcggatgccgagcgatgcttccgcggcactgtggcaggcagaactggagacactggagtaaacggaagagaggagccagttgccgaacatggggggcccaaaaaaatcaaagattttttggggaaagaaggagcaagggagcgtccggagcttttgccgtgggcagaatcggaggggagcggactttgcgacgacgcggcggatgccgagcgatgcttccgcggcactgtggcaggcagaactggagacactggagtcagtgcatttttaacagtatgtggaaagcggaccagggcgacggctatacagccggcgctctggtctttctatgcgtatacagataaacacggacaggcagcatgaactttcgcagttcttgacagattctcccccctcccattaaaatagaagaaaaattgtttgaaaacggaaaggaagcacacgatggaagaatctctagaacatatccgggagagcgcggagacacgaatgaggaagaatgccttcatgctccataattatatcgagctggaacgcgtggaaaaagaccgggcggtcttcaagctggacatccgcccggagagctgcaacccctatgggctgattcatggcggcgccatctacaccctggcggacaacgccaccggcgcggcggcccacagcgacgggcggtattacgtcacacagaccagcgcgctccacttcctgcgcaaccaggccacagggacggtgcgggcctctgcttgggtccggcaccgtggaaagtccacggtgctcaccgctgtggacatcaccggagagggcggcaggctgctggccacgggggagttcaccttcttctgtgtagacaaggcgctgatggaccagaaggcggccgctgagcagaaataagagagatgcgggagagggcgaacccctctcccctttttcccaaacactgtggaaaaccgggctgtcatatctccgcccgccgccgcataaggttgtcccagaggtgaggcgatatgaagaggccggtttttccaggcccgttcagaagagggctccggcggctgggcgcagccgggctggcggccgggaccctttgggcggttgtggtcaccgccggaagcgacagcgcgtctgcagcctgggcggccctgcgggcggcgtctccgctggcggcgctgaaatgggagctgggggacctgtgggcgaacgatgacctctcccccgccgcggtgatgacgttgggagagtctcccctgctgttgtccgcccgggcggctgtggcggagctgtggtccaccgagcggacggaggaatccggtgcggacggccgggaggagactgtcacggagccggtggaggagacgccgctggagaccacgggagagacggacaacggcgttccggccagaacactggtgcctacggaccccagcggctatacggtctgcggccggtcctacatctccaacagcacggaccacgccctcaccgtcacggagctgtcggagccctttgacgcccggctcgccgatggggagcctcagattctgatcctccacacccacggcagcgaggcctacaccccacccccgggcacggacatcgtctggtccggcaactaccgcactacggactcccgctacaacgtggtgggggtgggagacgagatggcggaggtgtttaccgccgccgggatctccgtcctccatgaccggacactgtacgactactcgtcgtacaacgacgcctataacaacgccctggcggccattgagacctatctggcggaatacccctccatccgcttcatcctggatgtccaccgggacgccatcggcgacgcggagggcaatcagtacaaggtgatctcggagatcgacggggtgggcacctccgcccagatgactctggtgatgggcagcgacggcagcggcctggctcatgagcactggatggagaatctgaaactggcggtggcccttcaggacaatatcttgcaaagctatcccaccctgatgcggccgatcctgctgcggaattcccgctataaccagcacgccaccaccggctccttgctggtagaggtaggggccgccggcaactctccggaggaggccgccctggcgggccgcctgttcgcccagcagatggcggactatctcattgatctgggcaagtgacagaggcggtcctgcggagagcaggccatccggccccggtccgacggcaaaagccccgtccgaacggacggggctttttgctttgaaggctcagggctcctccgccagggggaaggacaccacagcggtgaacaagtccgccagcgtctccacgtggaaatctccgccgcaggcctcggtaaaggagctggcgatggaaaggcccaagccgctgccgccatcggtacggctggcgtcgccccggacgaaccgggccgtcaggtccacgcctgtgggcagctcctcccgggaggtgttgcgcaggctggcctccgccctgcccacctcggtctttaaggagaggtagacccggcttcccgccagggcatatttcagggcgttgtcgatgaggttctggaacacccggtacagccgccggccgtcagccgtgatcatcaccggtatctccggcagctccatccggaaggtcagcccgctttgggagataggcccctccaggtccgccagggtctgccgcaggagcttggcaaaatccagccgctccaagtggaccggcagctggccggaggcggccttgctgacctcgaacacatcctggaccatcactgccagccgtcgggccttctcgtcgatgatccgggcgtagtccgctgcggccccctccaggggctcctgccgcagcagttccgcataggagagcacagaggtcaggggcgttttcaggtcgtgggacacgttggagatcagctctaccttcatccgttcgctgcgggtctgctctgccagggcccggtgcaggcccgcctggatgtcgttcagctgctccgcggtctgatgcaggtctgcgtccgccggcaggtccaggggcgtttccagatccccgtcccggatggccgtcacttggtccgccagcaggccgatatcccggaccagggtccagtcccgccggatccagaagatttccaggacccctatcagcgcaaaggcgggaacaaaaacgcagatcacagtcagagaagagttccaaagcatttcatacacagggacacagcagagaacagctgtaagcataatggcccatagtgcaaggttccgcaccagagaccgccgccggagccgcttctgcaccggcagcttcaagtctcttgccaagaatgcgtttttcagccccctcaacagactccgccgctgctccctttccgtgtttttccgggtgatgtgccgcagccacagcgcccacaccagcgccagcagcgccggggcattggcgggcagcagcgccgccagccgcagggcgtccgtcacggtcggacccacccagccgtaataccagaattcaaagggagagtagccgccgaatcctgtggagaacaccatggagaggactgccagggcagccgccagccaccagatctccccgggcacgcggcgagtgagagcggccagctttttctccgccttccgccgttccgcccgcaggagacgggtactcaccagatacgcaatgccgagcacacacagcactgcccgcagcaggtagaacttctgcatcccctggatgcgctgatacaggctgtagagatcgttagcggggcgggacgccccgccgctgttcggctggagataaggcaccggctcctcccggacggccatgtagacggtcacatccgccgcgtcctccccggccgtgaaattctcatagccggggacgtcccacagggaatcctctgtaaaaaatccatcgccgtaaacgtccactggctctccatccttggtgatggtgactgtaccgttctggaaggtcagcagaaagttgtagccctccggcacggcccagctggaggagaggatcatattcgctggagcattgctgtaataggagtcctcccccgatccctggacccggtagaggagattcttgtcctctgcataggaggcgtctggcgcctcctctttcggggttgctatatcttctgtggcagtgtccgtggatccccactcgtaccaggtgatgccagcactggacacgacgtaggtatccccggaagcagtatcccaccactccaggtcgctgccagtggccatagccagaaaggcccgcagccgttgggccacctcctgccggaaggctggggtctcctgccagtctgtactccaccatccgctgccgaaggagccgctgtcgaccccgctggccaggcggcccgccgtctgtcccaggctccccagcaccaggctcacgcccagtaccagggccgccagtccggccgccgcccgcagcctgccgcaggtctttccggagacgcggaccttcgccacgcccggggcgtcctccacccccttcagagcctcccggacctccccggccacaagttgttccagaccttcgtcaggtcccgtgctgttccattttgtatccaatgccccacaccaccttgatgtaatctggctccttgggattgagctcgattttttcccgaatgcgccggatgtggaccatcaccgtgttttcgcaggcgtaggccgcctccccgtcccacacccggcggtagatctcctccgccgggaagatgcggccggggttacgcatcagcaggtccacgatctttgtctccgtggcggtgagcttcaccgcttccccatccgcccgcagttcccggcggtccgggtcgtaggtgaggcgcccgttgacgatgaggccctgccgctcctccgcgtggacgtcccccagcagggtgtaccgccgcagctggctccggactctggccgccagctcctgggggttgaagggcttggtcacatagtcgtccgcccccatggagaggcccaggatcttgtccgtgtcctcacttttggcggagaggacgatcaccggcaggttccgcttttcccggatccgcagcagagcggacagcccgtccagcttgggcatcatcacgtcgatgaggatcagccgcaccgccgggtccagggccagatccagagcctccatgccgtcataggcccgcaggacccggtagccctcccgctccagggtgatggcgatggcccccacgatctccggatcgtcgtctaccaccagaatgcacgcgttcatctcgatccctccttgagctgattgtagcataccagggaattcttacaaacacccggagaaatttcttacagatttcttacggtttcaagcggcacaaaaaaagggccctcccgggaaggaaagcccttcttttcaatggctcactttttcagcggcatggagaagaggaaccgggtggaggcctggtcgctctcggccttcagagttcccttgtgctccgtcgcaatggaggcggcgatgggcagccccaggccgaagccggactgctccccccgggaggcgtccgcccggtagaatcgctcgaacaggcggcccagctggtccggtgggatgggatcgccggggttggataccagcagacgggcctgccggtctgtgcgccgcagggtcaggctgatggtaccccccgcctgcccatacttgatggcgttgtccagcaggacgccgatcagctggcgcagtttgtcggcgtcgccggtgacggtcacgtcgggggtgatgtcgctctccaggggctttcccgcctcaaaggccaccggctcaaaggccagtacgcagtccgtggccaggtcggagagcgagacctcccccatcaccgccgtgggaaccgcattgtccgcccgggccagggtcagcatctcctccaccagggacttcatctgtccggcctcggagcggatgttgtccgcccaccgggccgggcggtcctccagcggcgccgcctccagcagttccgcattggagaggatcacggtcagcggcgtcttcagctcgtgagaggcgtcggaaaggaactgccgctgctgctgccaggcttttgccaccgggcgggtggcccaccgggccagcaggatggagacgcccagaagcagcagcagcgccgccagaccgatttgcagataggagcccatgatctcctgcaatgtggcctgctccatggacatgtccacaaaggcgatgcgctcgtatagtccatagtcccggcgcagataccgcaggccgtagctgtggatagtgccctcgggccggttctgctggagacagtcggtaagaatggtctgcagctcctgtgtgtcctgcagattggaataggtcccgcctgtgacaaaggcctcgtagattccgctgcggtcccagagattcaccgtgaaatagggcagcagaacgtcttccccgccccggttgagccccagatccggccggccgctgggagtgtcgtcctccatgacccgctggagcacctgatggctgatgacctcgatgttctgcttggcggagaaaaacacagccgtgaataccacgcccagtaccgcggtcaccagaatcatgcacatggccacgaatttgatctgcaattttcggatcatgggaggatcgcccccttcctgtcgaaaactctgtggaaaagtggaaaaatgtggactttgtggaaaactacgcctcctcaggcgcttccaggcagtagcccaccatgcggatcgtacggatcttcacctgggagtggagatggtccagcttcttccgcaggaaggagatgtagacctccacattgttgtcctctgcgtcggactcatagccccagaccttcagcagcagcttctccttggtgatgaccagcttctggttcagcatcagcatctccatcatgtcgaactccttccggctgagccgcacggagcgctcgccgcaggagagggtgaaggaggtcttctccagccgcaggtctccgtatttcagggcatcagtctgccgcagctccggctggcggcgggtcagggcccggatgcaggccagcagctccttgggctcaaagggcttggtgagatagtagtccgcaccggagtccagcccgttcacccggtccgtcagctcggaccgggccgtgagcatcagcaccggcgtggtgctgccctccgcccgcaggcggcgcagcacggtgaagccgtccagcttgggcagcatcacgtccagcaggatcacgtcataaatggaggtcagggcgttgtccagccccgcctcgccgtcgtggcagacgtccaccgtatagccgttcagctccaacaggtcctggagggtggcggccaggcggacctcatcctccaccaccagtacgcgcatgaaatcacctccgtttgcaggatcgcgcgccgtttctgccggcagcgccacacaggggggagcccgggggctcccccctggtcagatgagacggatgggaaacgagatcgagtttattcgcccgtggcgtccgccgcagtcaggccattctccgccacagagagaatggtgtccaccgaagcggtgtccatctggtagatggtggaatccccctccatgcggacgtagtagccggtctggtccaggttctcgctgccgaaggtcagggtcagcgtcccctcggtaccggtgtcgttcaggtagagaatggtaaccgtggcctggggtgcgtcaaagccgcacagggcagcggcctcgtctgtgggcttgtagtccacgcatttggtgaaggtcagcgcccccagctccgccagcagagaggcggtgtccgcgttgccggtgacgtcctcgccgctggcagcccaggtgacggtaaccgtttcctccccggtctcctcgtcggtggaggtctccttgtcgatgggccgcaacagggtgctggcggcgccctcaacggtgacggactggaggttttcctccgtcagctggggcagctccggcaggtcgcacatgtcatagatggtcttggacatctcggtgtacagggagttggagatgatatacaccggactctcctgttcgttcatcagcatatagtagctgttgccgtccgtagtggtgttgcccagggagatggtcagcgtcccgccgtccggcttggctgcggtcagggtggcgaagggttggtccaggccataggcctccagcgtatcgccctctgtaatggtctgctggggtttgaggttggtgagaagggtcaggatcgactggatggtggagtcgtccaggggaaactccgggtcgtcggaccagacccacttgcccgcctcgtccagatggaaggacagcgtggcgttgccgttgtcataggtgagggacgaataggcggcctccgtctccgtgatgacgctggcggcgtcctgggcggcggcctcctcagcttcccgctgggcgctggaccgcttgacggcggagaccaccgccagcaggatgcccaggcccaccaggatccccagcaggagaaccagcgtcttcttctgtgttcgattcatgcttgtatgctccttcgtcacagtttccggcggtgcatccagcggacaaagccgtagatcagcagcgccgcggggatcaccaggataaacagcaggccccagatgccgccggtcgtgatggtattggtgggcgtcaacaggctcaccggctccacagagatggcggatacatcgtcaaagcccacagtggcggagtggatgaagagatccacgttgtcaacattggtaaagctgttggtcacatcggtgttgatcagcgtgtccgcgccgtagaccgtcagccgggcggtggtgtcctcgctgatctcctccgtggccacggcacccaccacataggtcccctgggtcatgttgtccgcgtccagcacggcatagccgttctccgtggtggttaggaagggctggacggtgatggtgtcccgggtgggatccgccagggtgaagccccgggaggcataaaacaggaccatggaatcacttgtgaggctgctggccgcatccacagaggtgtccgcctgcgcgaagaacagataggggttgttctgatagccctgggaggtgtccgcgatcatgccgtccgccacctgcattccataggcggcgcacagggcgttgaagttgggcaggtccaccagctcaccggccatgttgtagatcacctggccgccctccgccagatagttcaggatcatatccagctcatcgtccgccagatcctggtccggctcgttgaggatcagcagggagcagtcctcagggatgccgccgtcggtgagcaggttcacccgctccacggacatgtggagccgcgtgaaccgctccttcacgctgatggggacggcggtctcgttgtggcctgtggtctcgtacaccatccgggtcacgccggtgagcacgctgtcgatggcggaggtcagcaggctctccccgtcgaagtccgtctccgtataggtgccgtaatagtaatacgacatcatatcatacccgattatgtcgctgatgtcaaaggactcctgccggccggtggcctcgcaggtgaccacgatggtatccgcccccacaccgtactgggacagggcggagggatagaccgtggggtcggtgtattccagggtcaggtggtcgctgagatctgcgtagatgtccagaaagcggacgatccgggtatccagtgtgtccttgtcggtgagcacgtggatcaccacgtcatcctccagccccgccaggtagtcctgagaggtctcgctgatgttgtagatcccgctgcccgtcaggtcgatctgggcccactgctccggcagctgtgccgccagcaggttgaacaccagcactgccgccacggccagggccgtcagtccggcggagaaggcgcccctgcgggaggcgtggcgccccgcggtctcctgcaggctgtttttccaatcacgatgttccatattcacacgcctcctctcagttccaccggcgcttctggatgacctggacggtcagaaagaccagcagcgcgctgatggacaggtacagcaggatcccgggcacgtcgaagacgtggtccgtggaaaagctgtcgaaggcggagagcagggagaacttgcccagcacatccggcagcaggttggcgaagacggaggagtcccgcaggtagaaggcgatcagcaccgcggcgccggccaccagcacgccggctgtgaccttccagttgttggacagggcgttgatgaggaagcacaccaggatcagcaccacgaagaagcccagcagagacccgacggcggtggagggcagaaagcccaccaggccgtcccacagatacagcaggagcagcaggccgaaggtgcccactgcggcgatgatctggctctccgtcagagaggagatcagcatgcccacggcgatctccaccgcgcccagcaggaagaaggccagaatggcgccgtagtccgccaacaggaaggccgtgccgttcagcgcgatgatgagggggcacaggcaggcaatggccaccggcacggcgaacaccgtcagcatggcgaagtacttccccagcaccacggcggtgacggataccggcgccgtcagcagcagctggtccgtcttggtgtggcgctcatccgccatggagcgcatggtgagaatggggaccaccaccatgaaaatgaagagagaggagcccagagagagggagaaataggggtatccctgaaacaggttgtaggcaaagaaatagatgccgatgaagaccgtcagaaccgccacgaagatccagccgatcatggagttgaaataggagctgacctcccgcttataaatcgctttcatcgccgaccgcctccttttccgcagtttccacagaggtctggaacagcgccgccgcccgggcggccaccgtatcgttatcgtccgtcagatccaggaagacctcctccagagaggccgtccggggccgcagctccagcaggggcagccccgcctctgcaaaggcgaagaacagcgcctcccggatgtccctctccatgtggatggcaaatcgggctgtgtcctccgtccgccccagcagggtccggccggtgatgcccgccacccggtccagcacggcccccgccgcctccggcgcggcctttgccgtcagttccagggagcctccggcggagagcttctcctccaggtcctccggggtgtcgcacaccacaaaccggcccttgcggatgatgaggacccggtcgcataccgcccggatctcagagaggatatgggagctgaggatcacggtgtggtcctttgctagatgccgaatgagatcccggatctccaccacctgcttgggatccaggcccacggtgggctcgtccagaatgataatcttggggaagcccaggatggcctgggccaggccgacccgctggcggtagcccttggacaggttccggatcagccgggcgctcatatcctccagatgggtcagggccaggaccttcgtcagctggtccgtccgctgctccttggggatcttcttcagctccgcgcagaagcgcaggtactcctccaccgtcatatcaggatacagcggcgggatctcggggagatagccgatgcaggcacgggcggcctccggctcctccagaatatcgtggccctccaccaggacctgtccctccgtggccgccagatagccggtcatgatattcattgtggtggattttccggcgccgttcggccccaagaagccgaagatctggccgtcctccaccgtgaagctcagatggttcaccgcatagtggtcgccataacgcttcacaaggtttttgacctcgatcacacaaataacctccttcaggaatggagacgggcagggcccgccccagtcagctttcacagtataaaaaaagaaactgaaaactatctgaaagaatgaacagaacttcataaactgttcaaactttttaaaggttgtttttagattttgggggtatgatacagacatcctccaaaaaggataactgatcccccctctcttttttcatttttcatttcctttctctctgcgtgcggcggagggcgtccatgaccaggcgtcctccgccgcacgctgtcttgcgcgaaaagggcgaaaaagatggaaagatccggccggtccaggactttccgccgacttgttcttgcaaacagccggtgtttccgatataatgattccgcaattctaagtagccgggttcagaatgcgactgcccggtgaacaatggaggaaaaaagaatgagaggcgtacacagcgcggtggatgagatccgccgcaatgtcttcaccgaagtggcccgcctggcctatgagggcggggatttgaagcgggtggacatgatcccctacaccatcgttcccggagaggtggcccgccaccgccacgacgtgtttctggagcgggccattgtccaggagcgggtgcggctggcccttggcatgagcctgcagcccgctggcgagcagacgcccgtcagcgccggtatccaggaggcggccgcggccgacgacaaatattttgaggagcccctggtcaatatcatctcctttgcctgcaatgcctgcccccccaagcagatccggattacggacagctgccagggctgcctgtcccatccctgcatgaatgtgtgccccaaggatgccatttatctggacaaggacaagcattgccacattgaccaggacaagtgcatcaaatgcggccggtgcttcaaccagtgcccctaccacgccatcagcaagattgagcgcccctgcgccgcagcctgcggcatggacgccatcgaatccgacgagctgggccgggccaagatcaactacgacaagtgcgtctcctgcggcatgtgcctggtgaactgcccctttgccgccatcgcggacaagagccagatcttccaggtcatcaacgccatgaaccgcggatccaaggtcatcgcctgcgtggcccccgcctttgtgggccagttcggcaaggccgccacgcctgccaagctgaaggccgccatgcggatcctgggctttgacgatgtggtggaggtggccatcggcgcggacctgtgcaccgtggaggaggccaaggatttcctggcggaggtgccggagaagctgcccttcatgggcaccagctgctgccccgcctggtccgtcatggccaagaagctgttcccggagttcaaggactgcatctccatggccctcacccccatggtgatcaccgcccgcatggtgaagaaggaccatccggatgcccggatctgcttcattgggccctgcgcagccaagaagctggaggccaaccggaaatctgtccggtcggatgtggactacgtgctgacctttgaggagctgcagggcatgttcgatgccaagaacatcgacttcaccaccctggaggcggacccggaggacggcctgaacgagggcacctccatgggccgcggcttcgcggtgggcggcggcgtggccgcggccgtggtagaggccatcaagcacatcgaccccacccgggaggtacagatcgagtacggcgacggcctgcgggagtgcaagaagatgctgatgatggccaaggccggaaagcgcaacggctatctgctggagggcatgggctgccccggcggctgcgtggccggcgccggcaccatcacccccgtgcgggagagcaccctgaatgttgagaagttcaagaaggaggccgcggaggtcagcagcaccgccagcccctatgtggaccgtctgaaagacgtggaggaataaccgctaaagcaagaaagcgggccacccaaaagggtggcccgctttgtgcgttttccggaaaagctgtggttctgcttacatttggtacagaagaaccatcagcggcatggtcccgatacagagaagcgtggtgattacattaatggcgccggcgtagtctccttcatgaccgtaaacttgagcgatctgagtgacgttagccgccgcaggggcacttgctgccagcaggctgatcatcaggatggactggccgtccggcaccagggccgcaaggccagagtatttgaaaatacacaggaccaccagcggcagggcgatcagccgcaggaaggccaccttccagatgctgcggatgcgcaggaccgccagcaggttctgctctcccatgagcatgccggcgacaaacatgctgagggggccgatggtggaggcaatggacttcatggtaccggcgattaccgtaggcaggggcaggttcagcagaaacagcagcacacccacaaacacggaaatgatgttgacattcaggagaatttttttcagcgagacattccggtcaccactcagaataatccggcagtgactccacatgggaaactgctgcaccaactgaaacatgctgcaatagatgacccactccggccccaggaccgcagtcaccagggggatgatgaggttaccggaattggtgtaaatcagggaggcctgttccaccggcgtcagacgcagggggcggtgcagtaaggccgtggcaatgaaaaacagagcgtggatgccaatggcggccccaagggagagggccagaccctgaagcagctccggcgtacgctggagctggaaggcgttgatgatgacgcagggagtgaccagatacagacagactttggacagaacccggctgtcctccggcttcagcagatgcaggcggaccaggagccagcccaggacgatacacagaaaaagctgtacgatctgttcaagcagcatcaataccatgaaaacgttcctccatctacacacaggtgcgagtttaatcgtaccacgccaaaagaggaaaaacaaccagaaagtttatatagcgtaaaaaaactgggactgcagtaaaaaggctcccccatccagcggatgggggagcctttgttcagtcacggtctgcctcagtcggtgacgtagggcagcagggcgatctgccgggcgcgcttgatggcctcggtcagctgacgctgatgcatggcgcaggtgccggtggtccggcggggcaggatcttggaacgctcagagacaaagcggcgcagcttggcggcgtctttgtaatcgatatactcgcatttgtccgcgcagaactggcagaccttgcggcgcttgccgcggttggggcgagcgggtctcgcttcacgatcaaaagccatgaaatggttcctcctttatcaaaagtcagaacggcagttcgccgtcctcttcgccgatctcggcgaaatcggattgtccgcccatcggtgcggcgttgcggccgcccatgggggcgctgtaagaagcgggtgcgccgccgaaatcgccggcgccgtcccgtttggaatccccgaagtagacattgtcggcgacgatctcggcgcttctgcgcttgccgccgtccttgtccgtccaatcgcggatctgcagccggccctccaccacggccatgcggcccttggtgaagtatttgctgacaaactccgcggtgctgcgccaggccaccacgtcgataaaatcggtctccttttcgccgctctgggacttaaagtcccggtccacagccagggagaaggacgtgacggcggtgccgcttccggtgcggcgcagctcggggtcccgggtcagacgacccatgatgatgatcttgttgagcatatcaatgcccccttactcgcccttgcagacgatcagggaacgcatgatgccgtccgtgatccgcagaacacggtccagctccttcgggaaagaaggctcgctggtgaaggtcatcaggacgtaataaccctcggtcttgtagttgatgggataagccagcttgcggctgccccactcttccacttccacagcggaaccattctgctcagccagggtcttgaacttggccaccagcgcggcggtgttctcctcaccctgtgcagggtcgatgatatacacgacctcataattggcagaaacctttgccatatttgcacctccttctggacaaatggcccccattcgggatgggagcaaggatatgcctgcagactgcaagccatattattatatcggaatttctggaaatgtcaaggaatttttctcccggctctataggggggcaaatctttacacaagatactgcttgacaaattcccgcgggcggtgtcataataaatgcgacaaaaacaggggagccctcacgggctgagaggaagcggaccgcttcgaccctttacctgatgtgggtaatgccaccgtaggaagttatgtatgagcatccggcacggcgggcaccctctcaggcgcccgctgttttttactttgagacggaagggatgtgcatcggcgaaaacaacatccggcgccccggggaccaccgggagcgggctgagggggagcgccctgggcctgggccggcaaaacagcgatgggaagccgtgttccggcgtgagaggaggccagaaagcctcgaccgattttccacagcaggcggatgcccgcctgccgaccttgcatggcaaggggaaaacgctgtttcgcacgctgttttctccctgcaaattctgatggatcaaaggagcgatctctatgaaaaccaattccaagaagctggccctggcaggcgtgctgtgcgccgtggccgtggtgggcagtatgcttcagtttcccgtattcggcagccagtgcgcgccagtgcagcacatggtcaatgtcatctgcgccgtgttcctgggcccgggctacggcgtggccgtggccttcctggccagcctgctgcgcaacatcttcggcttaggcagcctcctggccttcccaggcagtatgtgcggcgccctgctgtgcggcctggtctactggaagaccaggaatctgcccgcgaccctggcgggcgaggtgttcggcaccggcatcatcggcggcctgctgtcctatcctgtggcggtggcctttatgggcgtagtggccggctccatcgccttttacgcctatgtggtgcccttcctggtctccaccgtgggcggctccattctggccggcatcctggtattcaccctccagaagagcggcgccctcaaatccatgcgggccgcattggagcattgatcccaactgagaaagggtccttccatgcttgatttcacccgtctggacaaagtccgccgccagcggcccctgatccactgcgtcagcaatatcgtcaccgccaacgactgcgccaatctggccctggccgttggcgccagtcccatgatggcccaggcaccggaagagatggaagccatctccgccgtcagcgacgccacggtgctgaacaccggcaccccggatgcggagaaattccgggcctgccggatctgcgccgtctccgcccgtcatccggtggtgctagacccggtaggggtgggcgcaagtccctggcggctgggacaggtccgggcgctgctggacctgttcaccccgtccatcctgcgagtgaatctgggggaggcccgggccctgctggggtcggatgggcaggaacaaggggtggacagcccgctgcccgccagccgggaagcccggagggacaccgccatggacctggcccggcgccgcggaacggcggtgctgctctccggtccggaggatctcatcaccgatggggcgcgggtctggtgcgtcaccggcggcagcggccggatgtctctcgtcaccggcacgggctgtatgctgtcggtgctgtgcggtgtgttcgccgccgtggagccggacgccgccgcggcggctgccctggcctccgccttctggaagatctgcgcccgccgggcggagcacctggccgcagaccggggcagcggcagtttccgcacggcgctgctggacgccgccaatacgctgacggcatctgacgccgcccgcgaggcggagatcctgactctctgacaaagaagcccgcccggtcctgacggaccggacgggccttctgttttgcgaggcaggcgatcactccagctcccgggtctcaaacatctcctcaaaggaacggatatagtagtccgccagcccgcggatctcctcctggtgtgcctcctcggacgcgtcgtacaccgccgccacccggaacccggcggccttggcggtctggatggcgtggaaggcgtcctcaaacaccaccgtgtccttcttgttggactgaaggcggcgcatagcccgctcgtagatctcggcgctctcctttttgccgacccccacctccgccacagtgataagtccccggaagtagtggtcgatccctgcatggcggagggctgcttccgccagagggcggtccgtggcagtggccacatacatccacacgccctccatcttcagaagggacagaaacttgtccacgccgggctttgcctggacctcatgctgatagaaatccgcgacccggtccactacccggccgatcagctcctcctccgtctgggggaggtggtagtgctccttgcagtaggcgatcccgtgccggagggagagggtcttcagcatctcgtcggtctccggctcgggctcgatgccaaggccccgcaggacgctggtacccaggtcccgccagataggcatggagtccagcagggtgccgtccatatcaaaaatcgcgctttgcagtctcatgggaactcctttcgtctgttgccgatggtccctattgtaccaccggagcaggcaaaagcgcaatgaaaaccccgtgaaaaggaggaaaaattcatgcgtctctttctggccatccagctgtcccccgcggtgcgggaagcactgctgaccgctcaggacgccctgcgccgccagggcaggggctctttcccgccgccggagaacctgcacctgaccctggccttcctgggggaggcagaggacccggccagggcccgggccgccctgtcggaggtatcctgccgacctttctccttggcggtgggcggcccgccggggcatttcggcgacctgtggtgggccggtgttcgagcagatccggccctggaggagctggccgtgtccctgcaggcggaccttcgctcccggggcttctgccaggaggaccgcccctggctgccccacatcaccctggtccgccgctggcggggcgaggtcccgcaggtgaccgtcccccacgcgagcatggtggtccggcagatctccctcctgcggtcagaccagattgacggcaaacggatctacacagaactctcccacaaatccctgcgttaaaaagcagccggcaccgcttggtgccggctgtttttacaaaggaaaggggatctaggggaaaaccgttggttttccccagttcgttcgccgttggcgaacgaagaaatttcaatcattttcggcaggacatgcgcctgccgaaaatcccttgacccgtgcgccctgggcgcacacaccagtccgcagactggtggtgggggaggtcgaggggaaacagccgaaatgccgccagcggcggaaaaagtgaggctgtttcgaggcagcggcgcgattggcggcccgaacagggccgggaattgcaatgccgcaacggtgtcagcctgctccccctcgaagccctcagcacagcttcgcgcccgccgggatggaatcatccaccatgatgaggtgcaggcactcctcaccgtgctcggtgtggacggcggagatcagcatgccgttgctctccaggcccatcatcttccggggcggcaggttcacaatggcgatcagggtcttgcccaccagatcctccggctcataccacttgtggatgccggagaggatctgccggtccacaccggtgccgtcatccagagtgaatctcagcagcttctcactcttcttcacggcatcgcaggccttcaccttcaccgcccggaaatcggacttgcagaaggtgtcgaaatccaccttctccgtcagctggggctccacctcgacggcgggcagggcggcctttttggccgcggcctccgcggcctccagctcctccagggccttgtccatgtccagccgggggaacaggttctcgcccttggtgacggcagcggtctcaggcagagcgccccactccgccgcggcgtcccaggtccgactctccgcaggggcgccgatctgggcaaagagcttttcacagctctccggcatgaagggcgtcagtaggatgccgcagatgcgggtggcctccagcaggttgtacagcacatgggccagccgcttgccgttggtctccatatcctttgccagggcccagggggcgttctcgtcgatatacttgttggcccgctggatgaccttgaagatctcgtccagagccttgtggggggcgaaggtctccatgtcctcctcatagtcgaaccggagccccgcggccttgctcactaggtccaggtcaaagaggaccggatcgttgggatcgtcagatccgaagcacatcgtggatgcccggcttgcggcagacctggcggtctctttctccatctccgtggcgccgcacccggcaggcagcgctccgccaaagtacttgcccaccatggcggtggtgcgggagaccaggttgcccaggtcgttggccaggtcggtgttgatggtctggatcagcagttcgttggagaagttgccgtcggagccgaaggggaacgtccgcatcaggaagaaccgcagggcgtccacgccgaacttctccgccaggatatacgggtccaccacgttgcccttggacttggacatcttgccgccgtccagcagcagccagccgtggccgaacacgtgcttgggcaccggctcgcccaggctcatcagcatggcgggccagatgatggagtggaaccggacgatctccttgcccacgatgttgacgccgggccaccagcccttgtcgtagtcgtggtagcggtcgttgtcatagcccagggcggtgatatagttgctgagggcgtccacccacacatagactacgtgcttgggatcgaagtccaccggaatgccccaggagaagctggtgcgggagacgcacagatcctccaggccggggtccaggaagttcttcaccatctcgtggacgcggctacggggctggaggaagtcggtgttctccagcagatcccggacctggtcggcgtacttgctcaggcggaaaaagtaggcctcctcctccgcgtcctgcacctcccggccgcagtcggggcacttgccgtccaccagctggctctcggtccagaaggactcgcagggggtgcagtatttgcccttgtaggtgcccttgtagatgtcgcccttgtcgtacatcttcttgaaaatcttctggacgctctccacatggtagtcgtcggtggtgcggatgaaccggtcgttggagatgttcatcagcttccacaggtccttcacgccccggtctccctctacgatgttgtccacgaactccttgggagtgacgccggcctccctggccttggtctcgatcttctggccgtgctcgtccgtgccggtgaggaacatgacgtcctcgccccgcaggcggtgataccgggccagcgtgtccgtggccaccgtacagtaggtgtggccgatgtggagcttgtccgagggatagtagatgggcgttgtgatatagaattttttcttttccatgggattctctcctttaaaacggcagctccgaatggaagagcgccggtatttgcctgaattattattatagtttgaaaatccaaaaaatacaagggaagatgcgaaaaacgggccgtcacacaagccgcctctcctcgtggggattgtatttttcgcaaaattccgatacaataggaacgctgtatgattttcacaagggaggatgcgcccatgaaactggtatcctggaacgtcaacggcctgcgggcctgcctgggcaagggatttctggacttctgtgccgtggccgacgcggacatcatctgcctgcaggagacgaagatgcgcccggagcaggcagaatttgatctgcccggctatcaccgctactggaacagcgccgacaaggcgggctattccggcaccgcggtgttcacccggcgccagccgctctccgtgacctatgacttcggtatcgatgagcaccgccacgaggggcgggtcatcacggcggagtacccggacttctacctggtgtgctgctacactccaaactccaaggatcagttggcccggctggactaccgcatggcctgggaggacgacatccgggactacctgctggatctggacgccaaaaagcctgtggtgtactgcggggacctgaacgtggcccaccaggagatcgatatcaaaaatcccggtcccaaccgccgcaaccccggctttaccgacgaggagcgggagaagatgacgaagctcctctccagcggctttgtggacacgttccggtatctgtacccggacaagaccggggcctactcctggtggagctaccgcttcaatgcccggaagaacaacgccgggtggcggatcgactacttcatcgtgtcggagcggctgaaggacaaaatccggaacgccgatatttggagcgaggtgctgggcagcgaccactgcccggtggtactggatctggatgtataaacttcacgcgcgttcgatgcgccacgaacatcggcaaatcctgcacatgaagtctttttgcatcatttccggctgccctgaagagtgcggggaaacggcacatttcaaaggtttgtgatgctttgcatcggaaaacaggaccggacctgctgggtccggtcctgtttcagctcaacagggcgttcatctcctcgatctccagatcctggagggcccagttgatgccgtagcccaccaccttgctcagatcccgcacctgctggtcgatgtcccgggtagtgaccatgaaggcatcatgctccccgcgcagccgttcctcatccaccttttccacgccggactcctccagaatgtccgccgccagggtggcggagtccaccaccgtgggcacgccgatggcgaacaccggcacccccagcgtctcccggttcagcgccgcccggtggttgcccacgccggagccggggatgatccccgtgtcgctgagctgcaccgtggcgcacacccgcccgcaccggcgggaggccagggcgtcgatggccaggaccatggcgggctggacttccgccaccaggccccgcaccgcctccgcggactccacgccggtggtgcccagcacgccggtgcggaaggccgacaccggccggaacccggcaaactgcttcggcatggcggagagcaggtgccgggtgatcagcacgctgtccaatgccagggggccaacggcgtccggcgtcatggctgcgttgcccaggcccaccaccagggcggagccctccaccggcagcagggccttcagctccgtgcccacggcccggaccgcccgctcgaaaaagtccgccttccgctgccagaaggtggtgaggtcaatggtgaaatagctgccctggggcttgcccagggcctcctcgccccggtggtccaggatgtccacccgggtgactgggtatccctccagcttgctcttggtcgccttcacccccatgaggcgggtggtccgctccgcggactcctgccagagctcccgggcctccagggccaggtcggtacgttttatgaacaatgcgaaccgcctcccaaacacaaaatctagtggtctgctcactaggttttgcggtaggcggcacgatatacaattttagcccgaaaaatataaaaaaaggcttgctttttgcgccgttccctgttaaaatatcattctgcatggtgggaactggttcccacagtcaaattttctgcctaaggaggtgtttggtttgccgaatatcaagtctgccaagaagcgcgttctgatcgccgaagtgcgcaacgcccgcaacaaggccgcgaagtccgaactgaagaccgccatcaagaagttcgaggctgctgccgcagaaggcaatcgcaccgaggccgatggcgcgtacaaggttgcagtgaagaaagtcgatcaggctgttgccaagggcattctgcacaagaatacggccgctcatcgcaagagcgccatgaccctgaagctcaacaagatcggctgatcatatcgggccaaaaggacatccgttcggatgtccttttttgttttctggccagggggcttttcccgattctggcccttttcttttccgcagggcgtgttataatcgtccgtaggatcagaattccgctgaagaggtgactgccatgccgctgttcgacacccacgcccactacaacgacgacgcctttgaccagaaccggaaggggctgctggacgccctgccggacgccggagtgggggctgtggtgatccccggggtggacgtggagagctcccgctccgccctggccctggcggagagccgcccctggctgttcgccgccgcaggcatccatccggaggactgcgccggctgcacggccgcggatttttccgccatccgggacctgtgccgggagaaaaaagtggtcgccatcggagagatcggcttggactactactgggcggagaatccgccaaaggaattccagcagatggtgttccgccgccagctggagctggcgctggagctggagctgccggtgatcgtccacgaccgggaggcccacggagacagcctggagatcgtaaaggagttccccggggtgcggggcgtattccactgcttctccggcagtcccgaaatggcggaggagctgctgaagcggggctggtatctgggctttgacggtccggtgacctacaaaaacgctcgccgggcgccggaggtcgtggccgtcacgcccctggaccggatcgtggtggagacggacgcgccctacatgagcccggtgcccaaccggggcaggcggaacgacagccggaatctcccctacattgtggaaaaactggcggagtggaagggcatctccccggaggagatggcggcgcacacctggaacaatggcctgcggctgtttgggctggaggggaaggtatgaaaaaagcgtttctgatggtcctggcctgcctgttgctggcgggctgcggcgcgccgtcagagacagtgacgccaacggactcctggccggattccgctctggcggaaaccaatgaagcggctgctgaatccccgccggagcctatttcaaccgcgcctgccgaatccccgccggcaaccgccccggcggaacccctctccgcccccgccgtggtaacggcggggcaggcgccggaggaaccctatgatttgcccacggaggtgatcgggctgaaggactggatcggtgaaagccgctggaaccatgacccggtgggccttttggcagaactgccggagcgggagctctccctctacggcgtgacaaagtggcttgacagctcagccctgctgcgctggggtgacagtctggcggagttttcctggtccttcggcggcccgttgattgtggagccgcagctttggtgctgggatgtggactccgacgggcaggaggaggtcgttgtcatcaatcatgtggacagcggcaccgggacttctattgaggagcttcacgtggtcaaaaaagacggggacggcaccttgacggactactgctttccggagtcactgtggcaggaggacctctccggcctgctgtcggtggtgtcggacggggaccggacctacaccgtcttgggcgcggatctggtggacctcacagacgagatccagacacagtttccggacctcaatccggccatgatcgaggacacctctaccggaagatgggccaatttttccgtgcaatccggtacggatgggaacggcagcgatcttttctttacgggttctgcgatgttggaggggagggaaatcccctatgactggtatgcggcggagattaccgctgccatctcctatgaaaacggcatcttcacgctgtcggactttcatctgaacagcttatcctgattacgcaaggagcgatatttatggaaaagggctttaccatcacctatgaatacggggacaacctgtatgtgaaccccaccaaccggtgcaacttcaactgcgcgttctgcctgcggcacaaccagggttccggcggcagcatctacacccataacctgtggctaaagcgggagcccacgaaggaggagatcctttcctccatcgagagccacgacctctcccaatacaagcagctggtgttcgtgggcttcggtgagcctacctaccggttcgatgacatctgctgggtcatcgaccagatgaaggcccacggcaccaagatcttcacccggatggacaccaacggcaccggttccctcatcaacggccgggacatcgccccggagttcgcgggccggttcgatatggtgtctgtctccctgaacaccgacacggcggagaagtacaacgccctgtgccacccccagcaggaaaacgcctaccaggccatgaaggacttcacgagagaggtcctcaagtatgtgcccaccgtgatgatgaccgtggtggacaccatcccgaaagaggagatcgagaactgccggaagatctgcgaggaggagatcggcgccacctaccgggtgcgggagtacattgcggactgacaaatgcagatatgaagagacgcccgcaggggcgtctctttttcctgagcttatgtatggaataccacggacttcacgatgatgctgacgccgcccaggaggaagaggacgatggcgcccttttggagcttttcctcttccagccggggccccagccacgccgccaggcccatggccagcaccgccgcgggaacagacgccagggcgaacagcagcaccgggccggtgaacaggtcggtgactagataagtcactacccgcaccgcattctccccaaagaagagaaagcacatgctccccttgaactcgctgtaatctctggctgttcgctggaggtaggccacgatgaacatgttgatgccgaagaggcccgcgcacacgccggagaacgcggacaccgccagccgcagccagggccggtccttccggtccggcttcaccggccgcagggagcgggtggccatctccagccctaaaagcaccacgacgacgcccagcacggttttgatgacccagggcatggaaaagcgcagcagcagcgtgccggggatcacgccgcagaagttggccgccagcaacggcaggatcttccgccactggaagctgtgccggtttttccaggtgatccaggcgttcaccgggcagtccagcagcagcgtacccggggtgatgaccacattgtccaggcccatggacaaaatcggcgcggagatcagggggttgccgaagccgatcagccctttgaccagataggccagcagctgcgcggcaaagataaacagtgcggttgaaagcgtcattgtatgttccctcccagattttcacccctcattatataccacattttcagcggaaaggaaacggcattctgcctccggcggaaaaaatggactccctgttccaggtttgtgtcggtagaggcatccccggcaaatcgataaacgatttgccggggaattccaataagtgcagatttaaatataaagataccatatcgtcatgattgcaaaatccgcaaacatatggataacccatgaatgatagatattttcatttttgctatctacatagtcaaaaagcagcccgccaatcgccaatcctattaaagccaaaagcaacatcaacggcggaaatgacattccaatcattgcaatatgataaactgcaaacatgcctgaactgaatatatatgctatttttcgggctgtgtatttggataatctgataaatgcaacgaaacgaaagaaaaattcctccagaaaggaattgcaaaaggaaatatagagagccaccccaataaagctgccgctgttgactttttgatccgctgaaagcgactgaaccaacgacgcatagtcgaagaagttttttgtcaaagtatacgcacccagaatcaccgcatagataaaagagcccagcacaaataatttcatcatgcccctcttgtcgattttaaagaattcatccagtaattttgtatgggttatttttgcatataccaatggcaataataaaaataccgcgactttaagcgcggatttgacaatatatgccggttcaatgattgtttcaatgagtgccataaaaacacaacatattataacaagaacaataatacccgacgctttttctttattcatagccatcagtattatctgcctcccaaatataaatctgctgcttttatattgcctatgtctcatttttaccattatagaatagaaaaaagttttgcgcaaggcagcaggtgaattcgccggggttgtgcgctatcattccactatctagagccggagcccagcaggcggttttgcttgcatttcccgggaaaaaggcgtatgataagaggcgagaaaatggggagcccgctggcgcgggctgagaggaggccagccaggtcttgaccctttacctgatgtggatcatgccaacgtagggaaatcatgaggcgcacagccgcggacgaccgttcttggtatgtccgcggtttttttgacagagaggatggagtgatatgaagatcgaccccaagcggctgcggctatatgccgtgacggaccgggcctggactcatgacgcggagggcctgctccgtcaggtggcggcagccgtcgacggcggggcgggcatcgtccagctgcgggaaaagcacatgggacaggcggatttcctggcggaggcggagcggttcgtggccctgtgccgggaaaagggcgctgtcagcatcatcaacgacaatgtggagatcgccgcccagaccggggcggacggcgttcatgtgggccaggaggatctggaggcgggccggactagggagctgctggggccggacaagctgatcggcgtttccgcccactccgtggaagaggccctggccgcccaggcggcgggggcggactacctgggcgtgggcgcggctttcgtcaccggcaccaagacggacgccaagcccatctcccgggagaccatccgggccatcacggcggcggtggacatcccggtggtggccatcggcggcatcagccatgacaatattctggagttgaagaactgcggcctggacggcgtggcggtggtctccgccctgttcgcccaagccgacgtgaaggcggcggcggaggagctgctgcggctctcggaggagatcgcccgatgaacatccggggcgccatctttgacctggacgggaccctgacggactccatgtacatctggcagaaggccccggtggatctgatgcgccggtacggcggtgacccgccggaggatctggcccgggacctgaaggagatgggccgccgggaggcggcggagtacctgcgaagccgcttctccctctccaccacgccggaggagctgatggacaccctcaacgatctggtgacggaggagtaccggtcccgggtgcccttgaagcccggggcggaccggctgctggcccggctggcggattccggcatctcctgctgcatcgccaccgccagcgaggcgttccaggcccgctccgccatggaacggctgggactgtggccgcacttccgcttcgccgtcagctgtgtccagtacggcggcaagacccggccggacatctatctggaggccgcccgccgtctggggaccgctccggcggagacggtggtgtttgaggatgcccttcacgctgccaggaccgcccacgaggcaggcttccgggtctgcggcgtctgggacgcctctgccgaagaggatcaggccgcgctgaaagccctggcggattggtacgtgcgggacctgggcgactgggtcccgtaagggacggggaaccgcggccagcgggccgcttccagcggcggatcgggggcaccaccttccgccgcttgataaaacttcaatgcaaagaagcatcaggaaaggaagcatcgatatgaagacagcattgacgatcgctgggaccgatcccagcggaggcgccggtatccaggcagatatcaagaccatgaccgccaacggcgtgttcgccacctgtgcggtgacggctctggtggcccagaacactaccggcgtcaagagcatcgtggagtgtacgccggactttctggcggaggagctggactgcgtgttcacagatatcttccccgacgcggtgaagaccggcatggtctccagcattccgctgatccgggtgatcgcggccaagctgaaggagtatggggccaaaaatctggtggtggacccggtgatggtggccacctccggggaccggctcatcacggaggacgcggtctccgccctgaaggagctcctgctgcccctggccacggtactgacccccaacatccctgaggcggagatcctctccggcatgacgatccgcagcgccgcagacatggaggcggcggcccgggccatcagcgagcagtacggctgcgccgtgctgtgcaagggcggccaccagatcaacgacgccgatgacctgctgtggcgctgcggcagcggcaagtggttccacggaaagcggatcaacaaccccaacacccacggcaccggctgcaccctgtctagcgccatcgcctccaatctggcgaagggctttgacctggacacggcggtggagcgggccaaggcttacatctccggcgctctgggggccatgctggacttgggacgcggttccggccccatgaatcacatgttcgacctgaagagcatctactgtacggaaaaggcagattgaccagtttgcagacaacagggggacagcggttttatccgctgtcctcctgttgtttttgcgcagaaaaacggcggttccgatggcgggatctatttggaatcaccagactgaacaaaatgatttcaggtatttttaaggtttaaaacgagctaaatatactgcaaaaataataaaaacaaaattttttaaagtattttttcaggttgattttagctttccatgatacctttggaccagaacccttcccggagggggaggtacggaaaggattggcacggtatgagcgaaaaaggactggagcgggagacggaaggaatctccgtgggggagcgggagcccgtcgtagcagattcctctcccaaagggggccgtctccgcagcagctggaaaaagctgtggaaggggcggaaacgaaaggcgctggcgctgcttctggtggtggccattgcaggcggcgtggtgatctggaggggccgcggacagacggcctccgctgcgacgacgtatcaggaggcggcggtggagcgccgctctatcactaattccctctcctccagcggcacgctggagccagcggactcctacaccgtcaatacgctggtctccggcgagatcctcagcgatacctttgaaaagggcgaccaggtggaggagggccagctgctctataccattgattcctccaacgcggccagcagccagacccaggcgcagaacagctactcccaggcccagacctcctatgagcaggcggtgaaggccaagtatccccaggcggacctgagcggcaccgtcagcgaggtgtatgtgaacgagggggacagcgtcagcgcaggcacacagcttctgaagatcgtggcggatgagaacatctacatcgacttctacttcacctacgcggacagcggcgacttctacatcggccagaccgccacggtctttatcgacggctttgccgggaccctcaccggaacggttgccgcggtgtccagttcctccgcggcggtctccaccggcgtacccctgactaccgtccgggtacggctcgccaacccgggccttgtgacatccgactacaccgccagcgccgtcatcggcagctactccagctacggccaggcgtccatcaaggtgggggccagcagcgtcatcacggcagaggcgtccggcaaagttgcaggtttcaactggctggtgggcgataccatctccagcggcgaccggatctgcaccatcaccggtgacagcgtggacaaccagattgaaagcgcccgcatcagtgtcagcaacgcctccaccagcctggaaaatgcccgggacaatctggaggactactccgtcactgcgcccatctccggcaccgtggtcaccaagaacgccaaggcgggggacaacattgagggcggctccggcagcaccctctgcgtcatctatgacctgagttatctggagatgaccatgtccatcgacgagttggacatcagctctgtggaggtgggccaggaggtccggatcaccgccgatgccgtggaggggaagacctacaccggcgtggtgacggaggtgtccgtggcgggcaccacctccggcggcatcaccacgtaccccgtcaccgtccgcatcgacgagaccgacggcctgctgcctgggatgaatgtggacgcggagatcgtgatctcctcggcggatgacgtgctggccatcccaagcgccgccgtgagccgcggggacatggtgctggtcaccgcgaattctcccagtgctgtgaatgccctggaccaggaggccccggagggctacgtctacgtgccggtggaaaccggcgtcagcgacaacagctacattgaggtcctctccggcctccaggagggggacacagtggcctatctccaggcggctggctccgccagctccggcgatatgacgttcgtcatgccgagcggggccatgtcctccataccgatgggcgacatgcccagcgggatgccctccggcggcggaatgcccagcggcgggccgggaggcttctgatgggcactttgatcgaatttcgggaggtctgcaagtattaccagatgggcgacaccactgtgaaggcggcggaccacatctccttccagatccggaagggggagttcgtggccatcgtgggccagtccggctccggcaagtccacctgtatgaacatcatcggctgcctggacgtgcccacctccggcacgtacctgctggacggcagggatgtgggtcagatggataaggaccagctggccgccatccggaacaagatgctgggcttcatcttccagcagtacaacctgctgcccaagctgacgctccaggagaacgtggaggtgccgctgatgtacgccggcatccccaagccggagcggcacgagcgatcccggatcgcgctggagatggtgggtcttggcgacaagctgcgcaataagcccagccagctctccggcggccagcagcagcgggcgtccattgcccgggctctggcaggggacccggcggtgatcctggccgacgagcccaccggcgccctggactcccacaccgggcgggaggtgctgaccatgctgcagcagctccatgccgcgggcaacacggtggtgctcatcacccacgacaactccatcgctgtccaggcccagcggatcatccggctggaggacggccacgtgatctacgacggcgatgccggtgcgcctgaggcggtagtgacgcccaaccttgccggaagggggatggcgggatgagcctgatcgagaccttccagatggcggtgcagaatattctcagcagcaagatgcggaccttcctcactatgctgggcatcatcatcggcgtgtgcgcggtcatcgtcatcgtgggcctgggcaacgggatgcagggctatattgaggacagctttgccgacatgggcaccgactctctgacagtgatggtgatgggccgcggctcctcccgcagcgtgtcggagggcgagatgtaccagctggtggcggacaacagcgatgtgttcaagcagatctcccccacggtcaccatgagcggctcggtgaagatcggcagcagcactctttccgccacctccgtcaccggcgtcagcgaggattacttctccatgaaggggtatgaggtcgcccagggccgggggctccagtacacggacatgaccggccggaaaaaggtctgcatcgtcgggcagtatctgaatcaggtctattacggcgggaatgccgtgggtcagacgctgcggatcaatggcaactcgtttaccatcgtaggtgttatgggaatggagggcacagagctggaagagggcggcacggacgactgcgtgttcctcccctactccaccgccgcccgcctcagcttcaccggcaccatctccagttacaccatcactgtccaggacacggaccagatctcccaggccaaaaccaccctggagaacgccctctatgagatttttgaggacgacgatgcctataccgtgggcagcatggcggagatggtggaggagatgaactccatggtgaacatggtgatctacattctggcgggcatcgctgccatctctctggtggtgggcggcatcggcatcatgaacatcatgctggtgtcggttacggagcggaccagagagatcggcatccgcaaggcgcttggggcccgggagggcgccatcatgcgccagttcgtcatcgaggcggctaccacctcctctctgggcggcgtactggggatcgccctgggcttcggcctatccgcggcggccacggtggtcatcgccaatgtcataccggacacccccatcaccgtcagccccagcattgcggcgatcctggtggccttcggtgtctccgcgggcatcggcatcgccttcggatacctccccgccaaaaaggccgcggtgctgaaccccatcgatgcgctgcggtatgattgagacgccatccgcatccgcccttcccggtgggtccccatccggggacccgccgccgtttttcttgtcagtcgggcccggccgtggtacaatggccgcgaaacaaccggtcttccggccggagagaggttctgcgaaaagaggagactgccatgagggagatcagaaagaagcgtgcggtggctgtggaagtccgccgggagaggaagtggttgatgcagtaaaaaggaaacaggaggagacatcgtgaatcagaccatccgcggcatggggcttccggaccccgacgcggtttttccaaacgaatacggcacatcctgctatatcaaaaatgtggtgacggccccgaacatccagatcggggattacacctactacgacgatccggtggaccctgcggggtttgaacagaacaacgtcctgttcaactatccggagttcggggaccggctcattatcggcaagttctgctccatcgccgccgggacccagttcatcatgggcccggccaaccaccggaccagcagcgtcagcacctaccccttccaggtgttcggcggggcatgggctgaccaagcgccgcctcacctgggccagttgccccgaaagggggacatcatggtgggcaacgacgtgtggatcggccgggagagcgtgatcctgccgggggtccacatcggcgacggcgccatcattgcggcccgctccgtagtggcgaaggatgtgcccgcctataccgtggcgggcggcaatccggtccgcgtgctgaagcagcggttcccagaggatctggtccagttgctcctggcatggcggtggtgggacctgcccccggcggagttggcggaggccgtgccgctgctgtgcgacccggatctggacgcggtgcggacggacctgcgccgtcgcctgggaatggcggagtgagtggctgtatgcaaaaaagtcccggccctttttagggccgggacttctgcttttttatgaagcgccgtctttcttgggctcgatcagataagacggcaggctccgctggcagccgtttttctcataaaacgcttccgcccccggctgggcgccgaaatacagcagcgtgggggtatgggccgcagccagccgcagcagccggcttccgatgccctgccgctgatatgccggcaacaccagcagctccgtgatggtgccgaaaaagcagccgtctgtgaggactcgcaggcagcccgccagctggccgccgtcccaggcagtgaagttcatcgtttttgacagcgcggcgcgggtctgctccagattgtacgctcccggccagacctgctggacaaagtcgaggaaggtctctccggaaaggctccggtcgtccacacgatactccatggcagcatcctccaatcccgtcacgcctccgccatctcccgcatcagggcgatctcccgggcatagccgggcaggtcgttgggggtctccagacagaagggaagatccttcagcgccgggtggcggacgatccgccccagcgcctccagaccgatggtcccctcccccagacaggcgtggcggtccttgcggctgccggggggattcttgctgtcgttcaaatgaatcgccttcagccgccggaggccgatgatgctgtcaaattctgtcagcacgccgtccaggtcgtggacgatgtcgtatcctccgtcggacacgtggcaggtgtccaggcagacgcccaccttgccggagagctccacccggtccagaatggcccgcagctcctcaaaacggccgcctacttcgctgcccttgcctgccatggtctccagcagaacggtggtggcctgatcgggccgcaggatggcgttgagtccgtcggcaatgagagcgatgccggtctcgcttccctgccccacatggctgccgggatggaagttgtaatactgtcctggcacatgctccagcctagccaggtcgtccgccatggtctcccgggcgaatatccggttcttctcctccgcgccgcagaggttcaaagtatagggagcgtgggcgacaatggggccaaagccgtgccgggccagcaggtcccgcagggctgcagcgtccgccgggtccaggtccttggcccggctgcccctgggattgcgggtgaaaaattgaaaggtgttggcccccagctccagcgcctggcggcccatggccgcaaagcccttggaggaggacagatggcagccgatatacagcatggccgcgcctccttctctcggtctgtactgctctgcatccgccggaaggcggaaggagattatattttatcataccacatggacactgcctatgcacgggcaaaagcaacaaaaagcggggtctgccggccgaaaccggtgaccccgctgagacactgccggacgctggtaaagcggcggccccgtccggcgggggccttatatgtttcgggagagcggatcggcttcatcgtctgtgatgaaaagttcctccgccttctgctgcgcatcgatcagccgggcctggagccggcgcagggattcctccgcatcggtgatggcgttgaagagcaacagatattccttggagaccttctgcatttggtattcatcctttctaaaccgccacaagatctggggactgcccttatcatacacaaaggccgggcgaaattctgtctgaatctgtcgagatacccaaggttttgcaaaaaattcaaaaaccaacacaaaatagcaggaatttccgaaaaaacgaaaaaaatccagggccttttgccggaaaaaatggaaatggcaaaaaaaagcggtccgcgtcaggcgcggaccgctccggaattcaagtcaggtttcgggctgctccagctcccgcaggccggcgatgtcacccaccggcagggagaacaccagggactgagcggcgctctggatgcccgccttggccatgatggccttcataatgggcttcttcgcctcgctccgggccaggatgaagaccatctcctgctccgacgcgatggacacgccgaaaaacttccgcaccaggtctgtgccggtgcccttggcgtggatcaccgtgccgccggtggcgcctgcctcccgggcggcgtccatcaccaggtcggtggacccctggttggcaatgaccacgatcagatcgtgggcaatctcccgttccatagcagtttctccctcctgttcatgcagcagatattccttggcggtggatccgccgatgctgttcaccggcacagtcatcaaaacgccctggccgggcacatccagccacaggtcacgggccgcctggcgcaccagccggggggaccggggggacacgcagaacagcacggccttctccgtggcctccaggcccagaaagtccagcacctccgtggtggcggtgccctgacccagagctgtcagcaccagcgagatcccgtgggtccggaaccaggcggcgaactgctctgcccggctgcggtcagtgatggtgatgaacaaatcgacgccctgcatggcggtctctcctctctttacgatgtcggacggactgctcacagctcgatgatctcctcgtccaccggggcgggaggcgtctcctgagcggctctcttcatcttgagctgatacaaaaggcccagcatctggatggtcagcagcggcgtcatagccaccatagccaccacgccgaaggcgtccgtcaccacattgccgcccaaggcctcgcaggcgccctgagcaaagggcagcaggaaggtggccgtcataggcccggaggccacgccgccggagtcaaaggcaatggcagtaaagatcttggggacgaaaaaggacatgacaatggcggccagataccccggcaccaccagccagaaaatggaaatcccggtcatcacccgcatcatggccagaccgatggaaaccgccacgccgatggagaggctggtgctcatggccttgccgggaatggcgccggaggtgatctcctccacctgcttgttcagaacatggaccgcaggctccgcctggacgatgaaccagcccatcagcattccgatgggaatcaggatccagttgaaggacaggccggcgatctggcggctgaggtagctggccgccggcatgaagcccacgttggcgcccgtaagaaacaggaccaaacccacataagtatacaggatgccgatgacaattttcaatacttttttcttctttaatttcagggaaaccgcctgaaaaacggcgaagaacagtgcgatgggggccagacacaccgccacttcgctgagatacgccggaagttccacctgaaacaggtgccacagagcccggctgtctgtcacggaggggatttccaccggggtgtagacgcccgcgcccgggtagatcagggccagcaccatcaccgccaggatggggccgacagaacagagagccaccaagccgaagctgtcctgggcggcattctcgtcgctgcggatggaggccacgcccacgcccagggccatgataaagggcacggtcatgggacccgtggtgacgccgccggagtcgaaggcgatggccaggaagtcctccggtacaaagagggccagcgcaaacacgaggatgtagaacacgatcagcatccggttcaggggaatgcggaacaggatgcgcagcatggcgatcaccagaaaaacgcccacgcccacggccacagcgcccaccagcgtggcgttgggcacaccgggcacctgctgggccagcacctggagatccggctccgacacggtgacgatgacgccgatcagaaagccgacagccgccacaacccagagctttctggagcgggtcatggcggcgcccacccgttctccgatgggggtcatggcggtgtcagcgcccagggaaaacaggccgatgcccagaatcaccatcaccgcgccgatcagaaaggccagcagcgtctcggtggggatgggcgcaacagtaaagctgaggatcagcacgatcaccgtaatggggaccacggaggccaaggcttcccggagcttttcccagaggatggttttattccgccccaatcgttcctgccattgctctcgtctcttccacggcaatctcatcacctctccaaaattcatacaatttatatagatatgattataataacataaataggccgcccacagtgacgaaaaagcagaaatttacaaaatctttataagcggagcggtgattcccttttttcccgaactgtgctatgctgtaccatatcaccttcacaggagtgcgcaggatgaagaagagtccttacgacagagagcggttttttgaaaaatacagccagatggaccgctcccgcctgggactggcgggcgccggggagtgggagtccttggagcccctgctgccggacttcgccgggaagcgggtgctggatctgggctgcggctacggctggcactgcatctatgcggcggaacacggcgcggcggctgtcaccggcgtggacctgtcggagaaaatgctggccgtggcccgggaaaagaccacggctccgcaggtgacctatatccggggggatatggcggagaccccattcccgccggagagctttgacgtggtcctcagttccctggccatccactatctgccttcctttacagactttttggagcgggtgcggcagtgcctgtcacccggcggcgactttgtcttctctgtggagcaccccattttcactgctgccggtccccaggagtggtactacggcccggacggcacccccctccacttccctgtggaccggtatttcgaggagggacggcgcaccgcccgctttctgggggaggatgtgaccaagtaccaccgcaccctcaccacctatctggacggcctgcttaccggcggattccagctgctgcgggtggtggagcctcagccgccggcgcggatgctgggccagccgggaatgcgggacgagctccgccgccccatgatgctgctggtctccgcccggaagcggacggcgtggccgcacggaaaaccggggcggcgcgacggccccggatgaaaaactgctggaagatcatgaatacacagaaaggaaggactgctccatgaaaacaggtctggtgctggagggcggcgcgctgcggacgatcttctcctccggcgtgtgcgacgcttttttgaacgagaaactgcccatgccggactacaccatcggcgtctcggccgggattgcctacggcgtcagctacctctcccggcagaagcggcggaatctccagctgctgatgcactacgccaatgaccggcggtacatgggctgggggaatttctttgatccccggaatcgcagctacttcgggctgaagttcgcctacgacaccatccccaacgagctggtgccctttgattacgacaccttcgaggcgtatcccggtcaggtggaggcggtggtcaccaacctgcagaccggccgggccgagtaccgggaggtcccccggcgggacgccagcttcctcctgctccaggccacatgcgccatgcccgtgctgttccagcccatccggctggatgacggcgccccctatctggacgggggctgctccgacgccattccctggaagcgggcgctggcggtgggctgcgaccgggtggtggttgtcctgacccgggagcggagctatcggaaggagccggagcagctgatgcccctgttccggcgggtgtaccgcaaataccccgtctttctggaaggactgcggacccgggcggagcgctataaccaatgccgggaggagctgtttgctctggagcaggagggccgggtgttggtgatcgcgccggcgaacacccggggcttctcccgcacggagcgggaccggcagaagatcctggccctgtggcaggacggcttcttcgccggccgccgggctgcggaggcggtgcgggacttctggacgcgggagacaccttccgctgggacaccggaatagcagcagaccgccgcccatctttcagtgggcggcggtttcctcttggcggaagtggttttgcacaagaaatccgtactgctttttgcgttttaccatatttttacgcaaattttacaaaatcttagaaatcctctttccagcgtgccgctttgcatatataatgttggagcgcagtatacatgacagaatcggaccggccgtgccagacggtctggaatactgggaaaggaaagcgcagttatggacattttctccgtctttaccctctgcggcggcctggcgttcttcttgtacggcatgaccgtcatgtccaagagcctggaaaagatggccggcggcaagctggagcggatgctcaagcgcatgacctccagccccttcaagagcttgctgctgggggcgggcatcaccatcgccatccagtcctcctccgccatgacggtgatgctggtgggcctggtgaactccggcgtcatggagttgagacagaccatcggcatcatcatgggctccaacatcggcaccaccctgacggcgtggattctgtctctcaccggcatcgagagtgagaacgtctttgtgaacctgctgaagccggagaacttctctcccctgatcgctctggcgggtatcctgctgatcatgggctccaagcgccagcggcgccgggacgtggggcgcatcatgatgggctttgccattttgatgtacggcatggagctgatgagcggcgccgtcagccctctggcggagatgccccagtttgccgggctgctcaccgcctttgaaaatcccctgctgggtgtgttggtgggcgcggtgttcaccgggattatccagtcatccgctgcctctgtcgccattctgcaggccctggccatgaccggctccatcacctacggcatggccatccccatcattatggggcagaacatcggcacctgcgtcaccgccctcatcagctccatcggcgtcaaccgcaacgccaagcgagtggcggtggtccacatctccttcaacgtcatcggcaccgccgtgtgcctgatcctcttctacggcggcgacatgatcctccacttcaccttcctgaatcaggccgtgggggccgtgggcatcgccttctgccacaccgcctttaacgtgttcaccacgatcctgctcctgcccttctcccgccagctggaaaagctggcgcggagactggtgcggaccgaggacacccgcgagagcttcgccttcctggatcccctgctgctgcggacccccggcgcggcagtcagcgaaagcgtcgccatggcaggccgcatgggacaagccgcccgggagaacatctgcctggcgacggaccagctctcccagtacagccgggagcgggagacccagatcctgcagaacgaggacaagctggacatttacgaggaccggctcagcagctacctggtggagatctcccagcacgggctgtccatgcaggatatgcgcacggtttcccgcttgctccacgccatcggggacttcgagcggatcggcgaccatgccgtgaacatccaggagtccgcccaggagctccacgacaaggagctccggttctctgacagcgcccgggaagagctgcaggtgctgctctccgcgctggatgacatcctggacctgaccatccgcagcttccaggcagcggacatggagaccgcccgccgggtggaacccctggaggagaccatcgaccagctgattgaggagatccgaagccgccatatccagcggctccaggcgggccagtgcaccatccagctgggctttgtgctcagcgacctgctgaccaacatcgagcgggcgtccgatcactgctccaacatcgccgtcagcgtcattgaggagtgctccggcggccccggccgccacgcctatctgcaggaggtgaaggccggcggcgccttcggcgaggacctgcggcgcgaccggaagaaataccatctccccgaggcatgacggaaagcggacaggctctgtgtctaccagacgcagggcctgttttttatcattcaggtatagccgtcccctgtcggagggaaaatacccctatctcaccgaaaacaggaggaatccgtatgtctgtggatctgaagaacagcgagaccctgaaaaacctcatgcgggcctttgcgggcgaaagccaggcccggaaccgctacacctttgccgcctccgtctgccgccagcagaagctgcatgtggtggaggcggtgttccgcttcactgcggaccaggagaaggagcacgcggagattttttacaaccacatgaaagagctggcgggccagaccgtggccatcgacggcacctatcccgtggacctgacgaacgatgtgaaggagctgctccgcaaggcgcagcacaacgagtatgaggagcacgacccggtatacaagaccttcggcgacgtggcccagcaggagggcttttccgctgtggcggcttccttccacaagatcgcagagatcgagcaggcccatggcaaccgcttcggcaggctggcggatctgctggaacagggaaagctgtttgtctccgatgtccagtgcgcctggatgtgcctgaactgcggttatatctttgagggggcggcagcccccaaggtctgccctgtgtgccagcacgaccagggctttttcgtgcggctggagatggcacccttcggggacgcggtgctgaaaaagtgaatcaggctcccaaggcggggaggccggaaaagcggcctccccgccctcttgcagtcggatctgaatattcactcttttattcatctgcaatatacatcgatgctggaaatattcacaaattttcggctgtttttccgggattgaaccggataaaatagagcactccaccaacaggggcaaataaatattcatttttgcacgaaaatctattgacaagagggagggaacgtgataaggtaaggcatgttccggcgggaggtgcttcctcccttggaaattcagagaaaaccgccccgcgaccgcgggagcatgaaaaagggagattgcgataccatgaagaagtttcttgcattgattctgacgctggccatggcgctgtccgtcacggcctgcggcggcagcgacgacactgcggatgacaccgccgacggcgagggctccggcacggaggagactgcggattacgcctccatgactgacgacgagctgaaggccgccatcaccactgtggagggcgggaagctcaccgtcgccaccagcccggacttcgccccctatgagttctacgccattgatgagaacggcgatccccagctggctggctttgatatggacctggcccagtatatcgccgactacctgggcctgtccctggagatcgttcccatggactttgacggcaccatcatggagctgcagaacggcaatgtggacttgggcatggccgggtactcccccgatcccaagcgtgccgacagcatggacttctctgacatttacatcaccggcggccagtctttcgtgtgcgtggagtccaacaaagacctgttcacctctttggaggatgccaacaatgccgactatcagatcggcgctcaggtgggttctatccaggcggatctggcgcatgagaacaccccggacgctgatatcatcgagctcgctaaggtgcccgatatcatcgccgagctggtgaccggcaagctggacggcgcctttatcgagaccatggtggccgagagctatgccacccagtatcccgagctgtgtctggtgctggaggtcccctatgacgccgaaggctctgtggtgggcgtcaccaagggcaacgccgccctgctggagggtgtgaaccgtgccatcgccgccgccaaggaggatggctccttcgatcagtatgtgcttacggccaacgagctggcttctggcgacatcatcgagggcctggtggacgaaaacggcgaggccgttcagtaagcttgtaaaactttcaattcctccctgcggctgcgcagggaggaattggccgctttctcatatattttggtaaagatagaaggaggaaccgcccgtgtttacagccgccggtttcgaaagaacttgggagtacatagaccttttcaaagagggcctgatttgtaccgtctccctctccctgctgaccgtgattttcggttttgtcctggcactgctcctggccatcatgcggctgtccaatgtgcggccgtttcgctttctgggtctgaccaaggacggccatctccgggaacagggcgtgctgatggtcctcagcagatttaaccccctcagcttcatcgccacggtttacgtggaagtcttccgtgccacccctatgctagttcagcttttcatgatctattatgtggtgttcggagatattgatctgccctctttcaagatctttggaaccattcgctttgaacggttcctcccgggcgtgattgccctgtccctgaactccggggcctatctttccgagatcatccgctccggtatccagtccatcgacggcggtcagacggaggcggcacggtccctgggactcagccaggtgcagaacatgcgattcgtgattctgccgcaggctatcaagaatatcctgcctgccatcgccaacgagttcgtcaccattatcaaggagtcttctatctgctataccatcggcgttcaggagatcatgtacgcggtttcctccatcaaaggtgcgacctaccgcattgcggaaccgcttgtggtggccgcctgtgtctacttctgcctgacgttccccaccagcaagatcatcgcttacttcgaaaggagaatgagccgtggcgaccggagataagctgatccaagtcaaggacctgaagaaatactacaaccggggcgccatcaaggccctggacggcgtcacggtggacattgaccggggcgacgtgatggtggtcatcggcccctctgggtccggcaagtccacgttcctccgcagcctgaacctgctggaggagcccaccggcggctccatcatcttcaatggggtggatatcacaaaaaagaagataaaaaatgcggagggcaaaacggtaaaggtggacatcgaccagcaccgccagaagatgggcatggtgttccagcacttcaacctgttccctcacatgaccatcatggacaacatgactctagcccccatccaggtgaagcacatggaccggggcgaggcggagaaaaaggccctggccctgttggaccgagtaggcctgcaggaccgtgcccgcgcctatcccatccagctctccggcggccagaagcagcggattgccattgtccgggcattgatgatggagccggaggttatgctctttgacgagcccacctccgccctggacccggagatggtgggcgaggtgctggaggtcatgaaggagctggcccaggagggcatgactatggtggtggtcacccacgagatgggctttgcccgggaggtgggcagccgggtcctcttcatggcagacggcaagctgctggaggagggctcccccgccgacattttcggaaatccccagcacccccggctccaggacttcctcagcaaggtactgtaaggcagcctgagcccagtgccgcccgctgggcggcgggaccgggcaactgcggggcgcgcacatctgtgcgcgccctttttaacgggccggggcatccggcgcagaaaggagcatccccatgacagcagaaaagcaggcggccgtcgccgccatcgaaaaaaaagcagatctggtagcccaggtggcagatgagatctggtcctttgcggagttgtctctccaggaggagcagtctgccgacctgtactgccgagtgctggagcaggagggcttcaaggtggagcggggcatctgcaacatccccaccgccttctccgccttctacggcagcgggcggcccatcatcggcctgctggcggaatatgacgcgctctccggcctttcccagaagggcggcagcctgacgcgggaggagctggtctccggcggctgcggccacgggtgcgggcataacctgctgggcgccggggccatggccgccgctctgggagtgaaggcgtatctcgaggccgccaagatccccggcaccgtggtactgtatggctgccccggcgaggagggcggcgccgccaaggcatttatggcccgggatgggctatggtacggtctggatgcggccctcacctggcacccggacgacgccaacgaggtgcttaccggctcctccaactcctgcatccaaacccagtaccacttcaccggcgtggcggcccatgccgccggagacccggaccgtggccgcagcgccctggacgcggtggagctgatgaacgtgggcgtccagttcctgcgggagcacatgagtgacaaggctcgggtccactacgccatcaccgatgccggcggccggagtcccaacgtggtccagcccagggccagcgtgctgtacatggtccggtccaatcatgtggcggaggccgtggagctgcaggcccgggtggacaagatcgcccagggcgcagctctgatgactgagactacggtggagaagaaattcatcgacggcctggcggacaccgtcacgaaccacgccctggagcgggtcctctaccgaaattttgaggccctgggggtccccagttacacgccggaggagctggcctttgccgacagcctggccgggacctattccggcagtgaccgggcgccgggcgtgggcagccagtatgatctggactacgcagcggatgcccaggccaggcgggcccaggctggccacgccatgaaccgctttctgctgcccctgtaccaaggggacgccttccagcccggctccacggatgtgggcgacgtcagctggcagtgccctactgcacagatccacgtggccgcctggcccaacggctgccccggccatagctggcagaatgtctcctgcggccggacagacatcggccacaaggcggccctccatgccggcaaggtcctggcggcggccgccattgacctgctgacggacccggccctgctggaggaggcaaagacggagtttcagcgccggacggcggcaggctacacctgccctatccccgcggacgcggtacccaccatcgcagactgattaaaagggcgccccggtcaaagccggggcgcccttttgtcgaaacaaccaattattttttcaggttaccaaaaattttgtttgcttttggggaaatccatggtatcataagagcagaagcctcaagccccgacttccgcaccacagaacgcgcggagtttccgcccgaaaggagtcctgcccatggagtctcgctttgaccgccgggagctgctgtttcagccccggggaattccgcccctcggcacctcgctctccctggccctgcagcatctggtggccatgatcgtggggtgtgtcaccccgcctatcatcatcgccggagccatcggcctcagccaggaggagcaggtgctgctgatccaggcatccctggtgatgtccgccgtgtgcacattcctccagctgtatcccatcggcgggcggttcggctctggcctgccggtgatcctgggtgtcagctttgcctatgttcccagtatgcaggccatcgccgcctccggcggcggagtggcggccattgccggcgccatgatcgtgggcggcatcgtggctgtgctggtgggcgtgttcgtcaagaagatccgccggctgttcccgccggtcattaccggcacggtggtgttcaccattggcctctccctctaccctaccgccatcaactacatggccggcggcaccggcaacacctatgaatccgtggtggcgcaacaggggctgacggaggcgctggtatatggctcctggcagaactggctgatcgcggccctgacgctgactgtcgtgctggtgctgaaccacaaggccaagggcatctgcaagctggcttctatcctgatcgggatgctgttcggctatgcggtggcgctctgcttcggcatggtcagctttgccgacgtgggaaatgctgcctggttcgccctgccggagcccctacacttcggtctgaagttcgatccagcctcctgtgtggccatcgggctgttgtttgccatcaactccatccaggccatcggcgacttcaccgccaccaccgtgggcggcctggaccgggatcccacggaccaggagctccagggcggtatcatcgcctatggcaccagcaatatcctgacggcgctgatgggcggcctgcccacggctacctactcccaaaatgtgggcatcgtcaccaccaacaaggtggtgaaccggacggtgttcgccattgccgggggattcctgctgctggcgggcatctcccccaaatttgcggcgctgctgaccaccattccccagtgcgtgctggggggcgccacagtgacggtgttttccaccattgccatgacgggcatgaagctcatcgcctcccaggacctgacggcccggaacaccaccattgtgggtctctctgctgctctgggcgtggggatttcccaggcctccgaggccctcagccagttcccggaggcgttcaccatggtgttcggacagtctcccgtggtgatcgcaactatcatggcggtgctgctgaacctgattttgcccaaggagaaatgaaaaaacgaacgccggatgggtttccatccggcgtttttatttagggggcggggcgctcagatctcccggcggccctctagggcccgcatcagcgtggcgtcgtcggcgaactccagatgtccgcccacgggaatgccgtaggccaggcgggtcacccgcacgtcaaagggctttaagagcctggcgatatacatggctgtggcctccccctccgtatccggattggtggccatgatgacttccttcacctcgccgctggccacccgctccaccagggatttgatggccaggtcgtccggccccacgtggttcatgggagagatgacgccgtggagcacgtgataccggccgttgtactccctggcccgctctatggcggccacgtcccggggatccgccaccacgcagataacggagccatcccgcttgggggaggcgcagatgggacacagccccccggcggtgaagttttggcacaccgggcagcaggtgacgcttttcttggcgtccaggatggcgtcggcgaactccttggcctccgcctccggcaggcccagcacgtaaaaggccagccgctgggcagacttgccgccgatgcccggcaggcgggcaaactgctccaccagtttttcaagaggtgcggggaaatattccatggtctgatgctccttcaaagggttcgtatccggtctccggccgggtatgggaaaaagaggcgatcaccggggcagatcgatggcgaacagggccgccgtgccgccggtgtggacaaacagcaggtcgtcctgcccgtcaaaagctccctggcgcagcagctgcatcatgccggcaaaggccttcccggtgtagaccggatccagcaggatgccctccgtccgggccagctcctcgatatagggggtatcctccggattcggcagggcatagccggggcccatgtgctccaccatctgaaatgcattctcttccggctggaaggggcactccagcagtgctgcggcctcccctgccaggcgggggacgatcttgtcgaaggggccgctgtccacggcgatgccggtgaccttcacaccgggcagaaacagcccggctcccagcagcagcccagcggccgtgccgccggagccggtggcggagacgatgtgtcccagccgcacgcccgcagccatagcctggacggcgatctcccgggcgccgctcacgtagcccacggcgccgagggccgtggaggcgcccacgggaatatagcagcacttgtgccccgcctgctccagcgtgccgccgatccggtgcatctctgcatagatctcgtcataggaatccatgtccagcagacgcacctcggcgccgaagagctcgtccagcaccagattgccccggtgctccgtgacgccccggcgcttcagcagcaggatgcacttcatcccgagccgcgcggcgcaggcggcggtgagggccgcgtggttggactgggcgccgccggtggtgaataccgtgtcgcacccctggtccagggcctccgccagaacgaattccagcttgcggaccttgctgccgcccagggccacgccgcacaggtcatcccgcttgatccaaatgccccggccgtactgctcgctcagccggtccagccggtaaaacggggtgggaaacacgcccagccggaccctgggcagatcgtgcagattccgcatggcgcgcgccctcagccccgcagctccgcgatgcgggcggggatatcgtcagccttgtagacggcgctgccggccaccagcacattggcgccggcggcgatgcaggtcttgcaggtgacgggatccacgccgccgtccacctccagctcgcagccggggttcttctcatcgatccagcggcggatggcggagaccttgggcatcatatccgccatgaacttctggccgccgaagcccggctccaccgtcatcaccagcaccagttccacctcattcaggaagggtaggaccgtctccgcaggcgttttcggcttcagcaccacaccggcccgcttgcccttggcgtggatcctggcaatggcgtcgtggagcttttcctccgtgtcggactccacatggaccgtcaccaggtcggcgccggcgtcgcagaactgctccacataccggcccggctccacgatcatcaggtgaacatccaggggcagcgccgtggtggggcggatggatttcaccaccgggataccgatggtaatgttggggacgaacatgccgtccatcacatccacatggacgtaatcggcggtggagatgcgctggatatcccgctccagattggcaaaatccgcggagaggatggacggtgcgatttttatcatggaaagcccctcttttctttcattccggcggcagaccggacggaatcgggctgccgggccctgtggcgcgggaagaacccggcgcataggataccccgagcggcaggccgccccccagtctgcacttccgcgcagcgtccgcccctgggcggggcgccgccgcttttttgaatagggagccggtggagcgtacgctctgccggctctcagcttgcgtatataccgtattcagtgtagcagacttccggtgcaaaagcaacggtctcttgcccggacgagccgggaggccggccctgcaaaaaattccaaaagtgttgcataaaccacttctaaaatgagaatattctgataatctaataccagaatccaagagagaggcggtggaatcgtggaagagcagatcgactatgaggagcgggcatcgctgctgaaggccctgtccaaccccatccggctgcagatcgtccacggcctgctgatttccgggtgccacaatgtgggctgcatggaggcgtccaccggcatgtcccagtcctgcatctcccagcatctgcagaagctgcgggcggccaatgtggtgacggcggaacggtccggaaatgaggtatactatcaggtggcgtcccgggaggtggcctccctggtggccgacctgctaggagaggaggcggactcctatgtcctatgatgtgctggtgatcggcggcggccccgcggggctgtccgcgtccatcaacgtccgggcacggggacgcagcgccctggtggtctctaatcccctggaggaaaatcctctctggcgggcggagaaggtggacaactacctgggcctgcccggcctgtccggcgcggagatgctggccgccatgcgccgccacgcggagcaggcgggggtggagtttctggcgggcaaggtgctgaacgccgtgcagatgccggacgcctggtatgtcagcgtggggccggatatgtacaacgccagggctgtggtgctggcggcgggcgtggcccgcgggaagaagtttgccggcgaggcggagcttctgggccggggcgtcagctactgcgccacctgcgacgggatgctctaccggggcaagccggtggcggtggtgggatacaccgacaccgcccggcaggaggcggagtttctccagaaaatcggctgctccgtgacctatttcgaccgccccaagcagtgcgagatccggggcgacggccgggtggagtccgtcacctgcgacggccggaccattccggcggagggcgtgttcatcctgcggcccaccatggcccccacggagctgttcccggggctggcggtggaacagggctatgtgacggtggaccggcgtatggccaccaacctccccggcctgtttgccgcgggagactgcaccggcggtccccttcaggtctccaaggccgcgggagatgggctgatcgccgggcagagtgcggcggcctgggcggcggctcaggagcgccgggaaaaacagagctgaacgtacaacatcaaatttgagtgtataaaggagacatgacgtatgggaatcaagcatttcaagactgcggaatttgacgccgccgtggcggcggcccccttggcgatggtggacttctgggccgactggtgcggcccctgtaagatgctctctccggtgatcgagtccctggcagaccagtacgagggtaaggtcctggtgggcaaggtgaacgtggatgaggagccggatctggcccggcggttcggagtcatgagcatccccacggtggtgttcctgaagaacggccaggaatttgaccggaaggtgggcgtgatgccgccccaggcgtttagcggcgtgctggacaccaacctgtgagctgccccgggcggtgcgcacagtccaaaggcgggaaatccgttaaagcaggccgggcctcttgaggcccggcctgcttctgcctgggcgcggcggcccagtccccgcgggggtggggaacttgccttccggtgcgcccccctttccttctgcggccagcaggggcagccccgccgcagggctgcccgcagcccattcgctggtgcggcaattcgggcttccgcttggtgccgtcctatcacaacggggcacagggattggggctgcaagggaaacgcacagctcccggaggccggtttcagaaaaccgtcggttttcgattcgccttttcacaagaaggggaaattcagctggaagacccggccgggaattacaggctgtgcgacttcaccgcgggcgcattcctagaccgggctgttttaacggtatactgggacccgcaccgcaagaccggcatgaaagcaggccctgtccatgtggacagggcctgctttcatgcttcgatgctgatggcgctgaccgggcagccgtcccgggcctcctgggccgcctccagctggccctccgggatgccgctgccgtgggccagaccgtcgtcgcccatgtggaatacctccgggcaggtgccggcgcacaggccgcagccgatgcagttctcatttactgttgcgttcatattggtcactcctattattccagaatatttccatcccggcccagtgtcaccacctgccagggaatgaacttgccgctctgccgcagggccgtctccgctgcccgctgcataccgccgcagcaggggacatccatccgcacgatggtcagctcccggatatcgttgcggcgaaggatctccgtcagcttttcggcatagtctccctcatccagcttggggcagccgatcagcgtgatgcggccccgcatgaaccgctggtggaagtccgcccgggcataagccgtgcagtccgccgcgatcagcagccgggcaccgttgaaccagggggcctccacaggcaccagcttgatctgcaccggccactgggccaggtgggacaccgcgccgtcctgcggcgcggaaacggcctgagccaccgccggacggagggcctgggccatactgccgggacagccgccggagggcggcgtctgccgcggcgcggtgcctttcagggcctccgccttctttgccaggacagctgcttcatcataggctgcggcctcccgctccacaaacgtgatggctccggtggggcaggtgggcaggcagtctcccagaccgtcgcagtagtcgtcccgcagcaggaccgccttgccgtccaccatgccgatggcaccctcgtgacaggctgcggcacaggcgccgcagccgttgcatttctcctgatcgatctcgatgatccttcttaccatagtgtgtctcctttttggggtttcaaacgttttgcttgctttctgagacctagtatcgtacaatgggataaaaaagtatgttgtttttacaacggaatggagaaaatggtatggaagtttctaccgcgcttcttctccggacgccgttgttccgcgggattccgcaggaggcgctgcctgcgctgctggagggcctgggcgcacggaagcgccgctgtggccggggtgaagtggtcctgcggcggggagagcgggcggaccggctggggctggtcctctccgggacgctgcatatcgtcaaggaggatttctgggggagccgcaccattgtgggcctcgcccggtccggagaggtgtttgcggaggcctatgcctgtctgggcggtgagccgctggaggtggccgtgctggcggcagcggatgcggaggtgctgtttctcaacagcgtacaggcgctgtcctgtgcccggccgggcgccgcggaattcacccggaacctgctgaccattctggcggggcggaatctgaccctcacccggaagattggccacatggcccgccgcaccacccgggacaagctgctcagttatctgtccgcccaggccatgcaggccggagggccggagtttgatatcccgttggaccgccaacagctggcagactatctggcggtggaccgcagcgccatgtctaccgcacttggaaagctccgggacgagggtgtgctgacgtttcaaaaaaaccatttccacctgcttcagcagatggagcagactgactgaggaggagagcgccatgctgacccgagtgccggattattatgaggcgtttcactgtctggcgggggcctgcccccacacctgctgcgaaaagtgggaggtggtggtggacgaggagaccgcccgccgctatcaggagacccctggctccctgggggagcggctgcgggaggcgctccagacggacgaggagggggatttctgcttccccctccggggcggccggtgcccctttctgaaccgagagaatctgtgcgagatccaccggatattgggagcagaggccacgtccctgacctgccggacccacccccggttcattgaggagtacggcccctttcgggaggtcagcctctgtgcctcctgcccggcagcctgtgacctgctgcttggctccaccgccccgctgtccttcctggaacgggagacggcggagccggaggaaccgggagacccgtggctctgcggcctcctgcccctgcgggagcggatgcttcgggagctggcggatcggcctcgtcccctgcaggagcggctggaggcatttttgctcctggctgcggaggcgcaaatcctgctggatgaggaccggacagaggaccttgcggctctggcagcggactggaagaagcgggagacggcggtaccgcccgggcctggcctgtttccacacgccctgcgggtgctgtccaagctggaggccctggacggggactggcgggagctcctgcgcagggcggaggaggcgccgcccgccgccgtgccggagacgctgctggagcggctgggcacatactttgcattccggtatctcctgaaggcggtcaacgacggcgacctgctggggcaggcgcagttctgcgtgctgatggtcctgacggcacagcgcctgacggcagtatgtggcttttgggaggctgtccgccgcctttgctgtgaagtggagcacagtgaagagaacctggaggcgctgcgcctggcgtttcttcgggatgcagctctctcccccggggcgtttttgtgccagatgcggagttgagcggctttgcccgcacctttgtgcattttgctcacggtaattgatttcgatttatggaaagcgtaaaaatacacaaaagcacttgacagcaaaagaaatctattgtacattatagacacaggaaaggagtgagtcccatgggctagttagctcagagattcccaatcatccctgcaccgttcggaatcgaggaattcctcaaaacgcgaaactccggaagaacccaaagacgaaacacacctcacgatgatgagccacacgagaatcgagttttggtagcaaccagagcagacgtctgcgtgtaccgatgttttatggattggcaaacccctgagttcccctgtttccccagcatccggacggtatctcaagaaagcaagaggtaatgcatattggaaactccgatccagaagtaggccccccgttcgtcgttggagcgagcggggggttgtgctgtatagagggcatccggcaaaaagcagggatgcggaagctgaaagcctgttggggcgccggagggcgcttttttgctgcgcagaagcaccgaaacagactgtgtgccgtctccggcggtacggtgacccggtccggcccgtgggccggatgcataaagctgccgggatctggcggagcgccccattcttatgtgcgttcacaccgcatgaatttttctgccctgaagggctgggaaagcggcagaacaccgggcggcccctcccctgccgcgtgctgcgggccctttcctctgcggaatgtgaaaaaagctcccgggccaaatggcccgggagcttctgcgtcgatcttacttgtggtccacagaggacatatagcgaatcagctccaccatcttgttggaatagccgcactcattgtcgtaccaggagacgaccttcacgaaggtgtcggtcagagcgatgccggcatccgcatcgaagatagaggtgcgggaatcgcccaggaagtcggaggacacaacgggctcgtcggtgtagcccagcacgcccttcagctcaccctcagaggcctccttcatggccttgcagatctcctcataggaggcgggcttcgccagcttggcggtcaggtccaccacggagacgtccagagtggggacgcgcatggacatgccggtcagcttgccgttcagctcggggatgaccttgcccacggccttggcggcgccggtggaggaggggatgatgttgccggtggcggcacggccgccgcgccagtccttcagggaggcgccgtccagcagcttctgggtgggggtgacggagtggacggtggtcatcaggccctccacgatgccgaacttgtcattcagcaccttggcgatgggggccaggcagttggtggtgcaggaggcgttggatacgaacgtcatatcagaggtgtacttgctgttgttgacgcccatgacgaacatgggcgtatcgtccttggaaggggcgcccatgaccacgtgcttggcgccagcgtcaatgtgaccctggcacagctccttggtcaggtgcttgccggtgcactcgcaaatatactccgcacccacggaagcccagggaatgtccttgacctccatagcggtaaagacaggatacttcttgccgttgaccaccagggcgccgtcctcggcggagacctcgccggggaacttgccatgcacgctgtcatacttcagcatgtaggccatatactcggggttcatgaagggatcgttcaggccgacgacctctacatcgtcatgagtcagggcggcgcggaagacgaggcggccaatgcggccgaagccattgatgccaatcttggttttcatatcggaaagactcctttcacaaaatcagacgcaccggcggcgcgccgtcaaaacgtttgcgtaaacgttttctaataatcgcacaagtatattatcatacggtcgacctttttgcaactgtcaattcagataacattttctgcggcaggttgtggataatccataagaaaaagggcatatttcacaatttttacacgaaacagggggaaaaggggcttgacgcggagggaaagctgtcctatactgaagtggctaattatttgcgtaaaccaataaaccattgcgcaaggaggctgtcccatgaaggtgaccatcagcgatgtggcgaagctggcgggagtgtccaccgccaccgtgtcccacaccatcaacaatacccggtatgtgtccaacgagacgaaggagaaggtctaccgggccatcgaggagctgggatacacaccggacgcttccgcccgcagtttccgcacgggaaagaaaaagatcatcggctttattgtgcccgatatcgccaataaattcttcgcaaccatgattgagtctgtggaaaaatatctctccgccaacggctaccagctcatcatcgccaatacccgggagaatatggaccgggaggagaccaatatccgcctgctgacggcgggactggtggacgggctgctggtggccagcaccatggacgatttccagcggttcgacgccctgatccccgcaggatttccggtggtgctggtggaccggatctttgagacaaagaagtactcctccgtctgcgtgtccaacttccagcccatctaccgcagtgtatgccggctggcgggaaagggcgaccagcggatcggcatcatcggcggcctcccccgcctctccagcacgcaggagcggatctccgcctatcggcaggctgtggcggactgtggcctgccggaggatgagcatttaatccaatatggcgactccctggagaacagcgcctgcgcctgtctggaccagctgctggagcgcaagtgcgacgccatcatcgtctgtcaggggctgatggcctcggagaccatcatctatctccaccagaagggcatccagctggcccaggacatcgacctggtgagctttgtggactatgactccgatgtgtacgccctgtacgccaatcagatggactccatcatccagccggtggaggacctggggcaggctgcgggcgagcagatcctcagacgggtggaggtgcccgacgcgccgatctttgaaaatgtgctcacatccacgtaccgcccctacaaccagcctcgggcctggtctcattcggaccgctgaactgaaaaaacgcgccgcagaagcggcgcgtttttcatgtcctggagacgttatccctggaagcgcaggtggaagcgggcgccgggatcaccggcaaagacaatcgttccatcctccggcaaggtgacggtggtgtcgccccacaggacggaggaggcagtcacctggccgtttccgtcatacacccagaaaccggaattctccggcacctgcacggtcatggtcttgccggcggcatcgccgacctgataccagcgggcatagccatccgcctgaatggtggtgtaggaggcgccggagccagtgaacagcgtgggcgctgcggccgcgtccatgtagaggctgcccttggcgttgatccagaggacgccgtcccgctcctccagctggtagtccacgccgtcccggctgcccacgccgggcacctggatctcagagcgggcggtggtctcgtccgcgatccgggcggcgccgatatagccggggatcgtttccggaacctccgcgaccgcggcggcgtccgccagcgccaggaaggtctgggagttgtatggctcgttcatgggcaggatacccaaggtggcgatgctgtcccaggcggcggctacctcaggagagagatcgttctccggcagcttcacggcggcgtagttggcgatgggcagcgcccccaggcccggcagaggggagacggcctgctggtacagataggtctggccgttgcgctctttcacaaaggagatgtaggacaacccggtggaatcccggaaggagccgtcgctgcaataggtgaaggtctgggcggggatcgaggtgggatagttcaggtaggacatggtcaaagtgccgtcggcctggatatccacctgatactgggcggaggtggagccgtagtacccggcgttttccagctgttccgcgggcatggcggcggactccgccgcgggcagggcctttacagtctggtccacggtgacgccctcctccgccagagcggcgatgaggatctgattggcggccagctggtcataggtggacacgccgccggagctgaccacagccgcggccatgtcatactccggcaggaccaccaggccggcgtggtagtacagggtgtcaccgcctttcaccagggcctggatgtcgctttggcagaagggataccactccatgttgtcccagcccaggccgtaggccagggagtccggctctccgctttcgggccacaggccccggctgtactccggataggccatggcgtccagagaggactggcgcagcagctccgtgccggtcagggcgccgccgaaggacgccagatcggaagccgtggcatagatgcctccggcaccgatggcgttcagggcatcctggggcagggcgcgggggtcggtgccccggtagatgggggccaaatcgttggcgtcaaagtccccgccgggagcaaaggtgcggtccaggtccagaggggccaggatatgttcgtccacatagtccatgaagtccatgtcagtgatggcctccaccaccagctccgccagggagaagccgtcgttgcagtagacgctgaaggcgccggggtccgccgccagccgctgggtggagagcttctccagcagggtgtcatgggcgcgtgtgctggcctcgccgaacagcatggcgtcagagaggccggtgcccaggatgccggaggagtggttcagcagcatccgaacggtgatgtccttgtaacgctcgtccgccattttgaagtccggcagatactgggtcaccggggcgtccagagacaccttgccgtcctccgccagctgcatcaccgccacggtggtgtagatcttgctgacggatccgatgccgtacagctcgtccccggtcatcaggcgattttcggaccgggagaaggtgccggtctggccggtgagaacgatctccccatcctgccacagcgcgtattgcaggctttgcgcgccgccgtactgggcggcgtaagaggcagcggtgtccgccagggtttgcaggtcctccgcggcggtctcggtttccgccgccgcggcggggaccgccaggctcacggccaggaggagggccagaaccagggctctccagcgagtgtgaagtacgttcataacagttcctttcccgccccacagggcgtttgtgccggacgctccggcgagatgacagtgccaggatacaccttccccccaggggaaggtcaagtaaaaaatccggaaagatccggtccaacagacgttcccggggacggatacccgtccccggtgtctgccggaaacacaaaggcggtgttgagcgcaggactcaacaccgcctgatcttctggatcaaagcgcaacacaacgcccactccccggttcgcacttgaaaaaagcgcaccccgccggtataatgggaaatacggtgcagtcagatgactgttgtgttgagtggtcatgacactcatcacagggacatagcgggtggccgcccgctatgccctgccgcaatttatgcttccgcattcagtttaaccgatggagaatggaaaatcaagggctttccagagtttctcgccatatagaaaacggcacggcaaccgccgtgccgctctttttatgtcttgctccgccctgccgccagcatgaacagcacgccgatgacgccaaagaccaggcacatccccagcatggcgtcggcgccgccccagtcgatggcgtaccccgccaggaagttgccgaacatggcccccaggccgttggaggcgatcatcataatggactggcccttcacctggtccaccgggaagacgtttgcgttggcgtagtagaccgaggcgggggtgaacagcccgtaccccagcagctggacgggctgcaccagcaggagtccggagaggccgggggccagcaggaacagcaggggcttcaccgccatgaagcagatggacatccgcagggtccccgccgcgccgaagcggcggaacagcggcgtgaacagcagcgccgcgggcagctccgacgcccccatcagaaacagtgccagacccaggtgcccctcgtcgccgccccggtctgagacgaggttcaccatgaagctgacgatgggcataatggccgccagggtgaagaacaggctcaccagcgtcagggtgaaggggcggctgcttttcagaatgtacaatatggagtggggccgctctcccccgccctgggcctgcaaggcatctttgggaaaggcagggtacagggccaccaccgcgatcatcagcaccagcagcgccatgtgggtcagcagcaggctttctgttccgaagcgcaccgcctgctggccgcacgcaacgcaggccagggcataggacagagaccccagcccacggctgaggctgtacgacatgtccaccccggcggcgatgaactgtaccgccatggagtccagcagaggataggcgttcagctccagaatgcccagggtcaggaagatcagggcggtgccccagaagccggggcgggtggtgtagaatactacattcacccccagggccagcaccagacaggcgttcagcaggcgtttgatcggcacctccgggtggcggtccgcccagcctcccagcaacggctgagccaaaatgccggcaaagcagcgaatggaggcaaagatccccgcctccccgctggtaaagccccgccccagcagcagagaggtctggtagcccgcgaagatggcaaacatggcccagtagaccacgtggaccagcgtataggatacgttcagccgccgcagagaggggaattcggtcatacggtctcctttccgggaatcagcagacccagcaggggttcaaaatctacgccctcccgcataggcaggtcttccgccgcggtccgctccgcgcaggcacggacgaacgccgccgcctctccggcggcggaggagagggactccccccgcaccagggccccggtgaggacgctggagaacacgtccccggtgccgtggaactcatgggccacataggcggtctgaacggcctccgtcttcccggtgcgggcgtcgaagcagacggcgccggtccggccgggggccagagaagcgcccgtcagcaccacagaccgccgccctcccaggctcagccgctccgtgatctcccggaggcccgcctcgccggcgggcagcgtctcatagggctggcccagcagcagcgctgcctccgtcaggttgggggtgatgacgtccgccagctccgccagccgggccatgccgctgcacatggcggcggtgtaggtctggtagacccggccgtagtcccccatcaccgggtccaccaccaccacggtgtccggtccccggaaccggcagataaagttctccaccacgccgatctgccgctcactgcccaggaagccgctgtatacagcctggaatgtcaggcccaagctggcccagtggtccgccaccttggacatttcgtcggtcatgtccagaaaggtgaacccctcgaacccgccggtatgggtggagagaaatgccgtgggcagggggcagcactggacccccatggcggagagaataggaatggccacagtgagagaacaccggccgaagccggacatgtcatgaatggcagcaacgcgtggggtcatcatggtacgcttcctcttttcaatggttttgaacagactgcatttcattgtatcgtagattttcctattgttcaagaggaagagatgtgatatactgcaactatcccagcatcatctctgcgggtatggtggaattggcagacacgatggatttaggttccattgggcaaccgtgcaggttcaagtcctgttacccgcaccagctcgccgcaagcgtcatatcgcttgcggtgagctttttcatttcattgcagagcttatcgtgcgctcgttctgctgcttttcgattccaaactgaaccaacttcactgggcttcggtttgggtccgccgctttgcggcgattttatcttactcacgaggtaatatcgactccaaccggccctgccatcaaaaggggcatctttttgggatgtcccttttgacgggtttcgctgtccggagggatggctccgccctccgatgctctaaaatacgcgggtgaatgaatttgcattgcgctaggcatccgctttccgggaaaacacctgcccgccgcccgtgccgactggaagggcggtgctgaaaatgtggattttgaccgaaccgttcccgcccaaaaagaacgatatccagaggccgccggtttttgacgttcggcggccagagaacggctccaaacagccggtccccttctgtgcttccacggtcccgcagccactgccgtgccgctggccgcgccctgattgaaactaaaaaaaggagacgcgctgaaaagcgcgtctccttttacagcagagtttgaccgtggtgcatccggcacggcagggcggcggatcagacctccaaattccggccggtctcccggtcgaagacatgggccacgttcccgccgaaggtgaacggcagggcgctgccggtggcgggaatcggatgccccgccccctggagatccatggtctggaggatgacgatggtgtcccgcccgcaggcgtccacgtggagatggaccgcagagcccatcatctccgccacgtccacagtgccccgcaccgcctgggacgcatccccggccagggagatgtgctccggccggacgcccagcgtgatggggccgggctggacctgcttccgggccaggttcgcctgcttggcttcggagagttccacccgggcgttctccagaaccaccgcatagcggccgtcttccttcaccagctccgcatcaaagaagttcatctggggcgtgccgataaagcccgccacgaacaggttcgtgggatggtcgaacacctcctggggcgtgccgatctgctggatgacgccgtccttcatgatgacgatccggtcgcccagtgtcatggcctctgtctggtcgtgggtcacgtagatgaacgtggtgtcgatccgctggcgcagcttgatgatctccgcccgcatctggttgcgcagcttggcgtccaggttggagagcggctcgtccatcagcaggaccttgggctcccgcacgatggcccggccaatggccacccgctggcgctggccgccggagagggccttgggcttgcggtccagatactccgtgatgcccagaacctccgccgcctgatccacccgcttgcggatctcctccttggggtacttcttcagcttcagggggaaggccatgttctcccgcacagtcatgtgggggtacagagcgtagttctggaacaccatggcgatatcccggtccttgggtgccacatcgttcatcagcttgccgtcgatatacagttcgccgccgctgatctcctccaggccggcgaccatccgcagggtagtggacttgccgcagccggaggggcctaccagcacgatgaactccttgtccgcaatgttcaggctgaactcctgcactgccagcacgccctcatccgtaatctggaggttcgtcttcttctcctcagagccctttttcttcttggcgggttcctggtggggatagacctttttgatgtttttcagaataacttctgccatgatatcaggctctggaaacagcgcctccgcagctgttccctcacggccggccggggccggtccgcctctgtggcaggtctccacactgccgcaccgcgagccaggcggggttctcctccttttttcgtcccgctcccggcagaatgtggagtgccggagcggacggatatgtcgtatttgaccggggattcaatccgggatggacaggtatgtgccctccattgcgccgccggcgcctactgtgaacgtcagggcctgatgggggggcgggactgcgccgtccggaccgggcgggcagtcggaaaagtacagccgtgcgccgctgtccgccatcatctgcaggatggccggatcggcgctgttgtagcggcggtcgctggatgcgcagcacaccaccgcccggggagcgatggcctggatctgttctgcagaaataccgtcccgctggccgtggtggcccaccttgaagaggtcggcccgcagggaggcggggtccagccctccatagcccatgtagttggtgtcgccggggagtaggatccgggtcccccggtactccagcaggaggatcaggctgtaattgttcatggccgcgtccagctggtccaggcgctgccagaaagcggacgggtccgcctcctcatacagtgcccggcacgaggacgccagcttctccgcctgtgcacgggaggggcccagcacccgaaccaagagatcccggcacagccggagctccattccggccagaggccggtggcgcgggcagctctgccccaggcagaggcggcggtagtcgttcagggcccggagaaacttgctccgggagggcgtcaggccctccgccggaatgtccagcgtccgcatggagcggcaaaactccgggggcagcgtctgccagagggccgcgggaggcagcttctccgccgcgggcagcaggccgcacaggtggtcctcatggacatgggtggctgccatcaggtcgatgtggtccacgccccgcagggagagatactggtccaaggggatacggccggtggcgctgtcccggtactcttctgcttcggcgctgccgccgtcgatcaccatgacaaaggtaccgccggggaaggccgggtcgggacattccagcagggcggcctccccatagcccacgttgacgaatgtcagcttcagttcttccataggcgctcaacccatggcccgcttgatgtagaagctggacaggatcagcaccagcaatgtcatcacgatggcgccggcgctgccgaagccgaagtccagagacttgataccgtatgtatacaagaactgagtgatggtcgtggtggtgcccgccgggccaccgccggtgaggacgttcaccttctcgaacaggcggaaggtgtcgatggtccgcagcagggcgcacagggccaggctgcccttgatgttgggcagggtgatgtaccagaactgctggaagaagccggcgccgtcgatgcgggcggcctcatactggttctccgacacggactggagggaggcgtacagcagcagaaacacaaaggggacgttctgccacacgtcgatcagcaggatcgtgccgaaggccgtttttgtgtccatgaaccagttgaacaccggcaggcccagtcccttcaggaactggttgatgatgccgtagttggcggagagcatcatccgccagctgagggccaccgtgacggcgggcagcagatagggcaggagcagcagcgtccgcataatcttctgccctcgcttgagggagttgacaaatactgcgatcagaaggccgagggccatctccagtaccaccgccaggatagtgaacttgatggtgttccacaccgcctgctgaaaatatccgtttttaaagagggagacgtagttatcgaacagcacaaaagaggcgttctccgtgcccttcaggtagttgtagtcggtaaagctgtatacaaatgtgaaaatcaggggataggccgtcatgaccagcaggactatcagggtgggcgtgagcattccgatcccgaaccggtttgtggccgcctgggcgctattcagttttgcaatctcgtttctcttcatacattggcctcacaaactcgagaggtgtggccccagggcccggctccggggcttttggaacaacggccggggcgccagacggcgccccggccggccgtgtcatttctgttttagagaggctgggttcaggccatcagctgctccagctgctcctgggcgtaggccagcgcctcgtccatggtcttggtgccctggatgatgttgtccatctcggtgcccaggatgttggtgaactccgtccactcctcgatcacagggcggtacacgccggtctccagagcgccgcagacggtctgcaggtggggataggtctccagcacggtggaatcggtcaggcagctgtaccggcagggcacgccgttgttctcaatggaggccagctgcacctcggggctcatgacgtactccagcagctccagggccaggtccttgtggggggcgttgtcggggatgccgatgcaccacacgccctgcagggccacggcgtccacaggcgcggagtcgtcggtcagcttggtggggatggtggtgtagttggcaggaccgtcagcagtgggggtgtaccagccgggccagatctgggccagggcggtctcgccggaggtcacggaagccacgatgtcgtccttgtccagggtgctgcccagggcgtacaggtccaggtactcctgcatggcggccttgaactcgggagtgtcaacggtggggttgttgttctcatccacgacccagccgccgtggacaaccaggtggggcaggaagtcggacaggatgttgtcggcgctgccgccgcggatcaggaaaccgttcttgttggagtcggccgccttggtcttctgggcgatgtccatcagatccgcgaaggagtcgatatcctcgggggcgtagccggcgtccgccagcagctgcttgttgtacatcatgaccgtcacgttgccgtagtagggagccaggtagatgtcctcgcccaccttgcagatggtggtggtggcgggaatgatgtcgtcgtcaaagctgtatcccatctcgctgaggttggccagtacgccgttctcagtgaactcggccatccaggagccgtccaccatgcacaggtcgtaggtgccaacttcgttgacggcatccagggcgatgccggtgtgcaggtcgtcgaaggacatgagcatcacttcgatgtccacgttgtgctccgcttcaaagggggccaggctggcctccagggactcgccgtaggcgccgccccgcaggatcagggtcatcttggtgggctcgccggaagtgctgccctcgctgccttcatcggccgtgtcctctccaccgccgccgcaggccgccagagacagcgtcatggccagcgccaggaccagggtaagcagttttttcatttcgtttcctcctactcttttccgcttgatgttgtgtcagggatcggaagtgcgatgtattttgttactctttgacagcaccgcttgacaatccggagatcaagtagttctgcgcaaagatcacaaacagggtgatggggatgacagacaccacgccgcctgcggccaccaggccaaagttggtcaggttgtcctccgtgttcagcaccgacagcgccaggggcacggtgtagttgctggggctgcgggtaaagatgaccgtgtaggtgtactcattccaggcgtacatgaaggacagcatggctaccgcggcgatacccggcgccaccaggggcaggacgatcttgcggaagagctgccactctgtggcgccgtccaccttggcgctctcctccacctcctccggcaggtcctggaaaaagctgatgaggaaccagataatcagcggcacgttgatgagcacgcaggccagcgtcaccgggatcttggtgttcaacaggccgatcttgctgaacatggtgtacagggggatggtgaaggccaccggaggcagcacgcggaccagcagcacccaataggtcattggccgcttcagcccgaagcggaatctccgccgggccaggatataggcggcgcagactcccacgatcagcgacagcaccagggagctcagcgtggtctgcaggctgttgatggcggcttggccgaagcccttgctgacaaacaggctgataaaatgctcaatggtgagggactgcgggatcagggagatatgcccctgcatctccgatgtagggcggatggccatggccaccagccaatagatgggaaacagggcgatcaccaacagcagggcgcagcccaggacttttcccactgtcccggctctttttctcgctttcatatcctctcctcctcgtttttgcgcatggcaaaattcccgccgcgcacccgcggcattctgtatttttccaaagtacgggtcaactggagccgcgcacccgcagctctgtgggcaccaccgtgacctgggggacgtccgtctcccctgccagcagcgcctggagccgcgccacgctcaactcccccatccggcggcagtcgatgtggacggaggtgagctccggctccagcatcccgcaggcggagctgtcgtccagtcccgtcaccgccaggtcttccggcacccgcaggcccaggcggagggcggccttcatggctccggcggccatcacgtcgtttccgccgaagatggccgtgggccggtcctgccgggacagcagctccaggcaggcctctgcggcactctccaccgtgggatcgcacagcttgatgtgccgggtgtctgccggcaggccgtgggcctgggtgacttccagaaaggcccggtaccgctctcccagtatatagggggagaagcgccctgccagcatggcgatgttccgatgaccccggccgatcaggtgctccagcgcctggcggaccccgccgtattcgtccgacaccacgcagggaatgtccagtccctggatgcggttgtttaccagtaccacggccagatcccggttctggagctctgcgatcatatccggtcgggcattgccgcccaggatcacaccctccacctgtttgtttttggaggtgttggaggccgtgtcccagtccgcagcggtggaaatgaccaactcaaagtcacttcggttcgtctcccgcatgatcccggtgcagatgccggcgtagaattcgtccaggatcgtggccccctccttacagatcaggaaggcgatcttgtccgttcgctggcgggccatggcccgggcgatggcatttggagagtagtggagcacttccgctgcttcaaacaccttccggcgggtgtcctcccggacccgctccggattggagaacgcgcgggacacggtggcgatggaaactccggacagtctggagacatcatagatggttggattcacggtcacgccccttttcacgtaagcgttttcatatttttcgtaggaaaataacagtttttttgttgtaaagcttccagtgttttcctggatcaagtcaactttaacacttttttgcggtggaagcaagggattctttgtatttaatgtacattttacacaggtgtagaaaagctctaacattccttgtatagatcggcagaaatgtaaccgcttccattaaaagcacttatgacagatgatactgctccgggaatgtgagaggtgcttctctccaggcttgtctttttcccgcgcctatattatactgttcacggaattctcaggaaaagagctgatgggatgtacagagccaggtccgccctccgccatgggcagatgtccgaggcattttccaccatggtttttctgaccctgtccggcgggctgcaggacgcttacacctactgcgtccggggacaggttttcgccaatgcccagacgggaaacatcgttcttatgagccagcgggcctttgccggggatctggccggcgtcctccggtatctgatcccgctgctggcctttgcgctgggcgtctttgctgcggagatggtccgccgccgctgtcaggagatttcccggctccactggcggcagatggtggtgctggctgagatcggcctgctgctgggcgtgggattcctcccatcgtcctgggatgcgccggccaacgcgctggtgtccttcacctgcgccatgcaggtccaggcgttccgcaaggtcaacggcagcgcatacgccagtaccatgtgcatcggcaatctccgcagcggggtggacgccttctgcgcctactgggacacccgggaccggaccgccctgcggaaggccggccgctacttcgccgtcatcctcatttttgccctgggggccggattcggcggcgttgcctcccagctctggggaacaggggccatctgggccagctgtctgctgctggccgtcagttttcttctgatgttccggcaggagatccaggcggaagcggactgctgaggatgcggggaacggcctccatccggatttcacaccaataatgatatgatgaggagaatgagaaccatgtctgaaacagccaaaatgctccatgtgaatctggcccccggagaggcgggccgctacgccatcgtccccggggatccggaccggtgcgagctgatcgccgcccacctggacaacccccgcatggtgacccggaagcgggagttcaccacctgggagggcacgctggatggagagcgggtcaccgttacctccaccggtatcggggggccctccaccgccatctgcgtggaggagctccataagtgcggggcggataccttcatccgggtgggcacctgcgcctccacctgcgccgacgtccagtgcggggacatcgtggtggtcagcggcagtgtccgcatggacggcaccagcctccactacctgcccatggagttccctgccgtccccagctaccagctgctgaaggctctggaggagagctctgtgtctctgggctttcacaccacggtgggcgtcagcatcaccaaggactccttttacacgcaggcggagccggagacgaagccggtgtccgatgatctgatccgccgctggcagagctatgtccggggcggtgccgtctgcacctccatggaggagtccatcctcttctctgtgggctccagcctggggatccgcaccgcctccatcctggtatcagccaccaatttcgacgggtccgtctccaagcgcaacagcgccgacgtctatcccaccgacagcatccagaagcccatcctctccgccatcgaagccctgcgccggatcatccggcaggacaagggctgatctccctccggatatcaaaaccgccccgtgccgcaggcacggggcggtccttttatatcacatctctccgccgtactcccggcggtattcctccagctcttccgcgtcccggtcatccagggcgtgaaggccgccccggccctccatgtggtgggtcagctcatgggacagggtggtgtatagctcgtcctcccatgtttcctggccccagtcctcccgctctgcaagggcggcaaaggagccgtagtacaggttgatatactggcccagcaggtcgtcgcagtactcccccaggatatacatctcgccctccgggaactccgggtccggcttggcctcctccagcaggttgatcccgccgttgaggccgtcgaacaacgccgccgggaaactgtctgccatgtcgtccagcaggtcgttcacccggtcgatggtcaggatcatggctgtttccctcctcacgccttgggcacctgcttcatgctgaggccgatgcgctttttcttctcgtccacctccagcaccaccacctggacgatgtctcccacagacaccacctccgaggggtgtttgataaacttctgggacacctgggagatgtggaccagcccgtcctggtggacgccgatgtccacgaacacgccgaagtcgatgacattccgcaccgtgcccgtcagcaccatgccgggcttcaggtccttcatctccagcacgtcggtgcggaggatgggcttgggcagctcgtcccggatgtcccggccgggcttcatcagttccgccgccacgtcccgcaatgtgggcacgcccacgccgcagtccgccgccgcccggtcctcgccgtaggtcctgatctgggcgttcagatctcccagcttcccatcccgcacgtccgtgagggtgtggccggtgagggagagcaatttctccgccgcggcgtagctctccgggtggacggcggtgttgtccagcacggagcggctctccggcacccgcaggaagccggcgcactgctcaaaggccttaggccccagcttgggcaccttcaagatctgcttccgggaagtgaaggggccgttttcctcccggtaggccaccacatttttcgccgtggtcgcgttcagccccgccacacgctgaagcagggagggggaggcggtattcacgtccacgcccacggcgttcacacagtcctccaccacaccgttcaaagcctcgtccagccgcttggggggcatgtcgtgctggtactgtcccacgccgatggccttggggtcgatcttcaccagctccgccagagggtcctggaggcgccgggcaatggatacggcagaccggagattcacgtcgtactgggggaactcctccgccgccagggggctggcggagtacacgctggccccggcctcgctgacgatcatgtagctgacatgggcgccggcctcattcacctgccggatcagcttcaccgccatctgctccgtctcccggctggctgtgccgttgccgatggcgatgtgctccacgccgtgctttcggatcagctttgccagggcggcgatagcctcgttctcctgccgctcgccgtaggtggggtataccacggcggtgtccagcactttgcccgtgccgtccaccaccgccaccttgcagcccatccggtaccccgggtccaggcccatggtgaccctgcccttcaccgggggctgcatcagcaggggcttcagattcagggcgaactggccgatggccccctcgtccgcccgctccgtcaggtcggagcgagcctcccgctccagggcggggaagatcaggcggtcgtatgcgtcctccgccgcggacttgataaattccattgcggcgctgccggggacgatcacatgccgccggacggcctggagggcccggtcccggtccagctccacgcggaccttcagaaagccctccttctccccccggttgacggccaggatctggtgaccctgaagccgggagagggcctgggagaagtcgtagtacagccggtagacagagtcctcctccaccgccgcctgggagcagagctttccctcccgctccaggagggtgcggagggtcttgcggagggcggcgtcgtcgctgatggtctcggcgatgatgtcggaggcgccggagagggcgtcctccaccgtctccacgcccttttcggcatccacataccgggcggcctccgccgtcgggtccgggcagtccggcccctgggcaaacagcagttccgccaaaggcgccaggcccttttcccgggcaatggtggcccgggtgcggcgcttctgcttgtaggggcggtacaggtcctccacctccgccagcgtccgggcggcgtcgatggcggcggagagttcctccgtcagcttgccctgttcctcgatagaccgcttcaccgcctcccggcgttccgccaggttccgcaggtactggaggcgctcctccagattccgcagggcggtgtcgtccatggcgccgtgaagctccttgcggtagcgggcgatgaagggaatggtgttgccctcgtccagaaggcggaccacgttttccacatggcgggggtctttgtccagctcagatgccagttgttgaatgagatcctgcatgggttatgattcttccttttctacgtgaaatagggcggcagtctgctgcccgggaaattcagctatgggataaccgggcagatacacccgatactgggggcgggtgccgccggatgccggatagcggtgaagggatcgttgttcccaaagaagggcttgcacaacggggcgtgtgcggccacgtccccaaaggaccgcttttggatgcgctccggtgcagtggttctcctcgccggcaggaagcggcatatcggtatctgcgccaatcatgtctgaggttcgggtgcgctgttctttttgcggggcgtacagctgctgccccatgccgggaatgctggcggcacaggtgtggctaccgaattacctcttcctctggtccgctgctgggtatcctgtcggggcagcccgtccgtctttataaccctggggccgtgcggccaaccagatcatctaaagtgacgccaaaatagtctgccagggcaatcagcccttgaaaatcaggatagcgcttcccctcttcataatagcgataggcccgcacagtaattcccaaatgggctgccagatcctcttttgtggcatttttttcttttcgcaattcctgcaaacgctctgaaaatctttccatatattctccttgacggaacttaaagttcctagtataatgagaacataaagttcttcgaggtgcatgattatgaacgacatcttgtctgccatctaccggaatcttctggagagccgattttcagcatctctctcctgcccggattaccggcgagctattatacgggtggaacagtgcatggatgagctgcgccaggcactacctgccgaagagcaggagctgccggagcagttctgggacgcctgctccgacctccatctcatggagctggaggtcatgtttcaggtaacatggaccgcggcccgggaaatctgattcctgttttacttatgatagagcttcttcgtctcgtaccgggcctcgcagctgacgttgatgcccaggcggcgcagaaggttttcgtccacctcgctgaggatcaccgtgaagtgggcgtcgcagccccggagcttgggcaactgctgctgggccagctccgccagggggttggtcagggcggagatggtgagcgccatcagcacttcatccgtgtggagccgggggttcttgtggcccaggtactgggtcttcagccggcacaccggctccagcacctgggcggagatcagctcgaactggtcaccgatgccgcccacggccttcagcgcgttcagcagcagggcggaggccgcccccagggtgtcggaggtcttgccggtgaccacccggccgtctggcagcaccatggcgccggcagggccgccggtggtctccgccttcagcagggcagcggacaccgccgggcagatgtccggtgtgacgctcgcctgttgcatcaccagctccagcttccgcaccggctcgtccccggctttgccccgcagccgctccacgcaggcggtgtagtagcgccgcaggatctccatgcggctggcggcgcagcacaccgcgtcgtcacagatacagttgccaaccatgttcactcccatgtccgtgggggactggtagggggacgtgccctggatcttctcaaagatggcgttcagcaccgggaagatctccacatcccggttgtagttgacggcagtcttgccataggcctccagatggaaggggtcaatcatgttcacgtcgttcagatccgccgtggccgcctcgtaggccagattcaccggatgcttgaggggcaggttccagatggggaaggtctcgaacttggcgtagcccgcagcgatgccccgcttgtagtcgtggtagagctgggagaggcaggtggccatcttgccgctgccggggcccggcgccgtcaccaccaccagcgggtgcgtggtctccacatactcattctttccaaggccctcgtcgctgacaatgtgctgcacgtcggaggggtagcccgcgatgggatagtggcggtagcaccggatgcccagggtggtcaaccgcttcaaaaaggcgtccgccgccccctggccgctgtaccggctcatcaccacgccgcccacatagaagcccatgccccggaagatgtcgatcagccgcagcacgtcgtcgtcataggtgatgcccaggtccccccggaccttgtttttctcgatgtctgcggcgttaatggcaatgaggatctccacgtcgtcctgcagctgctggagcatccggatcttgctgtccggctcgaatcccggcagcacccgggaggcgtggtagtcgtcgaacagcttgccgccgaactccagatacagcttgccgccgaactgggcgatgcgctttttgatctgctcggactgggtggtgaggtacttctgattgtcaaaaccgatggccggcatacgatcttccccttttctctctggttgttcaaaattcggtgatagtataccacaccctgtcccgttttggaagtggagaaccaaggcttttccgctgcgccctgcatcttgcaggcggccagctcccatggtacaatcagcggagaatttgcagggaggggatccagatgcgcaacacctttgaccgcttcaatggccggcaccaggactatcaggccgccagaccttcttatgcccaggaattcctggactggctgggagagctgtacgcgccgccggagcgctatacagcggcggacatcggatccggcaccggcaagctctccgcccagctgctggcagcgggcttccgcgtctgcggcgtggagccgaatccggatatgcggggggcggcggaggcgcttctgggcggcgatccccggttctcctcctcaaatggaacggaccatgataccgggctgccggaccggtccgtggacatggtcgcagcggcccaggccttccactggttcgacggtcctgcctttgcgcgggagtgccgccggatcctgcgtcccggcgggcgggccgttctcgtctggaacgtccgcgggtctgcaccgatgaaccaggccttggcccaggtctttcgggagcactgtccgagctttcacggattcaccggcgggatgggggaggacgacccccgcatccgggattttttcggcggggcgtatgaaaagcggcggttccccaatcccctgacgctggaccgggaccaattcctccggcggtgcttttccagctcctatgccctgcgggagggagacgcggattacgaagcctttcgggcggcgctggaggcgctgttcgacactttcgcctccggcgggcaactgattcagcccaacgagactgtggcctatgtggggatccccgccgctccccggggatgaggcatttccagaattgaaaggtcgaccttatcagaaaaaataatgcttattattacaagttcaggctttacttatggaaaatcagccgatataataactaaggttgggcatctttggagaaaaggtcgacctgaccggagtgtctgtaaatcaaaaccgggaggtttttggatatgtcaaattgtgccatcgtgggaatcaactggggagacgagggcaagggccgcatggtagacctggtgaccgcggactacgacgtggtggtccgctatcagggcggcggcaacgccggccataccgtggtgaacgagttcggcaagtttgccctgcacctgctgccctccggcatcttccgcaagggtgtggtgaacatcctgggcaacggcgtggctctggattgcgagagcctgtggactgagatgtccgacgtcatggaccagggcgtggccatcacgccggagaacctgaaaatcagcgaccgggcgtccctgctgctgccctggcaccgggacctggactccctggaggaggcccgcctggcggacaagaagtacggctccaccaagcagggcatcgccccgttctattcggacaagtaccagaagaagaccatcatggccggcgagctgctgtacccggaaaagctctgggaccatctggcgggcattctggagtggaagaacctgacgctggagcgggtctacggcgccaagccctacaccatggatgacctgaaggcatgggtagcggagtttggcgagaagatcaagcccttcatctgcgacaccggcgccttcctgcgccaggcccaggccgagggcaagcacatcctgtttgaggcccagctgggctccctgcgggatctggactacggcatctacccctacaccacctcctccaaccccatcgcggcgtatgcccctgtgggctccggcctgcccaccgccaagctggacaagatcatcggtgtggtgaaggcatactcctcctgcgtgggagagggccccttcacctgcgagtggttcggtgaagaggcggagaagctgcgggaggccggcggtgagtacggcgccaagaccggccggccccgccgggtgggtcccatcgacatcgtggccacccgctatggcatccagtgccagggagccacggacatcgccctgaccaagctggatgtgctcagctacatggatgagatccccatctgcgcccgatatgagctgaacgggcaggagaccgacgcgttccccttccccgccgtgctgccggacgccaagcccgtcatgactgccatgcccggctggaagtgcgacatctccggcgtccggaagtgggagaacctgccggaggcggcccggaactatgtggaatacgtggagcgggagatcggctgccatatcacctatgtgtctgtgggaccggaaagagattccatcatcattcggtgaggaggaaatccgatgctgtttgccgtattcgggtggatcgcgttggcaggtgccctctgctggccgtttctcctttaccggatcatttcaaaagcatcgaaggatcgttccgcgggtgtcgagtgtttcctgttggcactgctcagcctggatttttgtctctggctgtttacagtttttaccgcactccctgcttcataaatgcttcgcctccggcgaaacagatcgtaccctctggaggcacccatgccggtgcctcctaaacttttgagcgaaagaaaggtggacctcttatgtccaaagaacgttacgaatcccccctggcgtcccggtacgcctcggcgttcatgctgcacctgttctcccccgacatgcgctttgagacctggaggcggctgtgggtggccctggcccgggccgagcgcaatctgggcctgcccgtcaccgcggagcaggtggcggagctggaggcccacatcaccgacatcgactatgagacggcttcggcgcgggagaaggaggtccgccacgacgtgatggcccacgtctacacctacggcaaggcggccccctccgccgcggggatcatccacctgggggccaccagctgctatgtcaccgacaacgcggatctcatcatctaccgggagggcctgcggtatctccggggagagctgctggctgtggtggcgaacctcagtaaatttgcagagcaatacaaggccacccccaccctgggctatacccactatcagcccgcccagctggtgacggtgggcaagcgggccaccctctggatgcaggacctgctctccgacctggaggagctggacttcgtcctggaccacatgaagttcctgggctgccggggcaccaccggcacagaggccagctttatggacctgttcgatggagacggcgccaagattgacgagatgaaccggcagatcgccgcagaattcggttttgagcagtgttatgccgtctgtggccagacctatcccagaaaggcggacagccgcatcctgaactgcctctccgccattgcccagagctgctaccgcatggccaacgacatccgccttctccagcacgaccggcaggtggaggagccctttgagaagaaccagatcggctcctctgccatggcctacaagcgcaatcccatgcggtccgagcggatctgctctctcagccgctacctgatggcggacgccatgaacgcccccatgaccgcctccgtccagtggttggagcggaccctggacgactccgccaaccgccgcatctccatgccagagggcttcctctgcgccgacgccatcctgcgtctcagtcagaacgtcaccgacgggctccacgtcaacgagaagatcgtggaccggacctgccgggagtacctgcccttcattgctacggagaacctgatgatggagggcgtcaagcggggcggcgaccggcaggcgctccacgagatcatccgcacctgctccatggccgccaccgcccggatgaaggagggggagccctgcgacctgctctcccgcctggcggcggagcctgccttcggcatgaccgaggcggagatggaggccgtgctggacccgaagctgtacatcggccgctgtccggagcaggtggacgccttcctggcccaggtgaggcccctgctctccggcgccagccgggaagtcccggagatcagtctctgaccgtttcataccgtccgggcgccctgcccgccgtgcctgcggcgggaggggcgccggaacgcttttcaggcggaaccccttcggctgtcccggagcggaggagccgggaaggctgccggaaatggaatgccgattttgtgggttttgacgttgacagtgcgctgctggcggtgatacactgctaccatcgctttcgagatcgaggccaaatccaaccatcagaaggcattgatggagaaaaggatcgtggaaattccggttcagtgagcgggggcagtgggaagcccgtacaaagagtccgcgggaagaagactctgcagctgcattccgaacgcggatctccgctagtaagtgcgacgagttgtgatcgttatctcacacgggcttgttggagctttgaaagggatcccatcatgggagcaaattaggtggtaccgcggatcgcagctattcatcctaagattttaggagaaagctgcgttctttgttatacgctccatagcaaagagtgctctgcgccagtaccctgccctttgggcagtcggcggctgatgcgcaaattcatccgggaggcgcttctgcccatgtgcggggccatggttttttcaaaagatctgtaccaaggaagagctgctgcccctcttcggccggacgtattttgactttgagacgctgcggaggaagggcggccgtcgtccgccctttaccaaggtgagcctgctggaccgggagatcttcgggcaacaccattccggccggaactggatgcttcgggacttccggatgcccaaccggtcctgggggatgcgacgcggacggcctctgtgcccggggcccctccgatgacggcgagagcggcaaatgaggcggaaaatccgcatttcctgttgagttttccatatctgatgtgatacgatacattttataaatacaggaggatgaaacgcatgagtaccaccacgaaactctccgatctgttcggcagcatggtcttcaatgaggacaccatgaaggagcgcctgtcctctgcgtcctatgaggcgtggaagaagtgcgttacagacggaacgtctttggatatctccaccgccaatgagatcgcccaggccatgaagcagtgggccgtggaaaagggcgccacccactacacccactggttccagcccatgaccggcgtcacggcggagaagcacgacagcttcattgcccctgccggcggcggcaagatcctcatggaattctccggaaaagagctggtccggggtgagccggatgcctcctccttcccctccggcggtctgcgggccacctttgaggcccggggctacaccgcctgggatcccacctcgtttgccttcatcaaggagggtagcctctgcatccccaccatcttctgctcctactccggcgaggccctggacaagaagacgcctcttctgcggtccatggacgagatcagccgccaggcggtgcgaatcctgcgcctgttcggggacacgacgaccaaacgggtggtggttcaggtggggccggagcaggagtacttcctggtggacaaggcccagtacgcccagcgggaggacctgcggatgtgcggccggaccctgttcggcgcaaagccccccaagggacaggagctggacgaccactactatggcgccatccggccccgggtcgccgcctatatgaaggatctggatgaggagctgtggaagctgggcgtgctcagcaaaaccaagcacaacgaggtggccccctcccagcatgagatggccccgatctacaccaacgccaacgccgcctgcgaccagaaccagctggtgatggagatgatgaagaaggtggccgaccgccacggactggtgtgcctgctccatgagaagcccttcgcgggcgtcaacggctccggcaagcacgacaactggtccctctccaccgacacgggcaaaaatctgttcaagcccggctccaccccccggcagaacgcccagttcctgctgtttttggcggccttcatcaagggtgtggacgactatcaggagttcctgcgggccacggtggccttccccggcaacgaccaccggctgggcgcccaggaggcaccgcccgccgtgctctccatcttcctgggagacgagctctccgctgtggtggactccatcatcaacgacacggacttccagagcaccggcaagcggacgctggagatcggcgtggacgccctgcctgccatccgccaggacaacacggatcggaaccgcacctcccccatggcctttaccggcaacaagttcgagttccggatgctgggcgcatcccagtccatctccggccccaatatcgccctgaacaccatcatggccgaggagctgaaacagttcgcggacgagctggaggcatcccgggacttccaggcggacctgcccaagctgatccgccgggtattcaccgagcatcagcggatcatcttcaacggcaacggctatgacgaggcctggctggaggaggccaaaaagcgcggcctttccaacctgacctccaccgctgacgctctgcccatgtacaccgctcccaaaaacgtggatctgtttgtcaagcacggcatctacaccaaggaggaaatcgaggcccgggcggagatccacattgagaactacaccacggtcctgaccattgaggccaagactatggcggacatgatccgccaccagatcctgcctgcggtgtccgactacgccgaccagctgtgccagcgggcctatcacaaggacgccatgggtgtgccccaccagtatgagacttccacagccatgcagatcggcaccctgacggacgccctgcaggcggactgcgccaagctggaggcggatctggccgctatccccgtgggctctatcaaggccatgaactactgccatgaggtgctgatccccgacatggcagaggcccggaaggccgccgaccagttggagacgctgactgcctccaagtcctggcctttcccggtatacagcgacctgctgttctacgtataaagtgcgcaagagggccccggccatcggccggggccctcttggattcatctgttacaccagcacgtcgaagaacagcgccaaaatagtggtggcgaggccgcagaggccgatggcaaggccgctcatggccccctccgtctcccccagctccagggcgcgggcggtgcccatggcgtggctgcaggcgccgatggccagccctgccgccaccggatccttcacccggaagaggcgtgccagcgcgggggcgcacaggttgcccaggatgccggtgaagatcaccgccgccacggtgatggagacaatgccgccctgcccctccgcaatggcggtggcgatgggtgtggtgacggacttgggcaggagggagacggtcagtgtccggtccaggccgaacaggcggcacaggccccagatgctgaggaccgaagtcaccgccccggccgcgcatcccgccaggatgggcagcaggttctttttcagcaggtcgatctgggcgtagatggttactgccaggcagaccgtggccggccccagaaagaggttgatgaggctgccgccggcgttgtacgctgcatagggaatgtcaaacaccgccagcaccgcgataatcatcatcaccgccagcaccaggccgttgcagatcacaagcccggtccgcttctggattttgcagcctgcccagtaagccaggatcgtcagcgtcaccccgaaaaagggggactcccacagcgcgctcatctccgcttccccctctccagcaggcggcaggtgagccgcaccgctcccactgtagcggcaaaggtggcaatcagcgagaccgcgcagacgaccaccagggcaagcaggttctcccgtaacacatctgcatagttgatgatgctgacactggccgggatgaagaagaaggggagattccccagcaggtagtccgacttctcccggatgtgttctgtcttgatgacgcgtgccagcagcagcgccagaagcagcagcatcccgatgatgctggcaggcagggtgaagggcaacacccgctcaatacaggtgctgatccagcagatgccgaagatgatgccgatctgcgttagaagtttcaaagtgaaccgcctctcccggcggtcccccgccgcgttactctgcgccgtattcacacaagggcgcggattcttttcaacttttttattctacggagacggccggggaatgtcaaatccttccggctcctttttctgccgccgccgcaaaattcggcaaaacagtacaaggccccgccgggaaagagcgggaccttgtccaggtcatccaagcatccgcaggaggccgggggactcagaggggcatttgccgctccagctcccggcggaagtccgggtgggcgatggcaatcagcgcccgggcccgctccacggtgctcttgtatttcagatccgccacgccgaactccgtcaccacatactggacgcaggtgcggggggtggtcaccacgctgccgggggccagctgcggcacgattttggagtggaggacccccgccttgtcccggtagctggaccggagggccaggatactctttccgcccttggaccactgggagcctaccacccactccagctgtccgccggtgccggagtactgccgggggccgatactctcggcattcacctggccggtgaggtcgatctccatggcgttgttgatggagaccacatggtcgttccgggcgatgttccgggcatcgttcacccagtcgatctccttctggcagaaggcgggattctcatgggcgaaggcccacagctccggcccgcccaccatgttggcgtatacgctccgccccgggcaggtctgtttgcggctgttgttcaccacgccccggcgcatcagctccatgacgccggtgctcaggatctctgtgtggacgcccagatcccgctttcccgcatgggccagacactcgcccacggtattggccagccctcccagccccagctggatgcaggcgccgtctggcactagatccgcgatgtagcccgcgatgcggctgtccgtctcgtttcccgctgcgatgggcgtctctaccagaggacggctggattcgatgatcccgtccacctctgatacatggatgcgggtgtgggcctccccatcactgggaatattgggcattcgggggttcacctccgccagcaccagctcgcactgctccagcaccttccggctcagggccgtgccccacagggagcggctcatccacccgttctcatccgggagcgagcaggtcagcgccgccacccgggggcgccgggccaggagccacgcgggcgtctgactcaggttggagggggcgtaatggacgttgcccatgggctccaggccccgctccacgccgtaaaagttggagtcataagtcacctgtccggccagctccggcgtcagcagccgggtcccggcggggatgaagtgcccgtagatggcgatatggccgccggtctccagcaggcgctccgccagcgccccgtccagctcccagggccagttggacatggcggcgaaggccgccgtgtccccgtcccggatcagctccgccgcctcccgggcggtcatctgcagggcctgatactgggtctgccagttgcccgctcccgcgcagcgtccccggcggatgggtgtcagttctgtcatcgtcattctcctttgccgcgcccctctgcggggcggtgtctccggcggtttgtacagcccgccgtgggggccgcggccgccggttccctttcccgtctattgtaccgcacattccgcttccgcacaatcctcttttccgcggacgagttaatagaaattttgtttttttctgcttgcgcccggccgcttcgccgtgctatactggcgttgttcttgattttttccatggaggtgcatcttgcagaaacgcagtcacaaactgctggccgccaccctgctggagaatacccagggatttcaggccagacgattcgagctcgccttcctgttcggctcctttcagccggactgcaaccccctgacctatttgaagggctccctgcgggcctataagttccgggggcataactactccaactcccagcactacatctactcccgcatctcccggctccagcgccgccagcgctggaccatctggcagtattacaccctgggcaaactgacccactatctggcggatgcgttcacctatccccataacgagaattatcccgacagtatgctctgccaccaccagtatgagacggacctgcgggcctatctggaggagtatctggccacccgcgcccttcgtcgggagaagttccgtcaggacgtggcggacgcccttcaggagctgcaccggcagtacatggccggcgtggccgatatgcgcaaggatgtgcagttcatcctgaaggccacctccctgctgatggccggctgcctgcctgccagcgccgcagcggctgtctgaaccctgttttgggaaaagcgcacagcagcggtttccctttcggcgcattctttggaatcattgtcaatttccatttgctttttctggtgttatcctgaaactatcaaaggactcggaaaggaacccagtcatgaccaacatcacccgttctgccgaataccgttactttagctttacctatttttatggtaaggcttatttcggtttggctgaaaatgtgtgtgatcgtgtctgacgccaggaaaaggctatcagtgcatgacgacccgcagccgaaccggctgcgggtcttttttgtaccagccccatcatttttaggaggaatacagtatgatcgtcgttctgaaacaaaaccccaaccggcaccagctggagagcctgatcgcctggctccaggaaaaggggatcatcatccacaccagcatcggcgaggcccacaccatcttaggactggtgggtgataccagccagctggacatcgacctgattgccgccctggacatcgtggaggatgtgaaacgggtccaggagccctacaagaatgccaaccggaagttccacccggaggacacggtggtgcaggtgggcaacacccagatcggcggcggcaatctgaccctgatggcgggtccctgctctgtggagagcgaggagcaggtggtggccattgccaaagcggtgaaggccagcggcgccaccatgctgcgggggggcgccttcaagccccggacctccccctactccttccagggcctgggggccacgggtttggagtacctgaaggtggcccggcaggagaccggcctccccatcgtgacggagctgatggacctgagccagctgcccctcttcaaggatgtggacgtgatccagatcggcgcccggaacatgcagaacttcgacctactcaaggccgtaggccatcaggacaaacccgtcatgatcaaacggggcatgtccgccacctacgaggagtggctgatgagcgccgagtacgtcatggccggcggcaatgagaatgtgatcctctgcgagcgaggtatccgcacctttgagagctacacccgcaacaccctggatctggcctgcatccccgtgctgcggaagctgacccacctgcccatcatcatcgatcccagccatgccaccggcaagagctggctggtagatcccctggccatgggcgccgtggctaccggtgccgacggattgctgatcgaggtccacaacgacccggcccatgccctgtgcgatggcccccagtccctgaagccggaggtgttcgacggcctggcgaagaagctgctgaagctccatgactttatgaagacggtggaggagtaagacatgaatgttgccatcgtcggcctgggcctcatcggcgggtccatggccaagagcatcaagaaccgcaccagccacaccgtctggggcatagacctgaacgcggagaccatgaccatggcccggatgtgcggcgccatcgacgcccccctgacggaggagaacctgccccaggcggatctgatcctggtggcgatccggcccggcgccgccatcgagtgggtccggcagcacgcgccgcagatcgccaagtccgccattctggtggacctgtgcggcgtgaagcggaccgtggtggcggccatcgcccccatcgcagaggaacgcggcttctcctatatcggcggccaccccatggccggtaaggagcggggcggcttcaccgcctccgcagaggacctgtacgtgggagcatctatgatcctgacgccggacaagcggacggacatgcggctgctggagacgctgaaggccttctttctggacctgggctttgcgggcctcaccttctcaacgccggaggagcacgaccgcatcatcgcctttacttcccagctggcccatatcgtctccagcgcctatgtgaagtcgccggaggcccagaagcgccgaggcttttccgccggcagctttcaggatatgacccgggtggcccgtctggatgaggacatgtggacagagctgtttctggacgatgaggacttcctcaccgccgagctggaagagctgatcggccacctgacggactaccgcaacgccttgcgggccaaggatactcagcggctgcacgatttgctgaaggagggccgggagctgaaggccaccgccggcggcaactgacctatttccggcgccgctgcgcgacatgattctataaaaggagtttttcgatgtttgactccatccgaaccattcccgtccgggtccggccgccctatgatgtgcgcattggcagcggcctgcttggccggtgcggggactatctggccgcgctgctgggacagcggaggatcgccgttctggccgacgacaccgtggcctccctgtacctggacaccgtcaccgccgctctggaggacgcgggctttgccgtctgctcccatatcttcccctccggggaggggcgcaagaatctctccaccctgacagagctgctggagttcctggcgtcggagcatctgacccgcacggactgcgtggccgccctgggcggcggcgtcactggggacatggcgggctttgctgccgccgtgtacctccggggcatccggtatgtccagctgcccaccaccctgctggcggcggtggactcctccgtggggggtaagaccgccgtggacctgaccgccgggaagaacctggccggggccttctgccagcctgccgccgtgatctgcgacacggactgcctgaagaccctgccccccgacgtgtttgccgacggggccgccgaggccgtcaagaccggcgtgctctctgacgaagccctgttcgccctgtttgaggacggcaccctcaccgccgaccccggcgaggtcatcgcccggtgcgtcgcctacaaggccggcgtggtggagcgggacgagaaggagcagggggagcggaagcttttgaacctgggccatactgtgggccacgccatcgagaagtgcagcggctatgttatcccccatggccacgccgtggcggcggggctggccgtcatcgcccgggctgcggaggccctgggctggacggaggagtccctggcggcgcgaatcaccgcctgcctttctaaaaatggcctgcccaccgggacagactactctgctgaagccctggcggaggcagccctttccgacaagaagcgcgccggtggggatatcaccctggtggtcccccggaagatcggccattgcgagctgcggaaggtcccggtagcggacctgctgcccatcatccgggcaggactggaggcgtaaatggaccttcaaatcaccccgaaaaaactctccggcgccgtgacgccgccctccagcaagtctcaggcccaccgattgctgatcgccgctgctctcagcggcgggatcagcgtcatccacggcctggcggactcccaggacatccgggccacccgccggtgcctgtctgccatgtgtgccgggatggaggatctgccggatggcaccctccgggtccacggactgggaaacggcatcgtcatcgcacctccctatgccctgctggactgcggggaatcgggctctaccctgcgcttcctgatccccgtgggcctgctgatacagggagaggcgtccttcaccggccgaggccggctgatggagcgcccgctgaagccctacgaggacctgttccgggagaagggcatcgcctggaagctggcggacaacgtcctcaccgtaaacggcggtcggggatacggtaccctggccctggacccggggacataccgcctgcccggcaacgtatccagccagttcttcacagggctgctgttcgtcatgcccctgctggagggagactctaccctggtgtccaccacacccctggagagccgggactacctggagatgacccggcaggctcaggccgctgccggtgtcaccagccggtggctggacgaaaacacgctcttcgtccctggcggccagacctaccagtcctttgaggctacggcggaggcggactggtcccaggcggggttctggtacgccgccgatttcctggacagccgtgtggacatccggggcctgaatcccgactctgcgcagggggacaaggcagtcagcgaactttactggcggctggcccggccgggggacacggagatcgatgtctccggatgccccgacctgctgccgcctctggcggtgatggcggcggcccgctccggtaccacccggtttgtgaacgctgcccggctgcggatgaaggagagcgaccggctttccaccaccgccgccctgctgaccgccctgggcggacgggcggaggaggggccggactttctgacagtccacggcgggacgctcaccggcggcatggtggactgcgccaacgaccaccggatcgccatggcggccgccatcgctgccactgcctgtaccggccccgtcacggtgctgggggcccaatgcgtgcagaagtcctacccggatttctgggaggtgtacaagaacctgggaggtgatatccatgtcctctgaattcggcagtctcctgaaaatctctgtcttcggccaatcccatggaagggccatcggcgtggtggtggatggcctgcccgccggggaggccatcgacctggaggagctgaacgccttcctggcccggcggaagccggggaagagccccctttccaccgcccggagggaggccgacgcgccggtgttcctctccggcctggaaaacggcgtcacctgtggagcccctctgtgcgcggtcatcgaaaatggagaccagcactcatcggactatgatgccctgcaggacaagccccggcccggccacgcagactacactgcatttgtcaagtggggcgggcaggcggacatgcggggcggcggccacttctccggccggctgacggcgcccctgtgtatcgccggcggcatcgccaagcagattctctcccgccggggcgtatacgtaggggcccacctccagtccgtggggacggtggcggatgcattattccccctgcggcccacgaaggagctgtttgacgccgtggctgccaagccattcccggtgctggacgaccaggcgggggagcggatgcaggcgctgattctggaggcctggaaaaatctggattctgtgggaggcgtcgttgagtgtgccgccacgggccttcccgccggactgggggagcccatgttcggcggcgtggaaaaccggctggccgccgccctcttcggcattcccgccgtgaagggcgtggagtttggggacggcttcgccgccgcccggtcccgggggtccgaaaacaacgacccctttgtgatggaggacggccgggtgcagacagagaccaaccacgcgggcggcattctggggggcatcaccagcggaatgcccatcgtcctgcggacggccatgaagcccacaccgtccatcgcccagccccagcggacggtcagcctgtccgccggagagaatgcggagcttgtgattcacgggcggcacgacccctgcattgcccaccgggcggtcccggtggtggaggcggttactgccgccgtgctgttagatttattattggagggacatcatggaactttctgagattcgagagaagatcgacgcagtggacgagcagctgctggacctgttcctgcagcgcatggacctgtccgacgaggtggctgcctacaagaatgcgcaccatctgcccattttgaacaaagaacgggagcgggccatcctggccaaggtgacggagaaatccggggagcgggagcggtatgcctaccacctgttctccaccctgttcgagctggcccggtcccggcaggcagagctgatctccgcccccaccaaggtggccgcccaagtccgcgcctctctggaggccggtacctcggtctttccccagacgggcctggtggcctgtcagggcgtggagggggccaactcccaggtggcctgtgaccggctgctgccccggggcaacatcgtgtatgtgaagaccttccaggctgtggtgtccgctgtggagtccggcctgtgcaggttcggtgtgctgcccattgagaacagctccaacggctccgtccgggcggtgtacgagctgctgcaggaccacaacctctccatcgtccggtccacccggctgtgcatccggcacgagttgctgacgctgcccggcgtgaagatggaggacatcacggagatctactcccacgagcaggccatcggccagtgcagcaagttcctgaacagcctcaacggcgtccgtgtcatcccctgcgacaacaccgccatggccgccaagatggtggcggagaagggcgaccgccacgccgccgccatttcctcccacccctgcgcggcgttgtacggcctgacctgcctcaacgacagcatccaggacagcgacaacaactacacccggttcatctgcatcaccaaggatccggtgatctatgccggcgccaaccggatcagcctgattatcgcctttgacaaccggcccggcgccctgtatgaaatcctctccaagctggcggcactggacatcaacatgacgaagctggagtcctgccccgtggcgggaagtgactttgagtttgttttcttcctggagctggacgcctccgtccaggatcccagcgtcctggccatgctggaggagatggagcgcagctgtgccgagttccagttcttgggcaactacgcggaagtctgagccatggatgagcggatttacggcctgctgggccggaagctgggccacagctggtccgtccccatccatgccgccctgggcaacggcgcctaccgccttctcgagctggagccggatggactggctccctttcttcaccggaaggacatcggcggcctgaacgtcaccatcccctacaagcgggacgtgatgcccctgtgcgatgagatcgacccggcggcggaggccatcggcagcgtcaacaccatcgtccggtgcgcagacggcaagctggtgggctataatacggacatcgacgggttcctctatatggcctgccgggcgggtatctccctgtcagggaaaaaagtcgtgattttgggcagcggcggggcgtctctgacggcccagaccgccgcccggcaggggggcgcggcggaggttgtggtggtatcccgtttcggtccggacaactatgacaacctctctcgccacgctgacgcggagatcctggtgaacgccactccggtgggcatgtaccccggcaacggccagtctcccgtggacctgtccgtatttccggtctgtcagggggtgctggacgtcatctacaatccccggcgcacggccctgctgctgcaggcggaggcgcggagcatcccctgctctgacggactgcccatgctggtggcccaggcggtggcggcagaggagcggttcttcaacaggtccattcccgccggtgagaatgagcggattttggttcagctccggcgggagatgaccaacctcatcctgatcggcatgcccggcagtggcaagaccacggtgggggaggcgctctcccgcctcaccggccgggaggccgtggatctggaccagatgatcgaaaccaccgccggctgttccatcccggagatcttccagcgtgaaggcgagtccggcttccgggcccgggagcgggccgccgcggaggaggctgggaagcgcacaggcgtcatcctcctcaccggcggcggtatcatcaagacggcggaaaactacgcggccctccatcagaacggccgcatctatcagctggtgcgggatctcagcctgctgcccaccgagggccggcccctgtcccagggggcggatctggccgccatgtggcgggagcgggcgcccctgtacgcccgattccgggacgtggagattgacaacagcggcacggtggaggacaccgccgccgctatctggagggatttttgtgcacattctggtagttaacggccccaatatgaacatgctgggaatccgccagccggagatctacggccatgagacctatgaggacctgaaggcgctgatccgggcggaggcggaccggctgggcgcgtccgtctccttcttccagtccaaccacgagggggccctggtggacgccatccagcaggcatacttcgaccatgtggacggcatcatcatcaacccggcagcctacacccacaccagtgtggccctgctggatgccgtgaaggcggtggggatccccacggtggaggtccacgtctccgacccggacagccgggaggagttccgccgtgtctcctacatccgggccgcctgcgcggccaccatccggggccatgggctccagggatatgtggaggccctgcggtttctctgcggcgcggacgcttgacaaacggcggtctctgacggataatatgcccataccccattgggtatccgggaggtgtcggcatgagacaatgtatggatgcggacaacctgcaccggcggctgaagaagatcgtcggccaggtgcaggctattgaccgcatggtagacgaggacgtgccctgtgaggatgtgctgtcccagatcaacgccgccaagtccgccctccacaagtgcgggcaggtggtgctggaggggcacatccagcactgtgtccgggacggcatccagcacggggatgcggacaagaccatcgagagcttcaccaaggcggtggagcggttctccaacatgggttgaaggcaaggggatcggctgaaaagccgatcccctttgtatatgttacaggattttctccagagcgtaattggtcaatacctgtccgcggcagggcacctgctgttcccgctctatcgcatagccccggccgaggaagaagggcagggcggtcttggaggcgtggacagtgacggcgtccacccccaattcccggcagtgggcctccagcgcgtcacacagggctgcggcgatgccctgtccctggcagtcccaccggacgaacaggtggtccagataaccggtatcctccacattgccgtagcccacaatccgcccgcccgcctctgctaccagggtgtacagccgctgaaaccagctgtcccgtgtcagcagatccgcctctccggcggcccaggcttccacctggggcagggtgtagtcccggcagttcacctgccgaaccgtctcaccgaacaggcgggccagaatgggcaggtcttctgtccggtagcgccgtagtcgcatttctgttctctccttcctgttttgtggtcattttacaggaagaatctgtgtgccgcaaggtattttgcctgaaaacggcggcactttttcttgacaggcatacccctatgggtataatatacatatacccccataggtataaagagaggatgtgagccatttgatccatactctggagcgatttctggagtggggcggcgtgaagaaggccgtgacctgcctggtcttctccggcatcgccctgcttgtcagcatcttcgacctgctgccgcagctgccctttgacgccgcctgggcagctgtcgtcctctgcggtatccccatcatcttggaggcagtcatcggcctggtgacagcctttgacatcaaggcggacgtgctggtgtccatcgccttgattgcctccctcatcattggggaggacttcgccgccggcgaggtggccttcatcatgcagctgggcgccctgctggaggatctcacggtggcccgggcgcgggccggcatcgagaagctggtgcatctgacgccccagaccgcccgccgcctcaccggcggccgggaggaggccattcccgccgagcaggtggctgtgggcgacgtgctccgggtgctgccgggcgagaccgtgccagtggacggagagattctcaccggacagacctccatcaaccaggcggtgatgaccggcgagcccctgcctgtggacaaggggcccggagacgaggtttccagcggcacggtgaaccagttcggcgccttcgagatgcgggcgacgaaggtgggggaggacagttctatccagcggatgatccggctggtccagtccgccgatgccggcaaggccaggatcgtggggctggcagaccgctgggccacctggatcgtagtggcggccctgaccgccgccgccttgacgggcctcatcacccgggatcccatccgagcggtgaccattctggtggtattctgcccctgtgccctggtgctggccactcccactgccatcatggccgccatcggcaacgccaccaggcacagctttctggtgcgggagggagacgctctggaacggctggcctccgtctcccaggtgacctttgacaaaacaggcactctgaccctcggcaccccccaggtgaagctggtggagagcctgctgccggacgtatcccgggacgcgctctacgcctggactgcgggggcggagctccggtccgagcacccgttgggccgtgccgttgttcagggctggcgagccgagaccgtcgcggcgccgccggagacagcggacttccagatgctccccggccggggtgtttctgccactgtggcgggtcatcacctcgtcgccggtaaccgggagctgctgacagaggaacatgtcccctgggaatccttgtcccaggctgccgtccctgccctggagcagggctgcaccgtcatctatgtggcggtagacggccgcccggcgggctttctggccctggcagacaccctgcggccggacgccgccgggaccatccgggatgtccgggccaccggcgtgaccccggtgctgctcaccggcgaccacgagagggccgcccggcatattgccggagagctgggcatcggcaccttccaggcggagtgcctgccggaggataagctaacctggatcgaccgcagccagcagagcggccatctggtctgcatggtgggggacggcatcaacgacgctccagccctgaagcgggcccatgtgggcattgccatgggcggcgtgggcagcgacatcgctgtggacgccgcggacatcgccctggtaaacgacgacatccgggagctgccccatctgctggcactctccaagcggatgatgcgcaccatcaagagcaatctggccttctccatgaccttgaacttcatcgccatcgccctggctatcaccggtatcctgaacccggtggtgggcgccctggtccacaacgccgggtccgtgctggtgattgtcaactcctctctgctgctgaagtggcggaagcgcccgtgacagcggcaggccatgggacagaagattctgcgccctcctacagcaaaaagccccccggcctctgccggggggctttttaagtcctggcttctcaccccttcagggtgttcagcaggtgccggatgtgaatgctcatggcgtggcgggcgccagcctcgtcccgctgcatcagaaagtccagaatcatgtagttgtccgcgatggcgatgctctgcatgtgcgcccgatttacggagacctgcaggatctcgttcaccgcgccgttgatgatcgggtacagccgccgcatatattcgttgtgggaggccttgatgatggccatgtggaactcctggtccgccaggggccagtctccgcccgcctttgcgatgcgctccatccgctccgctttctggcggatctgcgccagttcttcgtctgtggcacgctgacaggccagcgccacggtggcgggctcaaagatcagccgcatttcaaacaggtccctggcccggacccgggaccgcaggttggacagcgccgtcagatccaccgcgctggcgggcagatcctccgtgacaaacgtgcccttgccccggcggatctccaacacgccctgggccaccagaaaggagatggcctcccggagcgtggtgcggctgacgtgcagcgcctcactgagttcgttttcattcgggagcttgctccccggcgtgaactgccgttcgtccatgattagctcgcacagccggtcggccgtccgctccgacaatttgactttccgtccctcacccatgcgcatccctccatcatccgtggtgaggtcaggcatttctccactggattttccggccagtacggaaatgtccttgacatcatatctcttttagagtacaatgacatcatacaacaaatgaaaaaataatacaactattttgtgaaaaaatgaggtgaaccgcttgtgacggccaaggacatgttttcccaccgcgtctcgatcctcaccggccactacggcaccggaaagacggaggtctccgtcaatctggccctggcgctggccgctgagggggaacaggtaatgctggcggatctggatatcgtcaacccctatttccgctctcgggagcggcggcccctcctggaaaaagccggtgtgcgggtgatttcctcctcccaggcctgttcggacgcggatgtccccgccctgccggcggagctgctgaccattctggagaaccgggagatccggggcatcctggatatcggcggcgatccggtgggcgcccgggtgctggcccggtttcagcccaagatcgtacaggaggattaccagctgatcttcgtcctcaacgccaaccggccggaggtgcgggatgcggagagcgccgccgcctacctccgctccattgaggccgtcaccggcctcacctgctcgggcctggtgaacaacacccatctgtgcggcgagaccacgccggccgaaatccgcaagggcgccgccctggcacaagaggtttcccggcagaccggaatcccgatcctctgccacacggcggagcggcggttcttagaatccttgtcagacctgggggaacccgtgttccccattgccatcaatatgaaaaagccgtgggagcgctgactccgcggcaggaaaaaaggaggcatcctgcaaccatgacagcaaaggtaaccttcaactctgaccggtgcaagggctgtgagctgtgcaccactgtgtgcccgaagcacatcgtcgccatcgatcaggccgtcatcaaccggaaggggtatcaccccgcccatgtgacggacatcagccagtgcattgcatgcgccagctgcgcgaagatctgcccggactccatcatcactgtggaaaaattctgagaaggaggtcatcgaccgtggaaaaagaactttggaaaggaaatgaagccatcgccgaggccgccatccgcgccggctgcgactgcttcttcggctatcccatcacgcctcagagcgaggtcccggagtatatgtccgcccatctgcccaaggcgggcggcgtgttcctgcagtctgagtctgaggttgcggccatcaacatggtgtacggcgccgccggcgccggcatgcgggccatgacctcttcctcctcccccggcatcagcctgaaacaggagggcattacatacatcgccggcgccgagctgccctgcgtcatcgtcaactgcatgcgcggcggtccgggcctgggcaccattcagcccggccagggcgattactatcaggccacccgcggcggcggcaacggcgattaccggacgctggtcctctccccctccaatgtgcaggaggcggtggacttcgtccaggaggcatttgacattgccgaccagtaccgcaaccccgtcatggtggttatggacggcctgattggccagatgatggagcccatcgagtggcgtcctgtccccaagcgggacctgccccccaaggactgggccaccaccggccgtaaggaccgggaccacaacaacatcatcaactccctgtacatggatccggaggagtgcgaccgtcacaacgaccatctggcggagaaatacgccctgatggagaagaacgaggtccgctggtccgagacggagtgcgaggacgccgagatcgtcatcaccgcctacggcacccctgcccggatcgccctcaccgcccttgagacgctgcgcgccgaggggctgaaggtgggcctgttccgtcccattaccctgtggcccttcccggaggaggccctgcgcaagctctccaaggccgaccacgtgaaggcatttttggatgtggagatgagctccaccggccagatgatcgacgatgtccgtctgtccgtggagggcagaaagcccatccattacctgggccacgccggcggcgtgatgcccaccgtggaagagatggtagaagcggccaagaaggccttgaaggagggcaagtgacatggcgatcgtatatgagaaatcccggggcctgacggacgtggagttccactactgccccggctgccaccacggcatcatccacaagctggtggcagagtcgctggtggagctgggtctgctggatgacgccatcggcgtgtgccccgtgggctgctccgtcttcgcgtacaagtatttcaactgcgacatgcaggaggccgcccacggccgggcgcctgccgtagctaccggcatcaagcgcacccatccccatcaggcggtgttcacctaccagggcgacggtgacttggcctccatcggcgcggcggagatcgtccacgccgccatgcggggcgagaagttcacgaccatctttgtcaacaatgccatctacggcatgaccggcggtcagatggcccccaccactctgatcggccagaaggccactacctgccaggagggccgcacccgggagcaggccggtatgcccatccgcatggcggagatgctctccaccctggacggctgcgcctatgccgagcgggtctgcgtcacggatatcgccaacatcaacaaggccaagaaggccatcaagaaggcattccagaagcagatgaacggcgagggcttcacctttatcgaggtgctgtccacctgccccaccaactggggcatgacgccgctgaaggccaatcagtggctgaaggacaacatggtcccctactatcctctgggtgtcatcaaggagacggccccggaaggcgcggaggtgaaatgagatgaaaaaagagatcgtcatttccggcttcggcggccagggcggcctggccatcggcaagaatctggcagaggccggcatggctgagggcctgaacgttacctgggctccttcctacggccccgagatgcgtggcggcaccgccaactgctctgtggtgctctccgacaagcccgtgggatctcccgtgttcgcccatcccaccgagctcatcgccctgaatgagccctccctggtcaagttcgaggagggcgttgtccccggcggcatggtattcgtcaacagcgacgtggtgacggataaagtctcccgcacggacctgacggcctactacatcccctgctcccagatcgccgacgaggtgggcaaccccaaggtcagcaacatggtgatgctgggcgcctatgtggccggcactaaggtgctgaaggcggagaccatcgagaagatgatccaggagatgttcaccggcgccaaggccaagttcgtccccctgaacatcgaggcgttccgccgcggcatggcctgcgtgcagtgatttgtttcagagggccggcgagtttgctcaccggccctctctctttggcgggccctgcgctttctgtgcattttaacagttgactttggctgtgtatcagcgtataaaagatatcatagaagaatatggctttatattgcgtggaacgggacacgccgcgaagatctctcccctcagagagctgccggacggtgcgaggcagcgggggcagctttgctggcctcccccgggagcagtgggcggaacagagctttcccagtacgccgcaccggacgccctccgttatcggggcagacgagcggccgctggaccagcggcaacgagagtggtaccacggaagtttgactttcgcctctcctgtgcagggcaggagtgcgcgaaagtctttttgctatcccccaaaacttcaaactatttttaaggagcgatcaatatgctggatattcaaatcaccaagaccaccagccccaaggccaagcccgcggacgagagcaagctgggcttcggcaagattttcaccgaccacatgttcgtcatggactatgcgccggacaagggctggcatgacgcccgcatcgtcccctatcagcccttccccctggatcccgcctgcgtgattttccactacgcgcaggagatctttgagggcctgaaggcctaccggaccgcggacaacaccatccagctgttccgccccgactgtaacggccagcggatgcaggactccgctgaccggatgtgcattcccaagatccctgtggaggacttcgtccaggccgtgaagaccctggtggaagtggacaaggactgggtgccccattctgacggcgcctccctgtatatccgtccctttgtattcgccaccgatgtgggcatgggcgtccacgccagccggaactacacgttctgcgtcatctgcgctccctccggcgcctactatgccgagggcatcgatcccgtccgcatctacgtggaggacgagtacatccgcgccgcgcccggcctgaccggcttcaccaagtgcggcggcaactacgccgcctccatcaaggccggcgagatggccgagcagcagggcttcgcccaggtgctgtggctggacggcgtggagaagaagtatgtggaagaggtcggctccatgaacattatgttcaagatcgacggcaagatctacaccgccccctgcaccggtacagtgctgcccggcgtcacccgccgctccatcatcgaactgctgaaggactggggctatgaggtctgcgaggagcacgtggccatcgccgacatcatgaaggccggccacgacggcaagctggaggaggtcttcggcaccggcaccgccgccgtcgtctcccccgtcaaggaactggactggaagggcgacaaggtcttcatcagcggcggcaagatcggcgagctgacgcagaagctgtacgacaccctcaccggcatccagtggggcaagctgcccgacaccaagggctggatcgtccccgtgtgcaagggctgagttcccatcgtcaaaaagagcggagccgaaaggctccgctcttttcctgcgtcccgctcagggctgctccgcttcataacgctttaaaatggcggccagagcctcagccgggatgtctcccacggggcggatcggctccggattttgatcgtagggggcgatgggcttttcaaaccaggccacatcccgccaggcgccgcacttgtacccagtgctgcggtaggtgcccagccgccggaagcccagggcttggtggagcccctcactcttttcattgggcacggtgacgcagccgtagaccgtgcggatgccctgcagccgcagaatgtctatcagggcgccgtacagccgccttcccagcccccgggaggtgcatgagcggtccagatagacggacagctccgcattccactgataggcggcccgctccgcctggcggtgggcgtaggcatagcccacgatccgccccttctccaggcatacgagatagggatactcccggccgacggcggcgatgcgtccggcaaattccgcctctgagggcagcgcacactcaaaggtgatgggagtgtccaggtattctccgtagatcttcagcagggcggcgctgtctgctggcgcggcaaagcggaacgccggcgctcccggggcttctctttcagccatctccgccgccccttacgtcctggcatgaatctgggcgccgcacttggggcaggtgatgacgattttccccttgcccaccggcacccggcagatggttttacagttcttgcaggtgaagtatttgtgggccttgtccgcatggcgggccttggcattctggcggctgctcttcatccgccacatccagttcacccaccgctggttttcgctccggcgcttggtgagattccgggagaagatgcggaacagggcgaaggcccaagcggcgatggacaccaggtacagcgcattccccagccacagatgatggggggccacaaacatggagacgaggtccagaaccagacttcccaccacaatggccaggctcaactggtccacgccgttgcgtccgtacatgagccgggccagtgcgttcccgattttttgaaagactcccatagataaggactccttttccggcggctcctgccgcagggtgtgattctgtcattattttacacgcaaacccaccgccgcacaaccgtttgcgggcggaatttacaaattggtcatttatttgttttgttcaaagtgctatactgatttctgttgagaaaaaacaccaaaggaagtgcaatatcatggcaaaacggcaattcaaggcggagtccaagcggctgctggacctgatggtcaactccatctacacccacaaggagatctttctccgggagatcatctccaatgccagcgacgcctgtgacaagctgtgctaccaggccctgacggatgacgccgtgggcatgagccgcaaggacttcaagatcgagatcaaggtggacaaggaacaccggactctgaccgtctccgacaacggcatcggcatggacaaggaggacctggagaacaacctgggcgtcatcgcctcctccggctcctacaagttcaagcaggaggtgggggacgacgccaaggacaccgacgtgatcggccagttcggcgtgggcttctactccgcctttatggtggcggaccacatcaccgtggtgacgaggaagtacggcgccgacgccgcctggatgtggcagtcctccggcgccgacggctacaccatcaccgaatgcgagcgggatgccgtgggcacggacatcatcatgcacatcaaggcggacaccgatgatgagaagtacagtgagttcctggagtcctggcggctccaagagctggtgcggaagtattccgactacatccgcttccccatccgaatggaggtctccaagacccgccggaaggagggtagccccgacgacaagccggagtacgagacgtatcaggaagaggagacgctgaactccatggtgcccatctggcagcggcgcaagtccagcgtgaagccggaggagtacaacaagttctatcgggacaagttccacgactacgccgacccccaaaaggtcatcgccgtgtccgccgagggcgccgtcacctacaaggcgctgctgttcatccccggtgccacgcccttcgactactacaccaaggagtacgagaagggactgcagctgtactccaacggcgtcctcatcatggacaagtgcgccgacctgctgccggagcacttccgcttcgtccggggggtggtggactctcccgacctgtccctgaacatctcccgggagctgctccagcacgaccggcagctgaaggtcatcgcggccaacctggagaagaagatcaagagcgagcttggtaagctgctgaaggacgaccgggagggctacgagaaattttggaagaactttggccggcagatcaaatacggcgtcgtcagcgaatacggcgcccacaaggacctgctgcaggatctgctgctgttctactcctccacggaaaagaagcccgtcaccctggcggagtatgtctcccggatgaaggaggagcagaagttcatctactacgcggccggcgagagcttggagaagatcgacaaactgccccagaccgagggcctgcgggagtccggcacggagatcctctacttcacggaggaggtggacgagttctgcgcccagatccttcacaccttccaggacaaggagttccgctctgtcctggaccaggagatcgaggagggtgccgagaagaaggccgaggaggccgcagacgcccacaaggccgtgttcgacttcgtcaaggagaccctgggagatcaggtgaaggaggtcaaggccagcgcccggctgaagtcccatcccgtgtgcctgacggcaggggagggcctgagctttgagatggagaagtatttccaggcggtccagccggacagcgccatccgcgccgagcggattctggagctgaatgtggagcacccagctttccaggccctggaggccgccgtgacagcggacccggagaaggccaaaaagtacgccacgctgctgtacgaccaggctctgctgatcgcaggtctgcccctggaggatccctccggctacactgatctggtgtgcgagctgatgaaataaaataccatgcgcaaaagcggtcccgggtaaaacccgggaccgcttgtttgatttgcttcaggacggatctctctgccatcccggcgttttttccatcgggtaggggcggccgccctcggccacccgagaagacagccgcgtggatcggtaccgccctcaccgccgctccaccagccgctggtagtgcttgtacagggcggaaaaccggccctgatagctgtggttccagggcttgcgcttgccgcagaagtggaggatggccgtgtggtccatcacccagtccatgtcccgctccccttggctcagcagcaggtagcggtcaaaccgccgggcgtcgtagttccacaggctgtcgtccacccccaggatctgtccgccgtacaggccgttgagcacgtcctggtccggcagcagcagaatgtcggcgtgctcccgggcatagtcgaagatgtcacccggccggacctcccgccgcatggcggacagatccatcactagtacgccggagttgtagtaggcctccgcctcatagttctccagccgcagccggttcaccgggtctgtgatgcccgccagcagcccggtgtgggtggcggcggccatcaggtctccctccaggtccgtatcatacagggcccggacgggattgattaccagaatgtccgggtccagatacagcacccggtccagagaacgcggcagcagctccgccgccagcagccggtagtacatggcccgggtccagtaccgggccaccggcgcgtcggcgaacaggtccgccggcacctccaacgggtggatgcgcccccgaccggcgcagagctcctccagtgccgcccagtcctccggcagcaggccgtctccgatggcgtaaatctcaaaggtctcgccaggatcattccgcagcagagagcccagcatcacccgcaggggcgggagatagttgcggtccagtgtcaccagaatgttcatgtggtcaagccctccgatccgttggtccgggccgtgtcccggtaataggccaccagcaggtccaccaccgtcccgtaggagcggatgccgtcctcttggccgtagcccttcaaaatcgtgtcgtacaccttctggctggcatccgccgcagccccctcgaaggatgcccagtaggcgttattagatgccagatccgccagcaccgtgtccggaaggctgtcccggatggcctgccaggccgccggatccgcctggtacagggcgttgcccaggtggatgtaccccatcagccagccggagtattcgtacaccggatcgccgctggtggtggaggccagcaccgccaggaagttgcactcctgctccgaggcgatgccccgctggtgggacagctcgtgggcgatggtggaggggatcaggcaggcgggggcgtccacgttgatgttggactccccggtgaaagcaaagtagacgccggtgaagttcatggcgctcatgaccctggagaagaacatccgcttgggcgctcggtcctcaaattccaggaaggggaacaggtcctccgcgccctggtagatgtccgtgctcccggcaaagatctcgttcagagacgcattgaacgtccccgcctcatcccggggcacctggtcggctgtctgcgccagattttccgcgaaccacgcggtcaccgccgtcagatccgggagcgatacctcctccgcccggatgccggaccggtcctggaaggtgtccgtgtaatagcacaccccccacagcaggcaggtagcggcgcagacgctcagcccggcgcagaccgcccccagaaccgcgctgtaagcccggcgcttccgccgccctctggccctgactaccgccgtgatgttccataccacataggccagcgcgaggacggccgccaggacatacagcacctccatcacagagaaggagacccgatagcacaggctgcccagagatctccggatcggggcggatacaaatcgctccagggcgttcatccagtcccggtgctcccgggcgatccagaaggccgccagcaggaccaggtccgccagcagccagatgtgcagtttttggtgggacttgaaaaatgtcatgctcactccgctgccgccagcagctggcgggtatagtcgtctttcgggtggtcgaagatgtcatccactgttccctgctccacgatgcggccttctttcatcaccagcacccggtcgcagagctggtacaccacattcaggtcgtgggagataaagagatagctgagatccagctcccgccgcagcgtccgcagcaggtccaggatctgggcctggatggtcacgtccagggcggacaccggctcgtcggcaatgaggaaccggggccgctggatcagcgctgcagcaatggacacccgctgccgctgtccgccggagagttccgccggttttgccgccagacactcctccggcagacccacccggtccagcatctcccgcacccggcgcttgcgctccggggcgtcatacttgccgtagacccgcagcggctcctccagggtccactccaccgaataggcggggttcagcgcgctgtacgggtcctgaaagatcatctggggccgcttggtgtagtgaatcacctgcccctggtcgggcttcacaatgcccaggatggtcctggccagggtggattttccggtgccggactcgcccaccagacccaggatttccccatggcgcacatcaaaggtcacgtcgcggaggacctcctgataggggccgcggcggaagagcccgcggtcccggtatccgctggtgacgtgccggacggagagcaccagctcctgttcgctcatggcgtctcctccttccggtgccgggtgggaatggcggcgatgagccgctgggtgtatgggtgccggggatggcggaacaccgtctcgatgtccccctcctccaccagcacgccccgctgcatcaccgccgtgcgggtgcagagcttccgcaccacgttcaggttgtgggagatgaacagcatggagatgccggactcccggttcagctttttcaaaagctccaaaatctgggcctggatggtcacgtccagggcggtggtgggctcatccagcagcagcagcttgggccgtgccacgacggccgcggcgatcatggcccgctgcagcatcccgccggagagctcgtggggatacttccgatacacgcccgccgggtccggcagctccactgctgccagggccgccagggcctggtcccgccgcgcctcccgggagaggtctgtgtggatacgcagcacctcctccacctgggggccgatacgcatcagggggtccatgcagctctgcggctcctggaacaccacgccgatctccctcccctggacctgccgcagcagcgtgcggtctgcgtggagcagctccgcgccgtccagcaggatctccccggaaaagtcgcactgctttcggggcagcagtcccgccacgctcatggcggtgacagacttgccggagccggactcgcccaccagccccaggatctccccgtcgtggatggtcagggacacgcccgccacggcctcccgctgccgggtgtggaatttcacatgcagatctcggatctccagcatcaggacacccccccgttccggcgctgcaggccctcgccgatgagacccacgccgaagatcagcagcacgatggcgccgccggaacccagggcataccagggggcgctggtcagcatcccctgcgcctccgagagcatgtagcccagggaggcgtccggcggcgtgacgccgatgcccagatagctcatggaggcctccgccagcaccgcgttgttgaagccgatggtgatggccggcagcagcacctgcgtggtgttgggcaggatctgccgcaccaggatgcggccgctggaggcccccatcagccgggcgctcttcacataattcacgtcccgcagcgccgcgaaggcggtgcgggtcacccgggcaaagctggggatgaacacgatccccagggcgatcaccacgttgtatttattccccggccccaggatgctgatgagaaccagggccagcaggatgctgggaaaggcggtcagcgcgtcattcaggcgcatcaggacctcgtccaccacgccgccgaaatagcccgtgagggcgcccgctgccgtgccgcacaccgcgccgatggccacggtgctcagggcgatcaggaaggtggtgcccgccccctgcagcacccggctgaagatgtcccggccgaagctgtcggtccccagccagtgggccagggaggggccctccagcttgggccctgccagcagggcgtccgggtcgtagggcgtccacaccaggccgaccaggatcagcgccgccatgaggccggtgacaatcagcccggccagcaggtatccgttcatccgccgcttcatgacgcacctcccagccgcaggcgggggtcgatccgctggttgacaatgtctgccacggtgcctgccagcaccacccagaaggccaggatcaccacgatggcctgcaccacggggtagtcccggttggagatggaggccaccagcagccgtcccagccccgggatggcaaacacctgctccaccacgatgccagccgccacgatctccgccatggtctgggccaggaaggtcaccaccggcaccagggcgttgcgcagcacatggcgccgcaggaccgccccccggtcattgccccgggagatggcggtgcggacatagtcccgccgcatctccccctgaatggtgctgcggagcatccgcacggtcatggcgatccgggggatggcgatggccgcagccgcgaaaaacagataccggaacgccccggtcgggtccgcacccagatccgggaattggccgtggacaaaccagcggagggtgatgctgaacagccaggaaatcaggatgccggtgaaaaacggcggcaccgccatgcacagctggtccaacaccgtccccacggcgtctcccaccctgctgtgcccgcgggaggcccacagccccaggggaatggacaccacggcaatcagcgcgaagctgagaaggctcaggcacagggtaatccccaccttgggggcaatcagctcccacaccggctggctataactgtaagaaatccccaggtccccggtgaaaaagcccgccagccactccagataccgcaccgcgaaggggcggtccagccccagctccgcctccagctccgccacgcgctccggcgtggcctgggtgcccagcatgatctccgccgcactgccgtggatcaattcaaaggccgcaaacgccagaagggagacgatgaccatggtgaccagcagcatcaaaatccgcttgcatacgtacttcatggcatcatctcccttccggggcagcggcagcatacctgccgcgcattggatttactgggcgtaatggaccgtggacaggtccatcacatagatgggatagaactggtatccctccagcccgttccgcagaaccaccaggtccgccaggtcctggatgtagacattggcggcgtgttccgtcaggttccgctccatctgtttgtagagctctgtctgctctgcgtcgtcggccgtggcctgggcctgctggaacagggcgtcatagtccgtgttctgatagttgataaagttgtcgtccgccgcagaggtgaaccgctccagcagcgcccgggcagtcatgttggaggcgtctacgcctaccacggtggactggaactgccggtttccgtacacctcgctgagccaggcaccccactccacaggctgaatctccgcggtgatgcccacggccttcagctgctccaccagcacagtggccgtgtcgatgtggggctgatagttggaggggacggtgatggtcatggagaacccgtcgggatacccggcctccgccagcagctccctggcccgctccgggtcatagggataatagtctgtcaggtcctccacaaaatatttctgaaacgccgggtacatactggagccgatggggctgccgtacccgtcgaaggccacatcgatgatctgctgtttgtccacggcgtagcacagggcctgccggaccttttcattgttgaaaggctccgcggcgttgttcagatacagcgcctgcaccagattcatcgtgccttccagcacctggaagtcatcccccagctgggcggcctgggtgctggtcaggtgggcgaacatgtcgatggctccgctctgcaggctcattaccaggctgtccgcgttctcaatgatccggaaggtcaccttgtccagctgggccggggtgccccagtagccgtcaaaccgctccagaacgatggagtcctgggctgtccgggagacgaatttgaaaggccccgtgcccaccggggcggtggcctggtccgtatagtcctccggcaggatggccagagtcagataggataaaaactcgctgtccggctgatccagggtaatggtcagcgtggtgtcatcagcctggatgctggaaatagcagaaagcgccgggatcagaggcgttccctccgaatcgtcggcgcagcgttcgatggaatatgtgacatcccgcatctctaccgggtccccgttgtggaactgcacaccctcccgcagggtaaaggtgtatgtggtctgatcctcagagatctcgtaatggtcagcgaccgcgggcaccaggtctccgtcaggcgtgggcttcaccaagccctcaaatacgttgaacatgacttccttggttcctgccgccaccgccaggtgagggtcaagactctcgtccaggtcctgcgcgatgcccaccacgatctcgttcgcctgggcccgcgcctcggtagagccgtccgctgtctgtccatcctctgacgcctgctctgtgctgccgcctccgcaaccggtgagtgcggcgctcaggaggcccgtcagaagaaggagcgccataagcctcttcttcatggttctctcctttgcatcactgctcatttcgagtcagtgttgggcggaaactgtccgccctgacagaaatgttcggctctattcaattttaaaaggagcctcacagggcatgttatttttataacgcttgccctgcaagggtgtattgtacacgaacgcctcggggattgcaagggctttcgcaaaaaaacagcctgttcgggggagaaacattcacaaatccgtcacacctgcggaattgaatttccgggggcggcgtgctatactaatttacatcgctttggatggggccgcccatcccagtcaggaggtgtcactcttgaaaacgaagaaactgctgttcattctcaatccccgggccgggcggaacaagccccacggtccgctgtttgacgcgctggccatcctttccggcgcgggttacctcatccggatccacgagacctccgccccaggagacgcggccgataccgccgcccgggagggcgccggatacgatctggtggtggcagccggaggagacggcaccctcaacgaggtgatctccggcctgatgcggctggatgccccgccgcccctgggctatctcccccagggaaccaccaacgacttcgcctccagccttcagattccacggaccccggcgtccgccgcgaaaaacattgtacagaaccgcatgcgggaactggacatcggccggtggaatgagcggagcttcatctatgtggcctccttcggcgccttcacccgcagttcctatgccgcctctcaggcggccaagaacgccctgggccactttgcctatattctggaggggatgaaggacctgaacaccctccgcccctatcacatccgcctcaccgctgacggagaggtgctggacggggactacctgttcggcgccgtgtgcaactccacctccatcggcgggctgatgaagctggacccggagcgggtggtgctggatgacgggaaattcgagatgctgctggtccccagccccaagacagccgcggacctgcagaatctggtgctggcgctgctgaaccagcagtacgacagccagggcctggtgttccgccacgtctcctccctccggctggagacagaggaggagctgccctggtccctggacggagagtatgcccccagcgtgccggtggtggacattgtcaatcgacagcgggcgctgaggatgctgttatgagagacttggaacatctgcgtcgccggtacgcagaccatgtgccggggcttctgggcgcccggcacagctatgccgtcctctgtcctctggtggagcggccggacggcctgcacctgctcttcgaggtccgctccgccgccctgcaccgccagcccggggaggtgtgtttccccgggggccggatggaggcgggggagacgccggagcagtgcgccctccgggagacggaggaggaactggccatcccccgtcaggaggtggaggtcctgggcaggccggacttcatctgcaatcaggcgggctttctgatgcagccggtgctgggactggtctcggccgccggttttgcggcggtggcgccctcccctgcggaggtgggagaggcattcaccgtccccctggctttttttcgggagaccgctccggagcagtatgtctatgccctgcagccggacgtgccgggggactttccctatgagaccgtgggtattcctgcggactaccgctgggcccggggccgggtggaggtccccatctggtattggcagggccacgccgtctggggtatgaccgcccgcctgacccaggacatcatccgccacctggaataaagagcacaggcagggccggagcatttgctccggccctgcctgttcagaatggaggacttatgtgcccagaaactccgggtcatatccgatgaacttttcccacgccggcccgtccgccgccggagaaaagccaaactcccggtaaaagcccgccgcagcctccgtctccggcgtgggcagccgcaggcggtcccggcccatggggcgatagtgcatcactgcctggccgatcagctgcacgccgtaaccccggcgccgccagggctctgccactgccagcagggggatccagccgcagccccgctccgcttcccggccgtcgtcaaaggccaccgcgcccacaggcgttccatccagataccccgccagtacaggcgccccggcgggcagtgccccggaggtccccgcccacgccgccggaaactccgcctgctcccgcgccagggggcggaaatagaggccgggctccagtccgttggcccgctgcttcacggtgcatccttgggtgaaggccgggtctgtcagatggctcgcatcgtcccgccagaccacctggatccgcgccccctccgcccgcagcagagagacagcggtgttgctgccggtgggcgtcttccccagctcctccagcgggatgccctgcagggccgccagcagcaggcggatggcgcagccatgagagaacaccgccgccgtttttccgtcattggccgccgcaatgtcccgcacggccgccagcagccgggtctggactgcctggggcgtctccgcgccctctacgtgccacaggtggagccggtggttgaagttttccagctgcgccgggtcctgccgggcgatctctccccaggtcttctcctcccacacgcccacgcagatctcccgcaggtcccgccgccggtgcaggggcaggcccttgggcttgtatatggcgctggcggtggcgcaggtgcggtagaggtcgctggcgtagaccgcgtcgatgggaatatccgcgaatcggcgcgccagcgcctggatctgccgctcgccccggtctgtgatgctgctgttggcctgtccctgggcgatgcggtacaggttgccctccgcctctgcgtggcgaatcagatagatggtggtcatggtttcctccgtccgggcctgagcccgccgttttgagatttggatgtcgttatcatcattatagcggatctgccgctttctggcaaatcgctccggcgcgtttttttcccgggaaagcggctatactacgctcaggccgcaaaggagtgactgaagatgagaatgtgtaccggattttgggtcggtatcggcgccggactgatggccggcgcggcagtgggaatgatgatgccttacggcagggatcccatgaaaacgcaggtgggaaagagtatccacaagctgggtgtcgccgtggaccatgccgtggacagcatcgtttccgaaatgcgctgacgcgcagggcggggagcctcggctctccgccttttttgataaaatcgtttttggggcttgactttgggaaaagctctggtataataataacgctgtcgcatttggcgacgcctcgtatacagaaattagaaccagaacagctatggagaagtcgcctagttggtcgagggcgcatgattggaaatcatgtaggcccctaaagggtctcgagggttcgaatccctccttctccgccatagaaagccttgaaaccgtcaggtttcaaggcttttcttttttgcgtcctgcaagcgttttcgccgcaggaaaaccccttggcggaagggcggcggaacgaaagagagacatctgcttttagcagatgtctctctttcatggcaaggggtaacaatccaaatcctctcaggtcggtcgaactctcttgcattcaaatttgcaatttttcttgagaagcatccaaccggccttctggccggcagcgcctttgcgccgtacaagcgttttaccacaggcaaaaccttggcgcagggcgaattcacttcgcccgagcatttcaatcactgaagggtggagcgaccaacgggagcgaaacccaaaagaaaatgcgacttgtcgaaacaagtcgcattttcttttggagcggctgatgggagtcgaacccacctatgcagctt

SEQ ID NO: 4924 - DNA, 23246 bp, Unknown
  gut microbiota DNA sequence
gggttggcagacccgcaaaaatttgatatactgctgaagaaaggcgggatcaggtatgaatctctgtgactacaacaccatccgggacctgctggcccggcatgggttccatttctccaaatccatgggacagaactttttgatcgatccggaggtgccccgccggatcgcggaggcctccggcgcggacgcaggctgcggcgtgctggagatcggcccgggcatcggccccctgacggcggagttggcccagcgggccgggaaggtggtggccgtggagctggaccgggccctgctgccggtgctggcggagaccatggccccctatccgaatgtggaggtcgtgccgggggacgtgctgaaactggacctcacggccatcgcggcagagaagttccagggcctcacgcctatagtctgcgccaacctgccctataacgtcacctctcccattctggaaaagctggtggagtccccctgctttactgccttcacggtgatgatccagcgggaggtagcccggcggctgtgcgccccacagggctcctctgagggcggctccttctccctgttcctccagtactacatgaagccggagctgctgttcgacgtgccgccggagaagtttctccccgctcccaaggtgacctccgccgtgatccgctgcgtccggcgggagcggcccgccgtggatgtagcggacgagagctttttcttcaaagtgatgcggggcggcttcctgctgcggcgcaagaccctggccaacagcctctccgccgccctgccggggattcccaaggaatccatccaacaggccatcgccgatatgggcctgcctgccgccgtccggggggaacagctgacgcttgaggacttcgcggccctctccgccgcgctggggcgggaggcggatggagattgactttatctcccgcaccgtgtatgatattgatacgaaaaatgcccctccgccgcgccggctggaagattattcagaaacgaggtcattcaaatggcaaccattgatctgagtaaatatggtattactggtaccacggaaattatccgcaatccctcctatgagttcctgtttgaggaggagaccaaggccggcctggagggctatgacaggggacaggtcaccgacctgggggccgtcaacgtcatgaccggcatctacaccggccgctcccccaaggacaagttcattgtgatggacgacacctccagggataccgtgtggtggacctccgacgagttcaaaaacgacaacaagcccgcctctcaggaggcttgggatgcctgcaagaagctggcgcaggagcagctgtccaacaagcgcttgtttgtgatggatgtgttctgcggcgccaaccacgactcccgcatggccatccgcttcatcatggaggtggcatggcaggcccacttcgtcaagaatatgttcatccagcccactgctgaggaactggagaacttcgagcctgacttcatctcctacaacgccgccaaggccaaggtggagaactatcaggagctgggcctgaattccgagaccgccgccatcttcaacctcacctcccgggagcaggtcatcctgaacacctggtacggcggcgagatgaagaagggcatgttctccatgatgaactactacctgcccctgaagggtatggcctccatgcactgctccgccaatactgatatgaacggcgagaacaccgccctgttcttcggcctgtccggcaccggcaagaccaccctgtccaccgaccccaaacgcctgctcatcggcgacgatgagcacggctgggatgacaacggcgtattcaactttgagggcggctgctacgccaaggtcatcaacctggacaaggacgccgagcccgacatctacaacgccatcaagcgcaacgccctgctggagaacgtgactgtggacgagaacggccactgcgacttcgccgacgactccgtcactgagaacacccgcgtttcctatcccatcgaccacatcgagaagatcgtgcgacccgtgtccgccggacccgacgccaagaatgtgatcttcctgtccgccgacgcctttggcgtgctgccccctgtttccatcctgaccccggagcagacccagtactacttcctgtccggcttcacctccaagctggccggcaccgagcggggcatcaccgagcccactcccaccttctccgcctgcttcggccaggccttcctggagttgcatcccaccaagtatggcgaggagctggtaaagaagatgcagaagtccggtgccaaggcctacttggtgaacaccggctggaacggcaccggcaggcgcatctccatcaaggatacccgcggcattatcgacgccattctggacggctctattctgactgctcccaccaagaccatcccctacttcaactttgaggtgcccaccgctcttcccggtgtggaccccgccatcctggacccccgggacacctacccggacgccggcgagtgggataccaaagccaaggatctggcctctcgctttgtgaagaacttctccaagtatgccgccaacgaggcgggcaaggctctggtagctgccggccccaaggcggagtaagtaaaaaaggaaaagccggatcagggtgccgcggaagcggcgccctgatcttgtcgaacgagctgccgcttgttcgacacaaccgcaaggccactctgcaaacgcagagcggccttgttttgccagtatgacaggatttttaccgaatgtactccccacactccgggcagtagtggggaatgccgccccggggatcccagtgtccgccgcagtacggacaccggaagaacagcagcgtctggagaacatccgccataacaaccaccgctcccggccacagcagccatccaatctccagaaacacgccgatgagcatcaggacgaatccggcaatcagccccacccacagcagcgtataactcttcttgtagtccatggccgccctccgttcagtccaggggcttcttgcaataggggcaggttttgggcagggtccgcttgggcagatcccgcttgcagtgggggcagtggtagaagaaattcatctgaagcgtcccaaccagcacacagatgatgcccagcacgccgatgacggttctgccggtgatcccgccgatcagcatcaccagaatgccgccgatgcccaatatccgcatcagccaatagctcgtcttatagttcaagcctgttcaccttctttccaaccggggctccggggtttttcaggtccgatccgggaatttttcgcagagccggtccagttcgccgatcagcgcctccatctccttctggtccatggtgcaggtgatctcagcggtgtcgtccccgtccatggtgttgggcagatagaaggacaccaccacttcaaaggtcccgtctcccaatgcccgggcgccgacggagaagtaaaagttctcctgaaagtcactgacgtacacatcccggattccagccttcagcactttcagcccggcgctcatgctctggagctcgtgggtcagcaggcagctgttggaatccttcaccacgtctccgtcctccttgttccaggtggcccggagcaccagccagttccggtcgtcactggtggggtcgccgccgtccggcggaaattcatagttcacgatatccagcctcaggctggactcctcattgcggaagagcatctagggttctccttttcagtcgttgtgatgggcggcgtaaaacgcgtcgtagtccgccagctgcttctgcagcagggccggggtgtccagcccatagggacagcgggacttgcaggcgttgcagtggatgcagtttttgatctggtgcatcttctcccgccactcgtcgctcagatagggcttgtagggtgcccgccgcagcagctgggccatccgggccgcctgggggatgtcgatgccggcggcgcagggcaggcagtagccgcaggagcggcagaagtcccccgacagctccgtccggtcgtggtcgatcaccgcctggagctccggcgtcatgcggggattccgctccgtcagctccagccactggtccagctcccactcatgctggatgccccagatgggcaccacgtctggatgctcctgcataaaggcgtagcaggcctccgcattgttcagcaggccgccggagaggcccttcatggcgatgaagcccatgtcgtgctcccggcacagctccaccagctccaggtccttctccgtggccagatagcagaaggggaactgcagcgtctcaaaattgccggactcaatggcctcgtgggccaccttcagccgatggttggtgatgccgatgtggcggatgtagcccttctgcttggcctccagtgcggcggcaaagggcccgtccgggtcatggatatccggcagcaccgccggattgtggaactggaacaggtcgatgtaatccgtccgcaggctgcggaggctctgctcaatgtgggcctggaccgtctttttgtctcctccgccgctcttggtggaaatcaccacgttctgccgcacgtcgtggagggcctctcccagtttttcctcgctgtcagtgtacatattcgcggtgtcgaaatagttgattcccgcctcacaggcccggcggaccagcttcactgcatccgccttggaaatccgctggatgggcagggcaccgaacgccgtcttggtcaccagcaggccggtacggcccagtctgattttctccataatagttcctccttcccgcacagagcgggtcactcccctgcattggattgtatcacatttttccaggtttgcaaaccgcaaatcctgtgatatgatagaagcagaatatcgcttcggagggacatgatctcccgtccgggaccccggcacccctgtcctcagcctattggggtctcgcccggcaggtcgggccccggatgggtgtccggacggtcccggcgggggattgggacagaaacagaggaggcgccctatggcacagaatgagctccatttgaaagtgacgctgcggatttacagcgacgatgaccagcgctgcttcggccccggcatcgccaccctgctgcagcgggtgcgggagcaccactccctccgggccggagccgcctctatggaaatggcctactccaaggcgtggcgtatcatccgcacggctgagacagtgtttgggtgcaagctgctctcctccaccatcggaggtgcccacggcggcggcgcggtgctgacgccggaggcggagcgccttctggcggcctatgaggcctactgcgccgatgtgggcacctacgcccaggggaaattcgaggatgccttccgcttctaccgggatctggaccatcggccatgacccggtgcggcgtgagccgccgtgcctgcccaggagttatcctctctgaacaggaaaacgggaccggagcctgtgcggctccggtccctccgtgttttgcggcgcttacgtccggggacgggtgggatcctcctccgtggggctggggatcggatgctccttgtgggccaccatggcctggatcagctccacggtccggcccaggcccagatagctggaatcgatgcagaagtggtaactgtccacactgccccacttcttggaggaatagtactcgtaataggacgcccggcgcttgtcggtcttgaggatcagctggcgggccttctccggcgtgaggttctgccgctgggccacgcgctggatacggacctccaggggtgcgctgataaacaggctcaggtggttgggatagtccgccagggcgtagtccgcgcaccggccgatgataacgcagggcccttggtccgcgatgtgccggatggtgttgaaagtcgccagatacacctgttgttccagagagtcacccacaccgctgccgggcagggcaaacatataggaatccatggcgatggagtacaggaggctcttgggccgctcgtcgaagttttcaaaaatcttctcgcacaggccgctcttcttggcggcctcctgcagcagctccttgtcatagaagggaatgcccagctccttggccacgcggatgccgatctccttgccgccgctgccaaactgccggccgatggtgatgatggttttcatagagaaccctcctctccttgttggttttattataccgcaagaagaggccgccgtcaaacagtaccgggcggaccgtcgccggaatcgccctcatccggcggcaggggatgccagggctcctgttttccggaaaaaaagcggcgggcaacagcgtccttcgccgtctccaccagtgcataccagaggcgtcccgccgcgaagagaatcaccagggccagcaggacggcaccgacctgctccagggaaagcgacatggcacgcgctcctcacttcgtggcgtaacaggtcttgaagaaagtctcaaaggcctgctcttccggtccctggtccacgtagatgaacagcttctcatcctccagccactcgaaggtgttgatggccagatagtgacgcccatccgggtagatgatgaaggcatccgtggggtacttgttctgataggcctttttgactgcggaacgggggcagatttccggattgccgcagccggagaggtccggaactgtgggcacgaccaccaccgtggggtccgccccctccttccagcccacgatcaggctgccgtaggtagtcttgctgccgtggaccaggccgtagttgaaccgcttcgcatcctccgtataggcggccaccagctggtactgcccgccgtcgggcaccacgctgtcaaacaggcggcgcatcttctgcttgctgtccgcgcttttggcctggtcaatttcaggtcccttgaagagttttccgaaaattcccatgacaatccctctttaatatctcaattttatattgaccattttattttatctggtcaatatatgagatatcataccaaaagaaaccggattgcgcaactgggtaattatcagcgcacaaaaaaagaccgcccatcagcggtctttttttgcgttgcgcagggagcccagatagttcaccaaaaatttcacgtgcagcgccgccgtctcctccaggtgcgaaggaaacagaaatggcatggattccggcgcggagttatagatcaggaggcaggagaacaccaggttcgccagcacctcaggggcgcagtcctcctgccggatgtccagcagcgccatcaggcgcagaaagaaatcccgctgcccgggccggaaatcctggaatcgctccggcgtcaggcggctgtgcagatccgcctcctccccctgggtcatcaccaggatgccgttttcccggtggcggaggatcgtccggaaaaaagactccacgtgctcctcccaggtcccctccggccgggccagctcctgttccagcagccggagcagacggcagcgctgctcctccatcatctggagggaaaaatcctccagcgagtcaaaaaacgtgtagaaatagggcttggaaatccccaccgccgcggcgagctccgccaagtgcagccccttcagacccttgcttacggccatattcagccccgtgtccagcagagcctgccgcacccgggcccggtcctcctctgtataggtcttgcgggccatggcattccctcccctttttcatctggtgccagtataacacaattcccgggaaaagaaaaccgttctgccgcgcatcccccaaaaagcaacccggccgctgtgcgcggccgggttgcttttgaagatctcacgcctccggcatgggcttgcctaggcgcttgtacatggtctttttcaccgcccggaggatattctcatacccggtgcagcggcacaggtggccggagaggagttttctcaattcatcgtccgtgtactccttgccgctctccaggatctccactgccgtcaggataaagcccggcgtgcagaagccgcactggatggccgcctcgtccacaaaggcctgctggatgtcgctgagctcgccgttagggcccagcagcccttccagggtgcggatgtgcttgccctccgcccacacggccagataaatgcaggagttgtatgcctccccgtcgatcaggacgttgcaggcgccgcactcccccacctcgcagcccttcttcacggaggtcatccggaagtcgttgcggagcatgtccgtcaggctggcccgcacgtccaccgtgcgttccacgtccttgccgttcagattgaagtgaacagtctgatactgcatcacatgcttttccatcacaggtcacctcccgccagcttcaccgcttcgatgaacgcccgccgggcgctctccaccgcgatgtgcatccggaaatccttggccgcccgccaggagtcccggggattgatgtcctccttcaccgcctgggcaaagcgatccgccagctccaggctcaccggctgtccggcggccagctcctccgcagccgccgcccgcaggggcaccggccccgccacgccgaaggctactctcgcccgctccacggtctttttgtcggcggaaaggcggacgttcacagaggttcccagggtggcgatgtccatggcattccgcatggcatactttatatagtggccaaatgtgtcaatataactgtctttttcgatcaggatggccgtttggatctcgccgggacggatatccaccttgcctgccctgatgtagaactcccggatgggctggcggcggataccgtccggtcccgtcagctccacaatggcgtcgtaggcgtggagagtggaggcggagtccgcggaggtgacaccgttacaggtgttaccgccgatggtgccgatgttgcggatctggggaccgcccacctggtccacggcctctcccaaaacatggaggtatttctggatcaggggatcccgggtaatgtgggaaaagctggtgagggagccgatccgcagggtgccgtctgcctccagggtcacgccccggagttcatccagcccgtagatggagatcagctccaccccggcccgcttgccctcccgcatctgcaccagcacgtcggatccgccggcgatgatctgggcatccggatgggccacccggagggccaccgcgtcctgaacgctctccgcctgatacagggctttcatatcatacatgagtggttccctcctttagtcttcgatcagcccagcctctttgaatccgcggtagaggacatggggcgtgatagggcatgcgtcaaaggccacacctgtggcgttcagaatggcgttgcggatggccggcgccggcgaacaggccgggggctcgcccagggccttggtgccgtagggagaggtgggctccgggttttccacgaacgccgcctggagcgtgggatggtccataaaggtggacagcttgtagtccagcagattgttgttcaggggctttccggtcttctcgtcgaacttcagctcttcactgaggccgtaaccgatggccatggacatgccgccgtggacctgggcctctgccagcgccgggttgatgagggtgccgcagtcgtggacgttgaccagattcagcagcttcaccttgcacagagggacgtccacctccacctctgcgaaggagcagccgaaggagtaggcgttggacttgatctgggccgtggtctcggcggtgatgtgctggctgtgctccagggagtagaggctctctgtggccagctcgcccagagtcttgaggacccggccgtcctccttgcggatgatcttgccatccaccagatccagaacagataccggcatccgggtttgctcatgggcgatctgcaaaatccgctctcgcagggccagggctgtctgcatgatgctgaagccgccgatgtacgtctgccgggaggcgtaggcaccggtgccgaagggcgtcacgtccgtgtcctgggtggacaccacatggacgtcctccaccgggatacccaccgcgtccgccaccatctgggaataggcggtgtcgcagccctgtccaatctccgtctcaccggtctggaactggagggaaccgtcctggttcagcaccatccggcaggaggaggactccagcgagatgggccacacagccgtgttgtaccagaacaccgcaaggcccacgccccggcggacagggccagtctggttctggtattcccgatatttccgctggtaatccagcatcgccattcccttgtccatgcactggttgaaggtgtcggcgtacaactcgtttctggagaagccgtcggtataccccaccggcatcagattcttccggcggaattccataggctccatcccgatagcctgacagatatcgtcgatgtggcactccccggcccacatggcctgggggatcccataaccacgcatggcgccggcggcggggcggttggtgtagaccgtccagcagtcgcactccaaattgtcgcaggggtagagctgggggaaggcgcccatgcccttggccacgatgctgtggccgtgggaggcgtaggccccctggttggaccaggcctcaaacttccgggccaccagggtgccgtccggccggacgtaggagatgatgtgggtgcggatggcgtggcggacccggttagagacaaaggtctcctcccggctgcactccagatgcaccagccgtccccccacctgggtggagagccaggcgcacaaaggctcgtacagagcgtcctgcttgttgccaaagccgccgccgatgtagggcttgatgatccgcaccttgccccagggcagacccagtgcctgccccaccacccggcggatgatgtgggggatctgggtggaggtgaccaccaccacccggcccgcctcctcataggcgaagcagccgtggttttcaatgtggcagtgctggacagtgggggtgtcgtaccagccctccacccggatcaggcccggctcctggatggcggtctgatagtcgcctctgcggatatctgtgtgcttcagaacattgccggggcagtcctcgtggatctgtggggcatccggctccatggccttctgcacgtccagaacgaagggcagctcctcatactccaccttcagcgcccggacggcctgagcggcagctatctcgttctccgcgatgacggcggcgatgtcgtcgccgtaataccgcacgtgatggttcagcagcagccggtccgccacgtcctggtgggcgggatctgtggaccaggggtgtcccgctgtggggaagcggtaatcgggcacgttgaagcaagtcaggaccttcaccacaccgggaacggcctcagcctccgtagtgtcgatggacttcacgtagccgtgggcgatagtggcgtgcaggatcctggccaccagggcgctttgatcgcacaggtccgccacatacttggcgcggcccgtggctttttcataggcgtccacacgggtgacgcttttgccgacgcttttactcatcaggcaagcctccttttttgatcaaagttccgccgtccattgactggacacggcgaaagcggatatactactgataaaatgaggtgatggatgtggaaaacaagccgaaaatcggttgtgtggtcatggccgccggcaacgcccggcggtttggggaaaataagctggccgcccagctgcggggcaggagtctcatcctccgggcgctggaagccgtcccggccgagaagtttgacaaagtcgtggtggtgactcaatacccggaggtcatgcggctggccggggagttccacttcgccgccatccacaatccccacccggattacggcatcagccacaccatcgaactgggcctgacggctctgcgggactgtgacggggtgctgttccaggtgagcgatcagcccctcctgcggcgtgagagcgtggcagagctggtggaccgctggcgcacccggccggagaagatcgtcgctctgggccacggcggcgtgcggggcaatccctgcctcttccctgcccggttctttccggagctgctggagctgcgggaggaccacggcggcaacaccgttatccggcggcacgaggcggatctcctccttctggacgtcccggcggaggagctccgcgacgtggataccgcccaagccctggaggaattgaaagcggaggagcaggtatgaatccaaccgtctatgaattcgatgcggtgatccggaaagttccggacatcgacggagcctatgtagaattcccccatgacgtacaggcgctattcggtaagggccgagtcaaggtggctgccacctttgacggcgtcccctacgcggggagcctggtgcggatgggcactcccggccacatcctggggatgcgcaaggacatccgggcccaaatcgggaagcagcccggagacaccgtccatgtgacagtgcgagagcgggggtaacgcagattcggacaggccgcggcggaagtaccgccgcggcgcttgttatttacggctgtaaggcgtgccctccaggggcagactggtacggaacttgccgtcgtagcggtagtaggcgtccgcaatggctggggctgtggggatggaggtgatctcgccgataccgatggcgccgcaggccacgttcagtcccgctttttccacgatgatgggggtgatctccgggatctggttggcccggaacaggcccagcgtgccgtatttggcggtgggcctgcagtccgtgaggggataccgctccgtcagggcaaagcccatgctcatcaccacgccgccctcgatctgcccctcgatggacaggggattcacggccttgcccacatcgtgggcagccaccatctggcggattttcccctcgtcgtccaggatgcacacctgggtggcgtagccgtaggccacgtggctgacggggttgggcaccggggcccccagagggtccgtctttcccaggtattcgccatagaactcctgaccgttcagggcgtccagaccgccggaggcccccatggcctccttcagatcctggcaggcccggcggaccgcctcgccggtgaacagcgtctggcgggagccggaggtggtgccggagtccggcgcgcagtaggtgttggaccgctcgtagacgatcctgtcccggggaatgcccgtctgctcgtagaccatctgtgtcagcaccgtgcccaggccctggccgatgcaggaggcaccggcaaagatgtggagcctgccgtcctccaccaccaggcggcaccggccggtgtccgggatgcccacgcccacgccggcgttcttcatggcgcaagccaggcccacgtactggttattctccacatagggcttcaccgcctccagcgtctccaccaggccggtggagttgtctacgatctggccgttgggcagctcctgtcccgggcgaatggcgttgcggtagcggatctcccagggggtaatgcccacgatgtccgccatctggtttaagaggctctcgatgcagaagcaggtctgggtgacaccgaagccccggaaggccccggcgggagggttgttggtataataggcccagccgtcgatctcaaaattctggtagttgtagggaccggcggcgtgggtgcaggcccgctccaacaccggcccgcccagagaggcgtaggccccggtgtcggcgatgacctcggcggccacgccctggatgatgccgttctcgtcgcagccgatggagaactccatctccatggggtgacgcttggggtggatcagaatgctctccgcccgggtgagcttcaccttcaccgggcgcttggtcaggtacgcgatcagggcggcgtggtgctggaccgtcacgtcctccttgccgccgaagccgccgcccaccaggcagttgcggaccttcactttttccgccggcaatcccagcatccccatggtctcgtgctgggtgtcgtaggcgccctggtctgtggagaggatcatgaccccgtccccgtcgggataggccacggcgcactccggctccaggaaggcgtgttccgtccagggtgtggagaagtgctgggtcagcacatgcttcgatttggcgatggcctctgccgggttgccccgctggatgtgcttgtgggtcagcaggttcccggtccggtggaccaggggagcgtctggcagcatggcctcccggggactgcggaccatgggcagctcctcatagtccactttcaccagggccttggcctgggccaggatctccggtgtctccgccgccaccaggcagatggcgtcacccaagtaatgggtgatatcccccacggcgatcatggtgtcccagtctttcaccaaatggcccaccttgttctgcccggggatgtcctccgccgtaaagacccccaccacaccgggcagggccctggcctcctccgtgtggatggccagcacccgggcccgggggtattgggaccggacggcgctgccgtagatcatgccgtccagatagatgtcgtcgggatagatgccggtgccagtgaccttctcctccacgtccacccggggcacccgctgccccagggaccaatcagcgggagccggcggcacctcgcccttgcggaacagctcggcggccagcagaatcgcatcaatgatcttcacatagccggtgcagcggcagatattgtttcggatggcgtaggccgcctcctcccgggtgggattgggattcatatccagcaatcccttggcgctcatcaccataccggggatgcagaagccgcactgaaccgcccccgccatgccgaaggcgtaggtatagacctgcttttcaaaatcggtcagcccctccaccgtgacgatggacttgccctccagcttatcggtctgggggatgcatgccttggtgggcttaccgtcgatcagcactgtgcaggtgccgcaggcgccctcgctgcagccgtcctttacactggtgagatgcagggtatcccgcaggtagcggagcagcttctggttgttttccactgtcacggcccggccgttcacggtaaattttgccatggcaagttcctccttgactgccgtgcccaaccctggtcccacggtcatcggtgttctttcggaaaggtcgacctttccgctgtctctattatacaataactttcttgccgccgcaactgaactttgtccggcacgctattttatctcggaaacaacgccaccagacggcagctcccaccccacgatcagggcgcccttccggacggtgatccgggccttgggctcgatgatgtggttgctgacgcccagggggaactccgccgagagggaggcgtgggagaggggatactgcacacccttctcgtcaatgccggaggccggtgcacccaggcagaagacggagagcaggccccactccaccgtctgctccacagtgatggtctcattctccacagccgtccacacaaaatcattgtcatagaggtatcccctggccccatggcggcgcagatacagcagtgtctgcagattggccagggtgtggtccagccgcctgccgccggtgccgccgtaaatgtaaaactcgccgcagccctgctccagccccgtcttcacagccagcatggtgtccgtgtcatccttctccaccggcacccgacagacatggtcaaagtccgcaggctgatccatggagtcaaagtctcccagcagcagatccggggtgatccccgcctggcggcaggccagatacccggcatccgccgccagcaccaggtcccctgtctggggccgctcccgcaggccgtaataggtgcctgcggcaaaaatgaagcatcgtttcaatgggtccactccccgtcttgttcattgagatgtcacgcggccgccgtgccgtgaaatccagcggctgtccttacagccattgtaccatgattccgcgcccatgacaaacagaacttcctgacagaagagccgcatccaggcagcgcccggacacggctcctccgtttactggatatgctcctcacagaagttgtccagcacccgatagcccatctcttccggctccgccaccgggaaggtggcgatgctgaccggatcaaaggccggacagagccgcttttccggctcgatccgcagggcgggcgttcggctgggggacttcttctgcggagcttgtgcctgccgcatacaatcaccccggctctagcatttgtgaaatctgcggaatcatgcggcggcgtttccggaaaagcccggaaacgccgccgcattctggaaaccctatattttaataatgtatcaggtctgcccctccagctttgcaaagcggtacaacaccgctgccagctgctgccgggtgacgggctgggagagcatcaggttccccgcctcgctgccctgcaaaaggccgttttccacggcccaggccactgcttcctccgcatacgcgctggggatgttgtccatgattgtttcctccttgggccgccagccgggccagccggagacggccacctcccgtccgctccgctggtcccatctggctcgtgcggtccgggtgtccacatgggtgaaggtctgatagacgccgatcccaccgtgtccgcccagatagtattccgctatctgccccaccagcaggggcgaggcaccgctcacctgaatatccgccgccctgcccagcaggtgctggctggctctggcaccacccaccttctgattgtaagaagcggtgcggtacccgctgttgacggtcaccgccccgcaggcggcagtgcggatccgctccagcagctccaccagatccgtgtcgatcttcaccaggtctgccccgtcccggcaggcgaactcccgcacccggaagtggggggacagcagcttgtccccctcccgggcaaggctgtatgtccccacgctcattccctggcccgcttttccgcctgcgtgccaaagtaaaaagcgatcaccacggtgaacacggtcaagaactgctccgcggtcacccggcccgttccggccatggcagcaaataccgccgtcagaatcaccgtcaccagactcttcaccgtcagcaggctggccaggcgctgtgtcagcagctccatctcagtcctcctccgtcagcacatcgccccgcaggcggtatcgctttccggccatatagacataggcggtcccctggcccatgtccacgtccaccgtgcggccgttcaccacatggaccttttccaggctgcccacaccgtggtccagaatgccccagccgttggcctcgtccggcgtctctcccgcccgggtctccagcagctcccgggcggagaagagattgcgggtggggtccagggtgagcccgcaccccagctccttcagggccttgttggcctcctccagagtcttctctcctctggtgtaatcgtacagcacttcctccagggttttcatcttatgtaccatcctctctccgggtcctgcccggctcaaattttactgacgctgtgggccgcctcgctgcggacgaagccgatatacgccgtgcgggccgtctccgctgcacgcatggcctcctccacgtcgccgttggtatgttgacccgccaactttttggccgtggtcagggacaacgaacaggtggcgtacatcagatccatagccagcctgctctccgtagcccggcgcgccgcccgggcctctgcccgcctggcactcttccgggagcggtattccgccccagccgccagtacggtagccgccccggcgatcagcgcgcagagcacctccgttccgatcctgcatccctcctctcagatccagcggtagtggggccgctcctcttgaaacagccagtgccgcatccagtcgaacagcacgatggcggtccccgccagcaccacccacagcagggcgtacttcaggcacacctgtccccacaggttccccggcaggcgggagtagtcccagatgtccagcttcagccagacgttcaggatcagcccggctcccagctccgccaaggtaatgacgctgcccccgatcagcgcctggagccacaggggccgctcccaggccatgtgctcgttggccaaatctagcggcagactcagcatcgccgccagcagaaacatgctccagtgggtgtgcccccgccagatcagctccaccatgcagtagagatccccgcccatcagcgataggatcaaggccttgtgccatctcttcacgttcgtgtcctccctgctctgaaattcgcttggcttcaaccgctatcgtgcctttccggcggctccgctatgcatagccggagccgtcaaccatatcctttatttcccggccggcgcgcacggcggcgtgcaacgcggcggaaatttcttttcccgccttcctctcttccaggttatatgcatctctccctccgctcaccacaaaaagcgccgcgggcaggaatgcccgcagcgcagagaaaacgccccggcgccgtaaccggcgccggggcatctgtatttgatctgttccttcggaaatcagtcctccgccatcttgcggtacttctggtaccgggccttgacgtcggcgatctccttctggtacagggcgtccgcccgctcggggaagttgttcttcagagaggcgaagcggttctcgcccatgaggaagtccatgagcttgtcagtatcgggcgcgggagagtccagctggaaggggttcttgccctcggcgatgcgccggggatcataccggtacaggtgccagtagccgcactccaccgccttcttcatctcgtcctgggtacagctcatgccggctttgatatgctgctccaggcaggggcagtagcagatgacgatggcggggccgggataggactccgcctcccgcagggccttcagggtctgggcctggtcataacccatggccacctgggccacatacacatagccgtaggtcatcaggatggcgcccaggtccttcttggccacctgcttgccgccggcggcgaacttggccacggcggaggtgggggtggacttggaggactggccgccggtgttggagtacacctcggtgtccagcaccagcaggttcacatccctgttctgggccatgacgtgatcgatgccgccgaagccgatgtcgtaggcccagccgtcgccgccgatggcccagatggacttcttggagagatactcacggttctccaggatataggacacatcttcggtctgctcgcacttctccagggcggcgatcagggcgtcggacacggcgcgggacttctctccgtcgttccagttgttgatgtagtcctcgatctccgcaggggcgatgccggcgtccttcatgctctccagccggatcagcagctccttgcggatggcatcctgagcgtggaagaagccataagcgaactcggcgttgtcctcaaacagggagtgctcccaggcggggccgcggccctggctgtccttgcagtagggcaggatgggcgcgccgccggaaatggcggaggagcagcctgcggcgttgcccgcgtacatccggtcgcccaccatctggctcagcagcttaatgtaggtggtctcggcgcagccggcgcaggcggcggagaactggaagtacggcttggcgaactgcatgttcttgacggtcttgctgttgatcacatccttcttcaggtacttgtcgttcatggcgacctcgtcgaagttcgcctgttcggacttcatctcctcgaagggggtcatcaccagggcgtccgccgtcttgtcgctctgattggccgggcaggcggtcaggcacacgccgcagcccaggcagtcatagggagagacctgcatccggaagaagtagctgggggcgtccttgcccaggcccttggcgggcacggtctcaaaggacgcgggcacctgggccttctcctcctcggccagcagcacgggccggatggcggcgtgggggcagcacatggcgcagcggttgcactggatgcagctctccgcgttccacttgggcaccttggttgccacgccccgcttggagaaagcggaggtcccgttttcccaggtaccgtccagcacgccgtgcttctggaacacagacacaggcagcttgtcgccctgctgccggtccatgggcagcacgatgtcacggacaaaggcagaggcgttcttgggctcggccatgggagtgtcaggcgcgtccgcccaggaggcggggatctccaccttcacagcggcgctgatgcccagatccacggccttgtcgttcagatccacgatcttctggccggccttcttgaaataggagttgtagttgttcttcttcatgtcctccacggccatatccagggggatgaccttggtcagggcaaagaaggcagcctgaaggatgttgttggtccgcttctcgccaaggcccacctgcaccgccagcttggcggcgtcgatgatgtagaagttggcgtgcttccgggccaggtcccgcttcatcttgccgggcaggcgggtctccagctcctccgcgctccaggggcagttcagcaggaaaatgccgccgtccttcagatcctcggtggtgtcgtacttgttgacataggtgggggcatggaccgccacaaagtccgcggaggacaccagataggtggagcggataggctcgtcaccgaagcgcagatggctctgggtcaggccgccggacttcatggagtcataggagaaatacgcctgtgcgtacttgttggccaccaggccgatggtggagatggcgttcttgttggcgcccaccgtgccgtcgccgcccaggccccagatcttgcaggaaacctcgccgggatgaggcagctccacctccttgtagtccagagaggtgtgggtcacgtcgtcgttgatgccgatggtgaagctgttcttgggattctccagcttcagattgtcatacacggcgatgaactggcccggggtggtgtccttggagctgagaccgtaccggccgcccaccacacggatgtcgccccggcccgcctggttcagagcggtgaccacgtccagatacacgggctcgcccacggagccggtctccttggaccggtccagcacggcgatcttcttcaccgtggcggggatggccgctgcgaagtgcttcacggagaagggccggtacaggtggatctgcaccatgcccaccttgcggcccttggcgttcaggtagtccacggtttccttcacggcctcgctggcggagcacatcaccacgatgacctcctccgcgtcaggcgcgccgtagtagttgaacagcttgtagtcccgaccggtgagcttgttaatctcgtccatgtaatgctggaccgtgtcagggatggaggcggccttgacgttggcgccctccttgcactggaagtacacgtcggggttcacgttgttgccccggttggtggggtgctccgggttcagggcgtggcggcggaactcctgcagggcctcctggtctaccagaggacgcaggtcctcatagtccaacgcctcgatccgctgcatctcatgagaggtgcggaagccgtcgaagcagtgcatgaaggcgtacttgccgctgatggcggacaggtgggccaccgcgcccaggtccatggcctcctgggggcaggaggacatcagcatggcgtagccggtggtgcggcaggtcatgaagtcggtgtgatcgccgaagatagagtggtggttgctggtcaccacgcgggaggcgatgtgcatgacgctgggcaggaattggccgcccatggcgtacatggctgggatcatcagcatcaaaccctgggaggatgtaaaggtggtggtcagggcgccggcctgcagggagccgtggcaggtgcccgcggcgccggcctcagactgcatctggatgacgtccaccgtggagccgaacaggttcttccgccccttggcggaccactcgtccaccttctccgccatgggagaggacggggtgatgggatagatcgccgcgacctctgtgaacgcgtatgccacatgggccgcggccgtattgccgtccatgacggcaaatttctttttcatcgggatactcatctcctgttataaaatgcgccgcatttccctgcggcgatcccgcccggcagatgggtgggtgcttgtgaaaagccgcggcggcacgataaggggggatttgcatatcgtaccgccgcggctgcatgatggattctctttacttctatgcgcgacgtccagcagagcttacacgaagttgcacacgcgagcgatggccatctcggtataacccagagactcggccttggtctgcttgccgcaggccacttcctgcgtgagcttcaacagctcctgccccagctcctcgatggtcttggtaccgtagatcaggggagaggcatccacatcgatgttgtcaatcatattggcgtaggtcagcttgttgccggtgatcttgatgacgggggccaggggattgccggtgggggtgccgcggccggtggagaacaccacaatctgggcgccgccggccaccatggccgccacagaggaggggtcgttgcccggggtatccatgatgaccaggccctgcttggcctccacctgcttggcgtagtcatagaccgccatgacagggctatggccgcccttgtggatgcagcccagggacttctcctccaggcaggtcaggccgccggccttgttgccgggagaggggttgccctcacggacttcctcgcccaccaggcgcagggagtcctcatagcggtggacgatctcaaagatgcggtcgtgaacctccttgttgatggcgcggcgggccagcaggtgctcggcgccgatgaactcagtggtctcagacaggatggaggtgccgccctccttgacaatcaggtcgctgagctggccgatcagggggttggccgccaggccgctggtggggtcagagccgccgcactccgtgccgataatcagctcggacatggggaactcctccttctgcagcagggaggcctcctccaccatctccttggcgtagcggacggccatgtcgatggccttcagggtgccgccggcctcctggatgatgacctgcttcaggggcttgttggtgcgctcctggatggccttcaccaccaggtccatctggcagttctcgcagcccagggacaccaccacggtgccgtagacattggggttggcggcatagccggccataacgtccatggtgaactgctggtcgggagccacctgggagcagc

SEQ ID NO: 4925 - DNA, 31091 bp, Unknown
  gut microbiota DNA sequence
cggagcccaccacctgctgggagatgatacgggtggtatcagaggcgcagacactggcaggcaggatcaggaccttgttgcggacgcccacgcggccgtccggacgcttgtaaccgtagaaattcatactcgtatcctccttctcagcccttgctgtccaggttttcccggtgctcttccaggttgtggcagtgcacgtgctcgccggccttgatgtcccgggccgccaggccgatgtgctcgccgtacttgacgatgggctggcctttggcgatgtcgcaggcagccagcttgtgatagatggtgatgtcctccgccgcagtcaggcgcttctcctcgcccgcgcacatgtaggtgacggtctcgcccttcttcacgggctcgatggcgaccaccacgttgtccacgggctcaacgatcatgccgttcaacataatgtaatactcctttcgttcctcaacgaatatgtgtaatggggatcagtgcttctcaaacagggctttctgtgcctcgtctttcgggaacttggggcagccgaacttcttggcccaccaagaggtaatgatggggaccagaatggcggtcaggatggcagacgccgccacctgagaggtggccacatccgcccactgcgcccaagagggatccgcctcggcgataacggcgggcactgccacagcgttgcctgcggtggttgccacagcccagccggcatagccgggacggcggctgatgaagcggtcgcacagcacaatgaaggcgccgccgatgaggcaggtgacaaggcccagcagaatgccctgcgcgccgcccttggcgatgttggtcaggttcatgccagcgcccaggcagaagcccacaaagggcagcaggatggtgccggcgggggccaggaagtcagacaggtccttgtcgatgttgcccaggatcatacccaccaggatggggccgatagcagccacaagggccatgaaggggatatcggccaggccgccgatgcccatagcgatcatggtcagcatggggccgtcgttgatggccagcagaggcatggccgcctggtccacggtgtcaccgtaggagttcatcagggccagatagatggagccgttggagttcgtgacggcggagatgatggccagagagctcaggcccagcacaccggtggggccgaacaccttgcccaccacaatgccgatggcggcgccgatgacgaacttggagatcagcagcacaccgccccgcttgacaacgccgcccatgtcccggacccgcagcgtggtgcccaggcagaacagctggataccgatggcggtgttggcgccggcactggtgaagacggcggtggtgaaggagccgatgttggtgacctccggaaggaaggtattgataatcgcgccgagcagcatcgggacgaccatcatacctgcggggatctttttcaggaatcgcatgatcatggtctttcttcctcctcaatttgtttgctgggggggcagagggcctctcccctggccatttgcgagcattccccgcatgagcggccgatcatgcgggccgtcacaccaaagggatttatcttaaaaaagccccgttgtcagggactctggccacggatcctgtcccagccgccggacggctctgggaccgcacacagatctccgtgcaagggggacaccaagacagactcttgtcagcgcggcgcccttttctgttccttatgtcgaactcagttcttattttggaattttcggtcgcattatatcatgccgttcccagtttgtcaattctcagacaagccaaagtttcgcgtttcggccagcttttcgatctccgcctgggcagtcaggagactgcggcggaccagctcgatcttctcttcccggcagcggaacagcggtacggagatgctgagagccgcgaacaccgttcccttccgccgcagcggcgcggcccagcaggccagctggtccgtggattcctcccgctccatagccagttccccgcgccggaccgcctccaactgggccagcagggtctccacatccgtgatggtctgctctgtcagccggggcaggcccccggcatacagcgcccgcacctcctcgttcgtcaggccgctgagcagagccttaccgacggcagtggcgttggccggcaggcgggtccccacccaggaaatcagccggatgggctggggagaatcctcccgcgccacatacagcaccctgtcttggtccagaatgcccatctggcatgtctcctggcatttggaagctacctccttcatcacctgggtaatgggtgccagcccccggtccgccgagaaggccgctcccagcaccagcgcccggggacccatagtataccggcccgtcccatcgtcctgccggaggtagcgccgctcctccagcgtatgtacgatgggaaacaggctgctcttcggggcatccagggcctgtgacaattctgtcagcgtcaacccctcctctgagccggacaggctctccagaatatccaaaacccgggctgtggcccgatgctgtccctgtgtcatatcgtgctccttccacgccggcgctctccgccgccgattgatttctccaggccgatcatatcagatgccgcttcgtttgacaagcgggcatgcgccgccgccctgttttccaaccggcgggattttaccagatcttctcttgacattcagcgccgttttgttatactaaagcctgtttttcgcgccccgcccgtgcgttttcaaaatctcaccccgcgggtttggagccagcggtcccggggccgtatgaaggaggacttttctatgaacgcagcatatctgacgccggccatcacactcttcaacgaggatggcacgctggacctggccagccaggagcgtctgttcaacaatctcatcgaccagggcgtagacggcatcctggtggagggcagcagcagcgagtttttcgccatgcccatgaaccagcgccgggagatggccaaattcgccatcgagaagatcgaccaccgggtgaagctgatcatcggcaccagccacatggtagcggacgagatcatcagcttttccaacttctgcctggacgcaggagccgacgccgttatgatcctgccgccctactacttccacttcggcccctccgctctgctgcaatactatgaccgcctggccgagcagattcacggcgatatctacatctacaacttccctgacaacaccggctacacgatcccgcctgagacggtgctggctttggccaagatgcaccccaacatcgtgggcatgaaagacaccgttcccggcatggaccacacccgggagctcatcaaggtcgtcaagtcccagatcccccagttcgagatctactccggctttgacgacaacttcgcccacaatgtactctccggcggcaacggctgcatcggcgccctcagcaacgtggtgccggagatctgcgccgcctgggtccgcgccttccgggagaacgacctggccggcatcgccagaggccagcagaccatcgaccgtctgatggacctgtatgccatccgcagccccttcctgcccgtcatcaaggaggcctgccgcctgcggggcatcgccgccaccagtgcgggcaccttccccatgcccagcgccacggtggaagatgacgccagaatcctggagctgctgaaccgggagggcgtgcagtaatctgctccccccctgaagccgcaccgccccagccgctgttttcaaaacggcggctggggcggtctcttttttatcagagaactcctcatggcagctctatatggacggacgtgtggaacaccggctccaccaggccggggatctccaccgcatcggtgaaatggacatcttccgtgaattccttcagcagggagacgatataaggatggggccgctcgtccggacgtccggcggccacgcagaccacggcggctttcggctggagcagccgcagcagcttccgggtggtggaggacagggaggcatggtggggcaccttcaggatgtcgcagggggtggcggtctgcgtctcccacatgtgggcgtaggcgtcgccccccagaacgatctccttcccatggtagtacagccgctggcgcaggctggagacgttcatggactttccccagtgaatcaggtcatagccgttccgctccccccggaaggcggcgtcgtacaccgctctctgccgggggtacagggcgggctcgccgaacaggatgtccatggtgaggtcgtccgtcagccggagacactccatccggtcccccggcagctccttgatccggccgatccggtctccgtaccgccgcagggggccggcgtacaggtccatacaccgcagcacgttccgcgctgccttgggcaggccgttgtctccgtccgggtccagagggccggaatcggcggggggcgcatagggggtcagcagctcgcccacagtgacggtctccagcacccggcccagaccaccgatgtggtcccggtggaagtgggtgaccagcaggatatccagatgcgccacaccttgacttcgcaggaaatccccggcaaagatccggcaggagcgggggtcctccaccggcgggtggtcgtcccgctccaggctgtcgtggccgcagtccaccagcatggaaaaacgcagtcgttccccctccatctcccggaccaggatggagtcgccgttgcccacgttgatgaagtccaataccagcatgtccagcccccctgttcgattgttgctattacaatatcacaaggcgccgccccaggcaatcgaaaccgcaaacgattgccgccaaatttttgtcttaaattttgacgttctgataaaagggaccctgcggcacaacgccgcagggccgcttcttctccagttcacaggctccgcaaggcgtccaccagggcggtctttccctccgtccgggcgtccttcatcttgatgatcctggcgggggttccggccaccaccgcgttgggagggacgttctccgtcacaacagcgcccgcggccaccacagccccggcgccgatccgcaccccctcgatcaccacggcgttggcgcccaccaggacgccgtcctccaccactaccggggtggcggaggcgggctccaccaccccggccagcacggctccggcgccgatgtggcagtcgtctcccaccgtggcccgtccgcccaggacagcccccatgtcgatcatggtgcgtttgcccaccacagcaccgatattgaggatggcccccatcatgatgacggcaccctcgccgatctccaccttctcccgaatgatggccccgggttcgatccgggccttgagatctttcaggtccagcaggggcacgccggagttccggcggtcgttctccaccacgcagtcggtgatcttctcccggttgtcctccaggatgggcgccagctcggcccagtccccaaagacgatgcggctctttccctcaccgaacacttcagcggatccgaagtccaccggagccgacaggttgacgtaaatctttactggggtcttcttgggggaatctgcgatatagttgatgatttcctgtgcattcaaagccatcacgctccaaacaagattttttgcaggtcatagacccctttgggccgcccaggcagcagccgggcgatgtgcagggccccgttcacaaagatctggcggctggcagcccggtgggtcagctccagttcctcatccggcccaaagaaatggaccgtgtgggtcccggccacggtgccgccccggagtgcgtggatgcctacctcatccttctcccggcggccgcagttcccctcccggccatacaccggccgcaggcggtgctggggatcgacagcttccagcagcagctttgcggtgccgctgggggcgtccgccttctggctgtggtgggtctcggtgatctcgatgtcaaaatccggccccagcaccggggcgatgacctgcagggcccgggccagcaccgccacccccagggagtagttggcgctccacagcaccggggccgcagagcccagggcaaagagactccccttctccgcctccgtatacccggtggttccagagaggagtggcgtccccgtccggcggacataggaggcgacctccggcagagcctccgggcgggaaaaatccatcaccacgtccgctacacgccccagtctgcccagctggcccagatcgtcccggccgaagacggcctcaatctcatccccggcggccgcagcggtctcccggatcagcgtccccattttgccccggccgatcaaaatgatcctcacagcagtcccgcctcctccagcgtccggcggagtgtggcggcgttggcctcccccatctcgcacaggggcagccgcatgggacccacgtccagccccatcatattcatggcggccttcaccgggatggggttcacctccaggaacaggtcgttcatcaactgcaggtaccgcaggtggttctccagggcccgggcatggttcccgtccagccagtccgccacgatctggcggcacatggcgggcatcacgttggcgtagacggagatgacgccgctgccgccgatgctgaggatgggcacagtgatgtcgtcgttgccggagtacagggcgaaatccggtcccacgcagcgagcgatcttcatggcgtaggacatatcgccgctggcttctttgatgccggcgatgttggggtgccgggccagccgttccaccacggaaaccgggatggagcagcctgtacggcccggcacattatagaggatgcagggaatgtccaccgcgtccgccgtctcggcgaagtggcggtacatcccctccgcgttagccttgttgtagtagggggagatcagcagcagggcatccgcccccatggactggtacagccggctcttctcgatctgggtgacagtgcagttggagccgctgcccaccatcaccggcacccggccgtccaccacccggatggtgtgctccaccacagcggcatcctcctcatggctcatcgtggagtattcgccggtggtgcccagggtcaggatgccgtcggtaccggcggcgatctgccgctccagcagctctgtcagcatatcgaagttgacgctgccgtcctggcggaacggggtgaccatggcgacaatggaaccttgcagatgttcaaatttcatgtgagtgtcctccgtctttctttttgtccgttggttgaagcaacaaaaaagtcggtagagacacgcccctaccgacagctctttcacacctctgcacccatgcaaaaagcggagttccctgtaagcggatagcgcccccgcggaaaattccgcggacagtcccgtgggtattccccacggacccaccccctgcccatacctgaccagggagttcggcggacttgcctcccccacgatcctcgcccgtcggctcccatggtctcgtcgcatccgcgcctctatctcattttctggtatcataccattacattctcccttttggcaagggaaaaaacggaaaaaagcgcgtctggcagtcccgtttccttgtcaaaagggacgaaaaatcccggttcctctggtcacccgaccgtgtctgtggtatgatatgattattaatgtcatctcagaaggggaggtcctgtccatgtccgccgtcgattaccgccgtgccctgcaccgcatcccggagctggataaccagctgccggagacggttcagctggtccagcgcattttggccccgctgccctgccgggtgttctctcccatcaccggcagcgtctgcgcctggttcgacgcagggaagagcgatgccgtggcatttcgggcggagctggacgcgcttccggtgacggaggccacggacctgccctacgcctctgtccatcccgggcggatgcatgcctgcggccacgatgcccacaccgccatggtcctgaccctggcggagtatgcggcggagcatctggccgagctgccccggaacgtgctcttcctcttccagccgtcggaggagaccaccggcggcgccggaaagctgtgtgagagcggcgtgctggagcgctaccgggtccgccggatcttcggcctgcacctgtggcccggcctggaggccgggaccatcgcctcccgccccggcccgctgatggcacggtccaacgaggtcaccgtcaccgtagaaggccgcagcgtccacatgtcccgggcggacgaggggctggacgccctgacggcgggcatctcctacctccagcgggcctatgacatgatggaacagctgcccccggaccagccccgggtgctgcggttcggcaagatggtctccggcacagtccggaacgccatcagcggccgcaccgtgctggaggggagcctgcgcacctaccgggaggacaccttccgtttctgccgtcagcagctgaaggacatcggccggtccgtggcagcggagaccggctgcagcctggacgtccacctcagcgagggttaccccgccgtgtggaaccacgaagagctctatcagaagatcgccgcccagctgggcgataacgcgccgaccctcatggaaaagccggtgctggcggcggaggacttctccttctaccagcagtatgtgccggggctgttcttcttcctgggcaccggggataccccccagcttcacgccccggacttcacctttgatgacgaggccgttctgcccaggggcgtggaatttttgaaaaagctgctgatgctgccgtgaggacaggctcatacgcaaaaggccgccggaggggatcccctccggcggccctgctttctctttccgcccgcggtcagtttgttgtctccgcctcgtagcggacataggccatataggtggttccggtcccctcatcccagcagctctgatagacatagatctgccccggccgctccgggtcggcatagtagggacaaagctccccggtgtccggcagctccgcctctccagcgtaggagaatccctccgggcacgcctctggatggcggcccacgccgcctgcctgcacatacaccgtgccatccaccgtgacagtgatcgccgctgtctccggctcagaatcgtctgtgccgtctgctgcaccgttcaccgttccgccggactcaccgacctccgccgtgtcctccgtgacggcagaggcgccgccgcttccagtggctccgtcccccatgttcatctgtgacaggaagaatgtggagcccacgatcatcagcgccaggcaggccgccaccgcgccggtccaggggaattcccgctgcttgcggtacgaggcgggcggcggcgcggcctcccggatgaacgcatcccggatatctcccacagcatccagcagctgttcccttgtcatagggtgaatccctccctctccaagtgttcctgcaggtcctgccgcaggcggaacagcgccgcggagaccgtcccccgccgcctgccgctccaggcggccagctcctccacggagcagagataccagtaccgacggacaaacagcacccgtttctcctggggcagggattccaaaaagcggttcaggctctccgccagggcggcggcctccacctcctgttccacgccgccggaggcgggcaggcagtcccccagctccgtcagcgccagttccgcctgtccctgccaccgcttctgggcccgcagggcccgccagcggtccagggacaggttccgggtgatcttccccaggaacgtatccagcctgccggggcggctgggcggcatggcctcccaggcccgcagccaggtgtctcccacgcactcctccgcgtcctcccgcagggccaggatgcggaaggcgatctggtagcagtagccgccgtacttggcgctgctctccgcaatggccgcctcgtcccgctcccagtacagctccacgatccgggcatcctccaatgccgtccctcctctccacttctctacacgcagtttccgcacagagcttacatgttgttttgattttaccataatcttttcggaatcggaatggtgttctgacgggaaaccttgatttgttcacacttttcctgtatcatgggtttcaattcggcccatctgaaaaaggaggaattgggtttttatgccattttcatttgacttcggaggctttgaccccagtgctttcggcggtttcagcggcggggacgcctcccagccccagcgtcccaagcgggagcggaagccccgcaaggccattggcaacgccttcacgcggacgctcatcaatctgggcgtgacgctgctgttcggcctggggtacttttacttcgagctgcccgccctgaacttccacgcggaggagttctatgtcttcgtgttcctgctgtgcgcggtgtactgcgtgtgcgccgtgctcacctccggctttcagggggagggcgtgaaggggtacttcggctttgtgaaaaagcagtgcaccatccccttcctggtcctggtggctctgatcgccgccatcatcatcggcggccttacctcttgggtggtaatccgggccggaagctacagcaagctgctttccatcaaagatggtgattttgcttccgaggtggaggagatctcctacaatcagatccccatgctggacgaagactccgccgcgcgcctgggcagccgcaaactgggcgaactggcggatatggtctcccagtttgagatcctgccctcctacacccagatcaactaccagggtcgcccggtgcgcgtgacttccctggcctatggagatctggtcaagtggttcaccaaccgctccgcgggcctgcccgcttatctgattatcgacatggtgacccaggaggcggaagtggtccgcctggacgaggggatgaaatataccaccgccgagcatttcgggcggtatctgccccgccacctgcggttccactatcccacatatatgtttgccgatccggtgtttgagatcaatgaagagggcgagccctactgggtctgcccccgcatggtgaagaccatcggcctcttcggcggcgcggacatccagggggccgttctggtgaacgccgttaccggggagagccagtattatgaggaggtccccaactgggtggaccacgtctatgacgcgaatctgattatggagcagtacgattattacggaatgtaccacaacggctttatcaactccattttcggccagcgggatgtgacgcacaccacagaaggctacaattatattgccatcggggatgacgtgtatatgtataccggtgtcacctctgtgacatccgaccagtccaacatcggattcatcctctccaaccagcggaccaaggagacgcacttctattctgtcgccggcgccacagaggcgtccgcgcaggccagcgccatgagtcaggtccagcagatgcgttacgtggccaccttcccgttgctgctgaacatcgccgaccagcccacctacttcatgtccctcaagggtgaagacggtctggtgaagatgtacgccatggtgaacgtccagcagtacaacattgtagagaccggcagcaccgtagcagagtgcgaggccaattaccgccgggcactggccgacagcggcctcatctccgacggggatgcggaggctgttccctctgaccaggaggagatcagcggcgccatcgctgagatccgcaccgctgtgctggacggcaattcctactacttcctgcggctggagggacaggatactttctacgccgtcaacgccgcggagaaccccctggcggtgatcctgaatgccggggatcaggtgactatcgcctacaccgcaggggagggcggcggcattctctccggcacctccgtcgcccgggccggagagacccccgtgaccttcaccccggaggaggcgccagctgatgcccccgccgaaacgggccagccggcagaagatgctgcctcttccaatcagcccacctgaaaatgcagtctcacagcaggccccgccgcagattgcggcggggccgctttcttttcggtgcctccctttttgtggaaactgccgttgacatccctttttcatccggatatactgaatttcatgaacaaaaaggagcgtgaaaatccatggacctgactctgaacaatgccgttatgggcgtggagctgtccggcatccggcagttcacctatctggtgcgggatacccccggcgcctgcgccctgaccatcggcgagccggatctgaacacccccgacgtcatcaaggaggccgccaaggccgctctggacgccaacgatacccactatccccccggcaacggctatccctacgcgctggaggccatctccaaattcgaggctgaggcccatggcctccactacgcccccagtgagatcatcctgacggtgggcgccacggaggcgctgttcgcctccttctccaccatcctgaacccaggggacgaggtcatcatccccacccctgccttcggcctgtatgaggcgctggtccagctgcagggcggtgtgcctgtctccctgcccacagagcacaaccacttccagatcgtgccggaggaactgaaggccgccatcaccgacaggaccaaggccatcatcctgacctcccccaacaatcccaccggctgcgtctacaccaaggagaccttggacgccgtccacgccatcctccaggacaagcccatctttgtcctgtgcgacgatgtgtaccgcactctgacctactgtgaggactaccacagctttgctgagtaccaggacatgcgggaccggatcattgtggtccagagcttctccaagccttatgccatgaccggctggcgcctgggctactgcatggcggacgccaagctgatggaccggatccaggtgttccaccagtactgtgtcacctccgtgccctcctttgtccagcgggcttgcgtcacggccctggagacggacaccagcgatgtggtggagatcttccgcaggcgccgggactacgtctaccagcgcctggtggacatgggcctggacgtggagaagccggagggcgccttctacatgtttgtggacatccggaagttcggcatggactccaacaccttctgcacccggatgctgaaggagggcctggtgggcgtcatccccggcatccacttcggcaccgaggggttcatgcgcctgagctactgctactccgacgcggacctgaaagagggattggaccggatcgagaagttcatcaagagcctgtaaacgcgcaagaagagccgcgggatcaaactcccgcggctcttttgattggtcagagcatccaagcctctcagccggactgagcgcaaatcgctcacttccgtttcttttttgcgtggtgcatattgtacagggacacgcagatggcgatgacaccggccatcagtccaacccatacattttgcaggccgtggcccacaagccagttatacaggaacgacagaggcggaaaagcccccaggatcgtcataatcactccggccgcacaggccagtgccaccactttgattatatacagaacattcttcatctgagcctgccccccagtctgtatccgtcagttccctcctgatttctgtatggtattatgcgcagcggatgttggcaagcgttccgcggattttctctccggccgcatttcgcctcccccatacacccggagcacacacaggatgggagatcacgatcccccgcccctttcgccgccgcacatcacttctgccgattcgccagctctttccggatggccttggtcaggagctcctggccctccggcgtgcggagagtatccagcaccgcggtgcgcagtgcctcctggaatttcttgctggtgaggaacgcgtcgaacatggtgccgccctccccgccggaggacgccgccaccgccggcttcactgccgcccgcctgggggccggaaccggggcgggctcgtccagaaacgccccgtccatccagtcggacatctgggtggtgtcgttggtctctccccgaagatagaagagggacacgccgaagtaggacgccagcttgttctgctggtcctgggtgggggtctggcggcccgtctcaaacttttcaatcgccgtgcgggggaagcccagggcggcggcaagagccggacggctcaggcccctggcggtccgcagctcctcaatgcgctgtgccaaagttaccataaaaatctgcctccttgctgaatgtctattgtatccggtccccgccgctctgtcaatgcggcgggacttttcttttggctgcggctgtgatatgatagcggttcagagaaggagttgatcccatggagcaggagcacaagcgccgcccccggtacaagggcacccacccccgcacctttcaggagaagtacaaagagcatgacccggagaactaccgctctgatgtagaaaagatcatcgagagcggcaagaccccggcagggatgcacatccccattctggtagacgagatcctggaggtccttcagatccagccgggccagaccggctacgacgccacgctgggctacggcggccacacccgccggatgctggcacagcttcaggggcaaggacacctatatgccacggacgtggaccccatcgagatggaaaagacccgcgcccggctggcatctgcgggcttcgggccggagctcctcaccatccagcatcggaatttcgccgacgtggaccaggtggcccccggcgtgctcttcgacttcgtgctggcggatttaggcgtctcctccatgcagatcgatgacccgacccggggctttaccttcaagcaggacggtcccctggacctgcggctggacccctcctccggcgtcaccgcggcggagcggctgcggcagctggaccaggaggagctggagaacctgctggtggaaaattccgacgagccctacgcggaccgcatcgcaaaggccgtcattcaggtgttccgccggggcggcactgtggataccacccgccagctgtacgccctcattgagggggcgctgtctttcctccccgccggggagcggaaggaggcggtgaagaagtcctgtcagcggaccttccaggcgctgcggatcgacgtgaacagtgagttcgaggtgctgtacgcctttctggaaaagctcccccatgtgctgaagcccggcgggcgggcggccatcctcaccttccactccggcgaggaccggctggtgaagcaggccttccgccagcagtaccgggatgggctgtacagcgacatcgcccaggaggtcacccgcccctctccccaggagtgccgccggaacccccgggcccactccaccaagctgcgctgggctgtccgggcggagtgaatgctgattttatggaaaaggagttgacatccatgctgcgggatgagacgatccgtcgggtgatccagttccgggacgaccgggagtggcggcagttccacacccccaaggacctggccatctccctgtccctggaggcggcggagctgctggagatattccagtggagcggcgcggacctggaatgccgggacaagctgggccgcatccgggaggagctggcggatgtgctgagctactgcgtcctgatggccgatgtgtgcggcctggatctggatgagatcctgaacgccaaggtggatcagaacgccgccaagtacccggtggaaaaggcccggggcagcgccgccaaatacacagagctgacctgactgttctccggatcccgaccgctccgcgccctgccgcacggggcggtttttccgcatcgacagcttttctccggaacgcacaaatttcctcgccgaattttggaagacactatggtaaatgcaacttttcatcccatatctagtgtggtatgataacaatgcttactagatatattacaattgagattgattctacaagagaggcggagagtcccatgaaagtcatgaagcggaacggcacggaggtcatcttcgacatcacgaagatcatcgccgccatcaccaaggccaacaacactatcgaggaggacgcccggatgaccccggtccagatccagcggatcgcggagtccgtggaactcagctgtcagaagatgaaccgctccccctctgtggaggagattcaggacctggtggagtcccagatcatggctcacggggcctatgaggtggccaagaactacatcacctaccgctatgtccgctctctggtccgcaagagcaataccaccgacgagaagatcctcagcctcatcgagtgctgcaacgaggaggccaagcaggagaactccaacaagaacccggtggtgaactccacccagcgggactacatggccggcgaggtctcccgggacctgagcgagcggctgctgctgcccgccgacatcgtggaggcccatcgggagggcatcatccacttccatgactcggactactacgcccagcacatgcacaactgtgacctggtgaatctggaggatatgcttcagaacggcaccgtcatcacggacaccctgatcgagcggccccacagcttctccaccgcctgcaacattgccactcagatcatcgctcaggtggcttccaaccagtacggcgggcagtctatctccctggcccacctggcccccttcgtggatgtgagccggaagaagatccgccggctggtggagcaggagatggaggccctgggcatccggcccacccgggagaagatcgaggagctggtggagacccgtctgcgggatgaggtccgccgcggcgtccagaccatccagtaccaagtgctgaccctgctgaccaccaatggccaggcccccttcgtgacggtgttcatgtacctgggtgaggccaagaatgagcaggagaaaaaggatctggccctcatcattgaggaaaccctggagcagcgctaccagggcgtgaagaacgaaaagggcgtgtggatcactcccgccttccccaagctgatctatgtgctggaggaggataacgtccacgaggattccccctattattacctgaccaagctggcggccaagtgcaccgcccgccagatggtgcccgactacatctctgccaagaaaatgctggagctgaagggcgatgtgtatacctgcatgggctgccgctccttcctgacgccggaccgcttcacagatgccggcatcggcaacatcgcaaacgccggcaattatgagcctggcaagcacaagtactacggccgcttcaatcagggcgtggtgaccatcaatctgcccgatgtggccctgtcctccggcggcgacctggacaagttctggaagatctttgacgaacgcctggagctgtgccaccgtgccctgatgtgccggcacaatcggctgaagggcactctctccgacgtggccccgattctgtggcagtacggcgcctgcgcccggctgaagaagggcgagaccatcgacaagctgctctaccacggctactccaccatctccctgggctacgccggcctctacgagtgcgtgaagtacatgaccggcaagagccatacggacccctccgccacccccttcgccctgcaggtgatgcagtacatgaacgacgcctgcaggaagtggaaggaggagagcgatatcgatttctccctctacggtacgcctctggagtccaccacctataaatttgccaagagcctgcagcgccgcttcggcatcatcgagggcgtcactgacaagagctacatcaccaacagctaccacgtccatgtgacagaagatatcaacgctttcgacaagctgaagtttgaggcccagttccaggccctgtctcccggcggcgccatcagctacgtggaggtgccggacatgcagaacaacctggaggcggtgctccaggtgatgaagttcatctatgaaaacatcatctacgccgaactgaacaccaagtccgactattgccaggtgtgcggctgggacggcgagatccagatcgcggaggagaacggcaagctgatctggaagtgcccccagtgcggcaacacagaccaggacaagatgaatgtggcccgccggacctgcggctacatcggaacccagttctggaaccagggccggactcaggagatccgggaccgggtgctgcacctgtaaaatatttcgttcaaaaggcaaagccttttgaacgaagagattgcagtttgtgcgcgcactcgcttcgctcgcacacttacaaactgagcggtgtttttcccgaggcgcatgtccccgggaaaaacgatcaaactcaaatgggcgcctgcgggcgcccattttgaggaatagcaggagggctgtcatgtactacggtgagatcaaaaactgcgacattgccaatggcgagggagtgcgggtcaccctgttcgtctccggctgcaccaatcactgcaagaactgctttcagccccaaacctgggacttctgctacggccagccctttaccaccgagacggaggattatttgctctccctgctctcccctgtctacatcaacggcctgacactgctggggggcgagccctttgaaccggagaaccagcgggccctggtgccctttctccggcgggtccggcagatgtatccggacaagaccatctggggcttctccggcttcacctatgaggagcttacctcggacggcactcatccccgctgcgaggtgacagacgagatgctctccctgttggatgtgctggtggacggccgcttcgtagaggagctgaaggacctgaccctccggttccggggcagctccaaccagcggctcatcgacctgaacgccagccgtcaggccggttgcctctgtttcctgccggaccgcccccggggcggccgctgaacagcagcctccaacccgttttttcagaggcgccccgcccttcggtgtggggcgcctccttctctttcggtgcctgccgaattttaaaggaagacccgtagaaattttggcagattgcttcttgacatttgctagtttgctaactaaaatataatcctgttcagttggaggaggtgtttccatgcagcatgagcggtacgtcgggtatgagatcaaggcactgtccaatctcctgcgcagacggctttgggggcctgccgaccatccccagagcatgctgacggagatcgagggcgttttgatcggttatctctgccacagccagggccgggaaatctatcaaaaggatctggagcgcgccctctgcatccgcagctccaccgcctcccggctgctgaagcggctggaggacgagggcctcgtccagcgctctatgggggtcagggacgcccggatgaagcggatcacgcccacactccgggcgcaggcgctgaatcaggaggcagagcggcggatcgccgccacagaggcgacgctgaccagaggcatctctcaggaggagattgaccagttcctggccatcgcggaaaagctgaagcaaaatctcatttgaccaaccgggccccgccgggaagcggctcaatcgcttccccccggcacagcaaagacacaaggaggtattctatgaagaaaaaaaggagcctggccagctgtattcaggagttctggccagccaccatcctgacgcccatcttcgtcatcggcgaagtggcgtttgacgtgttgatccccctgatgaccggcaagctgctggacgagggggtcaaggccggcagcatgcaccatattgccgcctacggcctcaccgtggtgggaatggctgttctggcgctgatctgcggcggactgtccggccgtttcggcgccaaggcctctacgggcttcgcgcggaatctgcggcgggagatgtatcggaatgtccagaagttctcctttgccaacattgacaagttctccaccagcggcatcatcacccgcctgaccacagacgtgaccaacgtccagatggcttttatgatggtcatccgtatcgcggtccggtcccccatcatgttgatctgcgcctgggtactcaccctgcgcatcaaccccaagctggcactgatcttcctggtggtcatcccgatcctgggcatcggcctggcgctcatcatgaccagggcccaccccatttttgaacgggtcttcaagcgctatgaccacctgaacaacgtggtgcaggagaacctgctgggcatccgggtggtgaagtcctttgttcgggaggaccatgaagtagagaagttcggcaaggtctcccaggagatctacatggacttctccaaggcggagcgcatcctggccttcaatatgcctctgatgcagatctgtgtgtatgcctgcatgatctccgtgtcctggatcggcgccaacctgatcgtgggcggcagcatgaccaccggccagctgaccagtatgttcagctacatcatgatgatgctgatgagcctgatgatgctctccatggtactgactatgatcatcatggcccgggcctccgcagagcggatcacagagatcctgaacgaggagagcgatctgaagaacggctcccagcccatcgaagaggtcaaggacggctccgtggtgtttgagaacgtcagcttctcctacgccaaggaccccagcaaggagtgcctgaagaacgtgaacctcacggtgaagtccggtgagaccgtaggtatcctgggcggcaccggcacctccaagaccaccctggtccagctgatcccccgtctgtacgacgccactgagggccgcgtcctggtgggcggcgcggacgtccgggactacgatatggacgccctgcgggaccaggtggccatggtgctgcagaagaacgtgctgttctccggcaccatcaaggataatctccgctggggcaaaaaggacgccactgacgaggagatggtccggatgtgccagctggcccaggcggactcctttatccaggagttccccgacaagtacgacacctatatcgagcagggcggctccaacgtctccggcgggcagaagcagcggctttgcatcgcccgggccctgctgaagcaccccaagatcctgatcctggacgactccacctccgccgtggacaccaagaccgacgccctgatccgcaaagcgtttctggaggagatcccggataccaccaagttcatcatcgcccagcgggtctcctccatcgaggacgccgacaagatcctggtgatggacggcggacagatcgtggccatgggtacccacgacgaattgctgaaaacctgtgatatctaccgcgagacctatgagtcccaaatgaaaggaggcagtgacaatgagcagtaagcagatccgcagcggcgccaaggcgcccggccatcgccggcacattgtcggccgcctgatgggctatatcaaacgggggtacaaggcccgcttcatcattgttctggtgtgcattctggtcagtgccatcgccaacgtggcgggctctctgtttctgggcagtctgatcgacgactatatcacccccctgctgggtgcggcggatccagacttttccggcctggtgcgggccctggtgatgatgggttgcctgttcctggtgggtgccctgtgcgcttacgcctataaccggaacatgatcgtggtgtcccagggcgtacagaaaaccattcgggacgacctgttcggccacatgcagaccctgcctatcaagtattttgacacccacgcccacggcgacgtgatgagcgtctacaccaacgatgtggacaccctgcggcagatgttcgcccagagcatcccccaggtcatcaactcctctatgaccatcctggtcaccttcctgggtatgctgttcaccaacgccctgctcacggttgtggtcctggtgtgcgtctgcttcgccctggtggtgacacggttcctggccggccgcagcggccgctatttcctccgccagcagagcaccctgggcgccctcaacggttatatcgaggagatgatcaacggtcagaaagtggtcaaggtcttctgccatgagcaggaggcccaggacggctttgaccgggtcaacgacgaaatgttccacagcgcggacaaagcccacacctacgccagcatcctgatgcctatcatggtgaacatcggcaatgtccagtacgtgatcgtggctatggtgggcggcgctctggccctcagcggggtggacaccaccatcaccctgggcgttattgccagcttcctgcagctgtccaagagcttttccaaccccatcaaccagatctcccagcagttcaactccatcatcatggccctggccggcgcggagcggatcttcgccctgatggacgaggagccggaggaggaccacggcactgtgacgctggtaaacgtgtcctatgacaaagagggccaccaactggaggagtccgagaagcgcaccaacctctgggcctggagggtcccccacagcactgacatggtgatggtccctgtgcgggaagaggcggacggctccttcacggagctgaaggcccccgaggctggaaaagacgaggcctgggcctggaaataccaggagcacggcaaggccttctaccgccccatcctgggcccggtccggaatgtcgagagcgaggactactacctcatcaagctctccggcgacgtgcggttcgaccatgtggacttcgcctatgaggagggcaagaccatcctccacgacatcagcctctttgccaagcctggccagaagctggccttcgtgggtgccaccggcgccggcaagaccaccatcaccaacctgatcaaccggttctacgacattgccgacggcaagatccgttacgacggcatctccatcaacaacatccgcaagccggacctgcggcgcagcctgggcatcgtgctgcaggacaccaacctcttcaccggcaccgtccgggagaacatccgctacggcaatctggatgccacggatgaagaggtggaggcggccgccgccctggccaatgccgacgacttcatccgccgcctgccccaggggtacgacaccatgctcaccggcaacggcgccaatctgtcccaaggccagcggcagctgctggccattgcccgggcagccgtggcagacccgccggtgatgatcctggatgaggccaccagctctatcgacacccggacggaggccatcgttcagcagggcatggactccctgatgtatggccggacggtgttcgtcatcgcccaccggctctccaccgtccgcaactccaacgccatcatggtgctggaccacggccggatcgtggagcggggcgaccacgacgatctgatccgccagcacggactgtactatcagctgtacactggtgccttcgagctggaataagcgaacatcaaagccaccggagcatttgctccggtggctttttttctgttcagcgccccgctcacgattccagcatctcccccaccagcgcctggaaggcccggcccagctccttggaatccgctccttccaatgcctccgcccgggccatgatccgccgcagggtgtccaggtcctgctgcaggaacagctcgcagagataccgcttcatcctgccgttgttgtaccgctccagcgccaccgtcagcaggtccgccttttcctcatactccgccagccaggcgggcaggccctccgccgccacggcccggcaggtccgctccttcacgcggcccgtatccaggtcccggaaatcccccatcttccccagcttcgggcaggggaagtccccgcactgtccgcagtggtccagtcccttttcccggacgcagcggtggaccttgcagggcacggtgtagtatccgtcgcaggagcagccgggacaccggctgcttccctctgtccggcagcgggtacagagggcgcagcgcatcccgcagtatccgtaggcatagtggctcataggtcctccttcccttccggaccgggaatctccgtcccgtccatctcccggtcgatcagcgccaaggcgatccggaacgcccggatgcgccgtaccgtcagcgtgtggggcgacgtgcccggtcgcagcttctccagcgccttctcacacttgcgcagggtggagtcgatggatcgccgggcctccgccagctcttcccgtgtgtatctcatcgcttgctctccgcaaagtcccatgcctcccgcagccagcccatcagctcttcgtcgatctggtccgcctctgtcaccaagacatggtgggtccagcggccgggatacggctccgaggccgccaccacccggggcgagtccagccggtacggcagtccaacggtcaccatcaggcacatcttcggccagtccttccgccgccgcaccggcagagatgccgcagcgaacagatgccggccgtaaaagctgatctggcttttctgcaccttgacggttccctccggaaacgccccgtccatccgccggaacagcgcttcatacagcgccagctccgccggatggccgtcgaagaacatccccgcatccgctgtgcagtgctctggtacgcgcatagtgcctctcctcttccggcctcttaatctccatcagcgccagttacaggccgttgaccacccgttccggacgcttgccgtccatcagcttttccagatccgcaaacaccatccgcgcggcctcccggaacgccgcatggctgatcccgccctggtgggggcagaggatcagccggtccgggcactccgccgccagccgcaccagcgggtgctccgccgtcacaggctccgggtcataggcgtccagcgccgcccccgccagacggccggagcggatagcctcgcacagggccgcatcgtcgatcaccgcgccccgagcggtgttcaccagatagctccccggccgcatccggccgaagaacgcccggtccagcaggtgggtgctctccggcgtggcgggcagatggaggctgatgatgtcacaggtctccgccagctcgtacaggggcagataccgggcgccgtacgcctcctccacagccggatcctgccggtgccgggcgtagtaaaacacctcgctgccgttggcccgcagccgctgcgccgtagcctggccgatggcgccgaagcccaccagccccacccggcaggtggacagatcttccggcacatgggctgccagctcgttcaccgcctcatgctgctgcccggcccgcaccatccggtctccccacagcgtccggtgcagcagcatgctcatcagcgtcaccgccagctccgccacggggcctgcgttgcacccggcgcagttgcacacatagatgcccccctcccgggccgccgccaggtcaatccggtcgtagcccaccccgtcgctgtggatcagcttgagatgcggcatccgggcgatcagttcctctgtcaccggcgtcaccggtgcggccaccaaagcctccgcatcgccgccggctgccagccagcgctcctccggcccctcccggtccgtgaacaccagctccatccgccccgcagcgggaatatcgggcagataccggtcatatcggctgctgggatgtaagatcaaaaccttcaacgctctttcgcctccaaatcatttgcccggcccactgcctccacatctgcggcggtgatccgcgtcaggtcctcccggttgacggacgcctgtcccgccagacggcccgcctgccggaccaggatctgctcaaacaggtttcgcacgccccgggcgttgccgaaggaggccgcatccgccatccgcctttccagcagggagcgcagcggcgcctccgcctccggctccagaatgtagcaccctttttcacactgcatccggaagatggccagcagttcctccgccgtgtaatctgcaaagtggaggaagcggttgaacctggactccagtcccggattggagtggatgaactcgtccatcagcccgtcgtagcccgcgacgatcaccaccaggtcgtcccggtggtcctccatggccttcagcagcgtgtcgatggcctcctggccgaagtcgttggccccgccgccgttgagggcgtatgcctcgtcgatgaacagcacaccccccagagcggagtcgatgaccttccgggtcttgatggctgtctgtcccacgtagcccgccaccagcccgctgcggtctacctccaccagctgccccttggacaagatgcccaggctgtggtaaacccgtgccatcagccgggcgatggtggtctttcccgtgccgggattgccggaaaacaccatgtggagactcatgtccgctgtgggcaggccgtgctgccggcgcagacgctccaccgccgccagattgatgaggtctttcacctcccgcttcaccgcactgaggcccacatagctgtccagctccttctgcagatcctcgatgttctctttggggggagctttggcggtgtcttcctgtttctgttctgccgcctctggcgcctttttctccccgccgtctgccggcgggatccttttttctttctccggcagcggagccacaggcacatgcttctccggtgtcggagtgccccagaagtccgcgcccatgcggctgaggttgtgctccgtcatagagcggatcacctccagctgccgcaggatgatctcgtcctttttgctctgatcccgcttgtccatccgctcacaccccccacagtcttgtatgtgccagcgcccggaacaggcaggcggcgatcagccccgtcaatgccccggtaaagagggacacccccagcagcaccggcaggtagtacagcggcgccgtgttgcccagcgtcagcacagctgcggccacctggccgcagttgtgggccgctgctccgcccacagacactccgtagacggagaggcgcttcagccgggagagggcgatcatcacccccatggccgtcacgccccccagcagggaaaaaatcagcgcgttcatgtttcctgcaaagaccgcccccagcaggcaccgggccagcaggatcagcagcgcctgccccggtcccagggcgtacagggcgaacagcgtcacgatgttggccagtcccagcttgatccccggaatggggatggccagggacaaggggaagaagttctccagatagctgagcgccagcgccatggccgtcagcaccgcgcacagcgtcaactgtctcgtcgtcagtttcatggcgcctccttatccgatcaccagatccacgccgtcatccgccgccgcgccgccctccagctgcacgacgatccgggcgggcaggcacacgatgctctgtcccccgcgggtgatctcccccatgtggacgcagtcctgggtggggcagtcggacaccgtcacctgggcagactctggcccaaaggccacccggagggtgtagccgttggacgtataggtccgctcctccggtcccgacaggtccgccagcaccacccgatccaccggctcgccgttcgcagacactaccgccgtcagcgggcctatttcctctcccccagtccagaacagagccgcgcaggccaccgccagcgccagcacagcggccgccgccaacgcatcccagccgtttggccgcagcttaggagacgatttcatacgcataccccgccgaatcgtccggacggaaccggtccgcgatgcccgcagtcgccagcagccggccgtcctctgtcaccaagatcaggtcaaagtcatagacgccgctgcgccagagctccagcgcccggtcctcccccatgacgaacagggccgtggagagggcgtcgcacatcgtgccgttgcccgcggccccatccgccaccacggtgacggaggtaagtccgctctccgccgggcggccggtggcaggatcaatgatatggtgatagagctgtccattttcctcaaaataccgctgatagccgccggaggtgacggcaaaggcgtccgacgcctccaggatccccgccaaagcccccgcggaccgggccgggtcctgaatgccgatctgccagggctccccctccaagttcccgccgcagacccaggtgttcccacccaggtccacgatgccgtgggtgatgccgtgctcctggtaaatcgcagccatccagtcgctggcataccccttggcaatggctcccaggtcaatccgggtgccctggtccagcgagacagcagtcccctcctccaggtggacatgctccgcccccacgcagggcagcagcaacgccagttcagcgtcctccggcacccggtaggtgtcctccgtaaagccccaggcagaggacaccggcgccagggtgatgtcaaaggccccgtctgtggcagcgctgaaatccagggcccgggcaatcaggtcgcggagttcctcccccacatccaccggcgtcccccccgccgcgctgttcaaccgggacactgcgctgtcctcccgggtgcgggagagcgcctcatccaggcggtagatctcgtcttccgccgccgcaagcgccgcctccgtctccccgccgcaggcccgcaggcccatcaccgtgtccatggcgaagacctgtatgctctgcatctcctgcgccgcagtgccgccgcaggcggtcaggctccccgccagcagcagtgacgccagcagtgcgcccaaacgtttcataagcaaattcctcttgtcatcagtatttttcgcaaaaaatctcataatagaggagtataccacgcccccgggcaaatctcaaccggcaatcctgactcctgttggaaaaaagggaaaagtctggctccttccccttgcaaaggcacgaaatatctgctatactatcatagtatgccagcggaagcgcatgttttcccgcggctattttcggaacaaacaccctggaggttgtcctatatgtccaaaaatcctgtcagtaaatccaagccggtaaagcggaacgagcccatgcacaacgcgctcaagttttttctggccggctgcgtggcggagatctatctgttggtcatccgccgcttctatgtgaacggcaccgccaatgagcttctcgcatgcgacgccgcactgccctatctgatggccgcgggtgcggcagtggctgtgatcggtctggtcctgggcatcgtctggcgccagcaaaccaagcgccgctggatcggctggtcggtgtttgccgccggcgttttcctgggcggttccgcctggatgatccgcaccttctacgactccgctctcaccttcctgtgcgtggtggttccggtggtcatgctgctgggcattctgtggaatctgtacgatcgggagtgctcctggtccctgaccatcctgggtgcctccctgatcgccctgtgggtctgccggcgggtgctggacagcatcttcctgggtacctatgtccggatcgctgcggtagtctatatcgtggtactgatcgtagcggctttcctcaccaacaaggcggacaagaatggcggcaagctgggcaatcttcaggtgttgactgccggcgcggatcccatgcccatctatgcggcctgcggcctgtccgtcgtggcgctggccatcgctctgttcagcagcaccatcgcctattacgccatgtgggccctggccatagtggtctttgccctggcggtgtattacacggtcaagcagctctgatagatccgcagccccccttcgggcattccgaagggggggctgttttgttctctcgcgtcccgacaaagggaacccctttccgccgccttgcagcgcagtatgtcccgcaaggcaaaagccgcttttcgtgggaagaaaccgctctgccgccctaaacggctcaatacgcacggcggaagaggcgtatggtatttcttataagagccagccgccaaggcagacggttgttcttccggcgggagggtccggactttgcggcatgaaaactgcgcatcggtgagcggaaaattcgttatcagcgatccgaatcccaaagcagcaggccactcttccaccaaccgccgctgggcactgccggaattataaaaagcttcttctctggcttgacgtcccttccaggtcaagctggaacagtccgccgccccggcacatgtctgtgagcagattccagccattggggactggacaggatgctgaagagtgcggccccatgatctgcgctgcaataaacaaaagaggattccccgtacgaggaatccttccgataatcaaagcaaaatccgtctgtggtcaagccataaccgccggttaagccggaggcttgcgtaggccctataagagcctattaccggcaagcgtctcaagatacatggaaatttattccgcttgcatcacttgccatacagcccgtaaacgggcaatcaccgttctaatagcagatttctattagtggaaggttcatgttagcggctcacttcactcgatgtttgatattaaagctctttttacgggccgccccaccggcagagctgatggggcgatccaatgagaaatcgccgcagtaaaaactgcagcgatttctagttttgtattgtgtggacaaaaaagatgcagttgcaaagcatttaccccaaaattccatatcttcattattgaccaaatcttataaatttattcaaagcattaggaacagtacacagttcatcacctccactttcaaaggcgcaaggatgtaactcaattctgaacttgaacttctgttctacaatggttaggggcacaatatgccttccatcgtttctggcagttactttatgagcatgcaatggtacagtcattttctatctctgtaacccccataacaatgcagtcgccaaatcatttttcgcatcgttcaaaacggaataactttatcgaagggatatgcctctgaaacaggattcaagagagattgactcttccatcaaatcctatatacagggcaacctcatcgcatattgaaaaaccggataccatatcaaatggcgaaagtgtattaaaggtgagccatgtattcatgctacataggggttcggattccgaaaatttcagttttgaaagctgatttcaaactttttgtgcctttatatttcatttggtgccgtcaagatttatgcgcaaaattgttt

SEQ ID NO: 4926 - DNA, 6928 bp, Unknown
  gut microbiota DNA sequence
cggagctggtgggagacgacctctctgccgactatatcatccccgccgccttcgatccacgggtgcgggacgcggtggcctccgctgtggagcaggccgcccgcgcctccggcgtggccagagtctgagtcctccgctgctgttcacgtatgcagaaggccccggctgtccttttggacagccggggcctttttcgtcaggttcaaatgtccacgctggggaccgctttcacctctccgtcgtgggggccctcccggaaccagcggacgatctcatccagcgcctcctcccggacaaagtcgccgccgtgctgaaagatctccgccatccggcgctcctggtccgtggcggcctctccccgggcctgcacctgacggacaacggagccggccatgggcttcatcatcatgcgatagaaaaagcccagcttctccggcgcgtagccgccctggagatagaacagccgcccgccgctgtcgctgtatcccccgttgatccgggcctcggtccagaggtcgccgttcccctgaggcgagacccccacaatggctgccccccggatggtatagcggtccatggcgctctggaggcccttcaccgtgccggccatcagccagcccatgtagaagatctcctcgccccgccgcaagctctttccggcctccttcaggctgtatgccggcacgccggtcctttccgccagcatctgggcataccgctgggtgtgcccggtctgggatgtgtaaacgatggctttcatcgcttcccctccttgtggaacggcggtgggccgccggattcatggctttattatatacgcattccgccccggaggcaaggacctgttccgccgccggggattttcaggtctatcccggccgcggctctcataaggtgtaccatcacgaccgagaggtggacaacatgacgactcagacccgcaacgaggtgctgctggaggggattgctctggaggcgcctgcactctcccatgaaaaccacggcacccggttttatcgctttcccctgcaggtgccccggctctccggcactccggacacgctgccggtgctggtgccggaggccctgctgactgcggtgcggctggaggacccgctccgggtccgggggcagctgcggtccttcaacaaccgctccggcgttgggaatcggctggtgctgacggtgtatgcccaagccatggaacccgggtccggagagccctgcaaccgcattctgctctccggcgccctgtgcaagccccccatcttccgccgcacccctctgggccgcagcatctgcgacctgatgctggcggtgagccgccggtacggccgggcggactatctgccggtgattgcctggggacagctggcggtccaggcggcccggctccaggtgggggacacgctcagcctggaaggccgggtccagagccggacctaccgcaaggtcctggaggacggcaccgcccaggaacgggtggcctacgaggtctccgccatgcatctgctggagccggaggcggcagagtaagccacccgccgggccgccgcagcgacgatcatggccccgcaggccgcgcccagcagcacccagccctcgcccccggccagctgctccaacagaaccccgtagagagcctgccccgccggctgggcgcatagggagacggtcagcagcagagacaccaccttccccaccagcgtggccggcgtctgagcctgaatgtgggccagcatggtcacggtgaacagcgcggcgcaagccatcagaacgaagcccgcagccgtcagcacagcaaaggccgcgacagcccccacgcctgccagcaggcagagccccatggggatgaggcagaccccgcaggccagcagcgtcagccaggaccggcggactgtcagccggggacccagcagtcccgctgtcaggcccccggccaggctccctgccgccatggcggtctggttgaggccgtaccaggtgtcccccagcaccagggtctgtttgatgagcaccggcatactcaccaccagcagcgcgctcagcagcaggttgaaggcgctgaccagggcgatgtacttcaggatctccggccgttcctgccggaggaaggtcccgctctccgccagatccgctctggcggtctgccagacgctggctccagtgtgtcttggcgtatgggggatatggatgaacagttccatcaccgccgaagcaaagaagcaggcggaggcccccgccaggaccggtgtcacgccgaaggcaccgtaaaccaggctccccagcagcggtcccagcaggctggacagggcgctgacctggttgatgacggcgttaccgtccaccagccggtccggcgggcacagcaggggcatgctggcctgcaccgccggctggtatgccccggagataccatacagcaacatcatggccgccaccagcaccggcaccaggggcagatgtcccaaggccagcgccgtcagggccaccagggcgcaggtgaagaagtccaacaccaccatgatccgctgcttatggagacggtccgccaccacgccgcccaggggcgtcagcaccaccatgggcacgaacgccgcggcggagcacaggccgaacaggctccgggaaccggtgacgtccagcagatacagcggcaggacgaatcgcagcacggcgttacccagcagggagatgatctgtccaatcaccaccagggtgaagtcccggtgaaacagcttttcccgcatctcaattcctcctcccgttctctcctgccagcagggccagacccagcagccacagacaggcggccaggtcctggggcaggagccgatcagtttgtctcatacgctcctccttttcatacatttggttggtatgtatttatgtgaaaaagaagctgccctgtcgggcagtttcttctgttgtttacagccgttcctgggacaggcggcaaaatcgctcccactgattcaacagctcctgatccagcaggtccaggcccatactccgcagcatctggtcgtatagctccatgcggcggcgggtcttctccggcgtggcagggtagatcatgggattcagccacacgtttgacaggagaagcagcagctcccccagttcctccgggtagtccgtccggatggagccgtccgccaccgcctcccgcaggacgggctccatgtagttgggcaggacctccccgatcatgctctccagcaggatgctcatcagcttggggttcttcagcatattgggtgccagcacgaacaggtccgtctggtccgagttctccagggatgcccggaacatcttctgcagcttctccgctccggtcaggccgggatcgtcccggaccgtccgcatccaggcctccgtctgctctcccatccggtccgcgatggcaaggaggatctcctccttgcccttgaagtggtggtagatggcccccttggtcagtcctcccagattgtcaatgatgtcctgaagggtggtgtgctcatatcccttttccataaacagcttcgcggagaccgccaggatcttttccaccgtctcctccgggtgcttgtttcgggccataccggccccccttccaatacatactattagtatgtttcgtttataccatgtttattattccttgtcaaggccgttttctcaaaagcgctgaagctccggtccggacggtgcttcatttggtgcagaagccgaaagtcccccgcatgtcgaacaaaaacgccagaaagcttttgggatagtcgatgaactccccccggtccaccatgtccaggatttccggcagctccgcccaacgggcccgggccacctcctccttttggagcgtcagctcctccaggccaaggtcccgctccaccaggaagaagtcatcaaagccgccgtcgaagttcacggtgcaggagggccgcactcccgtcaggtccagggccacgcccagctcctcccggaactcccgctccgccgcctggcggctggtctctccggcatccacgccgccggcggcagacacatcccatgcctccggccagacggccttttcccgagaccgctgctggatcagcaggcggccccggctgtcgaacacgcagatatggaccaccacccggtattctccctcccccttgggggcgtaacgctccgccgtccggcccagagggagccggttctcgtcgtacaaatccaccatttccattgcaaagtgcctccctgccgcccgttgcggtcttgttttccactctttatcttgaccgccccgctccccgctgtcaagaggattcttccgtgtttcccggaagatgtggcaaatccctctttacagcggccggaaaacccggtatgatggcgccatgacttcatattcaggaggatgtccccatgggcttttccattgagaccagcgtatccgccgtcactgtctttctgcagggcgcgctgagcttcttctccccctgcgtgctgccgctggtgccgctgtacgtcagctatctggccggcggcgccgctgtggtgggcgaggacggcgtccgccgctatccccggggaaagatcttcctcaacaccctctttttcgtggtgggcatcagcttcgccttcttcctgctggggctgggcctcaccgccctgggggagttcttccacaactaccaagtgtggttcgcccgggccagcggcgtcatcatcctgctgttcggcctgtaccagctggggctgggcaagcggaccatgctgctggagcaggaacaccgcctccccttccagctgaacaaactggctatgaacccggcggtggccctggtgatgggcttcaccttcagcttcgcctggacgccctgcgtgggccccaccctcagcagcgtcctgctgatggcctcctccgcggagtcctccgctgcgggatttcttctgatcggcgtgtacaccctgggcttcgtactgcccttcctggcagtgggactcttcaccggcacggtgctggatttcttcaagtcccaccagaatgtggtgcgctacacggtgaagatcggcgcggtgctgctgatcgtcatgggcatcctgaccctcaccggcgccaccggcggcatctccgcagatctggctgccggctccggcacggtgcaggaagagcccgccgggaacagcggcgaagaggcggccccctccggcgattctcaggaggagcacagcggggcggacagccaggagatccccgtggtccccgctccggacttcaccctgacggaccagtacggccagtcccacaccctctcggactaccaggggaagacggtgtttctgaacttctgggctacttggtgcggcccctgcaagatggagatgccggacatccaggccctgtatgaggactgggacgagaacgccggggagctggtggtgctgggcgtggccgggcccaatatcggccaggagggcagcgccgaagacatcaccgccttcctggaggaaaacggctacacctatcccgtggtgatggacgagacgggcacgctcttctaccagtacggcatcagcgcctatcccaccacattcatgatcgacacggagggcaacgtcttcggctacgtccagggcgccgtcagccgggaggtcatggacgacatcgtggagcagaccaggaccgggcagcgcagatgatccatccaggccgccggggccgcacattcgcggttccggcggctttttcccgtgctgcggagagcgcttgcaaaaaagttgtaaacctgcggcaatttgtgttagaatcaaattcgtaccgcggcccgctccggcggcgcggcaccccgatagatagaaagagaagggggacgcctatggcgcataacgattcttttgatgaaccgcgatttgaagccctctaccggaagctgtatccggacctgctccgctgtgcggagatcgccctgcggactggcggaagctggtacgtctccgtcgccgggcgtgcggaagaggtggtgcaggagctgttcgccttcgcttgggagcatcaggcagatctttggagcagcgcctcgcccacgggatggctgtaccgggtcctgcgctataaggtcctggagctcctgaaagaggaccgcttctggcggaagcacctgatccgggccgccggcgagatgcccgcttctccggaggatgatttccagcagcgggcggagatcaccagcatcctcacgccggaggagtacgagatcctgcggaagctctatctggagaagtacacctacgaggagctggcgcgggagatggggttgaagaagtccgccctggccatgcgggtcaagcgttcaaaggagcggttcgtcaaacagtggaaccggcactaaaagttttttcgccgcccctgtgaacaagcggggccgaaacggtcattatagatacagaggaggttcccggagatgccatcagatcgaaatacggcgtatcctttcctggaacaaatgcgcaccgaagagctggaggctctgctccagcaggaattcacggctgcggacggcggtgagccggacgtggactacatcatggcgattatggaggtgatgaagcagcgggatgcgaatcccccggcggcggaggccgacgtggacgccgcatggcgggatttcaaggaaaattatcaaggacaggcttctgcctatgagactgaggtcctcccggaacgtgactcatcccatcttgaccaaatcacctccccttcccccaaaaagaaaagccgccggattctgcgggcagccgccatcacggccgcgtgcattgtgattctgtgcggcgctgcctccgcctttgggttcgacatcctccaggcgttcgcggactggaccgcggagacctttggatttgtgacgccggggcaggaggaagcggaagcgccgcaggatgatccgtatca

SEQ ID NO: 4927 - DNA, 47532 bp, Unknown
  gut microbiota DNA sequence
tggaagtgcagatgaaacacgctctgtcccgcctgctcgccgatgttggagaccacccggtagctgtccagccccttttcctttgtcagcttggcaatgacctcgaagatatgagccaccactgtgctgttgtccgcggtgatctcagacacagagccaatgtgggccttgggtaccaccaggaagtgggtgggcgcctggggatcaatgtcattgaaggcgtagcacacgtcgtcctcgtagaccttgctgctggggatctccccggcaacgatcttgcagaataggcaatcggacattttcaaacctcctttgatgtgatcggtataaactgatgataaacgggatcgtagcgatagtcaacccccgccagcgtctcccgcagggactgctcgtccgcatccagggacgcgcacagatcctccaggtccgcatactggtcccggaggcgggcgttgaggaagctcagaagaatgtaggggtccttgggcagcagcatggcagccccctttctctgtaaagggaaaatacttgcgatattctgaaagtaaataattttaccgcacgggtgtgtagttgacggatgcttcctcctctgtggtctccagcttgaagatcacggggcggagcccatcgttgcaggagcagatggccacgccgggcctgcggatccagtcgccgtaatagaacagaccctctcccgccccgtgggccagggcgaacacatactgatagatagccttccaggcctcgtcacagaggccatccggcttggcgtagtcggcgtagaacacctggccttcccgcagcatggggcaggggcccagcccttcagcgccgtattccgccgccagctcttcatccagggtggttttcaagacggtgatcttgacttttttcatggatcgtcctcctggtaaagatcaaatgtgataggtggaaattcaaacaggggcttttccttcctctgcatcccccgcttgggcttctctaaccccagtgtgtcataatatgcgtcggagaaattcaggaccgacgggtcaaagcccgtctggagctccttcacccgctggaatgggtcccgggaccggatgtggaatgtctccgccaacaggtccagggatgcgtcccggctcttgaagtcctcctcgcagcccggccaggtgttggcatcgttgtcctccagaagcttccggaaccgggtcgcgtccagcatgaagatctgcgccagaggactggtacatttgcagtagaacagatgggaaaggaactcccggaagtccgcccccaccggcagcacaaaggtgccctcttctgccagctccggctccacgcagtacaccgcctcatcccccggcaggaggacgaagtgcgtcccgcaactgccccagccaatgatctcggcattttccggggtacagaaataccgtaccgggtcggcgtctgtctccggttccagctccagcatggagaagtccagaggcaggccgaaaaacgtcttgacgtcctctcgagttgacataaagttctcccactccactctgctcccgccaggcctttgcccggcgaggccccggggaaggtgtcatctacagcttacttcagcttttccgccacaaaatcatccacggtggccagtgcatcatccagcttcagcaggtcactgccgccgcccatggcgctatcaggcttgccgccgcccttgccgccgcagatggcgcagacactcttcaccaggtcgccggccttgatgccgcgcttcaccgcctcgggaccgcagactgccaggaaggtgatcttctccccattggcagaagccagcactgccacaacatccggggccttgtcccgcaggaaatcgcccatctgccgcagggcgttcgcatccatgccgttacggatagcggtcaggaccttcaggccgcccacgttcttggcggcggtcaggaattgccgggcctcgcccagggacgcctcggacttgaacttctccagctcatggcgcagctccttcatctccgctgcctgctgctccgccttggcggccagctcaccaggtgttgtcttcagcacttgagcggcgtggaacagcagctcctgattccggttcatggtgtccaggctcagtcggcccaccgtggcctcgatccggcggacgcccgaggcgacggagccctcggacttgatgcggaagggaccggccttggcggtgttgtccagatgggtgccgccgcagaactccatggagaagtcgcccatctccaccacgcggacgatatcgccgtacttctcaccgaacatggccacggcgcccttctttttggcctcctcgatgggcagcacctccgtcgctacggggtagccctccaggatggcgtcgttcaccagcttgtcgatctgagccagctgctccggggtgatagcctcaaagtgcgtaaagtcaaagcgcagccggtccggctccaccagggagcccgcctgatgcacatggtcgcccaggaccttcttcagggcagcgtccagcagatgcgtggcgctgtgagcccgcatgatggccttccggcgctccatgtcgatggatgcggtgacggtctcccccacgctgagggtgccggagaccaccttgccggagtgcatgaacttgccgcccttgttcttctgaacatccgtcacctggaaggtgccgttgggtccctgaatggtgccgtggtctcccacctggccgcccatctcggcatagaacggcgtctggtccagcaccaggatgccctccacgccctgagccagctcgtcccgcagttccccgtcggccaccagggccaggactctgccctgctcgctggagcgatcatagcctacgaactccgtggcgggcatgtccttgccgaactcgatgcctgcccagcccaggtcgcccagggcctcccgggccttgcgggcgcggaccttctgctcttccatcagagccttgaagccctcctggtccacggtcatgccggcctcctccgccatctccacggtcaggtcgatggggaagccgtaggtgtcgtacagcttgaaggcgtcagcgccggagaacacggtctccccctgggccttgtgggcggagagcatatcgtcatagatcttcatgccggcgtccagggtcttggcgaagttctcctcctccgtgcggatgaccttggtgatataggcttgccgctcccgcagctcgggatagtggccctcgttctcatggaccacggtgtcgcacacctcatataagaagggatggttcactcccagcagcttgccgtgccgggcggcccggcgcagcaggcggcgcagcacatagccccggccctcgttgctgggcagaacaccgtcacagatcatgaaggtggcggagcggatatggtcggtgatgacccgcagggagacgtcgatcttgtcgctctgctcgtacttggcgccggtgatctcgctgaccttgttggtgatgttcatgacggtgtccacgtcgaacagactggccacgttctggctgacgcaggccaaacgctccaggcccatgccagtgtcgatgttcttctgcttcagctcggtgtagtggccctctccgtcgttgtcgaactgggagaacaccacgttccagacctcgatataccggtcgcagtcgcagcccacggtgcagccgggctttccgcagccccactcagggccccggtcatagtagatctcggagcaggggccgcaggggccggagccgtgctcccagaagttgtcctccttgccgaacttgaagatccgatcctcggggatgccgatttcgtcccgccagatggcgaaggcctcatcgtcggcgggggtggtctcgttgccggcgaacacggagggatacagccggtccggctccagacccacccattcgggagaggtcaggaactcccaggcccagtggatcgcgtcccgcttgaagtagtctccgaaggagaagttgcccagcatctcgaagtaggtgccgtggcgggcggtcttgccgatgttctcgatgtcgccggtgcggatgcacttctggcaggtgcagacccggtggcgggggggctcctcctccccggtgaaccagggcttcatgggcgccatgccggagttgatcagcagcaggctggcgtcgttctggggaatcagggaaaagctgggcagccgcaggtgttcttttgtctcaaagaatttgagaaacatctcccgcagctcgttcagtccgtatgtgggatgtgccataaatgttcttcctcctaaaaatatctttttattctcaataatatatgataaataaaagcaataccgcctgttatttccagtcgccggcatggtgggatccgtcagctccgccgcggccagcagctgccgggccgccatgccgatcttccggggcagatccggcagttccctgtccagccgtacctgcagctccacctgtcccttgaccacgccccagatgttgttctccagatgccggggccagtaagccaaggagatgtctcccgggttcggatgtccgaacgccgcgacaatcaaccggtgcgcccgaaagaaagcccgataagaccgggcggttcccttccagaagggaaccgccgtcagctccggcggcagttcctcccagcagggagtgccctcccatcgatcccacagagccagcagtgccgtccccagctccggagccgtcagcggcggggacagggtctttaccgctgcaagaatgtgcgaaggcccgctccggctgcggatcaccggaaacaaaaggaatctcccctctgaatcggaaaaaatctggatgccacccaggcgggacgggtgcggagattgggctcgctgaaagaacaccagtatatcccctcttttctaaagcagaaaaaccgcccctgacgcacgtcaggggcggaagaacttccacggtaccaccctgatctgtcccatggggacatctcatgtcatccgctaacggggatgagccgtcccgctcgccgcaggccgctccaaagtggctgctccgcggcgtgggcaaggggctcgcaccgtctcccctctcgcttggccggtctcgcgaagctggctttgtcatagcttttcgctgttttcagacacaattattataaacgtttctgcccggttgtcaacgggaaaatcacaggttttttcccttgcctccggaaatccccgggaccttctttcctgtcagaatgcagacgccgtccgccacgcacttgccacagccgatgcagctggtaggtccgctcttccggctgtacgccgcccaacagtaaaacgcagtgcccgccagaatgatccccgtcgccagaatctcatgccacgccatgttgcagcccccctttttgtttttagtctaccacacaaagggggcacttgtctgtggcagctgcaacagccgcaggcccagcagcggcagcagctccgccgcaggagccggaagttccggcaggggaaattcctggggctccaccacgccgccgcccggccgaggcagctgccgctggacgcagaggaccggttccgccaggctggacagggtgagactgtccctggaggacaggccataggtgaccaccgtctccgccgtgatgcgctccagcggcgcggtacagtcccccggcaccagcagcacccggcacagggcggccgtatcccccagctccccgcacccccggcgggtcaggaccagcagtggccaatactgttccgccagcgcctccgcccgctccgcccccagaacgccgggcggcagcagctttctccacgccgggggacagcagaagataactccctccatcaaaacacctcccggctagtgtctgctggaggttggattccatgcaaaaaatttgctcgtcattttgcacctgccgtgctatactggaacgtaagatactggaaacggggtgatctccttgcatttctgggcccatctgcggaccataaaccgccaccgggcactggtgcggaagtactgcttccgcctggggctgtactggcagggcctgacccatgacctgtccaagtacgcccctgtggagttctttgccggggtgaaatacttccagggggatcacagcccaaacgacgcccagcggaaggaacatggatacagcgcctcctggctccaccacaagggccgcaaccgccaccactttgagtattggacggattacagccccaccggcgaggggatcgtaggtgtggagatgccgagaaaatatgtggcggagatgttctgcgaccgtctggccgccagcaaggtctaccggggaaaggatttcaatcccggtgacccttaccagttctatctccggggcaaggaccggcggctgctgatccacccggccactgcagcgcttttggagaccatgcttttaaagctccgggatgagggcgaggacgcggcctttgcatatatccggcaggagatcctgggaaagtcccaggatgccccaccgccggacccccggcgcttttgacaggtgcacagattgtccccctccactgatgccgagaagagccgtatgccggcgagcaaacattgaccatgtttgctcgccggcatgagactgggcagcgatttacttgatatgggcgccgatctccgtcagcagccgcagcaggggccgccacaggtccgggtggtgctccagcagaaaggtctggacctccggggccgtcaggccgtctccccacagcagcacatggctgccggaggcgaactcccccacggcggtgggcgccacggcggagaccgccacggcgatcttggcggcaatggccgccacgccgccggcatagacccccacggcgctgacccccagggccagataccccagggccgccacgccgaaagccgccaatccccccgccacgatgcccagggacagcattcccatggccagcacgccgaaggtgaacaggcccacccccacgatgccgatggccaccacgccgatggcgcagttgccgatggcgatgatgcccttggccgtgttatccatggacagtttcccgttccggacgaagccgaaccggatagacaccaggggcaggccgaagatccgggtcttgctgtcgtagcggtagaccctgcccttcacataattggtcagctcgtccacctttttttccagccggtctgcctgcttggaagagatttccccgcttccgccgcatggattgtccggctcctccatccagtccttcaccagatagtccacggacacgccgaacagctctgacaaggagatcaacttcacaagttccggcatggcagtgccgccctcccacttgctgacagactgccgggtgacccccaggcggtctgccagctgctcctggctcatgccggacttccgccgcagccccgtcaatttctcggaaaatgtcatcggagaacactcgctttctcatttggatgcccttatgataagccacccgccgcgcacctggcaagaacgcggcgggtggaactttgtcaactccaggttgcagcccttgaggcccaggggattccagatttttgccaggctccgggtgctatggcgggagttcctgctgcgacgggcgatgaggcagggtgttttaccagatccccagcaggtgctggaccagcaggctgacgccggcaatggccacccagcagcagaagcccatgaagatgggcttgccgccggtcttcaccagcttcacgatgtcggtgttcagaccgatggctgccatggccatgacgatgaaaaacttgctggcgtttttcaggaagctcaccgcagccgcagggatgggcagaaccgtggtgatgatggaagccagcaggaacagcagcacaaaccaggggaagattttcttgatgtccacctgggcgccgccctgctttccctcccggcgggtcctcagcagggccagcaccagcgtgatggggataatggccaaggtccgggtcatcttcacgatggcggcggtgtccagggtattggcgccgggatgcattccatcccaggcggcggccgccgcagtgacggaggaggtgtcgttcaccgcggtgccggcaaagaggccgaagccctcgttggagaggcccagcacacctcccagagtggggaagatcagagccgcgatgacgttgaacaggaagatcacagagatggcctgggcgatctcctcgtcatccgcgccgatgaccggggcagtggcggcgatggcgctgccgccgcagatagaggagcccacgccgatgagagtggagatgttgctgtccatgtgcagggccttatagagggcgaaggccacgatcaggctggtggcgatggtggagacgatgatgggcagtgactgtccccccacctgtaacacgctggagagattcatgccgaagcccagcagcaccaccgccagctgcaaaaccttcttggaggtgtaggtgatgccgcttttggcacttttctgatccttccagaacagggcgatcaccatgccgatgaggatggcgaacaccgggccgcccaccacctcgaaccgctggcccagcagccaggcaggcacggcgattaccagacagatcaggatacccagcgcgttttttttgacaaattccataattcgtttcctttctctcttgacaatcggagttgtatcatatcatgccgttcaggatttgtcaaaaaaatccggggcggcctctggccgccccgatgatgcaatgccaggctcagtggagggggatctccgtctctccccacagcagatagtccgcttgagacagatccacaggccgggcgaagaagccgctctgctccatccagccgctgtcgcccttgctgaagctgctggcaacctccacctgcgtcccatctttcaaaaccagcagcagttctgtgtcggggatagctatatctgagaattccactacctctccgctgtcagccgtcacaagcgccacggcgtctctgccgttttctgccgccgcggcctggacggcgttctcatcgtagtgatagctccactggagccccagaggagagaccttcagacgatccatggtcaaggtgccgcagggcgcctgtgccgtgacaccagcgacatccaccgccagcaggctatcttccgccagaccaccggagagcacgaagtcaaaatcgccggagaagatctccgtataggccttcccatccgtctgcttccacagccccggtatgtggaggacctttccctccaggtctccgtccgccagaatggagagtaccactgtcagcgtgttgtccgcaggatccgggtcctccagccaagtgaactccgtggaataagagatcgccgggtccccgccgtccggctcccgcagctcaagccactcgccgttcaaaatatcatcgccgaagagctggtaggtttcattttcaccgtccaagggtggcaggaccgtgccctctggggcctgaatctccagcatcaggtagaataccccatccatgccgaaggccgccataggtgtcatcatggctccacctgcggagaccgcacccggcaggccgccgctgagggtgtccaccaccgcctgctcccccgggtccagtctgccgaaaaagctgtcccatagcgacgcagtaacagccgccgccgtgcccaccaacagcactgctgccagtaccgccgccatcccccgtttcatccacaagctccggtgctggaccggcggtccggcctgctccgccatcagggcgtccgtcagggcggacctccccgcttccgtgaactgtacctggtccaactcactctgataagcattcctgtccataagcgcctcccagcatgttccgcaattttgccttgccccggtagagatacgtgctgacctgactggccgtgcagcccatcaacgtcccgatctccgccggctcgtatccctcgtaataccgcaggtacaccgcctggcggtatcgctccggcagggcctgcaccgccgccagcacaggactctcccctggctccggcagatggaccgccgcgtgggccgccgcctccaacggcaggcgccgccggacccaggcggatttcttccagtccttgcagcagttgacggccacccggaccacccaggcccgctccagccgctcctccgcaaagcggcggggactggtcagcagcttcaaaagcaccgtctgacagatgtcctgggcgtcgtggacgctgcccgtccaggtccaggcgatccgcagcacggtgtccgaccaccgctctaccagttcctccgcttccgggcgggtatatgtgatttgttccgtacaatcaactcctttgccggcgccgttctgctgataaaacgaatgatgaggctgccatctgacagggacatacaaaaaagcccgccgggaatatcccggcgggctgatcgaatgtccgcttactgctcttccagcacggccttgtgatagaccttcttgccctttttgatgaccgcgccctcgccgcagcagtccttgcagctgaacctggcctcaatatcggccaccttctggccgcagaccgtgacgccgccctgctgcaccagccgccgggcctcgcccttggaggcagccaggccgcactttaccagcagggtcagaatgtcgatctctccctcggcggtgaaatcctcccggcagagcttggtgcagggcatgttggcgctgtccccgccgccgccgaacagggcgcgggcggcctcctgggccttggcggcctcttcctcgccgtgaaccagcttggtcagctcgaaggccaggatctccttagcggtgttcagctgactgccctgccaggtatccatctcgtcgatctgctccagcggcaggaaggtcagcatccggatgcacttgagcacatcggcatctcccacgttccgccagtactggtagaagtcgtagggagaggtcttgttggggtccagccacacggcgccgctggcggtcttgcccatcttcttgccctcggagttcatcagcagcgtgatggtcatggcataggcgtccttgcccagcttgcgccggatcagctccgtgccgcccagcatattgctccactggtcgtcgccgccgaactgcatgttgcagcccaccgtctggaacatgtggtagaaatcataggactgcataatcatatagttaaattccaggaagctcaggcccttttccatccgctgcttgtagcactcggcccgcagcatgttgttgacggagaagcaggcgcccacctcccgcagcagctcgatatagttcagcttcagcagccagtcggcgttgttcagcatcagggccttgccctcgccgaactcgataaaccgctccatctgcttcttgaagcagtcgcagttgtgctggatggtctccggcgtcatcatggaacgcatgtccgtccggccggaggggtcgccgatatagccggtgccgccgccgatcagggcgatagggcggttgcccgccatctgcagccgcttcatcaggcacagggccatgaagtggcccacgtgcaggctgtccgccgtggggtcaaagccgatatagaacgtggccttgccgttgttcaccagctcccggatctcctcctcgtccgtcacctgggcgatgagcccccgggccttcagttcctcgtagatctgcatgatttgtctctccttttgtccgtttgtgaaatctgggacaggtatcaaaaacgccctctgtcccccaggggacagagggcgagaagttctcgcggtaccacctctgttcgcgccgccctcgcgggcagacgcctcaggccgtgcgaacacacggcggcgctgtaacgggcgctcccggagcacgcctactgggccgaaggccgtttgggtgccagctccgcggtgtattcgccgggccctgcccgcctctttccaccagaccagaggctctcttgggggcggtcttcccgggtactgctccgcttcatcactgtaagaggtattctagccgattttttacagcttgtcaacgggtggacggcctttctttttgcggaagaaatcgtatacacccttctggcagtcgtcctcatccgcctgttccagcatctggcggagacggctctccgcctcctgaagcggggcgcaggcgcagggtgtccgccgcaggatctccaggacttcatacatctcgccgccgagccgcagatagaggcacttgtaccggatgttctcctccgctttctccttatagaactccgcttcccgcctgtatgcctccgccgtctccagatcgtccattctgacacctccctaaattttgtgtctatattctagtacgctttttacatagtaactcgttttgtacttaaaatcaacttatattctactgaaatggagtttactatgaaaaagccacgggacagtcatcttggatttcgcatggataaagagacacatgacaagctgttttatatcgcggaatatgaaggacgaacaggcagcgggcagattctgtacctgatccgccgctgtatcacggagttcgagcaggtccacggcaaaatcaatctggaggaagagctccgagactgaaggagccccctcccggtccggcgcggttttctgcgccgggcttgattttcgcgcccgcggccgctatgataggatacagatatttttcagaagtgaggtgccctatgccccaggatcccagacagcgggacggctgccaattcaccgcacagaacatcacagcggcccaggagaagaatccctttgccaagatctccgacatcgtctatgaactgctggagaaggccatcttctcctccgccatcccgccggggagcaagctgaacatctccaagctggcggagcagatgggggtcagcacctccccggtgacccgggcggtggagcggctggaggaaaacggcctggtgaccgccgtccgcagcagcgacagcaaataccgcagctacttcgtctttgacctcagcagcgagtccctggaggacctgttcgtggcccggcgggccatcgaaggagaggcggccttcctctgcgcacagaagcggactctgattgacctgcccaggctccagaagctggcggaccagttccagtccgcctggcaggactttgcgaaggatctggataccgcccccaccgcctccgagcgggccaagatcgacctggagttccaccaccagctggtgctgaccacagagaacgagtatctcatcgacatgttcgagaccctccagggcacccttcactacctgtctatccgctcctgcgagttcgttgccacggaacagaaaaaggacaatctgatcgtcatgggctcccagcacgtggctatctgctccgccatcggcctggggctgccggagctggctcgctccgccatggagcggcacatcgatttctgctgcagccgctgcctcatcaaccgcacctttcacgccgccggatcccgctgacggcggaacgaaagcgccccagggcaaagccctggggcgctttcgtttataggagtgtcgatttcagcaaagttatttctgggccgccagcttctcgtactgggcgtaccgggcggcgcactgctcctccgcctcggcgaagagctgctcggcgatctgagggaatgtgcgggtcaggccggagaaccggacctcgcccatcatgaactcccgcagcttgccgttgggggccttgctgtccagctggaaggggttcttcccctccgccgccagctcagggctgtaccggaacaggggccagtagccgcactccaccgccagcttctgctccgcctggctcaccttcatgctcttggcgatgccgtggttgatgcagggggcgtaagcgatgacgagggacgggcccttgtgggcctcggcctccttcagggccttcaccacgtgggcggggttggcgcccatggacacctgggccacatagacatggccgtagttcatggcaatcatgcccaggtccttcttgggggtctttttgccgctggcggcgaactgagccaccgcaccgatgggcgtggccttggaggcttggccgccggtattggcgtacagctcgttgtccaccaccaggatgttcacgtcgatgccggaggccagcacgtggtccaagccgccgtagccgatgtcataggcccagccgtcgccgccgtacatccacatggtctttttcaccagctggtcggcgttgtcccgcaggaaccgcacgtcggcgccggagtcggcggtctggttcagagcggcgatcagggcgtcggacacggcccgggtcttgtcgccgtcgtcgccgtcttgcagccagctctccagggcggccttcagggcagcgtcggaggtggtgtccagggcagccttggcgtgggtcttgacctggttgcgctgctggtccacggacaggcacatgcccagggagtattcggcgttgttctcgaagagggagttggacagggccgggccgtgaccggcggagtccttcaccatgggaatggagggcacggacaggaacatggcctgggcgcagccggtggcgttggcgatgtacatccgctcgccgaacagttgggtcatcaacttcatgtagggggtctcgccgcagccggcgcaggcaccggaaaactccatcagcggccgctggaactggctgccccggacggtgaacttgtccagaggattggccttctcggagagggacaggcagtgattccagttgtcctgctccggcatctgggactccagcggcttcatcaccagggccttctccctggcggggcacacgtcggcgcagctgccgcagccctggcagtccaggggatccacctggatgcggaaggtgtaattctccatccccctgccgttggccttgtgggtgatgcagccggccggggcctgctccgcctcctccttggtaaacaggaagggccggatggcggcgtgggggcacactagagagcactggttgcagccgatgcagttgtccggcagccactggggaacatccacggcgatgccgcgcttttcgtacttggaggtctccacctccgtcacgccgtcggcaaagctgaggaacttgctgacagggatcttgtcgccggcctgggcgttaacggggatcagcacgtcccggacgtagtccggcacacctgcggtctcagtctgctccaggggctcgtcgggcaggtccttccagctgtcgggcactcggatctcctccacggactggaggccccggtccacagcggcgtagttcatgttcaggaccttgtcgcccttcttgaagtagctgtgggtgatggcgtccttcatgtactggacggcctcatccaccggcagcacgccggagagcttgaagaacgccgcctggaggaccgtgttggtccggttgcccagacccagctcctgggcgatggacacggcgtcgatggtatagaacttcacatggttccgggccagtgtccgcttcacgtggttgggcagattccgctccagctcctcccccttccacagggtgttcagcaggaaggtgccgccgggcttcacctcgtggacgatgtcataggagtggatgtaactctgcttgtggcaggccacgaagtccgcctgggtgacgtagtaggcagagcggatggactccttaccgaagcgcaggtggcttttggtgacgccgccggacttcttggagtcatattcaaaatacgcctggacgtactggggcgtgttgtcgccgatgatcttgatggagttcttgttggcgcccacggtgccgtcggagcccaggccccagaacttgcactcgatggtggagccgccggcggtgctgatgtgttcccccacgtccagagagcggtgggtcacatcgtccacgatgcccacggtgaagtggtttttctgctcgccggccatgttgtcgtacacagccttcatctgggcgggggtggtgtccttggagctgaggccgtaccggccggccagcaccttgatcccgctgcgcccggcttccgccagggcggtgcacacatcctcatacaggggctcgccgatggcgccgggctccttggtccggtccaggacggagatggtctggacggtatccggcagcttggccaggaagtgggacacggagaaggggcggtacagatggacctggatcatgcccaccttttcgccctgggcgttcaggtagtcgataacctcccccagggtgccgcagacgctgcccatggcgatgaccacccggtctgcgtccggcgcgccgtagtagttgaacagctggtagtcccgccccgtcaggtcgctgacggccttcatgtattcctccacgatggcgggcaggcggtcataggcgccgttgcaggcctcccggtgctggaagaaggtgtccgggttctggacggtgttgcggaccgtgggatgctcgctgttcagggcccgggccttgaagcggcggacggcgtcccagtccaccaggcggctcatgtcgtcgtagtccagcacctcgatcttctggatctcatgggaggttcggaagccctcgaagaagtgctggaaggggatgctgcccttgatggcggcgagatgggccacggcgcccaggtccatgcactcctgcacgctggatgaggccagctgggcgaagcccgtctggcggcagcccatgacgtcagagtggtcgccgaagatggacaggccgtgggtggacaccgtccgggcggagacgtgcatgacaccgggcagcatggagcccgcgatccggtacatgggcgggatcatcagcagcaggccctgggaggcggtataggtggtggccagggatccggtctccagcgcgccgtgcatggcgccgcaggcgccggactcggcctggagctccatcagcttcacaggctggccgaagatattcttcatgccggcggcggcccactcatccacgtggtctgccatggggctggagggcgtgatggggtagatcgttgccacttccgtgaacgcgtaggagatataggcggctgcctcgttgccgtccatggtcttgaatttcttgaggctcatgcggtctcgctccttttttccatcctctcggggaggacagcgtgatttcctttcctactttaccgcagggggatgcctcctgtccaaatccatggaatttatgaaaaatcccgcggattttccacggatgcggacggcaatctccccagttttcccaggagtttttgtgcccggccgcgcttttgcgtccaggccgggcatgtgcctgccgctgttttccggctttttccggcatggttcggcccggcgcgggacaagctagggcggaggtgatctaaatgcatgatgacagccgcaaggtagagctcccccggcggagaaagcaggagaagcccatccccagcgtctatccggtgctggacaccgatctggcccgggacaacgtggaaaacgacattccggcggcagacctggaggacctgtgaggactccggacttcttccccacagctgggaggtgaagcgaatggcaagcatttccgtctccctggaccggaacgcggaccggcatgacgtgaagctgctgaagcgggagctggacaccctgccgggcgtcacctccgtcagcgtcagcagcggcggacagctggcggtggactacgacgccacaggcgtccggcaggcggacattctggaaaagatccaggcgctgggctaccacgtccggcaggaacacgcataacaaaaccgggaaccggccaaaaagccggctcccggtttgtttatgttccgttggcggactcccgggggcctggaagaaactcctcccccgccgcctccatagccagaccccccgcggagagctccgtgaggcggggaacgaactgttccgccccgcccgccgggaacgccgcccgcaggcggatgtccgcgccgtacgccgtgtcccgcaccacgccgccgcaggcggtgatctccagcttcacccgctcgaagaggggatatgtgcagggcacgtcccacagcgtccacaggctcatggtgctgatgcccacggcgtccagggcgtccttggctcccttggtataggcccgggtcagtcccccggcccccagcagcacgccgccgaagtaccttgtcaccacgcagcatacgttggtgacgctctcccgctggaacacgttcagcatgggctggcccgccgtgccctggggctccccgtcgtcggagtaacggaccacgccgccctcctgcagcagatagcaccagcagttgtggcgggcgtcgtagtagcgcttcttcatctcctcgatgcgctcccgggcctctgcctcggtctccacccgccagatgtgactgatgaagcgggatcgcttctccgtgaacgcgctctccccgttttcaaagggcacccgataggtggtcatagccgtcctccctgtctgctccgcgctcatttccacacgtcccgccggtccgtccggcccgccagatagtccatggacacgccgaagtggtccgccagggcgcacagattatggaaactgggcaaattatttccagactcaaatttctggtaatgccgttctccaattccaatggccgtggcaacctgggcttgggtttctccgcgctcttttcggagcgatcgcaatttttcctgaaattccatgcgtcccccttgacacgccaaattttaggtattatactaaacttagaaacacgccattttttatgttattcgaggtgatttttaggatgacagattttatgaaatggctctatccccggtatatccgcccttatgtggaggcggcgccccaggaagaatatgagatgtggctgtccctgatggagagcgacttggaatatcaattccgggaggaattcgacaagaccctggaattcaccgccatccacgtcttcctgctgggcctgcgcaccggggcgggcctgggggcgctcattccacaaggaacggcgccatctgccccaggaccttcggcgtgcacaccgccgtgaccgcgatggtctccccgtactccacgttctccaccttggcctcccggtacagctggtccagcaggccgcccttgtcgtaggggatgtgcagcacacagcggcggctgccgctgtccaggcgttccccgatcatctccaacagcttgtccacaccctcgccggtcttggcggagagggagcagatatcctgaccgtggggcatgatctctccggcgggcagccggtcggacttgttgaacacgtcgatccggggcagctctccggcccccagctcccggatcaggttctccaccaccgccgcctgctgctgccactccgggttggacacgtcgatgacgtggagcagcagatctgcgtactccaactcctccagcgtggccttgaatgcctccaccagctggtggggcagcttgcggatgaaccccaccgtgtcggagatcaccacgtccagcgtgtcgctgaccgtgagaaggcggctggtggtgtccagcgtgtcgaacagccggttgttggcggggatgcccgctccggtcaggtggttcagcagcgtggacttgcccgcgttggtatagcccacaatggccaccaccgggatttcgttcttctgccgccgctgccgctgggtggagcgcacccggcggacctcctccaggtcctcccggagcttgtcgatcttccggcggatgtggcggcggtccgtctccagctgggtttcgccggggcccttggagccgatgggccccttgccgctggtgcccgcctgtcgctccagatgggtccacatgccggtcagccggggcagcagatactggtactgggccagctccacctggagccgcccttccttggtcttggcccgctgggcgaagatgtccaggatcaatccgcaccggtccagcacctgaacgcccagcagctccgtcagcacccgcatctgggagggggacagatcgttgtcgaagatcaccatggtggcgccggtgttctcgcagtagagctgcacctccgccaccttgccctccccgatgaaggtccgggggtccggggacggccggttctgcagcacaatccccacggtctcgcctccggcggtctccaccagggcggagagctcctccatagtgtcctcgtcggcgttttcctcttttttcagcaccggggagttcaaccccaccagcaccactttgtctcgtacttcctgtgtctctgccatgcaaactccttatttttgataggcctccacgacttggcccacatagatccggtgccagccgccctgccccggcgtgtagaagggcaggatctccccctcccccagcacgcaggcagggtccatgtcctgggcgtacagcttccggcacaccaggacccactccgcctcgtcaaagaagggcgcgtccccggccccccagcggaccgtcaggccgcacgctttcaccttgtccacgtcccggccgctcttgctgccgcagagggcggtcactttttttgcctcctccggcaggatggagacggtgaaataatcgtgggactccataaattgataggtatatcgctcgggccgcacgtagactgtgcagaccggcaggttccacagccggcccaactggcaccagccgatggtcatggtgttcaggccggtcttgtctccggcagtcagcagcgggggctgccgtccgaaaacatgcaggatctccggcgtcaaacgctccaactccacaggatgcagcttcatgcaaacgctccttccgcttcattgataccatacagtatatgcgcttttgccggaaaagtaaatgaaaaaagggcctgcccaaccggcagaccctttttgtgacgtgtcagacttacttgtccagaccgaacttcttgttgaacttggccacgcgtccgccggtatccaccagcttctgcttgcccgtgaagaaggggtgacacttcgagcagacttccaccttgatatccttcttggtagaacctgtctcaatcacattaccgcaggcgcaagtaatcgtagtctgctgataattgggatggattccttccttcattgctctcgttcacctctttctgatccagactacctcgccggagctttcaccccataaaggcgtttatcagtgtatcacacggacgtcaagattgcaagaccttttttcatttttccggagattttttcaggaggggcgaaactgctccacccactccggcgtacagtccgcaaaccagtcctggtgatccgggtcctccgggtcgtagagccggtccgtcagggcctggaaggcgctccactgctcctcggtcaaaacatggacggagatgccgtcctcttcctgccaccgctccaggatctccgcctcctgctcccggttccggagccgctggtccgccatggcctcccggccgcagcggtccaccgcctcccgcaggtccggggagagggagtcgtacagatcactgttcatggtgaggatggcgggctcataaaatgccgggaagatggtcacgtccgtctggaccgtctggtagcccgccgcgtccgcctccgccagggtgctctcctggccgtcatagtatcccgcagacaaaggcgtcatcacatctaaaaaactggaggggtagagttccgctccccagcaatccacatacgccacggacacttccagcattcccgccgtgcggatcttgagcccttccagatcttccggggcagtcaccgcacggccttcagaagtcgtcggataccggaagcccagctccccgtatgccaagccccggagccccagctccgccaggacaccgttcagtgcctctccgccggtgctgtccaggacctccgccgccgtttcggcgtccgggaacagaaagggcatggtcacggagaaaaacggtctgcccaactcttcttcgtcgccgtaggagccatatacgaaactgctgtccagatagaggtccacgatcccggccgcagcctgctccagggaggtaaccctatcgaggggcatcggctgaacctccaccgccacggcgccttccgtggcgtcggacagtgcctcggcaaaagattccgccgcgtcccagcaggtggagccctccggctggcccaccaccagggtccaggttgtctcaacattcttcggaaccggcggctcctctgaaacctcctccggcactccgccggtgcagccggtgagggccaggaccgccagaccggcagcggtcagcttggtaagacggcgcttcatttcaggtccctccttcttgttccagcgcccgccccaggtccgccagataccgagcctgctggcggcggaggtagcccttggcaaagaagcgcatccagggcttttttacggtgatggtctcggtgaaggtgacctgggtgccgccgccctccggccggaattccccggcccaccggcccgccagattggcattgtccaggtcaaaggcccagcgggacagggggcggcgttccgtgacggtgaagcgggtgggaaagccgcttctgtcgtactccgtaaaggcgtcctcaccgacgtggtccagacggctcagatcgctgcgccactgccagcagtccagatccgtcaccaccgcccacacccgctccggcggatacggcaccagggccgtggctatactgacgatttcccttcccattggccttcctcctcaaatctccatggtctcgcctgcagccaggaaatacagggcccggcggaccaccttcttttccagcacccgctccagggcccggctgtatgcctccagctgggggcggtagtgctccgcccgctgccggacctccaatgccgagaacacacggtccgttttgaagtccaccacggtcaggccgtctgccgtctcgaagcaacagtccaccacgccctggaggaggatttcctcccccgccgccgcggcgggatcgtagtcccgggcatccatcagcagggtgaagcgatactcccgcaggacgcttcggcttttgcggatctcctccgccaggggggagcggagaaaccgctccaaaggcgcggtctccacggccgcggcctgctggtccgtcagcaggctccgctgccgcagcgcctcgatctggcccgccacgtcaacgtttgagaagtccaggtattgcagcaccaggtgggtggcagtgccccgctctgccggggtcaggccctgccgctcccgccggaaattcggctggctcaggggccggaggtacggggtatgggcggcatactccgcgatctcctggtccgcagggcggcccttcagctgggtggccgtcaccttggcgggcagggccgtctcccgctggtaggggtagatgaaagacagcagctccgggtcaaagagggcggtctcccctgtctcctccgccgtcgcctggggccgagcgggccgttcccggtagtcctcactgtcatgtaaaaacacttgccaggatctgtcctctccaatatatagctggtcaatctctgtctccgccatagcccgcaggggtgcggcctccggccggcacagcaggggcagcaggacccagtcccccagggtgcggccctctgccaccgtctccggcagcacgggacaagcagccacagcggccagcttctggagccgcccggtggcgttgtacagggcgtccaccaggatcagcttctccttgggccgggtcatggccacgtagaggatgcgctgctcctccgctaggttctcccgccgcagcttttcctgaatggccagccgggccagggtgggatactggattttccgctccaggtcgatgcgcttgggccccaggcccatgtccgggtgcaccagcaccggcgtgtcgaagtcctgccgggagaacgcgtggtccagatctgccaggatgacgatggggaactccaggcccttggacttgtggatgctcatgagccgcacgccggcagcctccgccgggccccgggtggcgggagcctggtcctgctccagcagccgccgcagctgagtgacgaaggcgaagaggccccggtatccattgctctcaaacttctccgcgtgctggctcagggcgatgagattctcccgccgggccgcaccatcatccatggcgccgaagacccccagcacattcagtcggttgtagatgtgccagaccaggcggtggacactcatgtcccggcccgcctgccgcagatccgagaggattgccaggaagtctttgcagtcctctcccccatcggcagtcacagcgtcgtagtagtccccggtgggggcggcggagcgaacctccgccagccggtccgccgtgaagccgaacaggggtgaccggaggacggagatcagaggcacgtcctgccgggggttgtccacgatctccagcagggacagcatgacggagatctccatggtgtggaagaagtccccgctctcctggaaagaacaggggatgtcccgctccgccagggcggcggcgaaggcggcagaccggctgccgggggaacgcatcaggatcacgatatcctccggccggcaggggcgcagggtgccgtcgctctccgtgacgggatagccctcatccagcagcttccggatgcgcgccgccacgaaccgggcctcggcggtgaccttctttaccggcttgtcattctcccccgccttctggtgggcagagatgagatggaactctgtctggcaatccatccgctccgggtaatacgccgccccgaagtggagggcctcgtcctcgccgtagtccatctcccccatctccacagacaaaatgttggagaagatgaagttggtgctctccaaaatctcccgccgggagcggaagttgcgggacagcaggatcttccgctcctctccgtcagccgcctcctgccaggacttgaaccggttgtattttcccaggaaaatggtggggtccgccaggcggaagcggtagatgctctgcttcacgtcccccacagtgaagatgttctgcccgtttttggacaccgcccggaagatggcgttttggatctcgttggtgtcctggtactcgtccaccaggatctcccggtatcgggccgccacctgctcccccagctctgtgggggcaccgccggaacccaccagcaggcccagggccaagtgctcctggtcggagaagtcggcagcgttcagccgcagcttctcctgccggtaccgctccgcaaagtcctccgtcagctccagcagggccaccatggccggggccacggcagtcaggtcctccatagcctcctcctcagagacagacaacaggcccgccagcttcttctcctccgccttgcaccgctcccacacctgtttcagcgcggcaatgcccggctcgtccttccgtcctttgggggtggaaagccgggggaaggcgacggccgcttccgtctgccgggccgcctcccaggtctggacctgggccagggcgtcaaaggccacagacacctggagaaacttctccccgtacccccggtacagcgcctcgtccccctcggtccgggcggaggcggaccggagcagggccccccaatgggcccccttccggcggatggcggccagcagctcggcggcgtagggggtgtcatcaaagccgccctcccagccgccccagacggtccggttctccgccagccacccggccgggtccgcgtggctctggaccttgtcgtacagctccagcaccagggcggccagacggctgtcgtcccgtccggcccccagcgtgtccgccagcaggccacggccctcgtccagctggtcatagaagtcctccagcgtccgggagagcacccgctggcggatcagctgggcctcgttatcgtccagcacccggaagtctggggtcagggcccggctgtccccctcccgggccaggaggtgggtgttctcccgcagcagcgacgtgcagaaggcgtccacggtcttgatgtccgcctgatacacccgcagcagctgccgccggagctgctggtcccccggcgtctggcccagccgcttggacagctcggaggcgatcttgctccgcagctccgccgcggcggccttggtgtaggtgatgatgaggaaatcatcgatattgcagcgttcctccgtcacatagcggaaaagccggtccaccagtacctttgtcttgccggagccggcggcggcggacaccagcaggctgccgccccggttttccaccaccgcctgctgctggggggtcagggtcaattttgccatgttactgtccgcctcctctctctgtctcctcttccacctggcgccagaactcctccggctttaccggcaggatgtagtgcaggtggtcgccgtcccgcccatcctggaagtggcaggcgtcggcccagtcgcagtatttgcagaagctgtcgtcctcattgtggcagcaggggtccgcgtcgatgttgccgtcccggacctcccgggcgatctggtggagcagccgctccacatactgccccagccgcccaagctgatcggcggaggccagggcgccggacacgtccccctcccggtttacccgcaccggtaggaaccggggactttgcagagcctcgtgctccatggcctggagcacctccggttcagagagcagcaggcccgttcggcgcagctccttctcccgctggctctggagctgctccggcgtgatatttcgctcggcggagagaatctcatcccgggcagggagatacaacaccccggcgggctcaatgtccatgccaaaccgctgcttgccctcctttttcagggcgaacaggtacagcagcatctggatatccaggcccatccggacggcggccaggtcaaaggctttcttgccggacttgtagtccactacccggagatacagtctgttgtccttcacccagccgtccacccggtccaccttgccgccgattcgcagctccgcgtccggctcgctgaccgtcaccgccggcagttctccgcgctcgccgaaggacagctcgaaggccaggggcacgaagtcggagcagcgcatctcctcggcgatctggtccaccaccgcgtaagcggtgttccgcagccgggcgaagaggtaccggaaccgggcgttccggccctccagattttggagcacctccgccgcatactgctcaatatagcgccgcaccaaggcgtggaggtcctcctctcccactgcggcaaagccgccccggtccagcacgtcctttgtgacgtgctccagcaggtagtggaggaaggttccgatctggggggcgtcaaaggccgccgcccggcgggccttggccttcaggccgtactccataaagtaggcgaagtggcagctccgcagccgctccacccgggaggcggacatggagatccgctccccgtacagcgattgtaccgcgctcctggagaggctcccccgcttcagcgcagccgcccgctccatggccgccatggggggcgccaggacctcgtcatctgcgaaataccgccacaggatcccccctggggcggtccctgcggtctccaaggcagggatccttgctgtaaggcgataagccttatcagtcccttcgtgctcgatacgcagctccggaaacagcgttagcaggcggtccactacaaaggcaggccgcagctctgcaccggacacgtccgccgtgggatagctgaccaccagtccctcccggggctgaaccagagcggcgtagaggttctggagctcaatgcccatctgttccatgccgctgggcgccaggcggataccccgctgggccaattcctcccggtcatcgtcgttgagaatgccgccgctctgtcccacagcgggcagcacatggtcattggcccccagcagaaacaggtaggcatccgtgtgacggtcatttcgggtgatttccgtgacggacacctggtccagagacacggggatagtgcccacgctgtactgggaggccacctgccgcagcaggcggctgaattcatcggtccccataggctcgtcccccaggatctccacgaactggtccaggatggcgcagaggatctcccacagctgggcggtctcctccgcgtcctggaggcgccctgcctccgcctgggcccgcatctgttcctccagcgcgttctggagattcagatgctccaggaaactataaagggaatttactttctccccagctgtaacgccggctttcagcccttcatacagctccgcaagaggtgcgcgtacccggcggcgcagctcgttcacccggtccaggcgggcctggcggcgcttatcccaaggtgcgccataaccgtccggattgtcggtccagtccacatcccggagccacatcttcccgtggatctcccaggtgagaacgtagttttccagctcatcgcactcctccggcatcaggcccgccaggccggtcttcagccaacggaacatgtcctcgtactccaagccgttttccagagcggagaggacgccggtgatgaggctccacacgggcttttccaacatactgctccggcggctcagataggcggggatgctgtaccgctcgaataccgtctcaatggtgccctcgtagtcggtcatgttccgggcggccacggtgatatcccggtagcggcacttccccgccgctaccaggcggcggatgtccgctgccgtctgctccacctcggaaaaagcggtgtccgcctcccggacccggatggcggagctgtctccttggtagggctccccctctccgaagaagtgatgctccaaatatcccagggcggagtcgtcggcgctggtgagcgtccggacctcccatgggcagcccgcctggtccgccagccgcgtcagctggtcccgggtgcggagagagacctgaaacatctcctccgcgctgtccggctcccccagcagcgtgacagtgacagaccgagcctgccgcaggatgctctccagcacctgccgctcctgggcgttgaagtacgtgaagccgtccacaaacacgtccttgccgaaagcgtagcgggaggactccagcacctcgcagagcttggtcatccggtcccgggcatcaaggccggggcggtacagccgggactcataggcgccgtacagcaggctcaggtccagcagcttgtcccgggtggcgccctggatttcccgtgcctggctctccagcagctctggggacacgtcgtagcagcgcagctcgtcgaagaggtccagcagctgctgtaaaaacgacgccttctgagagggacggcgatacaccttcagcaagggggccacctctcccagggccttctgcagggtcaacagcttgccgccggcatccaatgtcacctgagcggcgccgccggtgatggtcagcacccggtcgcacaggcggcggaagctgaggacctccgcatggcggctggcagtgtctccgcaggcacggcacagatccacctccgcctggtgggaggcgtgctccggcaccagtaggatctgccgactggtatcccccagttctctgatccggcggagcacctgttccgattttcccgttttggcccggcccatcaggatcgtcagcatggcgggacctcctttgcgcaatttcaaaattcattgtagcatatcccgccgattcgtgctatcctgtttcttgaagattttccgaggaggactgacccatgcacattccccaaggccccacagccgccctggcgctggagctcttcgacgacgccctggccgctgccctccggccgtcgccggactatgatgtgagccggtggctgtacgtccccaaccactattcggaataccgctacattctgggcacccggggccggaagcccctgatctgcatgggtatcaacccctccaccgccgcgccggacgctctggaccccaccctccagtccgcccagcggatcgcgctttccaacgggtacgacagctttttgatgttcaacgtctacgcccagcgggccacccggcccgacgatatggagcggtcctgcaacccggtgctccatgcggagaaccgaagggccttccggtatctcctctctctgtccccggcccccgccctgtgggccgcctgggggaacatcattgagaagcgggggtatctgatggattgtatgcgggactttgccgccgacgccagcgccgccggggccgagtggttcaccgccggccccctgctgaaatccggccatcctcaccaccctctgtatctcaagggggacacgaagctgctggccttcgacatcgacagatatctgcgggcccgggcaacctgaaccgctgcgaggcacaaagcaggccgccccccaatgggggcggcctgctgtttttctgtgtcacagccactttttcttcttgaagtagatcaccagcgccgccacgatccccacgctcaccagaatcaccgccgggtatccgtacttccagtggagctccggcatccccacaaagttcatcccataccagcctaccagcagggtcaggggcaggaacaccgccgtcaccacggtgaagatcttcatcaggtcgttctgctggatggacagctgggactgataggcctcccgcagttgggccacggactcccgcagggactggaccgcgttcagataccgctccatccgattgcccaagtttgcaaagcggcgggtgttctgcttgcccagcaggctgttgtcgttctccgccagctcgtcaaagatggaatccagctgctcgtagtaccgcttcagccgcagcagctcctgccgccaagcgatgatccggtccagatacgcctcatgggcaccggtgagcacctctgtctccccatcgctgatgtccgcctccagccggtccagatgggccatatcccccctcagcagccggacgaagaagcggtggagcacctgctcgttggacagtgcctcttcctccggcaccagcagggccgcctgggcggcgtcctccgctgcgtcgtcctcacagaagacaaacaggtcctcccggtccagatacagcagcatctgggatgctgccgtccgctcgctgcgcacgtcgtaccagtcaaaggcgatcagatcgaagtcctcaaagccctcaaacgcttcgatctgcccctcgtggatgtagtccagcaccttggcgtccatatagggctccatctcccggatgcgggacatgggcagtacctttcgcatggcggtctctctcctctcggtctctcacaggttttccaggccggcgtccttgggcggcaggccgtcatagagcccggcgcacttccacagtgccgcgagaaaccagatgatgcccaccagcagggcaatcagggccatcagtgccaaagcgtccagcagcaggccgcccagcgttccggcaatctgtgccgccaacaggacaaaccaggcggtccgtgccgaagtgccgttcagatctgtcccataatgggtctccatctccaaaatggcctggatcacgctccaggaaatatacagggcgaccgccagagcagccagctccaggagcgtactcagccagtttgcgccggtcacgcccagcaagtctcccacccacaggatacccgtgtatatggccacagccacagcaaaggggcggagtttcccgaatcgaccgctctctcccaacaattcccctgctgcccgatagagtaagatataacccgcaaaggtcggcagcagattcagtgtatgtccattgattgtcacataaaaattgataaagatcaagaagaacccccaaaagattcccttcactgcatttcctcctcccgcttcttttgtacatgcctttttccgaaatacagcaccagcacccccgccgcgatcttcacggcggcgtacagggccgggaacagcagcacacctgccgggaacacgtcaagcagattcactccgcccatctccgccatatcccagccgatcagacccgtaaatccgcccagcatcccccggtacgccagataaaacagcgccagctgcaccagatccaatacgccccaggcgatcagcacccatcccagcaggtaccatttccgcttgctaaaggccaaaaaacgctccacccagtccttccgttcctggggcggcggctgcttctcctccggctccgtctgctccggctggaggcggagcagatagtctgttgtcacaccgaaaatatccgccagggccaccactttgtccgtctccggcatggtctcgtcccgttcccaacggctgacggcctgccgactcacctgcaggcgctcggccagcgcgtcctggctcatgccggctctctgccggagggattgcagcttctctccgaatgtcataggcattctcccttctcttggatgccttcagcttatcaggccgcccggttgcataccagcaaccaagcatggaagttccgcaatctcagattgccttcctctccaacataccacaacagggctccccgcgcaacggctccggcccatattgcaagaaaaaaccgaggcaccggacgtctccgcatccaagcgccccggcctatcgggcgggctccagcacaatgggcaggtccacgatctccagcccccggcgcatggcgtactccaccgtgtaccgggttccgccgggagacccgtcaaaggcggcgatcagcagcgcggcgtggtccaccatataccggtcccgccgctgcatacaggcgggggtgtagcaggcggacaccagggtctcaaagtcacaggcagccaccagccgctcataccgccgccgctggtccggcggccaggcatccgcctgggagggacatgggacggccgcctccaccgtcacgtccgggtgcgtctggcgcaggcggaggacgcactcgcagaaatacaggtcacagcccagggccatgccgcagagaaagtgacggaatccctcctgataggccgcctccaccgcgtctgcgatgcgggccttgagcaacacgcagcgcaggtcctcctcgttataccgccatggcagcttaccgggccggtgcccggtaaagcagcaggccgactgccgcccccgcatggtctccgcctccctccttctggtctttgattcagtatagaacatccgttcttgtttgtaaagacccacgggaaatttgccgttttttcatttagggacttgcaatttcttccgcgctgtcatatactatggccagaaagcaactgaatactttgtcttcagggcggggtgaaattccccactggcggtacagtccgcgaccgcctgcgcgtatgcacaggcgctgactcggtgaaactccgggaccaacagttacagtctggatggaagaagatgagtgcggcgtggccgcgcgtttgttcgcgctcctgcgttgcgtggatcaccttggagaagccaaagcgtccagggtgttttcaagcaacgaaaaggagtgtatttttatgtctgaacccaatgccaacgccatcaagaacccctcccggcccgcaacaaacgtccgaaccatcacctccctggccatgctggcggccatcgcctatgtggtgatgctcctcagcaagatgctgccacaggtgtccggcttcctgcagatggacctgaaggacacggtcatctgcatcggcgccttcctcttcggacctctgtccgccgccgtcatctccatcgtggtggccgtggtggagatgttcaccgtcagcgacaccggccccatcggctgcatcatgaacgtgctggccacctgcgccttctgctgcaccgccgccttcgtctacaagaagttccacacccgcaagggcgccgtcatcggtctggccctgggcactgtttgcctcaccgtggtgatgctgctgtggaactatctcatcacgcccatctacatgggaatggatcgcgaggaaatcgtggtccccatgctgatcccggtgttcctgcccttcaacctggtgaagggcggcctgaacatggcgctgatcctgctgctctacaagccggtggtcaccgccctgcggaaggcccggctggtaccggagtcccatgcgcctgtcgagggcaagggcaagctgagcgccgggttcctcctgttctccctggccctgctggcgacctttgtggtgctggccttggtgctgatggggattctgtaaatttgaacaccacaggcgcgggggcggataccgtccccgcgccttttactgcggcccatatccgtccctccgcctccctgcgccggtatgtcaaaaccttcccatcccttctcccttttcaggaacgaacagatgtgctataatagaagtgagaaaggaggcggggccatggaccgcatcatcctgcactgcgatctgaacagcttttacgcctccgtggagctgcggagccgaccagacctgcagaacgtgcccgtggcggtctgcggagatcccacctcccgccacggcatcatcctggccaagaatgaaccggcgaaaaaattcggcgtccagacggcggaaaccatctggcaggccaagaaaaagtgcccggagctggtgctgctgccaccccaccacaaactgtaccggcaggtctccaaagaggtcaacaccatctacgagcagtacacggacctggtggagcccttcggcatcgatgagagctggctggacgtcacccataccctccacctcttcggcggtgatgccaaggccctggcagaccatctgcggcaacggatgaagcaggagatgggactgaccctctcagtgggggtctccttcaacaaggtgtttgccaagctgggcagcgactaccggaaacccgacgccaccactgtcgtctcccgggagaactggcagaggctggtctggcctctgccggtgggggcgctgctgtacgtggggggcgccgcccggaagattttggcccagttcggcgtgaagaccatcggagagttggcggcctgcaagcgggatgccctggagaccctgatgggcaaaatgggcgtccagctccacgactatgccaacgggctggacaccgatccagtccgctcccggtacgagccggagatggtgaagtccgttggcaacggcactaccttcccgaaaaacctcaccaccgcagagcaggtgcggggcggcgtcgccgtgctggcggactccgtggccacccgactgcggcacagcgggctgtatgccggcggcgtccaggtgacggtgcgggatccccagttccatgaccgctcccgtcagatgcagctctccgcccccacccacctgatccgggagctgacggcggcggccatggacctgaccggccagctgtggaaacccccggctcccgtgcgggccctgactgttaccgccatccatctggttcggtcggaggacgcctatgaacaggtagacctgttcacagctggggcggcgcccaaaaaagaaaaacaggaaaagctggaggcggctatggaccgcctccgtggaaagttcgggaccgacgtcatctcctacggcgcggcccgtccagagaaagaggaggatcccctgccatgacaatagacgaggaaaaacagcagctccgggctacgatccggcgcctcagcgcccagctccccttccggtaccgggaagcggcggaccgggccatcgcccgccatctcctggctcttccagagtatcgcagtgccggagcggtgttctgcttcgtctccgccgggcgggagatcgacacccgtcccatcctggagcagactctggcagacggcaagatgctgtgcgtccctctgtgtgtggcggatggcatcatggagctgcgggccatccgcgacctgaaggagctcttccccggcgcctacggcattctggagcctccggcagacagccctgccctctccccggaccagatcgacctggcggtgatcccctgtgtcacctgcagccgggagggccgccgtctggggcggggcggcggctattacgaccgcttcctggcccactaccggggcgcggcggttctgctgtgccgggagcggctgctgcgccaggagatccccttcggcgtccacgactatcccatcccctgggtgctgacagaagccggactttttgaggacggcacgccatcccggctggaatgactgggaaaaggtccgcctcccacaaaatcgtcaaaatattcccactatctctacaacattttgtgggggtattacctcttgttcccttgacaggtccctggaactctgataagctggaaaaggcttatattttccggaagaccggatcacacgaaggaggacccctgcaatgatccaggacatcatggactttctctcccaggccgaccccgaggtgggggcatctattcagaaggaattcgaccgggagcagcacaacattgagctgatcgcctccgagaacatcgtcagcaaggccgtcctgctggccatgggcacttgtctcaccaataagtatgcggagggctatcctggaaagcggtattacggaggctgctatgccgtggacgtgacggaggagctggcgcggcagagggcctgtcagctgttcgactgtgcgcacgccaatgtccagccccactccggcgccaacgccaatctggcggcgttctttgccctgctgcagcccggtgacacagtgctcagtatgaatctggcccatggcggccatctgagccacggcagcccggtgaacatctccggcaaatatttccgcatcgttccctatggcgtgtctgacgacacagagaccatcgactacgagcaggtgatggccatcgccaaggagtgccgccccaagctgatcctggcaggggccagcgcctatccccgcaccctggactttgccaagttccgggagatcgccgacgcagtgggcgcccggctgatggtggacatggcccacattgcgggtctggtggccgccggtgttcatccctcccccatcccctacgccgatgtggtgaccaccaccacccacaagacattgcggggtccccggggcggcatgatcctgtgcaatgacgacgacctgtacaaaaagatcaactccgccgtgttccccggcacacagggcggtccgctggagcatatcatcgccgccaaggccgtgtgcttgggcgaggcgctgaagccggagttccgggcctatgggcggcaggtggctgccaacgccggggttctggcggaaaagctgatcgagcagggcttccggctggtctccggcggcacggacaaccatctgattctggtggacacccggcactttggcctcaccggcaaggagtatgagcaccggctggatgaggtaggcatcacggtgaacaagaacaccatccccaacgacccggagaagcccttcgtcaccagcggtatccgggtgggcactcccgccgtcactacccggggcttccgggagccggagatggcggagatcgcccggtggatgggcctcatggcaaaagaggactatgcggaccatgcggagcaggtccgtgcggaagtggcggagctgtgcaagcggttcccgctctatcaggactaaaacaacccccgcggaggcaaaggcacccccgcacaggggcatcaaccaaataccgttcatgagtagagcatgaggccaccgtaaatcacccggtggccttgctttgcatgatacaagttgacgcccttattagccctgataggcactaccccccctcagtggtttcctggtgaacgctagcaccccccatgcgtgacaacctccaaaacaccagtcagatcaaagctatcaagacataaaatacccccacccaattcgggcaagtctcatcaacttgctcaaattgggtggggtattcatcacaaaatgctagggagccactgtgtcaattgtgggataaatgtgaccagcatcaatgccaccaatgagataatcagcgtggggatcattgtgcgaatagtcttggacaaactggtttctccgatttgattacagaccaacagacataatcctaccggaggtgtcaccaaaccgatacagaggttaaaactcatcatcacaccaaaagtcaaaggatcaatattaaaaaccggtaaaagcggagtcagaaggggcgtcatcatgataatggcagcactggcctccatcaacataccaataatcaagaaaagcagattcagcaacagcaaaatcacggccttactgctggtaatagaggtgaagaattccagcatttgctgaggcaatcccgatgtgaccaccacataactggatgcttttgacaagccaaccaacatcataatagtcgcagtagaaatagatgtctccacaaaaacttgaggaatgtccttccatgtcaggtctttgtaaatcaatccactgacaaagagtgcataggcaacggagaccgctgccgcttctgtcggcgtaaaaatgcctccaaaaatgcctcccaaaataataattggcatcagcaaggcccaaataccgttcttgaaagcccgcaggatctctatggggctgcttttccgataagacgggagatcatgctttcgaccgtaaataaggcagtaaactgcaatggcacacgctaagagaatgcccggcaaaaccgaaccaataaacagtgacgccacagagactgtgctgacacttgcataaacaataagggggatggatggaggaatgatcggacctaaaatagaagaaatagaagaaatcgccgtagcaaattcatccgggtatcccgattttttcattgcggggatcgtaatgccaccaatggcagaggccgtcgccacaccagaacctgagatagcaccgaacagcgtagaggacaaaacagttaccactcccaagctgcctttgatttgcccaatcaacgcatttgcaatgttgatcagtttctcggtaatacttcgggacattagactccctgccaaaataaaaaaaggaattgccagcaaagagctagaattcatgccagcaaagagtttttgtggcaacacgatcagcgccatatccgccatatggagcgctaccagagtaccgattcccaaggcaataaaaatgggaacaccaaggaaagataagaccagcaagaagatgatcaccacaactcccacattcattcttctttccctcctttacgaaagtccctgacttgcttgaaaatcacttcaactgaagtcaaaatcatcaggacggttccaatcggcagacacagataaggaatcgacataggaacgcctagtcccacagaaagattatttgctccagtctttaccaaatcaatagaatataccagtaaaaagcagaggaaaaccacacctatcaaagttgaaataactgtgctcagcattctccagcgcggcttcagcagatgaatcaatgcatcgatttgcagatggctatttcgtcgtataccaattgcagaagccagcatcacctgaaagataaataaataccgagccagttcctcgctccatgcggtagcatgtgcaaagacatagcgcaaaataacctgatagatcatgacaaccagcattactgctactgaaatgcatagcagcgctttttctattttttccacaatatctaaaaattttgaatatgccttcattttttcttttgcctcctgtcacagctgagacttagaacaaaaagcccgacagatgccgggcttttgtgtccatttcaagttgcggcaagggcctgctgccgccgacccagcggatacaaaccaatgcctgctacatgaaaactacgaattagccggatccattgccttgatgcggcccacccaatccgccaagttggggaagtttgtctctgcaaaggtatcaaagtaatctgcaaacgcttttgtatccacttcgatgacctcacagccctcatcgagaactttctgctccgcttcttggtctctctgcttctgaactgcgctgatttcctgaccagcgtactccgctgcctctatcactgcattctgaatctcctctgggaggctgttaaaataggtccggtccatcatgaaaaggttgcagctatatacatgattggttttgatccagtatttacagacttcatcaaaggaatagttcagagaatccgcaaaggggttttcctgtccctccacggtattctgctgcagtgcagtatatacctcgttcatagccagaggagtcggtgaggtattcagccactgccaagttttcaggtaaacctccagattgggtactctgagtttgaaacctttgaaatcatcaatggtctccattttctttgtagctgtgacaacgcggggaccacgataggctccgcccatcagtttaaatccagaagcttctccggctgcctcttttatttcatcccccagatcgctggaccatactgccatgaagtgatcagctccgctgtacatatatggcatagcgtcaatatttccaagttctgtaaatggggccagcactcccagagcttcacatatgatgtctgccacgccggcagacataccttccaagacttcggaggtactacccagactggctccaccataaaggtcgacctgaacctggccgcctgtcagttcctgaattttcttcgcaaaaagcactgcctgatcataacagttgtcaccctccgtggaatttagcgcacatttccacacatatgtggcttcctgcttttttccctctgaccctttctcactggcattattgcttccgcaggcactaagcatcggcaacagcataagtgctgcaagtaatccagcaaataatttctttttcataatgtcctcctgaaaataatctttccagtcgttgtatatcaaagcaatggcagcagacactgcgcagatttagtcagtgcaatgtcgccgctgggaaactgtaacacttccacactgacatagtcctcatagtccaccgcatgaagtgactgcatgattttcgggaaatccaatccgcagttcccgggatataggcgattgttatcacacagatgcacataggaaaaatatcctttactgcgttgaatttctttgaaaatgtccgcatcctggatattcatgtgaaatacatccaacataatccgaaaattttgatatcccacccggtctacgatgtctcggccttcagcggtagaattaataaaattgcactgtaggaagttgacgggctccaaagcgattgtaacacctttgtcctccgcataactggccaactggcgaaaggcatccacggcaagatctagagtcgtttccggcgggatccctggtactagttctccccgcacacggccaatattgacttgggcatgatagggagcagcacagtcgatgaattccttaaatcgtttgatgcaacgcaggcgattttcaggattcgaactacttaaagaaatatgatcctgtgcccatatctctcctgttgccaacatgacaacttccaaaccataggtgctagtcaatcggttgagcagttcgggatccaatttttgggggtcgcgaaccatcaattcgattccttggtatccattttccgctaagtgtcgaaaggagtcctccaaacttccctgataagctgtcagcaaaggactggattccaagtctggcatagctacctggtatgctagcttcataaacacacctcctatcctgttttagtatagggatgagcaaaacgcaagctttgcaaagccaatgcacaatatatagatagactttagtaagcccgatagtggcattattgtatagtctcatgagcaaatcaatattttgctcatccctatattttagaaacaagccttccttttatcggcacagaagcagtctgcgttcccgaactgtagacagaaccccgtcccatgcagtcaagaagccattatgaaacagctcaaaggccggatgtgaagaaaggtcagcggccaccagaccatctgcttcataggcacgtcggaaggccggaattttttctttaagctcttccaattcctccggactggccattgcatcgattcgactcagaatttcaggatttgtgcggttcatctcatcaatgaagttccaaccgcaggtaacatgcatatcaccaccgaccatttctgtgaaatgtctggcagctcggacgcctccccccatcaatttacagttaagcgtagaatacttttccttccaaatctgatagatttttttagacatttccgtccctgacttctcaaccaagtcgggagagatagaaatgtgattggcttccacatatttttttgcataattttcaaaaggagccgccaatgtggtcacaaacagcgtgggggccgaaccagcaatctgtactcctctggcatatgcctcaaacatctgtacagcatagtaattagaaacgcccgctgttgccaaaacacacctgccttcactggtcagcttttccatggctgcaatgccagctagcgttgctgaaaccttgacaacaatattgggggaaatttcatagaaacggtgagcttcctgcaggataaagtcaatgtcgtcatcccgatagggatttccctgaatggcgacccagcccttttcgccgccagtctcctgaaacaacggcaagaaaatctctgcgatttttgcgatcatttcctgataggccaacgccactactagatgatcatcctctgtcatccgcacatagcggtcgattgcgctgagcgctgcgtcctttgtctcctccgctttaagcatatgagaaagataggtggggttagaggttgctccaaaagttcccgcctcaagtcccttttttgcctcggaaggcgtcggattgttgacccacattctagtaggggtctgctcattgattcgttccagataggttttcatcggcttttccttgcatcctttctctttcatttttgaatttcgacatcagcattgtaatgttgccatgttgtcatacagctcatggtcaaagtataacatctcttatgggaaaaagcaagcattttattgttgaaaatatacacaaagaagttgtatgcttatttgacaacttgactgggaatgatatataatacaatctatacttatcagcttaacgcagtcggacacaaaatgcagtggcggctcttgccatgcgcatgaagttctgatctccggtttttctacaattgaagcggaaacaagactcgtccagatacgcctgaagctgctggcagcgaccgtgattagattcccagtaaagatgacttttcagatgcaccctatatattgtaccttaattttgcaaggcttgcgttttgctcaaccctcaataaacgatattaggagaggattatgttaaaaccagttaatcacaacagtgcaagcagtcaaatctatgaacagcttctgcattatatcatctccggagagtggccggtaggaactcgccttccctcggaaaaagatttggcggagcagtttggcgtaagccgtgtccctattcgggaagccctccagcgcctgcgtgctattggggttgtacgttctctccaaggcagtggatcctttgtgtgcgggaattctcctttggaggcgatggaaaccattttgtcctgcaacgctgtttctcatgaacagatcgtggacttgttggagttccgaaagatttttgagccatactgtgtgcataaggtggcagaaaccgccaccaatcagcagctatttgaattggagaagtacgctccgtccttggaaagcatcaaagatcaaaacgatattcgaaccgtgacctttgaaatggatatagcatttcatcgcaacattgttctcctgaccaataattctctgtttatttccctttatgaagtaatcagcaaccttcgcctgagccatattgagtattttgtaggactgcgcatggaccatgaacgcattttggaagaacatcatgagatttatcgtgcattgatttgtagggatgcccaattggcagaaaaactgatgtacgatcatttgacccgtgtttccaacttcatgtaatctttgtataatttttctttgcaagttacttctaaaagaagctccgctttctatattatatgagggattccaagcttcaatcatggctggaatcccttgtagttactactctttttgagttttgctcatggctattactaataattacataggggttatggcaaagatttaccttatccgccattgcaaatccgagggcggtgcctgcagccgcgcgcaagtgcagactgatgtgctggttacgggacagcggaagacattgccaacgctgtcctcttctatgccagtgacctctcagattatatgaatgtcaacggcggactgtacatgtgagataacaccggcagttgtaccgttattcaacgctgaagaacgaaagcctctggaacagggacgaggagaatgtttgtggagaatatggtccgggcaacattgatctctaatgccggtcttttgctggaatatagggaagtgaagcttttggtggatgccatctaccataccacagatcccttcagccccccccgccagccgcgtggtccgcaatgctggccggagagcccccttttgacggtgtggatacgttgctgtttacccacggtcatccggatcacttttccccggagcgcctgatgcagtaccttcggtatcgtacggtcagacaggtagtgcttcctgttatggagccccagcattgggaaatcctgcagccattcttggaagagcggagaatccagtggactctgcttacagcacggatgcagacggcggactttcaaattccgggagggaccgttattcgaccctattttacccggcatattgataaagccttttggaatatgccgcatggctgctatttgatctccttcggcgaaaaacatgtcttgctgacagctgatgtggattatacaatagaaacctttgaacagatttcgtgtgttcacataaatgcggcgtttgttaatccactctttttcaatgcacttcgaaccggaacatttttaagggcacactgcagccagatcttctctgcgtctatcatatcccttttcaggaggatgaccggtggcaaatttgctcgatgctatcgcacaatttgcaccggtggaatcaagagcaagggaaggttgccatcttgagtgggccgtaccaatatgtggaattttagcggcaggagcgaacattatgaatcatccggtattttacttgaaaacgggttctcagaacccataagaattcgtcctaacgcaccgcgtggagggagactatctaatcctttggcagaatgacaataccatcgtcatcgggcaaaatcaaaatagcgaagaggaaatcaaccgcagctttgtagaagcacatcagattcatgtggttcgaagatctaccggcggaggcgctgtgtatcatgatcttgggaatttaaactattccttcatcaccgatgccggggaggatattaggaaacggcgatggagacaccctaaccggccatccgaaccaccagactgcggtaagaatccggatccttccgcgccgccaacaacacggaattatccacaatattgaactgccaatggaagcagccctgagccgcaaacgcccgtagcagttgctctgcaagacatccatctggcgtggctccgcaggcgttgcccaacccacctgcgcactgacagaataaagtgctggccagaattgccccttggaattttcgaaccgctccaactgatttgcaaacatgtccgtaatttcaacagccagtatgtcaacacggtcaacatcgtttccaaattttggaatacggtttaaaatgaattgccgcagtggctctcgatcccggaagttatccttcagaatccgagcaaactcattcagtgtcaatctttggcctcggtataccaactgccggacggcctccaaagaatccactaccgttgccgtgccgacagcaaccaatccagttgtattatagtgcgctccgccattcgtacagtcacgcccgttggcaacgcaatcgtcccaaaacagactgacaaaaggaagaggcaaaagctccttatgaattccatctgtgatattcgtctcttcaacctgtagggcgatcccctgttggaaatagctgtagaagcgattcatcaattgccgaaaagatttcggctctgcatcgtctgggtggaacatggagacgccagatttcgggtccgttccgtttcccagagtcaactctaaaactttcggcaagttgatatagccgccattgcaccgcgcccaatggccatgcacagagatttcatcacaacctacagcgatatagtcccgtgcctcctgaagaggaatgccgcaggtgctgaatgatgactgcatcattcagcacctgcggcattccatttccacaagcaatgctgccaactgcatgatccaaaaactcctgaggtgtccccgcgtgtagtcgtattgtaaaattgggctgatgcagttggatatgtctgtttgcatttagacagaggtaagacagaagatttgtgcagtcatgaccgccgcggtcaacccctcctacttcaatattctgccctgccacataatagcccgcgttgacctcggccgcgtctctgctgtccacccgcagaatctcgcagaattttagccagagcaggtcaaggagttcttgcgcctgttccaatgtgatcgtgcctgctgccaaatccgctttcagatagggccagcaatactggtccaaccgtccgaggctgatagagaatccgtttgattcgatctgaggaatcaactgcattagccaaaccatctgcaatgcttcatggaaagatgacgcaggctgcgcaggcacgcgggccaggacgcggctaattgcggtcaattccacctttctgcacggatccttctcctgcacggccattttcttctccagtctgcggtagcgctccgcaaaaacaagcacaccgacacaaacctcttcctcggcatcataaaaagccaattttccatcatacgcgggatcagatcggtttagtgtatcccgttgttttctcaccctttccaacattccgttaattccaaattgaagcagttgctgataattcattgccacatgcgcaaaaccgctcccctcatgaggatcagacaacagtccgcagacgtaggcgttctgaattgccgctgttctctgcctcatcaaataatcgtgcggtgtattccctttccaaaacggagcaatttccaacaggctcgcccgtacctctggtctaactcgtagccgattgtacttccgggtttcaaactggtcgatctcatccgtaaaattgatattcacttccggaaatacctccgcagagcgtggacgagaagctgagtgtccaacgatgacctcctggggctgaatgaagattgggagttcttccaatgtcctgcacaaagcctttgctctcagcaaaatcgtgggacatctcccggacaggtttcggtacacctctgtataaataatggctctctgacagcacatttctgg

SEQ ID NO: 4928 - DNA, 549 bp, Unknown
  gut microbiota DNA sequence
gtaaatgagcttaaggataatgaagagctcttcacagaggatacatacaaagagcgtatcatagatttcaagaagcgtcagacggttgtaaaggctctctgccttcacatagcacacgactgcaacctcgcctgcagatattgttttgcagaggagggcgagtatcacggcagacgagctcttatgagctatgagacaggaaaacaggcacttgatttcctgattgccaattcaggcagcagaagaaacttagaggtagacttctttggaggagagcctctcatgaactgggatgtggtgaagcagcttgtggcatatggaagagagcaggagaagcttcatgacaagcatttcaggtttacactcactacaaacggagtgctcttaaatgacgagattatggagttcgccaacaaggagatggataatgtagtccttagtatcgacggacgcaaggaggttcatgaccgcatgagacctttcagaaagggtgccggcagctatgaccttattgttcctaaattccagaagtttgcagagagcagacat

SEQ ID NO: 4929 - DNA, 17373 bp, Unknown
  gut microbiota DNA sequence
cgctgccggtggccacgatggcggcggtttttcgcacccagggacgtagctccagcaggggggtatctccggcggccgctttggcggctgtcagcttctcctccgcgatgatcagggggatcacccgcatccccgccagcttgtcaccttttttgacggctgtaccccccttccgggtggcgatcatcagctcatcgatggcgtttaccgcccgcagggattccgaccggagcaggaacagcccgtcgcaggatgccttcagctcgatcttgccctccttgacgccactccgctccatattctcgttggcacacagggccagcaggcgctccgccccctcatcttcgtggagcatcccaggcgtcatctcccacacgtacaggtgctccttgcccatgccgagcagcaccgggatgtcctccggcgccaccacatggcccttgcggaaccgggcatccttgtactggtccttgatgatctgggtcaggtcgtggcacagcacatggcccaccgcatcctccgtccgtatcagcttcatgcttccgcctccagaatctcgatctcatcgccgggacggaccacgccctcccggaccaccacggcgaagatgccctccgtgggcataacgcacctgcccaccgcctgcttgatggcgcagtcgctgtggcactccttgccgatttgggtcacctccacctccgtctcaccgatccgcagatgggtgcccaccggcaggtgtttcaggtcgatgccctcggtgttgatgttctccgcaaacacccccggatccagtgggatggggcagctcgcccgcatggtgtccacgctctcctccgccagcagggagatctgccggtgccagtccccggcgtgggcgtcccccacgatgccgtggcggaactttagttggatttccgggacggggtgcttctgctcccccttccgctcgctgatgttgaccgataccacgtttgccaacaggctcactccttgatctggtaatctccgctcttgccgccggacttggacagcaggcggatgttttcaatgcgcatgtccttttggactgccttgcacatgtcatagatggtcagcgccgccacggacacggctgtcagggcctccatctccaccccggtaacgccggtgcaggtgacggcggcctggatctccaccatgcaaggggaatcggacagggcgaaggtgatgtcgatacctgtcaggggcagggggtggcacatggggatcagctcccagttgtgcttggccgcctggatgcccgccacctgggctaccgccagcacgtcgccctttttcaaggtgccgtacttgatgttctgcaatgtctccggggccatgtggatctccccggcagccactgcccggcggtgggtgacggccttctccgtcacatccaccatcctggcccggccctgttcattgaaatgggtcaattccgccatggtggtcatcctccgatctgattcatgtttcggggcgtgtcgctggaccgttctgtgagatggtggcgctccggcttgtggaggatgccccgccggacggcgtcctccagcgcctggccgtggaggccccggagggggatctcttcccggctgtggaggcagcccttcagcttgccgtccgccgtcacccgaatccggcggcagtccgcgcagaagtcgtggctcactggggagatgagccctactgtccccagcgcgccgggcagctggtaccgccgggccacgccctgggcctcgatgggttccagctctgccatccggtccagcaccgtttctgcaggcaggaagcggctccgatcccacccggcgcaggggcccatgggcatcagctcgatgaaccgcatctcccagggatgctcccggctgagattcacaaaatcttcgatctcatcgtcgttgaacccgccgatgaggacggtgtcaaattttagattccggaatccagccgcctccgcggctttaatgcccgcaagcacgtcctggagggtccccagccgggtcatggcggcgaaccggtccggccgcagcgtatccaggctgatgttcagccggtccacccccgcatcccgcaggggccttgccagctggggcaggagggagccgttggtagtgaggcacagctccgccaacccggggatggcccgcagcatccggcacaggtccggcaatccccgccgcaccagaggctccccgccggtgaggcggatcttctttaccccgcaccgaaccgccgccgcggcgatctccgccagctcttcgatggagagaatatcgctgtgaagccgcttctccacgccctcgggcggcatacagtattggcaccggtagttgcacaggtccgtgacgctgagccgcaggtagtcgattgtccgtccgcagctgtcccgcataatgtcctccaaccgtgatactcaagtgagataaacgatatactatattataagcgccctgcgggaaaagtcaagaaaaacgccccggccaatgtcggggcgtgagccgaaaagtatcagcagtgagaggccctccaggcggcagccatccgcaccgacagcgtcaagacaatggccagcagaatgagggaggcgatgcctgccataagaatcagagccatcaaggcccacatggaggtcacaggaatttccggtgctgagagcaagtcggcgatgggcgcggtcagcaatcggtacgccaggaattcaatccatagcacgaccagaatcactccattccgcctggtgggaggaaaggagaatgtgcagaaggagcggacagtcccaatcagcagagccagtatcatcagcgattggatccacgctgcaaaggtatagacgggggttccgacttcctcccaagagaacgtgaaaaagaaaagattccagctgatgcgggtgccatagtagcaaaagatgtaaaccgccaagtacgctgcccaggcgcaccacagccccggccgctttcggacgagaaagcagatgatcccgcacactagaaacggaacggccaggatcaggccgacgaggatcccacccagcaccgtagggatcagaaatgccagaaaggccatgcagaagaggatgatcccggcgatcttccgacccggcattgacggagacaccatgaccggaggcgtctccaccttcagttggggctctgctcccgtcaccagttcatccagcgtcacacggaagagctggctcagctttatcagcttgtccaggtccggcacactggaatccgtctcccacttgctgacggactggcggctcacctccagcacttccgccaggtccccctgagacaggcgtttctccgcccgcaggcggctgatgttggttccaaggctcataccgcgccctcctttgtggttccagtatagtgggagagtgggcaaaagtccaccaaggggacctgaaaatttggcaactggcagttgcacactgccaaaagcctgaaaaacaggcagtcccggcggacttgcttgacgaggaaaggaggaggtgctattctatgaaaagaagaacgatagagggagaatgcgccatgaccctttcccagctgctggatatccgtcccggtgtcactgccgtcatcggcggcgggggaaagaccactctcctgcggaccctgggcgaggagctggccggacagcatccggtcctgctgtgcaccaccaccaagattctcccgttttcggacctgccctgcgcccggacagcggcggagctggacgaactgcgcagggcgcatcagctgctgtgtgccgggacagacgaaccgggaacgggtaagctgacggccccagagacgcccatggcggtgctggcggagcaattcgactacattctggtggaggcggacggcgctgcccgccgtcccctgaaggcgcacgccccccacgagccggtgatcccaactgaggccaatcagaccatctgcgtggtgggggcctccggcttcggccgtcccatcgctgcggccgctcaccggccggagcggtacgcgcttcttgcggggatgccggaggcggcggaggccacgccggaggccgaggcgagggtgcttcggtccgaagatctgcacacgaaagtttatgtcaatcaggtggagacgctgtggaatctggcagatgccagggccctggcgcgcctgatggactgtccggttctggccggcagtctgtggaggagggagtattttccatgctggtaatcatccgaggcgccggtgatttggccaccggtattgctcttcggctgaaaagggcgcatatatcggtgattatgaccgatataccggccccaactgccatccggcggaccgtagccttctcccaggccatcgtgctgggagagacaaaggtggaggatgtcaccgcccgccgggtggagacaccggaggcggctatggcccttttgcaagagaatgtagtcccggtgctggcggacccggagggagcctgtatctcgattttgaagccggacgcggtggtggacgccatcctggccaagcggaatctgggcacccggatcaccgatgccccggtggtcatcggcgtggggccgggcttcactgccggggtggactgtcacgcggtggtggagaccatgcggggccacagcctgggccgggtgatccatgcaggcagcgcgctgcccaataccgggatcccggggctcatcggcggctttgccggggaacgagtgctgcgggccccggcggacggcgtgtttcaccagctgctggacattggcgcccaggtgcggcagggggatgtggccgccacggtgaacggcgtgcccatgacctgcaccctggacggcgtcctgcggggtatcctgccggatgataccccggtgcacaaagggatgaaggccggggacatcgacccccgctgcaaggtggagcactgctataccgccagcgacaaggccctggccattggcggcggtgtgctggaggcgattttggacctgacgggagcgctgaaagaccgcgcaggtgggtattccggttaggtgcagcctgtcggggacgatcaaactgaggaaacgggaggaagaatcatgcctgaaaatgatgtcaagctgacgaagctggccaagtgtgccgggtgcggcgccaaagtgggggccggtgtgctggcccagctgctggacggcatccaggtgcatcgggaccccaatctgctggtggggttcgacaagagcgacgacgcctcggtctataaggtcagcgacgatctggccctggtgcagacggtggatttcttcccgcccattgccgacgacccgtacctgttcggacagatcgcggccaccaacgccctctccgatgtgtacgccatgggcggcgagcccaagctgtgcctgaacatcatggccgtgccggagtccatgccgaaagaggcggtgcaccagctgttgcgaggcggctatgacaaggtgtatgaggcgggggcgctcatcaccggcggccacagcatcctggacgacgagcccaagtacggcctggcggtcaccggcttcgtccatccggaccgggtgctgaccaactccggcgcccggccgggggacgtgctgttgctgacgaagcccatcggcattggcgtcctcaccactgcacagaaggcggagatgctgtcggtcgaggggcgggctttggcagaggaactgatgaccaccctgaacaagtccgcccgggacgccatggtgaagtaccgcgtccacgcctgcacggatgtaacgggctttggcctgctgggccacagctatgagatggcccagggcagcgatgtggagctggagctggaggtggacgccatcgacctgattccggaggcgctggagtttgcaaacatgggtctgctgccggcggggatgtaccgtaaccgcgcctttgcggaggcgggcgtggatgcaggggagaccgcgctgtgcagacaggacctgctctatgatccccagaccgctgggggcctcctcatggccgtggacccggcggacgcggaggcgctgtatcgggagctgcagggctgcgtccccagtgcccagcggatcggcgtcgtgaaggcctaccgaggcgggaaacgcatcttcctgcggtgaaagtcgaaaatgggaaacaggtgcctgccggatttctggcaggcacctgttttgcgcccgtaccgggcggaacccttaaacgggcaggcgcaggagcgcggcggcggcctggaagtagatcagcaccgccccggcatccacaatggtagtgatgaggggggaggccatgatggccggatccatgtggagctgcttggcggcaatgggcagcatacagcccaccagcttggccagcaccaccgtggccgccagggacagggagatcaccagggcgatggcgctgtcatggtactgaaggtagatccgcaggccgttggccgcggctaggacggcgctgacgatggcggctaccgccagctccttgcggatcacccgcagcgcgtcccgggggcggatctcttccagagccagcccccggatcaccagcgtggcgctctgggagccgcagtttccgccggtgtccatcagcatgggtagaaaggccaccagcaggggcacggcggagatggcgtcctcgtaccgggtgatgatagagccggtgatggcggcggacagcatcaaaatcagcagccacactacccgatggcgggcgtgctcccaggcggaggcggcgaagtagggcttctcgtccggcgtcaccgccgccatgatggagagatcctctgcggcggcctccgtcaggacatccatggcatcatccacggtgacgatgcccaccatccgctcctctccatccagcaccggcaaggccagcaggtcatatttcgccaggagccgggcggcctcttcccggtctgtgagcgtacccacagataccacatccgtgaccatcaggtccgccacagcggcatcctccgcggctgtcagcaggtccttggccgacaccacgcccagcagctgccggtgctccagcacatagcaggtgtagaccgtctccttgtggattccggtgcggcggatggtatccagcgcctgccggaccgtatcgcccggccggagggagacaaactccggcgtcatgacgctgccggcactgtccgccggatagcgcagcagggcatttaccgccatacggcgctgagggctggcggagcggaggatgcgggtcaccaggttagcgggaagctcctccagaaaatccgccgcgtcgtccagatgcagggcgtcaaaaatctgctgcagctccccgtccgcgaaagagcgggccagggtggcctgagtgggaccggggagataggagaacacatctgccgccaggtccttgggcagcgtgcggaacaccgccgcctgccgggcactgtcctccacggagtccaggagggcggcgatgtccacggcaccgcggccctgccaaagggcgcggagcgcctcgccgtcccggctctccaaaagctgaaagatctgatccttgttgaacatggtcatagtcgttacctcgctttcgtctgtattgtctgggtggctgactggcactttccatggtccgcacctcctttctgcataaaactctatgcgcgctcgcgcgttaggaacatcggctgtgtgaggttttgcgcatcctttccagctgccccgaagggacggggaaatggcgcgtttgaatttttggccgtgcttttccgcagcaaaaaaatccctgccggaaatccggcagggagagctgcacacaatgggcgtcttcgtccaagctttagcttcacggggcgtagcaactgcgttaagcggcgccttgttgtcgacgcggcctgttgaccagctggttgtgtctccacaactgtgcggcagcagtctttggatgattccgaatccccgtggtagcctcacctaccgattcgccgtcattataaccgcctggacggacgtttgtcaaccccgtcgcctcaaaaaatttttcgccatggcctcacagcgccttccggtgctggttcatgatacgggcgaacagcacgccgttggagggcggggtgtatgtaatggcattggctccggcctggatggtgcggaggatcgactcctctgtggggccgccggtggcgatgatgggaaccttcgggaagtcccggcggatctccgccacgatctccggcgtggcggcggcgccggagacattgagaaagtcggctcccgcctccaggcggctgccgatgtccgtgtgagcggagaccaccgtgatgaccacgggaatgtccaccacctttttgatctggcggatgacatcgtcggaggtgggggcattcagcaccacgccgtaggcaccctggtgctcggactggatggccagccggacggagcgggagccggtggtgattccgccgcccacgcccacgaataccggcacgtcggacacgctgatgatggcctgggagatcaccggctggggcgtgaagggatagacggcgatgatggcatccgcgttgatgttcttgatgatggctacatcggtggaaaaggccagggacttgatgcgccggccgaaaatacggatgccgctgcactcgctgacgcaggcggggatggtcagggagtgattgcgcagcgtcccagtgtaggaggggacctgttttgccatagggactcctttctcccggcggcagaacgccgggcacaggtggttgttcacaggcaaattataccgcaggaagccacgcgggacaagcccggatccgggcttgctttttttccggcgggagatatactgttaagagacgagatgtgtcgggacggcacaggggaacaggaggacggctatggatcgcttttccattctggtgggagatatcacccgttcggacgcggaggccattgtcaacgcggccaatcccacgctgctgggcggcgccggggtggacggggccatccacgcggcggcggggccggagctgctggcggagtgccggacgctggggggctgcgagcgggggcgggccaagctgacggcgggctaccgcctgcgggcccggtatgtgatccacacgccaggtcccgtctggcagggcggggagcagggggaggcggccctgctggcctcctgctaccgcagctgcctgcttttggcggaggcccacagcatccgcaccctagacttctgctccatatccacgggagtctacgggtatccgttgccgctggcggccaccgtggccctgcgggccatcatggacttcctggcggaccatgccctgccggagcgggtgcggatggtctgccattcggagcaggcggcggaggtctaccgccggacctggaacctctggtacgcggagggcaaggaccagcggatgtaaagaacgccggagcgggagaggtcccgctccggcgtttgtcactcttcgtttcttttgtcactctttttgacctttttgtatccgttttgacccgatttttcccggggcattccgtatgatagactcaaataagagatgaaagaaaggtatcccatcatgaaacgactggtttcccttctgctgtcctgcctgctgctgagctcctgcggcaccattgtgacccccgccaagaccccgccggagcatttggtgtcagaggcgcccccggctcaggttctccccgctcccggcgagatgccggagctcctcccggacagccaggaggcaggcggggagaatgcttcggagccctccccggaagagggcggcggaactcccgtggagacgctgccggagccccagcgggtggtggatcccacccgccccatggtggccctgacctttgacgatggtccccacgcggtctacacggaccagatcctggatattctggaggagcacggcgcggtggctaccttctttgaggtggcgcggaatctccccaaggcgccggaggcagtccgccgggcggcggacatgggctgcgagatcggcagccactcttaccgccacgcaaacctgggcaagatggatcaggccgcccagcaggcggatcaggccgcggcggacgcgctgtttcaggaggtgctggggaccacgcccgcgctgctgcggccgccctatggctccatgaacaagacgctgaagaccacctccggccggagcatcgtcacttggtccatcgacacggaggactggcgctccaaggacgcggacaaggtggtgaccggcgtggagaacgccgggaatctggacggacaggtgatcctgctccacagcatctacgagagcacggtggcggccacggaggtcctggtgccctggctgctggagcagggctaccagctggtgacggtcagcgagctgatccagctgcgctttggggacgaggtggagcccaaccgcacctataattacgactacttccgcttccaggtgccgcccctgcctgcggagacggcgcccgccgccgcgtgagcggcaggcaaccgacggttgctttacgccgctgccctgctgtgatagactggtcccgaggtgatgggaatggagtttcaagaggtgttcgcccagctgcggcagcggacgggtctgtcccagagcgaggtggcggagcggctgtttgtcacccggcaggcagtgagccgctgggaacggggagagacgatcccggaggtggagacgctccaggcgctgtcaaggctgttcggtgtgtccatcaacaccctgctgggcagtccccggaccctggtctgccagagctgtggaatgccgctgaacgatgacatcctggccaaaaatacggatggcagcttcaatgagcagtactgcatgtggtgctgggatggagagggctttgcccaggactgcaccatggaggagatggtggagcactgcctgccccacatgcccctgggccggacggatccggaggcgtgccgcgcctatatgcggagccttctgcccacactggggcgatggaaagagaactgacacaagcgccggactgcggaaacccgcggtccggcgcctggattttttcaggacagctgcgcaagacagctttcgcacacatagatcccatgggggagctgcctgagagaatccgcagcatggcagcagatgcaggatggttccttcttgcggaggatcaccgcgtgagatgcttcatccagagaaaaagagacgctgtctccttcatccaacaacatagcccggcgcagatcgatgggaatgacgatccgccccaactcatccaattttcgcatatggcctgtttcacatatcattgccccatctccttgcggaagtgatgaaaaaaggatagcacgtcggtcagaaaaagtcaacaaaaacgattattttttagaatataaataaacgtattagattacattcatcccatataataaagcccatgaggtgcatggatatgggaagtggacaggtattcgatttcgggcttcggctccggaaactgcgggaaaataaacacctctctcaggaggagcttgggaaacgcgtcggcgtcaccaaaggaagtatttatcgctacgaaaacaatgttcaatccccatctctggagacagcgagaaagctggcggtggtactggggacaacactggacaatctggccggtctggaggatggagtcgtcatccggcttcccaatctgtccgaagcggaagaagctgccctgcgtgagtttatccgtcgattcatttcctgagacgttgacaacggacctttgcggttgtgtattcggctgccgtgaacagaggccgggttcccgaaactgataatataaggcgaaagccgctgcatcaaccgatgcagcggctctttttacgcctttgccagatacgccccgcaggccttctgggcgtcggcggcggttttttcctcgtcgatggtgacgagatgcccctccttcaccacgacccggccgttcaccaccgtgcagtccaccgggccgcggaggcccaccgtggccagcacgtcggcgggactgtacgcgccgcccaccagctccagccggcagaaatccaccaggaagaagtccgcgcacttgcccacggccagctgcccgatgtcctcccggcccagcagccgggcgctgccccgggtggccatcttcagcacctgatacccggagggggccttctcgctggaggtcagccggtggagcaggtagcacacccgcagctcttccatcagggacgacccgtcgttgctggcggagccgtccaccgccaatcccaccgggacgtccagcgccagcatctccggcacccgggccacgccggaagccaacttcatgttgctgatggggcagtgggccacgccggtgccggtgcgggccagctcccgcagctcctcgtcgttgaaatggatgccgtgggcgtaccacacatccgggcctgtccagcccagagatgccatgtactccagtggccggacgccgtagtgctccaaggtgtagtgctcctcgtccctcgtctcacacaggtgggtgtggagccggacgccgtactgccgggccaggatggcgctctgccgcagcagctctccgctgacggagaagggggagcagggggccagggccacctgccgcatggacccgaaggacggatcgtggtacgcctcgatgacccgggcggagtccttcataatggcgtccaccgtctggaccacgctgtccggcggcaggccgccgtccttgcgggagaggtccatgctgccccgggaggcgaacatccgcatccccagctcctccgcggcggcgaactgggcgccgatcaggtctccgcatccggcgggaaagacatagtggtggtcaaagcaggtggtgcagccgtgcttcagcagctcccccatgccggtgagggagctgaggcgcaccacctgctcgtccaggcccttccagatctcatacagggcggtgagccagtcgaacagctccagattctgcacctggggcaggttccgggagaacacctgatacaggtggtggtgggtgttgatgaggccgggatagcaccagtaatgggacccgtcgatcacagtgtctgcggtctggggcaggtctgggcccagaccgcggatgatgccgttttcgcaatagaggtcggcgtgctccagcacggcgtcgccgtcatcacaggtgaggatggtccgcagattgcgcagcagcaaagaggacatggcggtcacgctcctttctgctcccagtataaaggacggcgggagaaaggtcaactttcccgggaaaacttcttgcggaaacggggaggatgtgatacgctgagagcaatttcggatcaccgggaggaacacggttatgctggacatctttgatattctgggccctgtgatggtgggcccctccagctcccatacagcgggggcggtgcggatcggccgcatggccaggaccctgctgggggcggaagtggcgcgggcggacatcggcctccacggctcctttgccgataccggccgaggccacggcacggaccgggcgctggtggcgggcctcctggggatgaagccggacgatctgggcattcctcagagctttgagatcgccgccaaccaggggttggaattccacttccacacggcccgtctgcgggatgcccaccccaacacggcggtgctgacggtggagagtgccgacgggcggaagctggagctgcaggcggcctccaccggcggcggccgcatccgggtggatcggctggatggagtggaggtgagcttcaccggcatcttcaacaccctggtggtccgccaccaggacgtggccggagagctgtcccggattctcaatgagctctccgtcagcggggtgaacatcgccaacatgagcctgaaccgggaccgccggggcggcgctgccctgacggtggtggagacggaccagaagatcccggcggatgccctggagcgtatccaggcgctctacggcgtcttgggcgccacctactacgagaaggaggaagactgaaatggctctggattccatgcaggagatcttcgacaagatccaggcggggcggaagcccttctggcaggtggtgcgggatacggacgtggaggagcggcaggtgacggcggaggcctcctttgagaagatgcacgccacctggcgggccatggtggagtccgtggacacctaccgggcggaccggcgcagcgtcagcggcctggtggggggcgacgcccagaggatgtgggactacgccgcccagcaggagacgctctgcggcccctatctgcaggaggtgatcgctacggccctgtgcgtggcggagtccaacgcctgcatgcaccggatcgtggcggcacccacggcgggggcctgcggcgtgctgccggctgtgctggtgccgctgtaccgccggggcgctgtagatgaggaggccatcgtccgggcgctgtatgtggctgccggtatcggcgcggtggttggctaccgggcgtccatctccggcgcctccggcggctgccaggcggaggtaggcacggctgcggccatggcggcgggggccctggtggacctgcggggcggcgggccggagcagatcggccacgccgtggcgatggcgctgaagaacctgatgggcctggtgtgcgatccggtggcgggactggtggaggtcccctgcgtcaagcgaaacgtcatcggcgcggtgaatgccgtcagcgcggcggacatggccctggcgggcattgagagccgggtgcctgtggaccaggtgatcgactgcatgggcgacgtgggccgccggctgccggtagagctgcgggagaccgctctgggcggtctcgccgccacaccattcggacagagcgtgaaggcaaagcgggaagagcgccgctcccaggaacaggagctgtgaggacgaaagaaggacctgccctgcggcaggtccttctttttgcgaaagggaagatcaggcgttccggctggccaggactttctggaaccagtccttgccgtctacaaagcgggagaccaaaaagctcaccacatagtcgccggcggagttgatcatggtagcggggggatccaccaggtttccgatggtgatggcgatgggataggcgatggccagctggtccgggaagaacacggagcacatgatgaactcgccgatgtagccgccgccggggacgccggacatgcccacggaggacagcacggccacaatcaccatcagtgccatgtcgccgatgctgtcaaagggccggccgaacacgccgaagaggaacgtgatcttcagaatgcaagagaagcaggagccatccatgtgcatggtggcgcccagaggaaccacgatctcgctgacatccttggagataccggtggcctccgcctcttccatgttggtggggatggtggccacggaggagcaggtgcccagggaagtgatggcaggtttggcgatgtgccggaacatttccttgaccgctcccttgccgccgccgaaccaggcgaacaaggggaaggccacaaaaatataaatgaagcagaggggatagtacaccaccagagcccgggcatagtccgtagcgatctgggagccgtaggtggccaccaggttggcgaagaagccgaagaaggcgatgggggcgtagtaggtgactagctgaacgaccttcatcatagcttcggacaggctggtgaggaatcttgcaatcaggctgtcaggacccggccccagatttacgccgaagccgaacagaatggagaagacgatcaggggcagcatggcgctgcggctgagcaggccggagaagtcgctcaccgtgaagaagttcacgatcaggtccgggatggagatgggatcctccaccacgccctcagtcaggttggtccagggctccagaaccggggggaagatcttcataatgacgatcatgatgaccgcagcgatggcgccggtgatgacgaaggtcagcacggtggtgcccatgatcttgccggcccgtttgcggctcttcatggtagccacagacccggcaatggacgaaaacaccatgggcaccacgatgcagaacatcatattcaggaacagggtgcccagaggttccagcaccgtggcgccggcgctgatgacgttgccctccgcatccagctcctgggggaagatccagcccacgatggagcccaggatcatggcccccagcatgacggccagaaatgcgtagttccgggcaacagactttttgctcagctgtgtactcattctctctcctccaatacatattgaaatagctgctgacctatatggccttccggccttacattataataaggtcctcatccgtaacttcacccctgcacaccacgttggtggggcctgtcagataaaggctggcgatatgggagtggacccgctccgcatcgatcaccaagcggccgccggtcatatccacctgtacgccgtggccggagactttgccctgcagagtcagcacggtcaccacagatccggtgccagtgccgcaggcataggtgaagtcctccacgccgcgttcaaatgtccgctcgaaaatcagatcttcaccggtgatctcgtagaagttcacattggcacccttgggaaagaccttgttccagcgaatagcccggcccagctcccgcagctcgttttcgtccgcctggcgcagtccggcgtatggcaccacggcgtgggggatgccgggatttcccagctccacataggagcagacgtatgtcacgccgtctgcctccaccgggctatccagtcgtacggtggtggggtcgttcagccggatgcggtacagccgctggtcgatccgccggccggtgacgatgcctgccgtggtctccacagtctgcgtctctccggccagcccgttttcgtagccataccggcagatgcagcgggcaccgttcccacacatctcacctacgctgccatcagaattatagaacagcatccgataatctccgccctgggagggggcatccacaaccatcaacccgtccgccccgatggacatgtgccgttcacacagcgtccgggcgatttgtggcagctgctccagggggaggtgctcctccaggttgttcagaatcacaaagtcatttcccgcgccgttcattttccaaaatctcaagtttccacctccttcttgtatatacattattataacagcgagaactgagaatgaaaagcagagaatgtgcggaaaaccatgcagaacctgcgaaatccacgtcagtgggaagacggtcgaaaaaaatcgagaaaagaggaaaaaggtattgacaaaaggggaaggatttggtattctaacaaagctgtcggcgcggtgatgagccgggcc

SEQ ID NO: 4930 - DNA, 49393 bp, Unknown
  gut microbiota DNA sequence
gcccgcttgtcagcgggccggctttgtggtattctttattttgtttgaaggaatctgcggtccatcccggggcggtccgctccccgatgcccggatttggcggaggtgtttatggtcgaattgctgctgattttagcggcagccgctgctgcggcagctgccctggccgggcttggatacctgctggtctggttcctgctccacggccggcgggatggtcctggctgggaaaagctggagggctttcggtacgcccaccggggcctccacggccccggcgtgccggagaactccctggcggccttccgccgggcggcggaggccggatacggcgccgaactggatgtccatctgacccgggatggacgcctggtggtgatccacgacggggatttggagcggatgtgcggcgttcccggccgggtggcggaaaaaaccgcggaggagcttgccgctctccggctggcaggctcagaggaacacatccctcttctggaggaggtgctccccctgtttgccggacgggcgccgctggtggtggagctgaagaccgaccggcacggcgccgcggcgctggcccgggatacggtggattgcctggaccgcttctccatagactactgtgtggagagctttgacccccggccgctgcggtggctgcgccgccaccggccgtcggtgctgcggggccagctgtcccaggatttccaccgccatccatccggccagggtccctggaaccgcttggcgctgacgaatctcttctacaatgcattcacccggccggattttgtggcctaccggttcggagaccgggaaaagccggcagtgcggctgtgccgcaaatttgggatgcggatggcctactggaccctccgctcccgggccgatgtggcccttgccgagcaagagggcgccctgccgatttttgaagaaccggaccgaccgaaggaggtaacccattgaagtcgacaaagaaagaaaagaagcagtataaaaaggcatttcaggaggccatggcacgggagctgcgggaacacaaaagctccttcatcgtcttttccatcctgcggattttggtgctggtggtgctggtgcggcagatcatgctggccaactacgagggcgccttcttctgcattctcacgcttctgctgctctacgtgcccagctggatccaggtgaagctgcggatcgagctgccgccgcccctggagatcaccattttctgcttcatctttgcggcagaaattctgggtgaggtcaacgccttttatgtcgtgatccccggatgggacaccatgctccacaccatcaacggcttcctggccgcggcggtaggcttctccatggtgatgctgctgaacgacgatgaccggatcaccttccatctgtccccggcgttcctggccctggtggccttctgcttctccatgactatcggggtcctgtgggagttctttgaattcggcatggacttcttcctgggcacggacatgcagaaagacacggtcatccacgccatccactccgtctccctggatcccacgctctccaacaaggtggtgacgattccggatatccaggacgtggtcatcaacggagagagcctgggactgggcggctacctggatattggcatcatcgacaccatgaaggacctatttgtgaatttcatcggtgccgttgtgttctccctctccggcttcttcttcgcccgcagcaagggccgccggaagagcgccgcccagggctttgtccccagcaaaaagaccgcggagcaggactatctccagcaggcgctggaagaggcggatcaaaaggacgcggacgcccccactccggatggccccccggcgccgggagaaccggagggtgcctgagcgccccacacagacagaaaaccaccggccgaagccggtggtttttcgcagcagcggccggcagatgccggccgctgctttttgatgtgacagggttcagtcgtccagctcctgctctgccttgacaattgcgccggaggaggcgtcgatctcatagctgtactccgtccggcccacatggaactccacctcatacaaggtccggccgtcatcccggtccaactccacctggatgcgggaggcgtcgctctcactgacgccggcgtgggtcaaggcagcggattttgcagccgcctcgccaatgtgggggccggagctgccggatgctgggacactgtggctctcccgctcgcttttcagcacggcgccggtatagaggtcgatctcatactgatactccgtggtgcccgccaggaactccacctcgtagcactccgcccgcccgtcgtcgtgctccacccagcagcggagatagatggtgtccgcttcgctgacgcctgcgtgggtcagggcggcggcagtggcggccgcctcgccgatgtaggagccggagctgccggttgttccgccggagatgccgccctcccgggagaaattcaccacctcaccggtgcgggcattgatgtcgtaatcatactctgtgccgccggcatagaactccacctcgtagaccatcaggccgtcctcgctgtcgaactcgatctccagctgggccacgctgctctcggcgatgcccgcatgagccagggcggcattttgggcctcctctgccgtgatataggcctttgtgctggcggtgcccgtctgggtgacggcctgggtggtcagatgccgggactcggcgatcaaggcgatctcattcaccgacaggggtgccagggacgcaaaggtcagtgtgctgtcctgagcgatcacctcctggatcagggatgccttgcctacggagatgccgtactgctgggccagagcattcagatccgcgctctccgtcactgtctggctgaggacagccccctccagggaaccgccctggaagacgctgttgatggtatccgtcaggtgctgctggagctgggcggattttgcggcgtcctggttctccacggacaccaggatggcgttctggatatcgctgagataaccgttttggagcatggagccgatgagggcgttcactgccacgtccaggtccgtgccggtcagatccatgtcgcccaggataacctctgcgtcctggttgaagggggtgacggagagcacccgctccttggagctgacggtcatggacaggctggggttcacatccagcatcaccacggagtccacggcgttggctccccgccagctgctgatgccgaaagcaccacagcacatgaccaccagggcggcagccactgccaggggcgcccagcggcgcttctttttcggagcctcaaaagggaggacagttcccgcttgcgggccgcaggcggccaggatgcggtccagcggatcaggagcggcgtgctccacggcggtccgcaggcgctgttccagttcacgttcgtccaagtcagtctgcctccttccatgcgagttggagctttttcaaagcccggctgtatttggagagaaccgtggggagcggcaggcccagcagagcggcgatctcccggtgccgcaggcctgtcagcgcgtggagggtgacgatctgccgctcttcgtcactcagggcggagagcacggcctccagcatcatccggtcctcatgggtcacggcgggattgtccgccagacggtcctgccagtcctcctgaaccaggggttccgtccgcccgtgctcccgcaggcggctgatggccagattccgggtgatggtcagcacccaggccataggcttgccctgcctgcggtatccgccggcagcgttccacacctgcaaacaggcgtcgtggagaatatcctctgcgtcgtgggcgtttttgacgattgacagggcaaagccgtagacggcaggacgggtgcggctgtacaaatccgccagagcgtccttgtctcccccggcgatgcgggcgatacagtcctccagggcggcatccgcgtctgggtccggctctgccacggtcatgcagaatatcatggggcttcctcctgttcacacagacaacgcgccggcggcgcgtttgattgcactgcggccgaagcatcaccggccgcgcccccatgatagcacatcctgcagaggtttccaaccccgggccgaaattttccggaagggcagctgctccgccggatcagggcagcatccggtccgccgccgtgatggggcggatggggcggcaggggacgcccgcagccaggactccggcagggatgtccttcgtcaccacgctgccggaggcgatgaccgccccgtctccgatggagacgccgggcatcacgcggacgccgccgccgatccagacgccgctgcccacacggatgggataggcgtactccagcccctgggcccgctttgccgcgtccaaggggtggccggaggtgtagaatccacactgggggccgaccagcacgttgtctccaaaggtcacgccgccggcgtccagaatgacgccgccgtggttcatgtagaagttccggcccacactgatattccagccgtagtcgcaccagaagggcggctcaatccgcagtccttccccagcggcgcccagcagccggcgcagcagcatctgggcggattcgatgccctccgcctgataggcccgctgattgaactgctggcactgagtcttgcaggcagccagctccgccagcagggtctcatcacgggcgggtgcgtacagcattccccgcagcatcttctccttttccgtcatagggtgattcctcctgtacaggcggccccagggccgcagttcactctgccattatacagaaggcgccctccgggtgcaagagccgccgtcggttcagccccggggatactggctgctgacgctctccagctctgtgacggagccgaagccgctgatttcgatgtcgtaccacgtgtccccgttgatgatttcgtagctgtactcattccaaaggccctcactactgacctcctgtgagacgatctccccgccgccgacggtatccagcgcgatctgttgagcctccgcactgtccacccgcagcgccagcacggcggccacggccgcgacggccagtaccgcagctgcacccacgatcatggcgacgatcttcttcacagacatgtttttcataaaaagctcctcctgcttgttgtttcggattcatggttcctgtttgtgtcttctgccctgataacgcgcagacaacggcttttattgcatggcgggcgaaattttttcttgacaggatcgcctaaagccgccactgtgagaggcagaaaggaggtgaatttgatgaaatataaaaaatttggaaatatcagccctatcgaaccagtcggcgggagcaagactatcaacaggttcaggaatttctgaaaagcggcgatcccgaactttggaaggcgctttatgagagtgcctatgaaattgtataccagtgcgcgtacgggatggatttttgccgcgtgctgggacctgatgattactgtgagattgccgatgaggcgtttgccctctgttatgaacagctggaccgatatcaggggctcagccagttctccggctgggtaggcgggtacagcaaaaacattacccgcacccgctgtcggcaggtgttgaccggcctacggtatcgccggcagctctatgaagtctccaccggacggatgcgggattgggatcccctgtggatcctgattcgtctagagcggtactattgtctctggaaagccatctccgacatctctgaaacaagccagcggattctggaggctcggattttggaaaagctgtcgctgcgggccattgcgcaggaattaaatctgacacagcgtgaggtaaaaacgcgatatgaagccgcgtgcaatgtggtccggacgcgcttcctgcgctattgcacggagaaagtagagttttaaagtgcaggaatcccaactattcatgccgaaaggagtgcaccaaatatgcacaacgataaaaaagcgtatcaagttgatcggacgccgacagaattgctcagcgatctgctcgtccagttaaaatttttaaggcaggaatgcctccattacgatgcaggagactggtcttacggtgcgcagattgcgaccaagctccggcttttgctccaccagacaaaatattctgattccctgctggcccaaattacaaagcgttttgcattcagctgtccggattttctcagtctgagcaccgtgcggggcgagctgcccaataaagggaggaccgattttgtccgctccccgctcattcagtaccagatgattcaccagccagaagtccctccggttctgacggtgcagcccctgtctctggaacccggaaagcgatatgccaaacgggcattcaagacctggtggaatgggattgacattctcctgattgaccggcagcactttttgaaccgtaagggcgtagtgtgtctgctggcaaaccaggagggcggcgcccatgtccagcccggcatggacgaaaaggcggctatgttacgccggggagcggcaaattccctgcagattgccgccccgctgccggacgggctgacgcggatatataccgccgaaatcgaccaggtactggcagccgttgtgcgcaccattgcggcggagacactgtatacatttgagcatgcaatcctgccccgctgccaaatcgccctttctgcagatgaaaaagactgaagcgggtccgggagccgcgccccggcggcgttgacttttccgctgctttccggtatgcttttgctatcctgatacaaagggggcgccgcgcatgccggacctcacttccctgttcacagacacgctggccaagttctccttccgggcggtcctctccgccgctgccacgctgctgatctgcctggtggccgtccacctgctgggcaagctgctgcggcggctgctggctaggacgaagctggacgagcgcatccagaaatacctgctggccggggtgaagctgatcctctatatcgtcacggtgctgatcgtggcggagagcctgaacattcccatgacctccctggtggcgctgctgtccgtggggtccctgggcgtcaccctagcggcggaggacatcctgggcaatgtggccggcgggctggtgatcctctctgcccaccccttctccatcggggactatgtagaggtcggcggcgtggccggcacggtccatgagatcagtctgaaccacaccaagctggtgaccccggatgggcatttggtgatgctccccaacaaggagctggcctcctcccagatgaccaactacaccgtattggggcggcggcgggtggtgcagcgggtgaccgcctcctacgacgcccccacggagacggtgaaggccgcctgccggcgcgctctggagcagacggaaaacctgctggaggacccggctcccaccgtctacctcaccgcatacaaggagagctctatcgagtacacagtctactgctgggctacgccggagaactggtggggcgcgtatctggctctgggggagcacctgcgggacgccttccgggagtacggcgtggagatgacctacaaccacctgaatgtccacatcatagaaaaccaaagctgaccgcgggaggcgctccaggcgcctctgtatacagcgacgcccggtccgggaaatcccggaccgggcgccgtcttttggggtaaatgccgcggaatgccctgcatgggacacggatgtggtgggtctccccgctcatgcggttgacttccgcccgcagcgccatcttatcccgctgcgaacgagatggccggcgctcaatacctgcccgcccagtccgccagcagcaacaccggcagcgcccacagcagcaggaacaccagcagggccagaggcgtcagcagattataggcgccttggaacaccatataaaaggacagcagcgtcccggccacgctgcccagcacggacagcgccgtggcccggcgcacagccttgcacaggcggcggctgcctaccaccgcttccgcatagggcagcagtccttcccgaaacagcagggcccggggcatcccccggtccagctccgcctcactgaaagccacccggtccgtcagactggggaactccaccttcacgcccttgtgaaacttccgcttcagcagggccggggtgatgttgggatcccgggacgccaggatcggcgtgatgcggctgcggcgcatcatccgcagggcgaaatccacgttctccgagggctggtacttcacggcaaacactgccgccagctgccggtccatggccaggaagatgccggtccgcaggttgatgccgccgggcaggcgcacctccatcttccgcatgaaggaggccgtgcccagcaataccgactccccccggatggtggcggagtagccgccctcctcataaaagctgaaatcgtccactttctcataatggccgccctcgctgcggagcaggccgtcaaacaaccgctgaaggccgcagtccgccgcccgggccatagaggcggcataggaggaaacccgggacaggtcctccccgaacacctttacgccgttgagctggatcgtacccggcgggaacaggtctccgtccgtcaggatcatggcccgcctgcggctgatcttctccgcaccgcaccagcccgccacggcgcaccccgccttgtgaaagtgccgggccagccgggagaagggcatcccccagcacagaggcagggcaaaggtggtgcctgcccccaggatggcagaccagttcagcaaaaagtcgtccccccgttcctggcccagggagctgagcccggcaaacacgatggaggccatcagcaccaccggcatcagcgcgttctgccacacggcggcggtattctcccgcagggcggtggtgtagaagccggggacggaacccgcctgcttgcaggcccccttctccgtctccgtcaccagataaggcggctcgtcatccgtggcggccatgcggaaggtgtcccacagtccccggctctcccgggctccgccccacatggcaaacaccagggcgaggcaccccaccggggcatagcaggggacggcgctccgctccggcagcaccagccgggccacacagtccgccgccatcaccagggcggagaccaccgccagcagctcgctggtgcagcgcttctgcagcagcgagccgaacgccttggcgaatacctgccgggccaggacggccaccgccgcaaggcacgccagcagcacaccgctctggacagctgcgtcgccggtccagtagcggatctcatagccgtaggcctcgatccccatggggatcaccggcagcagcgagatcagtaccgctgccaggatggggtgcttgcgccgcttggcctccgcccggtagtccgccgccgcctcggccagctccggctccggaccgatggtgtcgatctccgggatctcctccggcgcctcctccggttccggcggggcgtagagctcctctgtctccatcaggcgcttccgggagaacaggccccgccggggccgcagcaggggctcctgagcctcctcttccatcaccgcgtccacggtgctgcccaccacatcctccagcgtgatggggtggggagagggcggcagatcctgccgcagctcctccagcaggtcctccggctgggcgggcggcttttggggcggagctgttttttccgtcacctggggggcgggacgcggccgcgcctccgtttgcagaggcggcttcttcgcgccgccctccgccggaggggcggccggctccgtctcccggcgggcctcctgctccacggcctccataagccgctgctcccggcctgcgccgtattccgccaggatctcctccagggagaagtcctcctccaacgccgggacatccgtgcccccggtcagaccgctatcaaactctctctcgtctttggaagccatgctgcccctttcctctccgctgtgtccccggcccttcaggccatccgctggcgcaccgcctcatacagcaggatcgccgcggcggcagaggcattcagggaattcagcttcccccgcatggggatactcaccaaaaagtcgcagttctcggcggccagacgggtcatgccgtccccctcgctgccgatgacgatggcggcgggtcccttcagatccgcgtcgtacagggccgtggtgccgtccgccgccgtgccgaagacccacaccccctgttttttcagatccttcagcagagcggggatgttgggcacccgggccaccggcacgtgggccaccgctccggcggaggtcttggccaccacggcggtgaggcccgcgctgcggcgcttggggatcaccacgccgtgagccccggcgcactcagcggtccggatgatggcccccaggttgtgggggtcggagatctcgtcgcacaccaccagcagggggggctcgcccttgtcccgggcggcctgaaggatgctctccacactgacgtactcccggaccgctgccagggcgatgacgccctggtgggcatgggtgcggctcatggcgtccagcttccgccggtccgcctccaccaccaccacgcccgccgcccgggctttggaggcaatatgtcccagggtcttgtccgtctctcccttctggaggtaaattttgtcaatcgtctcccctgcccgcagggcctcaatgacggcgttgcgcccctcgatgatgccgtcggcctcggcagtcaggtcctgctttctccgttcttccataacttctccctcaatctgagtattttcgcattcaagaggtagtatagcataggggcgggagtctggaaagtggaattcacagaaaatttatagaaaaccggttccttgtccttgtaggcctgcggcttctgtgatatactttataaatcattttaaggcttcggcactgtctgaaaacagggctggacgcccccgggcagcggaccgcacccccgtctccggcacaggcgggaccggggcggtcccgtttatcctccgggtattgacaggttttcccctgaaaggagttccatacatgaacccaaacgacaataagaacaacaaaaacaacaagcccggcggcaactggcggggcgtggcctctctggtgggctgggcccttctgctgacgatcatcttcagctatgccagcagcgtcatcggcagcactggccgccaggcctcctccatcaacgtggaatacggagagttccaggagatggtggagagcggccaggtggcccgggtggaattcgacaacgcggaggatatcctcctgataacccctgaggaggggtattcctacaccgctgaggacggcaccgtctacaccaagacggaggacggctacacttatatggacgccgccgggcaggagcagactgcccacctggagctgttcactgtccggatccagtccaatgacgccgtcattgatttcctgaacgagtatggggtggagggcgtcgacaaggagtatcaggccccggtgaacccggtgctggccatgctggtgagctacgtgttgccctttgtgctgatcttcctgatgttctccctggtcatgcgttggatggcgaaaaagggcggcatgggaggaatgggcggcatcggcggcgtgggcaaggccaacgccaaggtgtatatggagaagtccaccggcgtcaccttcaaggatgtggccggccaggacgaggccaaggagtccctgacagagatcatcgacttcctgcacaacccccagaagtacacggagatcggcgcgaagctccccaagggcgcgctgctggtcggccctccgggcaccggcaagacgctgctggccaaggctgtggccggcgaagccaacgtcccgtttttctccatctccggctccgacttcgtggagatgttcgtgggcgtgggcgccagccgcgtccgggacctctttaaggaggcggccaaggtggccccctgcatcgtgttcatcgacgagatcgacaccatcggcaaatcccgggacaaccgcatgggcggcaacgacgagcgggagcagacattgaaccagctgctggcggagatggacggctttgaccccaccaagggcatcattctgctggccgccaccaaccggcctgaggtgctggaccaggcgctgctgcggcccggccggtttgaccggcgcatcaccatcgaccggcccaacctggcgggacgcattgccacgctgcaggtccacacccgcaacatcaagctggcggaggacgtgaatctgaaaaaggtggccctggccactgcgggctgcgtgggcgcggaccttgccaatctggtgaacgaagcggccctgcgggccgtgcggaagggccgcaagctggtgacccaggaggatcttctggccgccttcgagctggtcattgccggcacggagaagaagggcagcgtcctcaccgagtttgagaaaaagctggtggcctaccacgaggtcggtcacgccatggtggcctacaagcagaaaaacaccgagccggtgcagaagatcaccatcgtcccccacacccagggctctctgggctacaccctgctgatgccagaggaggacaagaccgaactgcgcacccgcgacgagctgatggccaagatcatggtctccatgggcggccgggcggccgaggaagtggtgatgaacaccatgaccaacggcgccagccaggatattcaggacgccaccaacgtggcccggaacatggtggccatgttcggcatgagcgacgagttcggcatgatggcgctggcctcccgccggaaccaatacctggacggcggctacggcatggactgcgcccaggataccgccgcccggatggaccaggcggtgaaggacatcctggaccagtgctaccagcaggccgtggaggtcatcaaagccagccgggaggacatggacaaggtcgtggcctacctgctggagaaggagaccatcaccggcgcagagatggtggctatcatcgagggccgggacccggaactggtggagaacccctacgcctccacccgcgcagaggacaaggcgttccgcccctcctctcccgagaccattgaggcccctgccaagaaggtgcacatgatctcccagaagatcgaatcccccgaggagcccgcccaggagggacagccggagaacccggtgtccgatccctccccttccggcggagacgccccccaggagagcggttccactccggctgagccgcccaaggacaccccgtgatccccgatcatccccgcgaggcgcgctgaccccagcgcgcctcgcttttcccatcgccactacatcaaaaaggagaatcgccatgatccgactcgccacccccgcggacctgtctcaggccgcagatatctatgaggagatcctggaccgagaggcacagggccccgtctataccaactggcagcggggcaaataccccaccatcgacaccgcccgccaggccctggaggccggcaccttctacgtgggcgaggagaacggcgtcctctggggcgtagtgaacctgaacagcgtccagctgccggagtacggcgccatcccctggaccatccccgccgctgcggaggaggtaggggtgatccataccctgtgcatccgtccctcctgctccggccggggatatgcccgacagatggtggccttctgtgaggcggaggctcgccgccagggccgtaccgtcatccggctggacacctgggaggggaacctgcccgccaaccgcctgtacccctccctgggctaccgctacgccggaacggcggagttcttcttcatgggctttgtgcgggagaatctcaactgctacgaaaaggccctctgaatccattgagacgcaagggcttttctcctctgctaaccgtgggttgacagatttccactccccagttggtggcctgagggcaggctgtctgctagtctgacggcgaaaggaggcgagggatgtgaccattgggcagcgcatcgcgcagaagcggaaggagctggggctgtcccaggaggctctggggagcaagctgggcgtctcccgccagtccatctacaaatgggaggcagactccgccctgccggaggtcgacaagctgatcgccctcagccgcctgttcggcgtctctgtgggatggctgctgggcgtggaggaaccgccggaggcggatgccgctcctgctgaaacaggcggcgggctgacagaggcccagctgaagatggtggaggagatcgcaggccgctacattgccgcccagccgtcgccccggaagcgccgccgctggccttgggtgttggcggcagcggcgctgtgcctggtgctgttccacctcttcgaccgtctggaccgaatgaacggccagtatgtaaatctgcagaacagcctctaccgggtggagtccagtgtgtacggccagatcggctccctctccaaccgggtggaggagatcttgaaggcccagaacagcctggtggcggactgcggtgtggagctggaagccgtggaccttgccgccaacaccgtcaccttctccgcctatgctgtccccaagacctatgtggagggaatggctgtggagttcctggcggaaaacggcgagactgccagcgaccggctgggcagtgtgggagaagagggccccaaccaacggttctccgccacactctccatccccttgacggaccatatcaccctctcggcgctgctggtcccgccggacggcacccgccagacccagctgttggaccagtttgaggggctgtacagcgcctctctgccgcaagtggaggtcaacagcgatctcatgtggatggatctggaggacagcacgctggtcctgaatgcgtccagccacgagcgctatgtttatatccgtgaggtgacaccggctgatgcgtctctcaccgcggccgtggcaaatatccgggtgggcctgttcaaaaatcagaaactggcagcctgggcagagccctgtgaaaagcctgacagcttccacggctttgaagaatttgatttttaccagctgccggagctgcgcctctccctcacgcctgcggatacggtacaggtggctgccgtggtgacggatatctatggacgggtcacggtctcccaggatgtgccctacattctcgatgagagcggagatgcgctgacttggccagacagcagtgagacagatcccgatcccgcccactggcagtacggcggatgaccgccgcgcaaattgtttccggattttgaacattttgtgaatgaaatcatccgtttttgaccagtctgtaaacaaagtatgaagctttcccccaggctgttgactttcccggctgggggcagtatgatgagcacaacaagcaggaagcttgtgacacacatcattttccctctcctttctctatatcatacagacgccggggcggtccgaaaggaccgccccggcgccgtttttctgctgtccctgcccgattattgctttttcatttttatcgaaaaacaataaaaaataattgacaaacaataactacacgtggtacgatacggaaaaaggggggaattcctatgccgtccagccgtctctggcgtgttctgctggcgctgctgcttctggcggccctgttctgcgttcccagtctggtgctgacaggcagcgaatggctgccggagctgacaggcgcggtggagaactatgtgcccttctggaaggggctgcttcggttcctgattttctgtgcctggtgctgggtgtggctctggacagagggttccgcgctccagatcctgctggcgcttctcctgcagttctgcggcatctgggccttgtgcctgctgcgtccccgtccggccagccgggcccattctcacgcataaggaggaaagcgaccatgtccaacagtactgtgcaaatactcgcccgggtgctccgggtactgctgatcttcgccctactgctcaacgtcctggctctgctgctggttcccgcctccgtcatggtcaacgcggaaaacctcttcggcggcgccggcacctttctgcatgacctgttccacccggaggcggacgatgtgaccgccgcaggcgtatccgcgatttttctctcctgggtctggatatggggcgagggcgccaacgccctaatcgccctgttcttggtgatctgcggcatctgcaccgcgctgattctcctccaggggctccgggtgctgggcaccatcctccagggtgcgccgttttccacgcagaatgccgtcagcctccgacgggcggctgtatgttccttctgcatcgcgggagcggcattgctccggacgatctgggggctgtggttttaccagtccctccgccccctggccacctacaacgcgctctttgtgccgatcttcaccatgttcggcctgctgtgcctggtgatgtccgccctgttccgccaggcgacggagatgaaagtggaaaacgacctgaccatttaggaggaggcccacgccatggttcgtactgctgtccaaaaaatcgcggatgtgttgatttttctctgcggtttcctcatcttttgcgacattctgctgcttcccctgacaccggccctggcctacttccgctttcagaatccggcgtccatgcgcttcgaccacctcctggctgttttcgcctacgactttgacgacggggtgggaaatttgctggaaattattttgaaagaggcctggaagtccccggagaccgcggtcctggctctattcctgcttttggcgggcatctgcggcgcagtgatcctggtccagggcatccgtctgctggcctctgtggcggacggcacgccgttctccccgaagaacgccgtctatctccagcgggccgccgcaggctgctttgtgatcgccgccggcgccctggggcggaccgccttcaccctctgccgggatggcgccgccgcattgctgtcctacaccgctttgttcatccccctcttcaccatggcgggccttctgtgcctggtgatggccgggctgtttcaccgggcagcggagatgaaggcggaaaacgacctgacgatttgaggtgacggcatgattgtagtcaacctggacgtgatgatggccaagcggaaaatgtccctctcccaactatcggagaaagtggatatcaccctggccaacctgtccattctgaaaaacaacaaggccaaggccgtccgtttctccacgctggaggccatctgtgccgccctggactgccagccgggagacattctggagttcgtgccggacgaagaggcggaaccatgaccgccaggcgcacggctctgcccgcccacgttcttcagcgccgcctggccgggagtggtattggtcctcctgctggggtggatccctgtgtccttctgcccctggtatctctgggaatccacctctggagccgggcagatcgcggaagatgggacccagtgtactgcgggacatcttctgcggattgtatccggcggcggtcagtctgccgatctgccccggaaggccgctggggccgttgcggtatctcataacgccgtttcggatactccttctgatgctgacgcgataaatgctgcgcttttggaatctttactgttggaggtttctcgcgatgtttcagctttcgctgtttaccgagttcggcaggctgtgcaacccctttgactatgttttggggtttacgttcctgctgatggcctttcacctgctcttcctgctcttcaatctgcgggagcggcagcgggtgaagctcttctgcctgggcagcgcctcgctggtcctgctgctgcatatcgcggcgctgcggctctcgttccagttcaccaatctcacctttgacactgtggcgaccggcccggcgccgggcctgctgggggcgctgggcagccgtacctggctgtatccactcttcctctacctgcttctgctgcctctggcgtgcgtcccgcccaggcaagacagttccccggacaactccggtttccgcaaggaggtggacgcatgattgatgccccattctgcaatgcggtcagcctgctgacgggctttaccggctgggtgctggcggtgtggtcctttctccgtcctgagagggaccgctccggctggaagctggccggcggcgggatggcctgcgccctggccctgctggcccagctcttcgccgtgcagctggagaccgtggcgggtgatttggaaacggccctggtccaggcctccggcgcagctatcgccggccggatcctgtttgtgataacgctgatctttgaaaccatggccgtggtgagccaccactttgccgccagagaccgaacgtaacgtgcattgactgtccctgctgtggagacagccccaaaaaaggagaacccattatgaatgaacatgaaaaagccctgccggcgggagggccggcgaagcttacgcaaaatgcggtgaaaatttatgtgatctcctcccgagagcgactgcttctgccgctggccttctgcttctgtcttctgctggtgaacacgctgctttggagcggccccaccgcgggactgaccgcctccgtctgcgtctggtacggcctgctggggctctacctgggccgcaccctgctgaacacctgggagagccgcgttctgctggcggtgaatctggccctggccgccacgctggccctggggtccaactggtatttccgggcgtggaatctactggccctgctggccctgctgcccgtccacgccatcggcctctccggcggacaatttctgccctggtggcgtccctccatgctgtgggagcggctctgtttgctgctgtggggcctcttcggccatctgggggcagcattggccaccgcctggcctcagaaaaaggacggcgccgcccggcgggtcctgcccctgctgctgggggcggccggcgccctggcgctgctggcggtactggtgcccgttctggcctccgccgacgcgctgttcgccgccgccacggcggacctgcgggcctttgtctccctccacttcacggacgcggtctggaaggccctgctggccagcgtcatgacccccttcctcttcggtctgctgtacagtctccgccgccccacacccctgaaacggaccggagccgcagcccgcggcggggtagacggcctgggcttcgccatcgtgctggcggcggtggcggcgctgtacctgctgttcctgggcgtccaatccgccggactcttcggcggagccgagtacctggcccaaaagggcctttcctatgccgagtgggcccggagcggtttcttccagatggtgggggtgacagtggtgaacctgacgctcctgctggctgcggtccagtggtcccgccgggagggcggcgcttggcgggcagtccggctcctctccgccctgctgacagcggagagcctgctcctgctcctctctgccgcctggcggatgacgctgtatgtggatgtgtacggcctgtccttcaagcgctgcatgacctactggggcatggggatgatggcggcctttctgctggctgcggcctggaaggtgcggcggccagacttccggttctgtcgggtggtgtttcccctggccctggcggggtggctggtcatcaactgcgtgccggtggactacctggtggcaaaggatcaggtggaccgctacctctccggggagagcggggtgctggacgcggagtacctgctctatgacctctcctatgacaccctgtcccagctggagcggctggacggagacatggtctgcacagcgtatggggactgggacgccatcggtacggcccgcctgtccatcctattggaacagcggcggcaggaggcccggacagactgcgccgactggcggacctggagcctctcggcctggctggccagccggggcggcgcgtaagggggccgggcatgaagcgctatctgcggctggccgcctggtgcctggggcttgcgctggccgtaacagcctgcggcagggcgggccggatcgtcctcccggaggcggcggaggtcactgccatccgggtaacggcaggagatgcggtgacgctccacacggaccgggactggatcggagaatttctccaacaagcggcagaggccgtctccaccggcatggagagcgtgcaggacgcgccggaccaaaccggtgcggtaaaggtggagctgggcaccggcgagacgccggactggagcgtcctgtacgtctacgaggcggacggcatctgctgtttggagcagccctatacgggcatctaccagggggacgaggcactctggacagttctggcggctgacgccgcgccggaggggaggaatccacagtgaacaggccgtcggccggttggatcgtgtgcctgctgctctgcggcatgttgatcgccggggtgttctatctgatcggctacaaggccgcctatgaccggatggaaaacaccgtgccgtccacggtggaggtctcagttgcatggcagggggtgagtccatgtggaagctgatgggcgggctgctggcactgccggtcctgcttgttctgtcggtcctgatgatcttctggggcagcggcgattatgtcagaaccgttcagctcaactgggagctggagctccccgccagcgagggctgtctgtatgagaccgacagcggcgccagctttagcggggacggggagcggtatcacgtcctggcatacgcggacgacagcgggctggaggaaaccctgacagaggaagctacgccggtcaggtccgcagaagtgccagtgaccgaaatcctggatctgctggccgttccggcggaccagcggcccgatttttcggactgccgcggcttcacggcggcgcacccaacggatgaacgcaaccggctgtacctgctggtgaacagcgcaggtacccggctgtatgtggtggagtgctttttttgagcagaaaaacagcggcggccatgggtttccatggccgccgcttggcggtttcgcttattcctcatctcggccgtggccgcaccagggacagaccggctgtgctgccggaaaccattttccgcaccaggggcagggctgatcccgccgggtcccgcacagggggcaaaaggcatcgtcacggggatgctccttgccgcagaccgggcatttgaccagctcccccgtaccgggaacgtagaaggcggcggtgtccacgtctgttggttccggctccaccggcacatgttttttcggctgagggagaaagttggtgcggaaaaaggccagtcttccacaggcggggcagctgtatatatccacctcaatccagtcggtgacggaggcaaaaaggcccgtcagagccaggcgcctgcccgcctgccagaggtccatctgcccccccccgcactgggggcaacccaccggcgtgttcggattcatctcccgcacctccgcatgctcacatccgcaggctctccggataatctcccctggcatggagcttgcggagctcctccgccacgatctcccggtcctcatggtaggtcatgccgaaccacttgtccgcggagtgaaggacggacacctccagcgcgcccttttgcagctgatcccccaccatcaccggcagcaggcactcggccttgatattttccccggcctccgtgcggaggaagttttcaaagtactcccgcagggcggggaagatgctgggggcaaacccccagaagttcatggacaccaccgtctccggggacaggtccgtgccctccgccagatcccgcagcgtgccgtcgggatacagctggatcttcagtgcctcccggacggagcggagctttccgtcctccaccgcgcacacgccgcgggacaccgtgccgtggaggctggcggtattcttcagcagataccccaccatggtggcctttcccgtctcaggcagcttcaccagctcgtcatagatggtgcggtaggcgtcgatgccgtaatagtcgtcggcattgatgacgcagaagggctcgtgcaccacatccgccgcgcacagcagggcatggaccgtgccgaagggcttggtccgctccggcggaatccggtagaagtccggcacggaggtaaagtcctgaaagacataggccacctccaccggcgtgccgtccagtgcggtcttcctcgccagataatccccgcacaggcggcgcatcatctcctccatctccggcttgatgatgaacaccaccttgctgaaccccgcccggagggcgtcgtagatggagtactccatcaggatctcgttgtggggcccgatgccgtccacctgcttgctgccgccgtagcgggacccaaggcccgccgccatgatgaccagtgagactttcatttgcttctctcctaaagtttttgtgaatttgcgccttgttgcgcaaccatacgctgttcttttaccataccctatttgccggatttttgcaactgctcttgacttttttcctctgcggtctataatatgaaaacgataatcattttcagattaaaggaggcattggatgccatacagcaccaaacagcaccaggcggtgctccgctgcctggaggcccggggcgagaccgcctgcaccgccgccgaactggcggaggacctgcgtcgggagggctgcccggtgggcctggccaccatctaccgccagctggaaaagctggaggccgccggggcggtccacaaggtcaacaccgaggagggcgccctgtaccagtactgcggccgccagtcccaaggccaccgggattgctttcttctgaagtgtgagcgctgcggccgcatccgccatgtggactgtacccgcctgcagaacctgtacgaccacctggagcgggagcaccacttccgcatcgatccccgggggacgctgttttccggggtgtgcgacgtctgcgccggagaggaggaccaccatggagcccaatgagctgatcgtctgccgggacgcgtccctggggtatgagggtcagagcgtcctggcccacctggatctcaccatccgggcgggggactacctgtgcatcgtgggggacaacggctccggcaagtccacgttgctgcggggcctgctggggctcctctccccccagtccggggagattctccgggcgccggaactgcggcagggagccgtgggctatctgccccagcagacccgggcccagcgggacttcccggccacggtgtatgaagtggtcctctcgggctgcctgaaccagaaggggctgcggttcttctacaccgccgcccagaagtccgcggcattgatgaacatgggcaagctggggattctggagctgaaggaccagagctaccgggatctctccggcggccagcagcagcgggtgctgctggcccgggccctgtgtgccgcccgcagcctgctgatcctggacgagcccattaccggcctggaccccgccgcggcccaggatctgtacaagaccctctcctacctgaaccggaaggagggcatggcggtggtgatggtgacccacgatctgagggccgccctgcgcagcgcccggacggtgctgcacatcggccacagcagctactttttaggcacagtcaaagactatctggcctccccccaggggcggcggtttcgggaggtggaggaatgagcctgaccttgatgctgacctatccctttatgcagcgggccctgatcgccgggacgctggtaagcctctgcgccgcgctgctgggagtccccctggtactgaagcggtactccatgatcggcgatggcctcagccacgtctccttcggcgccctggccatcgccgtggccctggggttcactcccctctacttctccatccccgtggtgatcctcgcggcgttcttcctgctgcggctggccaccaatccccgctggaacagcgacgcggccatcgccgtcatgagtgcgtcggccctggccgtcggcatcatcgtcatctcccgcaccagcggcatgaccacggatgtggacaactacatgttcggcagcgtcctggccatgacgtgggcggatgtggccctgtctgcggtactgtcccttgcggtgctggccctgttcgtgctgttctaccacaagctcttcgccgtgacgttcgatgagagcttctcccgggccacggggctgcgggtggactggtacaacaccctgctggccattctcaccgccctgaccatcgtgctggggatgcggatgatgggtgccatgctgatctcctccctggtgatcttcccggcgctgacggccatgcggctgttcaagagcttccggggcgtggtggtatgtgccgccgttacgtcggtgtgctgcttctgcgcgggactcatggcctcctggacgctgtccacgccggtgggagcctctgtggtggcggcaaatctcgcgctgtttctgctctcctgtgctgccggctggctgcgcaggcgctgaaaaccgccggatctgcggctgtgccgtatatccggcggatttttttatacaatattagaaaagaatctggcagaaaaggcttgcgcttttccagtatctgtgctatgatgcgtatgttagaagagtaaggtatgtggagtgggctgcggggtccgctctttttcttgacctttttcggtcaggcaaactctgcttaaacttccaaaagaagggagtcctcccatgaaaaagatcactgaactgaccgcggaactggccgctcccgctatcgcggaacagggctgcaccctctgggacgtggagtacgtcaaggaggccggcacctggtatctgcgcattctgctggacaaagagggcggcgtggacattctggattgtgaggagatctcccggaaggtcagcgacctgctggacaaggccgaccccatcgagggcagctacaccctggaggtgggctccgccggtgccgagcgggcgctgaagcggccctccgattttcagcagtttctgggcagccccgtgctggtgaagctgtaccgggcccgggagggccggaaggagtttgccggctatctgaagggctatgacgaggccaccggcgatgtcaccgtcaccgtgggcagccaggatctggtcttccccaagaaggagactgcccttatccgcctgcgggtggaattttaaccaatcaccgtcccgacaagacgtattttatcaacaaggagaatcagcaacatgaaaggcaaaaagcagaaggagcccgtaggcttcaatcccgcggaaatcttcgcggcactggctctgctggagaaggagcggggcatcccccagtccttcatgatggagaagattgtccaggccctcaccaccgcctacaagcgggaccacgcggatgtggagaacgtcatcgtggatgtggacgaggcacaccagaacctgaagatgttcgtccagaaaaacgtggtggaggaagaggactacgtggaccccgccaacgagatgcccattgaggaggccaagaggctctccgccaagtacgaggtgggcgacatcgtgaacatccctgtggacacggtggagttcggccgcatcgcagcaggcaacggcaagcaggtcatcatccagggcctgcgggaggccgagcggggccaggtgtatgatgagttcaactccaagcagcatgagatcctcaccggcgtagtcacccgtgtggatccccgcaacggcaatgtgtccctgcggatcggcaccggcaccgactctaccgaggcgctgctgatggccggtgagcaggtccccggcgaggatctgaccgaaggcatgcatgtgaaggtctatgtggtggaggttcgccggtccacccgcgggccccaggtgctgatctcccggacccatccgggcctggtgaagcgcctgttcgaactggaggtccccgagatttatgacggcaccgtggaggtgaaatccatcgcccgtgaagccggcagccgcaccaagatggccgtgtggtccaacgacgagaacgtggaccccatcggcgcctgcgtgggccccaagggccagcgtgtgggcagcattgtggaggagctgcggggcgagaagatcgacatcgtcaagtacagcgaagacccggcccagtttatcgccgccgccctggcgcctgccgacgtggtggatgtgtggatggcggacgagggcaaggcctgccgcgtcatcgtgccggatgaccagttgtccctggccattggcaaggagggacagaacgcccgcctggcggcccgcctcaccggctacaaaatcgacatcaagccggagagctatcacgacgaggaagagccccctgccgggggcgccccggaggccgcggacacggcggaagcgtccgctgtggagcccgtggacgcggagtaagatcagtttatcagaaaggcggcctatgagatgccgaaagtgaagaagattccccagcggcagtgcgtgggctgccgggaaatgaaggataagaaggccttgctgcgggtggtcaaggccccggacggcaccgtgtccctggacttcggcggcaagaagcccgggcggggcgcctatgtgtgccacgacgtggcctgcctgcagaaggcccggaaaacccgggccctggaacgggcctttgacaccgccatcccgccggaggtctacgacgccatggaggcagaactgcgaggtgcggatggaccggcttaacattctgtccctgctgggtctcagcctgcggggcggccggttggccgtgggcgaggagccggtagaggccgtggcccgcgcccgggacgcccgggtgctgctgctggccgccgacgcggcggagggcacccgccgccggtgcgagcacttcgcccaggccggtgactgcctgtggctccagctccccttcaccaaggcggaactgggccgggccctgggccggacggccgtggccatcgccgcggtgacggacgtgggactggccgccgccctgctgcaccggctggcggagctggatccggagcagtacgccgacgcggcggaccggatggatgtaaaggcccgccgggccgcggagcgccgggcggagcaggcggcccatgagaagaatctccgccagggcaagcgccgccgaaaggcgccgcctgcaccaaaggcggccaaacctccggcggaaatgccaccggagcgtgcgccagacgggaaccgtccccgcggcgcaaagccataccgatcccgtccccccagggacgctcgccccaagccgaaggcacaggcgcggccatacgccaacagccgcccggtgaaaaagggcaaaggctccttccgcaagaaaaaggaaggctgacggaccgcgccgccgcggcatgtgtccgcggcagctatttgaaaaaatttcccagccctcgggttggagcagaacgaggtgtttctattgggtattgagaaatacagagtccatgaggtggcgaaggatttcggccttcccaccaagaccatcacggagatcctgacgaaatacgccgagactcccaaaaaccacatgcaggcgctgacagatcaggagctctctctgatctttgaatacctgacgcagcacaatccggtctccagcatccaggtgatcttcgccgacacctacaaggaggagcctgcgaaggaaccagccaccaaaaagccagagcccgccggcaaggccgccgcgcccgcccagggccagcaggtcaggcagtctgtgcctgcccagagcgcgcagagcagccagggtggccggcagcagccccagcagcagaacgccgcctccaagcctgcggcgcagcagccggtgtcccgggtgccccagcggaagatcgtggacacccgcaagggcggcgacgtgaatctggccaagtatgatgagcggctggaggatctgggcggcgagcggggcgctcggatgcagcggcagcagcgcagcggcaaggagaagatccgcaccaacaaccagcgccggggcggcatgaccttctccaacaagcgcaagcaggacgaggcagagcggatgcgcaggctccagctggagatcgccaagaaggcccctgtgaaggtcatgatccccgatgagatctccgtgggcgaactggccagccgcatgaagaaaaccggcgcagaggtggtcaagtgcctgatgaagaacggcattatggcctccctcagccagatcattgacttcgacaccgccgccatcatcgccgaggagatgggctgcaaggtggagaaggaggttgtcgtcaccatcgaggagcggctgattgacgaccacgaggacaaggcggaggatctggtgccccgggctcccgtggtggtggtcatgggtcacgtggaccacggcaagacctccctgctggataccatccgccacacctctgtggcggccggagaggccggcggcatcacccagcacatcggcgcctatcaggtgcaggtgaacggcaagcccatcaccttcctggacacgccgggccatgaggcattcacctccatgcgggcccgcggcgccatgattacggacattgccattctggtggtggcagcggacgacggcatcatgccccagaccgtggagtccatcaaccatgccaaggccgcaggtatccccatcatcgtggccatcaacaagatcgacagggagaacgccaacccggaccgggtgcttcagcagctgacggagtacggcctggtaccagaggactggggcggcgacaccatctgctgtaggatctccgccaagcagaagatcggcatcgaaaacctgctggaaatggtgaccctcaccgctgagatggcggagctgaaggccaaccccaaccggtctgccaagggcaccgtcatcgaggcccggctggacaagggccggggccccgtggccactctgctggtgcagaacggcacactgaagcagggcgacatcatcatcgccggcaccgccgtgggccgtgtccggaccatgatggactacaagggcgcccgtctcacccaggccggcccctccgtacccgtagagatcgcgggcctctccgaagcgccctctgccggcagccccttcttcgccgtggccgacgagcgcatggcccgggagctggtggagcagcgcaaggccgaggagaaggccaaggccgccgcaccggtgcagaaggtctctctggagaacctgtttgaccagatccaggccggcgaacgcaaggagctggccctgatcgtcaaggccgacgtccagggcagtgtggaggcggtgaaggcctctctggaaaagctgtccaacgacgaagtgaccgtccgtgtcattcacggtggcgtgggcgccatcaacgagtccgacgtgatgctggctgcctcctccggcgccatcatcgtgggcttcaacgtccggccggacgccgccgcccgggacggcgcggtgcgccagaacgtggatatgcggatgtatcgcgtcatctatgactgcatcgatgagatcgaggcggccatgaagggcatgctggcccccaagtaccgggaagtggtgctgggccacgcggaggtccgccagacctacaaggtctccagcgtgggcaccgtggccggctgctacgtccaggacggcaagatcgtccgtagctgctccgtccgggtggtccgggacggcatcgtgatccacgagggctctctggcctccctgaagcggttcaaggacgacgcccgggaggtcgctgagaactacgagtgcggcctgaccgtggagaagttcaacgacatcaaagagggcgatatcatcgaggcgtttaccatggaggagattccgcggtaatgtgctgggcctgacgctgtataccgcctctccgccgccctttcgggtcgcagagcggccccgcacggcagtgcgcccaagcgtgccgcggttggctctgcccgccgaggatgtctgattcagagttcctgtgaaacccatttcatggggcgtgcggtatcatcgaggtgtttaccatgaacagcttccccggtaatgggcctgcctcatcagatcgcaatcatcaaccatacttgcaatagccggcagggcgggcgtaaacgcccgccctgctttttcagaaggagcgcctatgagccgcgtgatcctgctttgcgccgatcatccccttccgctgtatgccgcccagacccgccgggtctatttccaccgcggcgtgcggtatgaggaggaaggattttctgttcagccccatgtctactaccgccctgcggtggacaacctggagctgtccatgaaaccccatcgctatgagctggacctgcgtgctacggagcaggacgccgccctgctgcgggactatctgcggcagagctgcattcccggtgaacaggtggagctgtggaacctgtgggtgagcgatatccgggtccgggcctttcgcctgacgggcccgctggcagatctggacgccgacgccctggtgcagatggaggagcgggagcagacctgcattaccctgaccatataagcgctccaaccaagcgcaattccaatgaactcccataaggaggtatctctctatgccaagcaatcgaatcggccggatcaacgaggagatccagcgggagctggcggaccagctccgccgtctgaaggacccccgtgtctcccaggtgggtatggtatccatcacccgggtggacaccaccagcgacctgcgatacgcccgggtctatatcagtgttctggacaaggaccaggagaaagacgtgctgaagggcctgaaatccgccggcggcttcctgcggcgggagctgggacgggccctgcagctgcgatacacgccggagctgcagttcatcgccgacgactccatccagcacggcgcccacatcctggagatcctgcgccaggtggagcggcaggatgaagcccgggacgacccggacgccggcgaaacggaggaatgagcatgctgacggtcccccagaccgcggcgctgctgcggacctttgacaatattctgatcctcacccatgtccgcccggatggggacacggtgggctgtgccgcagccctgtgcgcaggactgcggtctctgggcaaggcggcgtttctgctgcccaatccggagctgacagacaccaccgccccctatttccgcccttacgaggcgccggaaggcttcacaccggacaaggtggtgtccacggacatcgccacggtgggcctgttcccggagaacgccagaccatacgcggaacgggtggatctggccattgaccaccatccctcttttgagtcctttggccgagagaatatcgtccggccggaagccgccgcgtgcggagagctaatctacgacattctgtccgatctgggccccatcacgccggagatggcccttccgctgtatgtggccgtctccacggacacaggctgctttgcctacgccaataccactgcccagacccatgcggtggcggccgcgctgctgcggaccggcatcgactatcagaccgtcaacaaggtgttcttccgcaccaagagccgcaggcggatgcagctggaggccgccatcctcaacgactgtacgttttacgaccgagaccgggtggcggtgctgtccgtgcccctctccctgatggcgcggatcggcgcctcggaaacggatgcggaggacctctccgctctgggtccccagattgagggcgtggactgcgccatcaccatgcgggagctgcggcccgatgtgtggaagatgtccctgcggaccggtccccggattaatgccacggaggcctgccggctgctgggcggcggcggccacgcggccgccgcaggctgcacggtggaggccccctgggctgaggccagggagcgaatcctggctgccgtggcgcaggtggcgccggactatcagcgctgagcgggccgcgttctgctgcccttgaggaggtttttatgcccagtggtatcctgattatcgacaagcccgccggttggaccagcatggacgtctgcgccaaggtgcggggcatcttccacgaaaagcgggtgggacacggcggaacgctggaccccatggccaccggggtgctgccggtctttgtggggcaggccacccgcggggtggagttcgcagagaacggccagaaggaatatgtagccggtctgcggctcggccaggtgacggacacccaggacgtcaccggcaccacgctggagacccgtcccgtcacggcggatcgggcagcactggaagcgctgctgccccgctttctgggagagcaggaccagatcccccctatgtactccgctgtcaaggtaggcgggcagaaactctacgacctggcccggaagggacaggtcgtggaacggaagccccgccgcatcaccatctacgagctggagctactggcccaggagagcgcaacggactacctgctccgctgccgctgctccaagggcacctacatccgcaccctctgccatgacatcggccgacagctgggctgcggcgggacgctgtacgccctccgccgcaccatggcggccggcttcaggttggaccaggcagtgacgctggaggcagtccaggcacagggtacagcgctcctgctgcctacggacagcctcttcgcagagtacccggccctgcctctgacatccggcctgctggagaaacgggtccgctgcggcaatcccatccccctgccgggcacaccggacggcatctaccgcgtatacagccgggaccggcagttcctgtgcctgtcccgggctgcgggcggaacgctgacgtccatcaagaatttctttggagcgtaaaccatgaaagaacgagtcattgccctgggcttttttgacggagtccacctggggcacggcgccctgctgcgccgggccgctgaggaggccgccctgcggggctgtacccccgcggtattcacctttgaccgcccgccgaaggaggtggtcaccggcgtcccctgtcccctcatcaactccccggaggaccggcgggacctggtgcggcggctgtaccgcattcaggacgtgctgatggtcccctttgaccgcgagatgatgaccacgccctgggatgactttattgtccggatcctggtgggccgctaccacgcggtccatctggtggcgggacacgatcaccacttcggccacaggaaccagggcacaccggagctgctggcgcagaagtgcgcccagctgggcctgggctgtgacatcatccccaaggtggaggtagcaggcatcaccgtcagctccacctacatccgccggttggtggagctggggcagatcagccgggccaaccgcttcctgggccacccccacaccctgacaggcacagtccgccacggccggggcatcggctcctcccaactgttccccactgccaacctcgtcattccgcctcatgtgctggtgccgagccacggagtatacgccacccgggccacactggaggacggctcctgctacgccgctgtcaccaacgtgggcacccgccccacggttcaaaacggctcggacatcacagtggaggcctgtctcctggacttccagggggacctgtacggtaaacagctgcggctggagttttatgagcatctgcgccaggaggtgcgcttcgactccctggacgccctgcgggcccagatccagtcggatgcagacgccacccggacctatttcgcagacggggtccccaccttccctgccctttgatcctccatgaaacagcgcggagtccggaatcggactccgcgctgttttcagatcagccacaccgtcagccacaccaagccgatcccggcagcgcccatcagggtgtagaccgccggggaaagatcccgccagatccggctgaaccgcccatggtctccgccggcatagtttcgcgccacccggcgggcctcctccaccagctcccgggcggtgacgccctcgccggccgcatcgttccgcacgatgaagatcgcctgctcaaaaaaacgctggtccggggaatccaccaccacgacccgtctggaaatgcctttcaccatccgctttacgcctcctgcctctcacagaatttagatggttccattttgtctcagcgcgggaaaatttataccgcctctcacacctttttcacaccgctctcccggctgagatacagcacctgaaccccgcagtcgtcctgaagattctcccgccggacgctctcgctgaggatcagtcccgccagggtctgcggatcctctccatcccagccggccagcaggttttgaagccattcgtcccggcccgggtctgccaccccgtcgctgaccattactgcaaagcttcccggctccagcgtggcacgggtcacatccggagccgccgccccgccccgcagacccgccggcagggtcccgccggtgatccgccggacagtgccccccttcttcacatagctgggggccgcgccgtatttgaagaaggccgcctcccccgtctccggtctgcaggtgatgagatcaatggtggtgaagcttccggtctccgcgccccgcagggccatggctgcgttcagggtcttcatggccgcctccggctcgatgcccgcctgcaaaaactgctccaacagacggcaggtgagggcggactcccgccgggctgcctctccgctgcccatgccgtccgccagcagcaggcacaggaggcccccctccgtgcggaaggagaccaccgtatccccacagaccgtctccccctccttgggccgcagggccgcgccaatgcggcagagatccgcctcccctgctgtggcacggacctcccccaaaccggcagcggtggcggtcagcagttcactgagctgggcgtactggcccctggcgctgcggcgggtctcctccagctgccgccggtactgccgccgcagcaggaatgcagagagctccccattgacggcggtgagaaagtccggcaggtggatgcaccggtccgcgaagtagctgggaaagtccttggccagcgcgcgcccccgctccagcaggaagggcgtggcgtcgttcagggcgttgaaggtgccggtgtactccttctgccaacagagctcgcacagggcgcagccccggcacaccttttctgccgcccggtcaaagaccaccgccgggttctcctccgtggacaccggggccgccctgcccatgctgtcgtacagggcccgcagagcggcggccatccgggtcagctgggcgcgcatcccctccagcgcggcgggaaactccggtgtctctccccgcatcacccgcttgccgccgaaggctcggcccggcagcatcaaaaacaggaccgctcccaccgcggcctccggcagcaggggcgtggagaggcccgccggcagggcggccagagccgccgctccccagaatgccagcgccgcccagatccgccttccgctactgcggctcccagccagaaggcccgccagaccataggccgccccgaagaggacgccgccccggccggaacagaagtccgccgccaggcccgcccccagtccggcggctaccccggtcatggccccccgctgataggcggtgtaggccagcagcagacacaacagtgaacgccccacggagacaccggccagttctacgtccaccagcgccagcagaatggagcctgccagaaacagcagactatctggctccggccgctcccctccggcctgcagcaggggctgataataccatgcggagatgcctaccagggccgttgccgcaaggcagggcgccaggtttcgcaggggggacaaggactggagcacgtagatgccgctcaccgccagaaacagtcccgcccctgccagagggtgaaacagcggtccctccagcagcttcagcccctgaaaggccgccgcggtggtaaagatcaaaatcgcagcggccaaaaagggcagcgcaccggaaaagtccagaaacagcaccgcccccacgccagcgcccagcagggcggcgatccctcctgcccctggcccacaggccgccacgcaccccagggcaaagggcgcgtaatcccccggcgtctgggtggcggtcagcgccgccgccaaaaaaaatcggatgccccaggccagcagctgtgccggctggtgccggctccatatcatgtccctgtgccccacagcttgtccctcctgtattccgccgtgaagtccacggcctctttggttttttccactattttacaggctgtgtggaaaaaatcccgtcgggaaaagaaagccgcgccatttccgggctggatgcccatagtggacttttacggccggatatggtatgataaactatcatgttttcattggaaaggacggcccgccttgaacatcggcacgcttaccatcaactcctccctggccctggcccccatggccggggtcacggacgtcgccttccgccagatctgcgcggaattgggggcgggatataccatcacggagctcatctcctccaaggccctgtgctaccacgacaagaagaccctgtccctgctccagcagtttcccggggagcaccctgcggcagtgcagatcttcggcagtgacccgatctgcatggcagaggcagcccagatcgccctggagcattccggggcggatgtggtggacctgaacatgggctgccccatgggcaagatcgtcaacaacggcgacggggccgccctgatgaaggacccggaaaaggccggacgcatcatggaggcagtggtgaaagccgtctctgtgccggtgaccgccaagttccgccggggctgggacatgggcagctgcaactgcgtggagttcgcccgaatcctggagcaggcaggggcctccgccgtggcggtccacggccggacccgggcccaggtgtacagcggtcaggcggactggacctgcattcgggcggtgaaggaggctgtgtccatcccggtgatcgccaacggcgatatctggaagccggaggacgcggtccgcattctccagcacaccaaagcggacatggccatgatcggtcgcgggtgcttcggcaacccctggctgttccagcaggccaaagccgcgctggagggcaagcccatcccgcccctgccgccgcttgcggagcggtgcgacacagcggtacggcagtttgagctggccgccgcgtccaagggcgagcgggtagccgtgctggaggcccgccgccactactgctggtatctgaagggcgtgtcccactccggctactacaaggaacagatcgtgcagatgaacacgctggaagacgtgtatcgggtgacgaaaggaatcaaaagggatttgagatgaacgagcaatcgcgggaacagcagctggtctccgccgcccgggacggggatatggacgccttcgaggcgctggtccatctgtatgagaaacgggtgttcgccctgacgctgcggatgtgcgggaatcccgaggatgccgccgaggccgcccaagaggcatttctcgccgcctggcaggggctggcattcttccggggagaggccagcttctccacctggctgtaccggctggtgtccaacgcctgcgtggacttgctgcggcgtgatggccgccgccgggcctcggccggcccctccctggatgacgaggagctgaatctggacgtgcccgatccggcgccctctccccaggacgcggcggagcggcaggagctgcgggaagagattgagcggggcctctccgccctctcgccggagcaccgggaggtgctgatcctccgagagattcaccagctgcgctatgatgaaatcgcggactccctctctctggatgtgggcaccgtgaaatcccggatcagccgggcccggaaacagctgcggaattttttgctgaaaagcgggaacttttctccgctgccggcgtctaaaggaacagaaaaggagggctgacaatgacatactgcaaggagttttcggccctgctggacccctatatcgacggagagctttccccggaggaaaccgcccgggtgcgggagcatctgcatacctgtgacggctgccgggcctatgtccaggccgcgctggccatacgggacgcgtttcccgaggcagaggatacccctgtgccggatggcttcgccgcaggcgtgatggctgccatccgggcggacgccgccccccggaagcgccggagaccccggtgggcaaagacgctgctccccttggccgcctgctgtgccgtcgtggtgctggccgtctccggcctgccccgccccggcggcaccgctgtgacggaccatccggaatcccatgcagagattgcggccccagcagaggccgctgtgcccaacgtggacagcgttgaggaggacaccgccgccacggcctatgcaacccagtccgacgaggacacggcagacgtcccggattccactgtgtctgaggcaatcgcgccggaggcggataccgttgcgcccggcacacaggaccagcttgctcccgcctccgattccaaaagcagcattttgccccgggaagggagttctgccgatgtgccggagacggccccggccaccttcgcgatccaatcccccggcctgacgctgacggcggaggaggccggaagcctgctggacagctatacgctcatctctgaatcggacgggactctggtctacgaattgaccgccgccgaatataccgctctgctgcagcagctggaacagcaggggctggccattgcaggcgccgccaccgcagaggaggcggaggccgacggaaccattctggtccacgtgattcccggttaaaaaagcagaagggacgccgaaattttttgcggcgtccctcttcccttttttgaaagcttgtgatataatattatttcgacaggtgccatctccctgtccaagcgtccgacactgggcgttcgttcggcggtcttcgtcaatcgccgttctctaaacaaaaaaatggaggttgcccgtaccttaccacgggcgttttgctgcgttttcgtatcaaaggcctccgacatcattcaaggaggtctttcttttatgtccaaacccagattcaccacacagcagatggccgctgccggtatcatcgccgccatttacgccgccctgacgctgctgctgcccattccccagtatggcggcatccagttccgggtggcggaggccatgacggtcctgcccttcctgttcccggaggccatccccggtcttaccgtcggctgtttcctggccaacctcctgggttctcccattcctctggactggatcgtgggtacggcggccaccctgctggctgcgctctggacatcgaagctccatcacagggcgctggcgcccctgccgccggtgatctgcaatatggtgctggtaggtgcggagatcgcctggttttccacccaggagggtgccgccttctggcccgcgttcgccttcaactccctgaccgtggggatcggcgaggccgccgcttgcttcattctgggctccctgctgctgcgggtcctgcccagagtccccgcactgaagggccggatagcctcttcccgcatctgatgccactctgcgcaaaaaagaagtcccgcgtccgttggacgcgggacttcttttcacttagcggtgaactcgtcctttccggcgccgcacagggggcacacccagtcggcgggcaggtcctcccacttggtgccgggggcgatgccgttgtccggatcgccggcggcctcgtcatacacatagccgcagagatcgcattcgtactgtttcatttgaaagatcctccttctgttataaacgggcgatacacgcctggattccggtggagacagtgcttacttcagcttcttccggatggccgccttgacctccggcgacagcagccggccggcggcccgtactggcagcggcggcaggcggcagaactcccggcgcacctggtcgaagggctccagggcgtaggcggcaaagaatgccgtccgctccggcggcaggggaatgggagatgccagccggggatttccggcaatggcccgttccggcgggaagggctgcttggccagcgggagctggtcaaaaatgtggctgccgtggggggtgttcaccaacagcaggctgatccccttctcctgctggtccggcagctcatccggccgcaggccccagaaatcccccagtgtcagatcgcccacccgggtcatggaggcgtagggacagcggtagcagctgggccgcaggaacagcgcccggccgaaggcccggccgtattccgtgcggaacagcggcgcggtatccacggtgccgtcgccgtagaccgcggtaaaatggctgtccttccatccggcgaccttgttgcggaaacggaccgcctgcagcggctgctgccggcgcgcctccaggctccgggccatgtcctcccacacgccgggagagggcacgccgtggcacaccaggtcgcaggtggtcagattctccggccgtccgcccagatagcggtacagcccgtccacctggcagggtgtgccggaaaacagcactggtcgctggtccaaccagcgccgcacctcccgaaagacgccctccagatcgctctggacgtacttggcgccccgcaggcgccacagctcctccttgcggaagcaggcggtgtgccgcagatgctggctgccgtcaaaggcggcgccaaagaccacgccgccgctttccaggatatactccgccagcagggtgaacacgccgcccgaggtggagtctcttcggatctcatcgtttctattccaggccgcgaatacagcgggcatggagctctgaggccgctcccgcaggacggggcacaccgccgtgcagtgcccgcaccgcacacaggccgctccgtcgatcaccggataggcaaagccctcccggtcccgctccatggtgatggcgtccttgggacagccgctggcgcaggccgtgcagccggtgcagtgggtgtggtccgccaaatggggcaagggccgttcctctgccttgacaggcgcctcctccggtgtatggggccggtcctccagggcgcagcgcagatagtccagggacaacttccgctcccggccgagccgctcccccaccgccgcccagtcgatgggcgccgtcaggtccgcggtatctcccttgccgatgatccgctcccccagtcccaggcggctcaacaggctgaaggtccgggaactctccggcgcagccatctctgccggtgccaccgccgtaaagaagggcttttggaactggacggagaacaccgttccgtggaaggagttggtgcacacataggcggcatcccggaacagacccagaaactccgccggaccggcgctgagaatgcagcgggccttggggtggaccttctggcgtacgccgcacagctgcaccaccggcagccccgtctcctccgccaggcggcggatatagggtgccagggcgtcggggcggctgatgcaatagcagaggatatagccccggcccgcgcctccgtccctggccgcggccgcccaatccgttctctccagcagcagcgtgggatccagcaccaccggcacgtccttcccggtgatgtcccggacaatgccctgcccctgccgctcccggacggacaagtgggagaaggactccagataggtccgcagctcctcctccatgccgtccgggatgcgggggatgccgaaggatggggcataggcgatctttcgcttgtgggagaaggccccgaagaacaccgggtcgaaccggccgtcggggaagatcttcgggttccaaatctggtcactgccggagagcagcacatcgtagggcagctccgcctgccgcagctcctccaggctctggtagcggcggccggaaatgttcagattctcccgggaaaatgcctcaaaccgctcgtatcgggccttcagcgggccatagtgcagggcggtgtgggcgtcatgggcggcgcttcccaggccagtgggccgctggaacagggtattgtcctggttcacgtagtagtcgatgatctcgcattcgctccccagggacgccaccgcccgctccgtggcgtaagcctgcagcatggcgccgtagtgatggatatggtaaaaggtcagcagtcctgttttcaccaagtgtcttcctttccgcagtccggatatcccgccgggcgggtcactgcctgtccagaatggcgtcggcgtcccgggatgccagaaggtcgtcctccgccacccagtccgccacatccaccacgtcgaacgccgtggcggtccggcggatcaccacctctttcagcccggcgttgatgaccagcctccggcacatggagcaggaggtggcatctcccagcagttccccggtccgggcgtcccggcccactaggtacagcgtgccgcccaccatgtcccgccgggaggcggagatgatggcgttcgcctctgcatggacgctgcggcacagctcataccgctctccccggggaacctgcatggcctctcgggagcagtagcccagatccacgcagttggcccgcccccggggcgcaccgttgtagccggtggagatgatctcgtcgtttttcacgatgatggccccatagacccggcgcaggcaggtggcccgctccagaacggtctgggcgatatccaggtagtagttggctttgctgatccggtccatgggcgacacctctttctatcgagttcctctattgtatcatgatgccgccgcagtttgcaagaactctccccactctggaagggatttctgttggaagtcaccccagggggcgccggagcccgttctccagccccgcccgcacggcgatcatctctgcggccacggacacggcaatctcctccggcgtctgggcgccgatggccaaaccgatgggagcgtgaaggcgggcgtactcctcgtctgtgaaccccgccgccagcagccgctcccggcacagggccagcttcctcttggagccaatgcagcccaggtatttggcgccgctgcgcagcacctgagtcagcacctcgtagtccgcctgatggccccgggtcatcaccaccacatagtcctccggcgtcaccgtcacctgttcggacagccgggcgaagtccccgcagagggtcttctctgctttggggaacagcgccgggtccgcgaactccggccggtcgtcgtacaccacggggcggaagcccagggaagccagcaccggcaccagggcctgagacacatgtccgccgccgaagagataggtccgcccggccttcaccaccgggatggacagccacttccgggcaaagaccgcctgattcccgcacaggagctccagctcctccggcaggatatccagatgacggggcccggtccggtctgccaggcccatggccgtcacctgctccccctcgatccgccgcaggagccaggtgtcccggtttccgccgtccgcctcgatcagatcccgcaaaacggcgatgatcctctgctctcccgcggggaggtactggaactgcaccgtcactcccccgccgcagaccatgcccaggctggcggcgtctcccagggtaaagcggaactgccgcagggcgtcgcccccccgctccagcagctccgccgccaggcgctggcactcgaactccacgtttccgccgccgatggttccggtgatcccgccgccggggaacaccgccatcatggccccggcccctcggggggtggagccgtcggaggcggcgatgctcaccagctccaccggacgcccctcctccagagcgtggacgatctctctgaaaaattcccgcatatcagccgattcctccgttcacagcgcccaggatcaggaccagtaccgtcacgccgcagtacagatattttgccgtcgggtaaaaccagcggcccagagggcgccgccgggccagattcacctgaaccaagcagtcctcctttttcagcacccagtagaagaacacccccgccagcagcgcgccgatgggacaggcgtagatggagcagacatccatccagccggagacgatgccctggatgcacagccccacggccaggcccacgacgccgatcaccgccacagcagtcccccggctgaggtgcagcttctcctgcagggtggcggtgggagcctcgaacaagttcaccagggacgtcaccccggcgaacaacgccgccacaaagaacaccgccatgaggatccggcctcccggcatctcccggaacaggttgggcaggtagatgaacatgaggccagggccgctctgggtcagggtctcccccgccgtggccatggccgggataatgaccagggcgctgaggatcgcggccatgctgtcaaagaacgccactgtccgggcagactccggcacgtccgcctctttggagaggtaggacccgtagatcagggtgccgttccctgccaccgacagagagaagaacgcctgtcccagagcgtagacccataccatggggtccagcagtccctccggcttcaggacaaagatgtagcggtagccgtccgccgcgccgggcaaggtggcaatgtagatggccagccccacgaacaggcagaagaacaggggcatcatcaccttgttggcccgctcgatgccgccgccgatgccaagggccatgatgagcagcgtgcccgccatagcggccacctgccagccggtgttgccccaggaggacgccgcggtgtcgaaataggcggtgaatgcctccaccccttggttctccagcgcagcgcccgtaaaggacgccacggcgtacttcaaaatccaaccaaccaccacggaatagccgatggccatggccagagagcccgccaccgggatgaggcccagagcctcgccccagccccgccggcctgtgcgcctctctgccgccgtgccgaaggccgccacgggtccgccggatgcggcccggccgaaggccatctcgccgatgacgccggtggaggcaatcagcaccacaaagatcacataggggatcaggaaggtggccccgccgtaggcggacatccgggatggaaacagccagatgttccccatccccaccgcggagccgatgcaggccagcttgaatccccagcgggaccggaagctgtcccgtcttgtctgttccatgattttttcctctcttctctcaaaactgcggcggcccgccgcggcgcgcgtcagccggcgccccgcttttgcagctcctcacccagcaggcgcactgcctggtccagatagaactggagcggctgggattcccccacggccagccggatgctgcatcgctgagagggcagcagaatcttcaccgcctcgctgccgccaatggcctccgccatccggggagagacctcccccagcaagccgttgggcgtcagcacaccgatgggccccagcaggatatccgcccgccgggcgttgaacgccacggcgttctcgccggtggcgccgtcgtccgcccccgcccgcagcatagcggcggtggccagagagttggtccccagcgcccgcacatggagactgggccactttttcttcacagcctccaccaggccccggcccatgccgccgccctggccgtccaccacggctaccagcagttccccacgcatcattctctccattcctccattttcagatctccctttcagcatacccattccgcccccgcttgtcaacttcttccgcagcgtccatcgcgccttgcagagcgcctgcgcccacccttgtatttttcccgcatggcagctacaatgggaggcgcaccaccgtgtcaaaaaatttttagagatgttgaagaaatccggcccgcagtcccgtatgatagatgtcggacgacaaaaggaggtggcggcacggcgtgaacaaactgacaaacgcgtccttttcccagctggtggtccagtatgagcggctggtctacacggtctgcttccagctggtgcgggacgccgccgcggccgaggacctgacccaggagaccttcctgtccgcctacctccaccgggacgccatccctcccggctatgagcggcagtggctgtgccgcgtggctaccaacaaggccaaggactacttacagagcgcctatcagcgccacaccctgctgccgggagaggacaatatcccgccggggctgtctccccctgcggaggagacggtcctgcgcaggtcggctgcagctgaaatccgggacctgatcctccatatgcgccagccctaccagccggtgtgccggctgtgcctgctggaggaaaagacaccggaggaggcggccctggcgctgggccggccggtaaagaccatccatacacagctgtcccggggcaagcggatgcttcgggaggcattggaaaggagtgggaacgatgacatgctttcgccctgacgggcatttgacggacgcggccctgactgcccttgtccggggggactgcctggaggagctggaccgcctggagctggcggaacatctggcctactgcgaccagtgcctccagcggtacacagagctgctgtctgagggaccgatgctgacccccgcccgctcctgccgggagagcctgcggcgccggatccggcagcgggccgtccagcttggcgtcagccggtacgccacggccgcggcggcagtgaccctggccctgacgctgctgtggggcagcggaaacctgtccggacgggtgcattccactgcgccctcgcttctggagcgggcgggcactgccctgacagagtggaccgacgcctggccacaggcgtgggaggaggccctctccggcttctccggcctatttgacaatttcggcgtctcgccgcggaatgatctgacacaaggaggtacacacccatgacccatcgaaatggattcctgctcttcatctcttcctgcctctccggctgcggacagatgtatcagggctatatgaagcggggcctgtccctgctgctggccttctgcctgatcctttttgcctccacctatttctttctgggggcactggcgctgtttctgccggtgatctggctgtatgcctttttcgacagctatgcgctccggagccagctggccgccggcaccgcgccggaggacgccttcctcttcggcctgtccgatatggacagcaaacggctgggagagctgctgcgcaagcgtcacagtctcatcggctgggcgctggtggtagttggcgtctatatgctctacgacatactgttgagccagctgggcggtctcttcttcggttggttcggggagtggctatacggactgctgcgctatggcctgccccgcctggtcatcaccgtgctggtgatcctgctgggcctgtggtttatccggggccccaaggacaagacgcccattgacgacgagatccccccctttgcgccgcctgcctccagcgcggccggggcttgcgccgccgatccggcggaggccagggcggaagacgttgcatcagaccgctccgctgcgggaaacgccccggagggagaggaggcccaccgtgatgaacagccctgagcagacgccggaatcccgtccggcccgggatcgccgggtgggcaccttcaccttcggcgccgtgctggtgatctgcggtgcgctgatgctggtgagcatgttcttcccctccctggatctgaccctggccctgcagctctcgcccctgatcttggtctgtctgggcgtggaggtgctgctggccagccgctccggcgggaaaatccgctacgactgggtgggcatggtgctttgcttcgtcctggtcaccgcagcgctggtgttcttcggcatcgcctggtgcctggtgtaccacccggaggccgtcatccactactgatacgggtctgcgaaggccccggtgcattgcaccggggccttaccctttcttcttggttttcccgggaaaatccggtataatggagaaaatacctgccgcagaaaggaagaatcctcatgtctgattcgtttgaaatgcgccccatcgcccgcatccgcagcgacttcggctccaagttcggcgtccctcgtcagagcggtctggtggacgcgttggaggccgccgtggtgttcgaggagccctaccgcaatcctgacgccctgcgggggctggagggattctcccacatctggctgatctgggcctttcaccagtcccagcggccggaatggtcccccacagtccggccgccccggctgggaggcaatcagcgggtgggagtctttgccagccgctcccccttccggcccaatcccatcggcctctcctccgtgcggctggaccacatcgcgtacacggacgccttgggcccggtgctccatgtccgtggcgcagacctggtagacggcacccccatcctggacatcaagccttacctcccttacggggactgccacccggaggccaccggcggctttgccagcgagccggcgcgtcccacgctggaggtggaaatcccacccgccctgctggaccaactgcctccggaccggcgggaggccctgcgggatgtgttggccttggatccccgtccccggtatcagcaggacccggaccgggtgtacggcttcctcttcgccgggcaggaggtgagattcaccgtggatggagaccgcctgcaggtcgtggacatcaaatgaacgcaaggcaccccgggatatttcccggggcgcccgtcttttccgggcactcagcgcatggccagcgtcacgtcgccggtcaccgccagctcgccgtggttgtagacctcggcggagcaggtggcaatggccttctccacccgctcggaagccatcttggcgtggatctcgatggtatctcccggcaggatcttcttcagaaaccgcacattattgatccccaagaacagggggatcttccccgcataccgctccgcggacagcagcaggatatccgccgtctgggccatgcattccacagagtacacgccgggcagcaccggctcaccggggaagtggcccttgaaaatctcgcgggccgggtccacaaaaaatgtggtcacgatgtggtcgcctgcctccatctcctccacggtatccaccagcagcatggggtcccggtgggggatgatggccttgatctcttctttggaaagcttcatgatagtggttcctctctttcgcgcaaaacgctccgtatataagccgcgccgggacagcggcacggctctgcctctttttattgtactgccgacagggcaaaatgcaagagataatttgcgctccggatcacaaaagagagccgccctcccgggcggctctctcattttccagatggggtgccttacttcgcagccttggcggccttgatggcctcgatcagcatgggggtgaccttgaacaggtcgccgcaga

SEQ ID NO: 4931 - DNA, 5485 bp, Unknown
  gut microbiota DNA sequence
atgtccggcaccggcgcggagctgctggccaatgagaagatcaaagaggcgtatctcggcaagcacagataaggggatagttgtcagatggcaacgggtgctagcggatgtgatgtgtatgcaatttttctgaattggacaagtaaatccggacagcaaagagccgaggcggagagttttcttcgccttggctctttactgcaaggtgtcatcagtcctgtggctatctgttagtaagacatacaaaaggtttttgggcttgcaggctgcaagcccatccgattcaggatgagggatttgaagcagtgacgctgcgaaagatcgccgacgtgacagcatccttttgtttcctatgtgggtggccgtaaagtatggagacttacatttctatttgatgttactaagatttaatttagaaatataattgccgggtaaagcacgccagccaggcgtgctttattcgttttcaggcctatgttgaaggtatctctggatcttcaagaatttagatgatatcagcagcaccgactttgcttgcatcgcattgaaagccactcttcccggtctggtgcgcgcctctgtatttgcacaagaaagacagtaagcgtcacagcaatgagaacccaggggaccattggcatatagagggaaccatgctctgcctgtttcgcatactgactaaatatttatagagtcaatatcgcaggttctgcatttttcacttatttcagaaagcagaagaatctgtccgattgcgtgagctagaagcccacccaatgcaggccaatattatagaaccggcaagagatatggatttacgcctgcgtaccatcaatagtatacacaacaggattcctatcaggcgcttcacacccagctgggggcccgctctttctaatgaatacaccgaaccgctctccggtcttgccttgctcccgatacagcagaagcgctcgttctatcatctcaaagacctgctccttggtgtagatttcatcaatcacggtaccaaggcgctgacgcttaccccaaataccaccgaccataattttatatcctgcttttgcttctgtcacacaatcaaaattacaggcatccacacacttaccgcagttgttgcaggtatcccaatcgatttgcatgatgccatcctcgtccagatgggcatttttcatggggcagacctctacgacggagcacttcttgcagccattgcagtcatcgggattataggcaggtacccgctggcccataatgccgaaatcattcaaacctggcttaatacagttgtttgggcagccgccgatgccgattttgaacttgtggggaagtttgacatcataccagcccttgtagaatgtttcgtgcagttcacgcgctagttcttgagtgtcgatcaggccatggatacacacagtgcctttgcaggccacgatgggacggacgcgggaacccgtgccgccagtataaagaccggcttgggcgatgaatgtattgaatggttcgatgttgtcgtaggtcagaccttgaacttccagagtcagacgagtcgtgagggcaattttcccattaccgaatttttgagcagcttcctttttccggtagaacacaccaacagaagcttctcaatgcccagggagctgttaatggatcaaatgcgtacagcgggactcggggaacggcttcgtcttttgaatagaatctttgcaaccaaggaatatgaggcttttgccgctgtggcagaagcaatgggttgccctagccattcgcatgaagcggcttcatctgctggacagagatgacttgaaggacccgtatgcgctcgttcgtatcgattgtgatgaagaatgaatatttgagcaaggaggatattggaagatgccgcgatacaatatccgggaggataatcccgtcaaatacactcaggtaaaggcggagcaggaaagacttcgggcaggcgtttcccgatgataaccagctgcgtcattggctggtacgggtgacggtgaatgcctgcaaggatgccctgcggtcgccctggagacggcggatggtgcctctggacgactgccgggagccggtgttcaatacgccggagcaccagaatctctatgcagaggtcatggccctgccggccaagtaccgcttgccgctgtatctctattattatgaagggtacacagcggcggaggtgggggagctgctgggcctggggccctccaccgttcggacccggcttgcccgggccagagagaaactgaaagcacagctgagggaggagtgagccatgcagaacatctatcgggagacatttgagcagatccatgcctccgagcagctgcgaaaggaggtagccaatgtgccgaaacaggagaaggcagcgtttagacaccatatttccaaggcagggctgattgccgcagcgttggcgctggcgctggcgggcacggtcctggcagtggccagtcccaccctctggtggtggtttgagcagaagtgggaggaggagaccggcagctcgatgacggaatcccaatccctggtgatcgacggcctgacccgaaaagtgggggagagcgttaccagcggggacgtgaccgtcactgtggacagtatcaccgtgggcagcagtcagatctgggcattgctggacgtgacgggctgggactttgaccgagatgcccagtattcctttgacaggatgcgtgcggagatcgtccctgaccccagtgggggccagcatggtggggctgggtacggcctggacagtatcgggatcacccgggagggcgcagcccggatgctgctggagttctccgccaccatctccactggtaaccagctgaacagaggagattacgcgctggagatcgatctgaacgacctgatccgccgccgtaccggcggggcagaggatgaggccttgtgtgaaggagagtggtctttctcgattcctttggcggcagagagcctgtctcctaccatcaccatcgacagagttcaagtgctgtcgaatcacatggtctgggatcaggctaccggcaaagatggcggcgccttagagggtacagggggaaaatctcacccggctgttgcaacgctaacgaacctccaaattaccgcaacaggtgcctccttctactgcgacggactgatggaccggctccacgcaaccgtgatcctggccgacgggaccgaagtagagaaccgtggcggcggtggaagcagaatggaggacggcggatggtatgtcagctttgactggccggtgccgctggatgtgacggatatcgttgctatccgctttggcgatgcagaaattccgttgaattaagtgagacttgcaaagagcgccccgccaaaagcaggcggggcgtttttgtcactttcacgtttctatccagtccctctgccgccagacggcaaactcccgccggaccagcagcaagctcaggaggaaggtcagcatgtcggaaatgggggcggccagcagggcaccatccaggccgaaccggccggacagcagaatagccaggggaatcagaaacacgccctgccgggccaggggaatggcaagggagggtaccggccggccgatcccttgaaagaaagaggcggtggccagatgcaggccgtacaggaagaaggcggccatatacagccggaagcagtgctgggcacagtccaggtagagggggctgtcagagacgaacagcatcccgatctgccggggaaacagctggaacacgaggaaccacacccccgaaattaccagggcgatggcggcggccgtgcggaaggtctgccgcacccgaagaaaatgcttcgccccgaagttgtaaccgttgataggctgtacggcggaggagacgcccacaaacatggagtgggcaatctgatagaccttcatcatcattccgtagacagagagagcgatgtcgctgccgtacacgctggccgctccgtgaacccgcagcaggttgttcagggtgatctgtaccagggcagtgaggatctgggtcagcaggctgggaacccccagggccagaatccgcccggtgagcctaatggtggggcgcagcgcctggcgccggagccggactgtgtgcagccggggcaggtaggccagaaacagcaccccggccgccacctggccgatgactgtggcaatgccggcccccaccacgcccatgcccagagggaagatgaagacggggtctagaatcaggttgaggacggcaccggtaatcatgcagcccatgctgtaccgggggtggccgtccgcccgaatgatggcggtgaaggccgggcagatcagctggaagggcaggccccaggcaatggtccggagataggctgcagcctccggccaggcagtgtccgtagcgccgaagagccgggcaatctggggggcgaagcaccagctgacgatggccgcacagagaccgctggcggcaatcagggtggcggcgtgaccgatggtgtcatccgcctcttgctgctggcggcggccgaggcacaggctgatgttggcggcgctgccgtctcccagcagcagggccacggcattcaccagaatgaccaccgggaacgccacgttgatggccgccatggcggtgatccccacgccctggcccacaaagatctggtccacgatgttgtagaggcagttgaccatcagcgtcagggccgtggggatggcgtagcggacgatcagcttttgaaccggctcggtttccagcgggctgcgggactcctgatcggccgtcatacggatccctcctccggcgggcgcaccgcccgccgtgataaaaagtcccagcggcagagcaccgccctgcccactgggtaagcatcaatttttttcagcataacatgggcggcggtaaaagtcaacgcactggacagcggtctgttcacagaatgttttcaaagaagccgccggatgccggcaaccttttggcggccggacctatctatatggatgtacaggcggtgcggacaggcgtgcctgtccgcagtggctccgctgtacaaaatcacaaggaaaaggatggaacatacatgagaggattgctcacaggaatcctggcggcgctgatactgctgacgctggcggcctgcggctctgaaaagacggacgccggcaacgacgggaaggaagaggacagcgcaacggtcaatggtgtggtgaactgtatgggggatttcctggttctgcttactgacgatgggacttatcaggttttcgactttggcgaggatgtggatcaggggcgtcttgaagagggggacagcgtcacagttacctataccggagagcttgggagcgaggatccggtgcctgtggcggtttctgtggagaagacagatgcggtataaggaacgctttccataaagcagcggcccgcaaactgcgggccgctgctttttagcagggcagagagacctgggcaatcaggtcccgcacaacagcactgcctag

SEQ ID NO: 4932 - DNA, 1681 bp, Unknown
  gut microbiota DNA sequence
agagaggagcgttgaccatgaaacgcattctgaccatactggccgcgaccttgttgctgactgcggcaatggccgggaccgcctccgcctcttcctacgactccgttgcggaggaattgtccgccatcggcgtgttccggggcaccgccggcggctttgagctggaccgcgcccctacccgttccgaggccgccatcatgctggtgcggctctacggcgccgaggacgaggccaaagccgcctatgaggcgggagagatctccatgcccttcaccgacgtgagcgaaaccgcggccccctccgtcgcctggctgtacagccaaggcatcaccaacggcacctccgccaccactttcggcgcatccagtccgtgcagcgcaaaaatgtattgcgccttcctgctgcgggcactaggctatgaggacggcgtggacttcctgtacgcagacacgctggacttcgccatgctccacggcctgttcaacctctccatgctggacgccgcccccttcctgcgggacgatctggctgccgtcacctaccaggccctgggcgctgatctcaaggacggcagcacctatctgctggccagcctggtggagagcggcgccattgacgccgaggccgcccggcccattaccgagaaaatcgaggcctaccgggccctgaccgccgccagccaggcctcctccaccggcatcgacgcggactataccatgaatatggggatggacattgccgttgacggctccgatgggaccgagaccatccacgaaaccatgtccgtggccgtctccggaaacggccgcatccagatgattctgaaagacccgctccagctggccatttccatgaacatgaacatggaatccaacacggcaggcgccggccccgatgtgaccatgcaggatcaagtctctgttcaggagtggatgcaggacggctgggtctatatccaggaggagatggacggaaccacagaccggtacaaatatccggttggcaacatggacgggttcgcggagttttaccaggagatgctgcagatcagcggccagatgaacagcatgatgctgcccatgatcgactccatcgacgtctcccgcacgggctcccgcaccgtatacaccatgaagatggatgacagcctgaacagccttctggaggatctgctgacggccttgcaggaagagcttgccgccatggagagcccggtggacctcaccgcagatctgcagagctgcacatacgtctacaccgtcggttccgacggagagctggagtcctgcaccgcggacttcgacctggatctggtgctgggcctgcctgtcacggagaccgaaaatgcgcagattactgccaagctccagatggatatgcagatggatgtcaacgccaccggcgatgatgtgcgcatctcttatcccagcttctccaactttgaggacctgaccccggtcctctccggcggtgagctgtaaccccccccttctaattcagtaagagagcgccgcgagcaaagctcgcggcgctctcttatgctccaacggacggcaaatcaggaaattgaaatcattttgcctcagcggtacagccgcccctctcgaaggccgcatcagcccggaggccacgtcatatctctgccgctcagtacgtggaagtgcagatgaaacacgctctg

SEQ ID NO: 4933 - DNA, 721 bp, Unknown
  gut microbiota DNA sequence
cttacttcgcagccttggcggccttgatggcctcgatcagcatgggggtgaccttgaacaggtcgccgcagatgccgtagtcggcaatctcgaagatgggcgcagtgtcgttcttgttcaccgcgatgatgcactcggagtcctgcataccggccttgtgctggatggcgccggagatgcccagggcgatgtacaccttcggatgcaccgtcttgccggtctggcccacctgatggtcggcagacagccagccggagtcgatggtggcacgggagccgcccacgacgccgcccaggacgtccgccagctcctcagccagcttgataccgccctcgacatccttgctgatgccgcggcccacagacacgatgtagtccgcgccgatcaggtccaccagcttcttggcggccttcacgacctccacaacctcggtgttcaggtcgctctcgctcagctggaagctgggcttcacgatctcgcacgcatccgccttggcctggtcgaagacgttcttcttcatcacgccggggcgcaccgtcgccatgcagggacggaaccgcgggcagatgatggtggccatcaggtggccgccgaaggccggacgggtcatcttcaggttccggtcctccatatcccacttctggctgtccacgtccagggtgctggactcacgcaggaactggatgtagttcgccacatccacgtccaggtgggtgcagtc

SEQ ID NO: 4934 - DNA, 144982 bp, Unknown
  gut microbiota DNA sequence
tctgcggcgacctgttcaaggtcacccccatgctgatcgaggccatcaaggccgccaaggctgcgaagtaagcgaataaaagccaagagccgcacgggcaaagcccgtgcggctctgttctgtttgaacacctatgggggataccggcagttcaggactctgcgcgctcggcggcacaatccggatgctctgcgacaaactccgcctcagcctccgccaggatctttttgtctgccttggtggtgagttgggatttatcgaatttggcgaacaggtccggccgccgttccatagtgcgcttgtagctctgctttttccgccaggcagccaccttaccgtggtcaccggagagcaggatctccggcactgctcgaccgtgccattcagccgggcgggagtattggggatattccagcagcccgttccagtgggattcctcctcaaagcactccgcatccggcagaacgccgggcaccatgcggcacaccgcgtccgccaccgccatggcggggatctctccaccggtgaggacgaagtcccccatgctgatctcctcgtccacacactcgtccaggaaccgctggtccacaccctcatagtggccgcagaccaggatcaagtggtcatatcgcgctttcagctccttggcaacttcctgggtgaaggtgcggccgcagggggagaggaagatcgtccgtccggggccgtaggtctccacgatgtggctccagcagcggtacaggggatctgcctgcatgacagcgccccggccgccgccgtagggatagtcgtccacctgcatctgcctgttggtggtgtattggcggatctggtggctctggatggagatatagcctcgctgctgggcccggcccaggatgctcacgttcagcatggcgtccactgagtctgggaacagcgtcatgatgtcaattctcatccgtggccatcccttcccaaacctggacctccatccggttggcgtccaggtccaccgatttgataaacacatccggcacggcggggatcagatactcccgcgctcccctgaccgtgtagaccttgtgagcgggataggagtccacccgggtgatctcgcccagcgtctcgccggtggcggcgtcacagacggtcatgcccagcagctccgcatcaaagcaggcgccctccggcagcttggcgtctgcccggcggatatacaggttcttacccttcagggccagggccgcgttcatatcatccacgccggggaacttcatcagcaccagggacttgtggacgtggttggcggtgggggtgacgggggccccgtccaaatagaacgtctggaactgggtcaggaaggcagggtcctggccgtccggctgtacccgcacctcgccccggatgccgtgggcgttgacgatgcggccgattttgatggtttccaatctcataggagcgctcctttgggaagtgatggcacgccgggccgtctccggcccggacaggaggcaggcgggccccgtaccctcctgcctgacaacgtttatcggcttgtttctgtgtccgcccttcccagggcggaggcggggaacagagagatggtcccgttgtcgttgagatagcgcagcagggacagcaggatgggcaggccgaacaggcccacgatgccaaacaggtggttgcccacaaacatgctcatcagtgtcagcacaggatgcaggccgatctgtgcccccacgatccggggctcgatgatgttgcggatgacggtgatgatgacgtacagaaccagcagtgcgaaggcgtggggaagatctccgcccagcgcggagagaatgacccaggggatcatgatacctccggtgcccagaacggggagaatgtcgaaaatagcgatcagcagcgccaccagaatcgcacggttcacgccgatgagggtcagaccgacggatagttccacaaaggtgatggacatgatgagggcgtaggagcggatgcagacgaacagcgttcccaccacatacgccttgacctggagtaccagattccgggtgctcccctggaggcagcccaggcaaaaccgcacgatcttctggtagtcgacggcgatgaagaatgtggaaatcaccatcagcagcagccggatcaggaagccgggcagggaggtggcgaaagaggtggctatggacacaccgcccaccaatacgacggagagactggagaccaactgccacagcatattgagcagttgggactgcagctcctgcaacgcggacatgagggagggatccagcttggccagcagctcctccagccaggcgaaaaagtcagtgagctccgggagaatataggcggaatagagcgagggaatctgctgtaccagagacgtgatggtggccgtgatccggattcccgccagcgccagcagcaggccgatggtgccgtatgtgaggaccaccagcagtaccgccaccaaccccttgggcgcgtggagcacccgggagaggaagcggatggggcggcgcagaacataggcgatcagaaacgccaagacgaacggcagcagtagcggcagcgcatactgcagcaacagataactcagcaccagaatcagcgctagataggtcacatcaatgatgaattttttctttttttctgtggacaccaaaagcctccaatcccacaggcagcgtcacctgacgcttgcggtgtagtacaagtaagcagtggaacgggctggccgaagcggcggggccgcagcccggacagcggcagcgaaatgatcgaaaaaggaggaggcctggcctcctcctttcggatctggcggaagcggcccgccggatgatcggttcaatctacaatatctacggaaaccttctggccggtgcgctgggcataggaccggatgacagtccggatctccttggcgatgcggccctgccggccgatgacctttcccatgtcgtcgggggcgacgcgcagctccagcgtcagctcctggggaccctccacctcagtgacagagacggcctccggatcatccacaaggtttctggcgatgtagagcagcaactctttcatgcccgatcctccggatcagaggacttctacttttttcagcagagctctgacggtgtcggtgggctgggcgccggacttgatccaggcctgggcgcgctccgtgtcgatcttgatctcagcaggggagacgcaggggttgtaagtgccgatctcctcgatgaagcggccgtcccgggggaaacgggagtccgctaccacaacgcggtagaaaggagccttcttggcgccaaggcggcgcagtctgattttcaccataatttgttacctccaacagtaaactcgaaattttttatctataaatgcatagcacttatatccactttatttcagccgcttcttgcgaccgaagccgtgcatccggctgcccaggccgccgcctcccattttggaaagccgtccccgggtcatctgcttggtcagctgctgcatcatatcgaactgcttcagcagccggttcacatccaccacctccaggccgcagccggcagcgatgcgctttttccggctggcgttcaggatctggggattctcccgctccagcggggtcatggagaggatgatggcctccgtgtgggccagggccttgtcatcgatggtggcaccggccatctggcggcccagagcaccgggcatcatgctggcgatctggctcaggtcacccatattccgcagctgctggagttgttcgtagtaatcctgcagcgtcaggcggtttttccggagcttttcctccagcttggcggcctgattttcgtcgtaggtctgctgggccttttcgatgaaggacagcatatcgcccatacccaaaatgcgggatgccatccggtccggatggaagggctcgatcatatccagcttctcgccggtacccacgaacttgatgggcttgccggtggaggcccgaatagagagagcagcgccgccacgggcgtcgccgtccagcttggtcagcaccacgccgtcgatgcccagcgcctcgtcaaaggcagtggcggcgttcaccgcatcctggccggtcatggcatccaccaccagcaggatctcattgggatggacggcagccctcatccgcttcagctcatccatcagggactcatccacatggagccggccggcggtgtccaggaagaccatgtcactgccgtggtcccgggcatggcggattgcattctctgcaatctgcaccgggtcaccttgaccctgctcgaataccggcaggtccagctggccacccaccaccttcaattgctcgatggcggcgggacggtacacgtcgcaggcggccagcaggggccgcttgccaagctggcggcgcatcagccccgccagcttggcggtggtggtggtcttgccggcgccctgcaggcccaccatcatcacaacggtgggaccgctgttggccatggagagccgggcggtgccgccgcccatgagctttgtcagctcttcgttgacgatcttgatgacctgctgggcgggcgtgaggctgtccaacacgtcggaccccacagcccgctctgtcacggtagccacgaagtccttgaccaccttatagcctacgtcggcctccagcagggccagacggacttcccgcatggcctcccggacgtcgttctctgtcaggcggcccttgccccgcagcttcttgaatgttgcgttcagtttttcggtgagcccttcaaatgccatgcgatcattccttcaaagcggtggcttccgcgtgaatcaattccgccagctcagtcagacgggggtcctcatactggcggtagttgatggtcttcagctcggcggctgcatcctcgatggcctgcaaatggccccgcatctgctcgaagcgccggatcaggccggtcttgtcctccacctcctgcatgacgccctccgcccggacgatcacgtcccggacgccctggcgggagatgccggcgttttccgcgatctcagccagagacaggtcctcattgtaatagaggtcaaagaattccttctgccgctcggtgaggagttcgccgtaaaaatcgaagagcatggtcatgcggtatgtctgatttttcatgaactccctcatttctgtaaagctgtattcctttacaacgagaaatagtttacaggattttgccggaaaagtcaaggggaaaaacgaaagaaatccggaaaaaattcccctccggcagaccggaacggcttgccaaatccgcgtttgcggcatagactgagagggactgaacagaacggagggagtttatggtattcgacgcgcattcggatctgctgtacgatgtgacccggcggcgcctgctgggggagcggcgggtgctggagcaccaccatctggaccggctgcggcggggcggcgtggaggggctggtgctggccgtctgggccagcggtccccgagagacgttctggaaggacaccgcctggaaggatcctgcatccaatttgggccgcacccatcagatatttgcctgtgcccgggcagacctggcggaatgtccgcaaatccgcccggtccacaccgcagcggaggcagaggctgcccgggcagcgggccaaatctacgccttcctggcggtggagggcatggcggccatcggcgggaaccccgccggcgtggactggtactacggccagggcgcccggctggggatgctcacctggaacgagaccaatgccctggccgccggagccggaggcgatcctcaggcggggctgacggaggcgggacgccgggcggtgcgccggatgggagaactggggatggtggtggacgtgtcccatctgaacgacggcggcttctgggacgtgatggacctggccgccgggccggtgatcgcatcccactccaactgccgtgccctgtgcgatgtgcgccggaacctgtccgacaaccagctgcgccgcatccgggacaccggcggcgtggtggggctgaacgccttccacggctttgtccacgccgagccccggcagcagaccgccaggaccctggccctccacgccgtccacatggcggaggtcatgggggtggagcatgtgggctgcggcttcgacttctgcgagtttatgggccctggaaacgagggggcagagggcctggaaagcgccgcccacatccggaacctcttctactggctggaaaagctggggatgaaccggcaggagctggaaatggtcgcccggggcaattttctgcgggttctggcggggccagacctgccgccgcaatgagaaagacagctgctccccatcggagcagctgtctgattttctgcatcacggctgtgtgaagcctagatagcgggtgccctgaaaggtcaggcggcccgtgtccccttccaccaggagaccatactcccggccactgacggagaactccatccggtcaccgctctccacctgaaaggtgacatagtaccgggtggaggtggtcatgtgatgggtctcgcctccgtggtgatggtgggagacatcgatccgcttggccaccacagtggcctccaccgtcaaccggggggagttgttgttccggtgccactggctgacaccccggacgatcatcacaatgaagagacagagcaccagggcgaagatcagaaagaacaaaatttcgaatccgccgccgaacataaaggagtctaaaagccccatgccgccaaagccgggcgtggtcatgaagatcccaccttttcctcttgttgagactgattttaccagataccgcataagtcggcaagaaagaatttgaattatgggaagagatatactataataatcccatgttgtattccacagaagaggagttgagaccttggaaagaaccagaatccaactggccgacggggtgtatctcacctatctgccggccagaaagttcaagaccagcctgctctccgcccagttcgtcaccccgctgcagcaggagactgcctccgcttatgcgctgctgccggccatcctgcgccggggcacggtgcgctatcccgacctgggggcgttgtccgcccggctggaccggctgtacggtgcctctgtggactacaccgtccgcaagcagggcgagaatcagtgcgtaggcttcgtggccagctttatcgacgacagctacatccccggtggggaacagctgctggagccggtggcggagctgttgggagagctgctgtgcgatcccgtgaccgagcggggccgctttgtgaccgcttattttgagggggagaagaccaacctgattgacgccatccgcagccaggtgaatgacaagcgggagtatgcctacgcccgattgctgcgggagatgtgcgacggggagccctacggcatcagccgcctgggcgacgaggcgggtgcggagaagctgcagatgccaaagctccacgccctgtacggagagctgcttgccaccgccaggctggagctgttctactgcggcagcgcatccctggagcgggtacgggaggcgttggccgcagctttcgccacgctgcccagggatgggatccgggacatcgctccgtccacgccccatccggcccggaccgaggtgaagcgggtggaggaggccatggacgtgactcagggcaagctgggtatgggctttgcctgcggcagcgacgactacgccgccgcgctgatgggcaataccctgtttggcggcagcagcaactccaagctgtttttgaacgtgcgggagaagctgtccctgtgctactacgcctcgtccgcctaccaccggcagaagcggctcatcaccgtctcctccggcattgagttccagaactaccagaaggcctatgacgagatcatggcccagctggccgccgtgcaggctggccgcctggaggactgggagctggagggcgcccgcagtacgctgctgaatgcctacgcctccatgggagattcccaggggaagctggagaacttctacctgggccaggcggccaccggacaggaggacacgccggagctgctggcggagcaggtgcggcacgtgacggcggaacgcatctttgacgccatgcagaccgcctctctggatacggtgtacttcctgaagggaaaggagactgcggaatgaagcagacgttttacgagcggatcggcgagtccgtctaccgggaggtgctgcccaacggattgcaggtctgcgtggtccccaagccggagcacgccaagaagtacgccttctttgccacccggtacggcgggatggacacccgcttctgtctggacggtaagtggctggacacaccggcgggcatcgcccactatctggagcacaagatgttcgacaccaaggagggtaacgccctccaggagctggcgaaaaacggcgcggagcccaatgccttcacctccaacgccatgaccggctactacttcgactccacggagcactttgaggagaatctggagatcctgctgtccttcgtctctatcccctatttcacggaggagagcgtggccaaggagcagggcatcatcggccaggagatccgcatgatcgaggacaaccccgactggcagctctacacccggatgatgcaggccctgtaccagaagagcactgcccgcacctctatcgccgggacggtggagagtatctcccacatcacagcggagacgctgtacgactgccacaaggcattctacaccccctccaacatgattttgacagtggtgggcaacgtggatccggtccatgtggcggacctggcccggcggatcctaccccgggagggcgggcctgcgatcccccgggactacggccaggaacccgcccaggtggcggcaaaggagacccgcatggccatggaggtctctgcccctcagttcctgacggcctacaagtgcgccccggcggcggacggggaggactacctccgtaccgccgttctgggagacatggcctgcgacatcctgctgggggattccagccacctgtaccagcggctctatgaggagggggtcatcaacaccagcttcggcggcgcctttgagatgatgccgggcgtggcatacctctatgccggcggcgacagcaaggacgcccgccgggccgccgctgagatccagagggaggcggagcgcctggcagcggagggcatcgacgaggactattaccagcgggtgcgccgggcgtccttcggctccaacctccgggggctgaactcctttgagaacatcgccgtgaccctgacggaggggtatttccacggctatgatcccttccgcttcccccaggtgttcgactccatcaccaaagaggacgtggccgccttcctgcgccgcaatctgaccgcggagcgggctgtgctcagcgagatcgtgcctagggagaactgaatccaagacagagaaagagggggaaccccatttgagagcattacaggatatgcccatcagctttcccggcctgttcggggactggtccttcaatcccgaccctatcgccgtccatatcggccatgggatctactggtacggcatcattttggccatcggcctgctggcgggcctggtgctgtgcatgaagcaggccaagcgctacggcctgacagaggacaatgtgctggatatggtgctgtgggcggtgcccagctgcatcatcggcgcccgcctttactatgtgatcttctatctggacctctaccgcaacgccgatggcagcttaaactggggcgagatggtggcggtctgggacggcggcctagccatctacggcgcggtgattgccggggccatcgtggcatttttctacacccggcacaagaagatcaagatgggcgccatgacggacctggcggtgatgggcctgctgctgggccagtgcatcggccgctgggccaacttcatcaatcgggaggccttcggcgccgagaccacgctgccctggcggatgcgcctgtggaccagcgccacggagtatatcgaggtccatcccacgtttttctatgagagcctgtggaatctgatcgggcttctgctgatcctgctcgtggtctccaaagcccgccggttcgatggggagaacacctggttctacttcctgtggtacggcctgggccggttctggatcgaggggctgcggacggacagcctgtatctctttaactggacgttcctggggcagcccatccgggtgtctcaggcgctgagtctgcttctggcagtcaccgccgcggtgatgctgttctacaacatcaagatcaaaaagcactcgcgggatgagttgctggtgaatcaggtggcggcggaagccgccgaggggacggcagaggcggatatttccacggcggaagcgggagagagtgtccctgccggacaggaggagccggagctcccccagccgccggagacccaaaacggggaagggggagagactgatggcaacacgcattgacggcaaggcgctggcggccaaggtcaaggcgcagacggcagaggcagcgaagtccctgtaccggcggccgggccttgcggtgatcctggtggggaatgaccccgcctcccgggtctatgtgaccgggaaggaaaaggactgcgccgagtgcggttttttgagctttgagcacgccctgccggaggacaccacacaggagacgctgctggacctgatccaggagctcaaccgcgacccgcaggtggacggcatcctgtgccagcttcctttgcccgggcatctggacgaggaggcggtgctgaacgccatcgcccgggacaaggacgtggattgcttccacccctataacgtgggccgcctgatgatcggtgatccggtgtttctgccatgcacccctgccggcgtcatggagatgctgcgggaatacggcatccccgtccggggcaggcggtgcgtggtgctgggccgcagcaatatcgtgggcaagcccatggccatgctgctgctccagcaggacggcaccgtgacggtctgccactccaagacgccgggactggcggccatcacccgggaggcggacatcctggtgtccgctgtgggccgggtgggtcttgtcacgccgggtatggtgaaggaaggggccgtggtcatcgacgtggccatgaaccggaacagcgagggcaggctctgcggcgatgtagacttcgccgcggtagaacccaaggcatcctacatcactccggtgcccggcggcgtggggcccatgacccgggccatgctgatgcgcaatatcctcaccgcagcccggaaccaccaggcggagaagtgaacagacgaaaagagcgccgcggcttttggccgcggcgctcttgatttgtatggggagaagctaccgttcctcccggaaatacgccagacccaggctggcggggggctgattctccttcttgttccgcagggagacaaaaatcagcaccgcgatggtcacgagatacggcagcatgttgaagaggtacgtgtcccgccggcccaggccggggatgatgaggtacacccagaacagcaggccgaacaggtaggagccccagatagcgttgactgtccgccaggtggcgaagatcaccagcgccacggccagccagcccagggactcgatggtgccgtcgttggcccaggtgcccttgatgtagtccatggtgtagtacaggccgccgagaccggagataccggcgcccacgcaggtggccaggtacttgttgcgggagacgttgatacccgccgcatcggctgtggcaggattctcacccacggatcgcaggttcaggcccggccgggtgcggttgaggaacagctgcagcaccacggccagcacaatggccagatataccatgaagccatagctgaacagcagccgcccaggaagccccaggtccgacaggccggggatggtggcccggtacacggcgctggtggcggctacggagatctggcccacgccgccggccatggagttcagggtgccgccgaagaagttggccacaccgccgccgaagatggtcagcgtcagaccggtgacgttctggttggcccggagggtgatggtcaggaaactgtacagcagaccgcccagggcggaggcggcgaacgccgccagcagagagatcaccagacacacgaaaccggagggatcgggattgttgaactcatagaagaaggaggccgccagtcccgcaataccgcccagatacatgatcccggggacgcccaggttcaggttgccggatttctctgtcaggatctcgcccatggcgccgaacagaatgacggtgccgaactggatagcagactgaatcagctgaacaatttggtcgacgctcatttggccccctcctttccgccccgcaggatgatgcggtagttgatgaaaaattcgctgcccagaatgaagaacaggatgatgcccgtaatgatattggaggcgtagtcattcaggttgaactgggaggcgatctgaatggcgcccttctgcagaaacaccagcaggaaggagatcaggatcatcacaaaggtgttgaactgagccagccaagccacgatgatggcggtgaagccacgtccgccggcggtggaggtggagatggtgtggctggcgccggccacggcgatgaagcctgccagaccgcagatggcgccggagatagccatggtgcggatggtgaccttcttcacgttgatgccggcgtaccgggcggtgttctcactgtcgcccaccacggagatctcatatccctgcttggaatatttcaggtacaggaacatccccaccgtcagcagcagcaccaggacaacattcaggccgtattcctggccgaacagctccgggaaccagccgtccttggtccgctggttgatgacgcccacggtattggagcccacgggattttcccacagggccacaaagtagctggtgagctggatggccacgtagttcatcatcagggtgaacagcgtttcattggtgttccacacagccttgaaggtggcgggcaccatgccccacgccgcaccagccagcaggctgaccaccgccatgatgaccagcagcaggggggtggagatatcgccgccgaaggcccgcataaacccggcggtgacgatgccgccgatgaggatctgtccctcggcgccgatgttccagaagcgcatcttgaaggcgggggccagccccacgccgatgcacagcagcatcatggcgtcccggacagtaacccagctgcgccggggggtgccgaaggcgccgtcaaagatgccctcgtacacctggaaggggttcagcttggtgacggcgaagatgaagatgccgctcacgaccagggacagcagcaccgcgatgatccggatggcccatgccttggggcgggcgatgccgtcccgcttggcgatgcggagcagaggctccctgtgggtcttaccctgtgtcatgcctccttcgcctcctttacaaagcgggtcatcagcaggcccacttcctctttggtggtggtgcggccgtccacaataccgctgacctggccgccgcagagcaccaggatccggtcgcacagctccagcagcacgtccaggtcctcgcccacatagatgacggccacgcctttcagcttctgcgccgtcagcaggttgtagatggtgtaggaggtgttgatgtccaggccccgcaccgcgtaggcggtcatcaacaccgagggattctgggcgatctcacgtcccaccagcaccttctgcacgttgccgccggagagccggcggaccggcgtgttgatgctgggggtcagcacatccagttcctccttcacccgctccgccagctggcggggcggcttgcggtccagcagggggccccggccggaacggtaggtcttgagcatcatgttgtccgccatgcccatagaacccaccagtcccatgcctagccggtcctccggcacaaaggccatggacacgccgatgtcgtggatctgccggggattcttgcccagcagctcctcaccgcccttgtccaccggcacatgctgaccggcgatgggttcgtcgggggcggggggatgatagatgacgtgggacccgggctgggtgacccgcaggccggcgatggcctccagcagttccttctggccgctgccggagatgccggcaatgcccagaatctccccgccgtaggcgtcgaaggagacatggtccagagccttgatgccgtcgggagtcaggaccgtcagatccttcacctccagccgcaggttgcggtcctccaccagggggcggtcgatgttcagcgttaccgcatggcccaccatcatgtccgtcagcttctggggagaagtgtcgcaggtggccacgtccccgatatagcggcccttgcggagcaccgccacccggtcggacacgtccatgacctcgtggagcttgtgggtgatgatgaccagggccttgccgtctgccttcatattccgcatgacatcgaagagccggtccgtctcctggggggtcagcacagcggtgggctcatccaggatcaggatgtctgcgccccggtagaggaccttgatgatctccaccgtctgcttctccgacacggacatgtcgtagatcttcttgttgggatcaatggaaaaaccatatttctcactgatctccaggattttggcggaggcggccttcagatccagcttgcgctctccgtccagccccaggacgatgttttccgctgcggagaacacgtccaccagcttgaagtgctggtggatcatgccgatgccgcaggcaaaggcgtccttgggggaggcgatggtggtgggctcgccgttcaccaggatcttcccttcgtccgggaagtaaatgccggccagcatattcatcagcgtggtcttgccgctgccgttctcccccagcagggagaggatttcgccccgcctgatctccagggagatatcgtcgttggcaaccaccttgccgaaccgctttgtgatgtgccgcagttcaatggcagtggtatgttccaaacagatcatcctttcttttagtgtcggttccgcgccatggccgcaggcacatgcctgcggcgcgggcctccggagggaaaagaaaagggaaaaaagaccccggcggccgatgccgcggaggggatggagcgatttgagagaaaggggctgccaaagggcagcccctttcgttggatatttagttgttgttcagctcagtgatgccgtcgatccgcagggagaagtacggagcggagcgcagcacggactcctggaaggcgccgtccacgatggcctcgccggtgtcgttgacaaagtcgccgtcgctgtccagaccgaacgcagatgtcacatgaccgtcggcgtccacctgataggacccgtcggcagcgggctggcaggtgaacttggaggtgtcgaacaccttcaggctgccgtccttgatgctggaccaagcggcgtccacggcctcctgggtgccctcggcgcactcaggccccagcttggagatcatcacagcgtcctcactgatgcccacggcatagtccacgggcacttcctcgccggcgatgaacttctccagggtgtcccggtacaggacggaccagttgttctgggaagaggtcagagcggcggtgggcgccacttccagcatatcaatgttgtagcccacagagtagaccacagagccggcatccttctgcgcctggacggcggagggggcaccggtggagtcggcgtgctggccgatgatgacgcagccgcgggccatcaaggcattggcggcctcgccctcagccacgggatcataccaggagttggtgtactggacctccatgtaggcctcgggaacctgggtctggatgcccagcaggaaagcggtgtagccacaaaccacctcggcatagggataggcacccacatagcccaccttgggatcggtgacggtgccggcgtccatcagctctttcagcttcatgccggccaccacgccggagacgtagcgggactcatatgtataggggaacaggttcttgtagttgtccagaccggaggtggcggccatgtcgccggtgcaggagacgaaggtaacgtcgggataatcctcggcggcatccagcatgtagctctggtggccataggagtcagagaagatgatattgcagccctcttccgccagatccacggcggcgtcatagcagttttcatcctccgcgatgttgtagcggaaaataacctgagaattggcatcaatacctaactcttcacaggcggcagtcaggccctcgatatgggccgcgtcataaccggagttgatgtcgtggacgcagatcaaaccgatcttgacatccgcggcgctgccgctggattcctcattggcggcggggtcttcggcggggctgccggtgctctcctcgtcggagccgccgcaggccgccaggctgagcgccatgaccagcgtcagcagcagtgcaaggaacttcttcattctactttcctccttaaaataaaattgggtggatcactgcaagggacaaagcggggtgtttcccctctctattgccatcatacagggtcaaacggaaaaattcaaccggatttttactttttttaggcggatagaccaaaaaaataccgacctaaataggtcgacctttggcagtgtgcacaataataagacgaaaaagacaaacaaggagagcgtttttttcgctctccttgtagaaaattgacagattgaccttttttggatcttacatggagacggcggtgccggtttttccggcgatgccgtccttggccttctccagcagggtgatgagggctgtgcggccgggcttggacgcggcgaacttcacggcagcctggaccttgggcagcatggagccgggggcgaactggccttccgcctcgtactgccgggcctcctccggcgtcaggtgatccagccacttctgatccggcttgccgaagttgatggccaccttctccacggcggtgaggatgatgagggcgtccgcgtccaggctctccgccagcagctcggaggcgaaatccttgtcgatgacggcgcctgcgcccttcaggtggttgccctccgtccggtagacggggataccgcctccgccgcagccaatgactacctggcccgcctccatcagcgtacggatggtctcgatctccacaatggctttgggtttgggagaggccacgcagcggcgccagccccggcctgcgtcctccatgacgcagttgccccggcggcgcatctcctccgcctcctcctcagtcataaaggtaccgatgggcttggagggattctggaaagccggatccgccgggtctacctccacctgggtgaggacggtggccacgggcttttggatgccgcggttcagcagttcctcccgcagggagttctgcaggtcatagccgatatacccctggctcatggcagtgcagacggacatgggggcgatgggatggctgtgatcctcccgggagagggtggtcatggcgatgttgatcatgcctacctgggggccgttgccgtgggccaccaccacctgatggccctcctgaatcaggtccacgatggccttggcggtgtgcttcacagcgaccatctgctccggcaggttgttgcccagggcgttgccgcccaaggcgataacgatacgtttgcccatagttggtgtatcccttcttcacaaatgatagtggtcgaacctatcagatagttttggcgggaacgcccgcgctattcccgccaaaacttgaaatttttagaacgatcagaacagcttccgcttgctgccctggtccagggccatcagcgcggagaccgggtccttcactttgctcatcaggatcatggccgcgatgatgtagggcttgtagctggcctccttgtacaggggcaccaggtaccggtcgaacacggagttgtccacctcgccctccgggcagctgaggccggtgatatcggcgggcaggcagtgcaggtacagggccttgccgttcttcgtccgcttcatcatctcttcggagcaggtccagtccttgtgctgggcgttctgggccagcagctgcttctccagagcgtcgatacccgcctggtcaccggcctgatacagcttggtccgctgctccatggcggcaaagggcgcccagctcttgggatagacgatgtcggcgccgtcgaaggcctcctccatggtggagaccttcttgtaggagccgccggtggccgccgcgtttttcttggcgatctcctccacctcgggcatcacatcatagccctcgggatgggccagcaccacgtccatgccgaaccgggtcatcaggccgatgacgccctggggcacggacaggggcttgccgtagctgggggagtaagcccaggtcatggcgatcttcttgcccttcaggttctccacaccgccgaactcatggatgatgtgcagcatgtccgccatgcactgggtggggtggtccacgtcgcactgcaggttcaccagggtgggctgctgttccagaatgccgtcccggtagccctccttcacggcatccatgaaggtcttctggtacttgtggccctcgccgatgaacatgtcgtcccggataccgatgacgtcggccatgaaggagaccatgttggcggtctcgcggacggtctcgccgtgggcgatctggctcttcttctcgtccaggtcctggacggtcagacccagcaggttgcaggcggaggcgaaggagaaccgggtgcgggtggagttgtcccggaagatggagatgcccaggccggagtcaaagatccgggtggacttgttccgctcccgcaggtcccgcagggcgtcggccacggtgaagatggcctccagctcctcgtcggtcttgtcccaggtccagtagaagtcggacttgtacatgttgttgatgtgcagcttttccagatgcttggccagctcgatggtcttggacatattcagcactccttgtaatatgtgaaattgtagatgtatggcggctccgccgcagcgaaaggaaaaaccaggaaaagggtctagggaaaaacccaggtttttcccagttgatttgcctccggcaaatcaagcaaatcgaatcattttcgccgcggcgtgtacgtggcgaaaatgccttgacccagccccccttcgaagctcaccggatatcgttatccgtgaggctctgccggaactcggtgacgtcagcagtcttgttctcgggcttgtacaggccgggtactgcggcgtacagggcggcacaggtcaccagatcctgcttccaggtgatctcattgggggcatgagcctgggactcggcgccggggccaaagcccacgcaggggatgccatatcggccctggatggacacgcagttggtggagaaggtccacttgtcggtgaggggacggccctcccgcaggtgcatggcgtcccgcttctggtccgcgtcggcatggccgatgcgcttgtcgccccacagggcatggtgggcgtccaccagcgcctggacatgggcggcgctctccttgttgatccaggtggggaagaagcactccgtctcatagacctcgccggtccaggcgggccggtcatacatgtacatgctgaccttcacatcgtctccgtacttctggacggcgggcagctgccggatctcctccaggcaggagtcccaggtctcgccggcggtcatgcgccggtcgatggagatggcgcagctgtccgccacagcgcagcgggagggagaggtgtagaagatctggctgacggtgcaggtgccccggcccaggaactgggcgtcctcgtagtgctccggattgaattccggattcagcatcttcaccaggcccttcacccggttggaggggccgtcgccgctctcgttcagggcccggacatcctggaggatgtcggccatcttgtagatggcgttgtcgccccgctccggcgcgctgccgtggcagctgacacccttgacgtccacccggatctccatgcggccccggtggccccggtagatgccgccgtcggtgggttcggtagacaccacgaactcgatcttgctgcgggcgtcctcctggccctggaagtccttgttgacgatgtactgccagcacatgccgtcgcagtcctcttcctggacggaacccaccaccatgatcttgtagccggcggggatcaggcccagatccttcatgatcttggcgccgtacacggcggaggccatgccgccctcctgatcgctgccgccccggccgaagatgacggcgtcgtcctcatagccctgataggggtcggcctcccagttgttgatgttgccgatgcccacggtgtcgatgtgggagtcgaaggcgatgatcttgtcgccgtcgcccatccagccgatgacgttgcccaggccgtcgatctccaccttgtcatagcccagcttctccatctccgccttgatgcagtggacaacctccttctcctcacagctctcgctggggtgagagatcatctctcgcaggaaccgggtcatgtcggcctgatagccttgggccgccgctttgatcgcttcaaaatccatatcgctgacctccatatcaatgtttggaatcccgtcatttccacatcacggattggcttacctatccctatcatagcataagaaaacaggatgtcaaacaaaaaatgagaaaacctaaaaatttttttgaatctccggcgcggaatgcgccgtccggccgaaatgattgcaaaaccaaagggcttgtgatatataatggtagagtaaaaagaacagcagatttgggatggggagagcttatgccgataccggaaaacgtggaaaacctgcggagagtttccgcaaagagcagcatttatcaagtggtatgcagctggatcatcacgggtgtgctgaagccgggagaaaagatcgttgattccgagcttgcgaagcgattcaatgtcagccggaccccggtgcgggaggccattcagatcctggagggacagaagctcgtctatgtggtgccgggccgggctacggtggtggcggatattgaccctgcggatattgaaaaatgctaccggacgctggcggagctgcagggactggcggcggagctggcctgcggcagcctcacggaccgggaactggagcagctggagcggattcacgccgcctttgtggatgcctgcggccgtaatgacggcaccgatgcgatcacgcaggacaacctcttccatgacgcgattgtccgcggggcacacaacgagtatgtggaggaattttcccacacgatgatcctccatatccagcggatcaaataccattatttccactgtgaccggctgcgaaagatttccgtttcccagcatggggaaatccttcagaccatccaggcccgggacagcgcccgcgcgaaggagctgatgcgaagccactggctctgctccatggaaaatagcctgcgggatgttgcgggcatgatccatggagccggcgcagaatccggacaggatgttctgacaaagtaaagatgggaagaaaaagccagagagaggacgcggagagaatccgggtcctctcaacgttttctaggcgaattccataaaattgtatccggcctctggtacgttccgtagaaatcctttggagaggccgggctttcgttgacttccacaagagtgcggttcataatgaatatgcgatatattacatattgcatataaagtatgacagaggttgagaaaggagcagagacatggacagagaccagcggctgattgcgttttgccaacaggctgttcgaatccccagtccctccgggcaggaacgggaagtggcccagctgatgaagcgcaagatggaagagtatggtttcgacgaggtgctcatcgacaggcacggcagcgtactgggccggatgcggggctgccggccgggaaagaccatccttctggatggccacattgacaatgtggatgtgatcgacgccgacgagtggacccacgacccctttggcggcgaaatcgaccaggggcggatttacggccggggcacatcggatatgaagggcagcgtgacggccatgatctctgcggttgcccactttgccgaggacagcggccgcgactttgccggagagatttgcgtgtcctgcaccgttcatgaggagtgttttgagggggtctcctcccgggagattacccggctggcgaagccggactttgtcatcattggcgaagcgacgtccaccactgtcaagatcggccagagagggcgcgcggaggtggttgtggaaacagagggggtgagctgccattcctcgaatccggacaagggcgttaatgcggtctaccacatgatggcggtgatcgaggagatccgccggatcatccccaacgagcaccccattctgggaaaaggaattctggagctgacagacatcatctcgtccccatatccgggcgcctcggtggtcccggccctctgccgggccaccttcgaccggcggaccctgacaggggagaacgaggccgtgattctcggccaggtggaggaggcaatcgcccgcgccagggaaaagatccccggcttgaaggcgcggacctatctggcagaggggaaggaggtctgctggaccggggaggccatcgccgcgaagcggtatttcccggcgtggctcattgatgaggacaatgaatatgtgcagaaggcgctggccggtctgaagaaagcgggaatcgaggcgccgatctctcacttctctttctgcacaaacggcagccacttctgtggcgaggccgggattccctgcatcggctacggcccctctttggagagcctggcccatgtgcgggatgaatacattgaaattgagcagctgacgaaggcgtgcagaggctttgccagcatccttcgggagttgacgcggtagagcgcggacgagaaatcacaaataatcacgaatctagaaggaatggttatagcgttggagcaaatctgattcttattgataaggagaatggaccgtatggaacagatcttgaaatcaatctccagctttctgtggggtgctccagtcctgatcctcctggccgccgttgggctgctgtttggatgtaagacaaaatttttccagtttcgcaagttcggctatattttaaagaatactgccggcgagatgtttaaaaaaggcggtggcgcaaaagggaaggaaggaacgctgacgccgctgcaggcggtgagctccgcgctggccggctgcgtaggaacggcgaacatcgcaggcgtggccaccgccatggtggtgggcggccccggcgccgtgttctggatgtgggtcgtcgccctgctgggaatgctgacgaaatgcgttgaggttacgctgggccagtactaccgtgtcaagggagaggacggcgtttattatggcggccccatgtactacattgagcggggaatgggcagaaagtggaaacccctggccgtcattttctctgtcactatcattttgggcggcctgggaaccgctgcgttcgcccagccctataccatgtccaccgctgtgcagaacagcctgggaattcccgcatggattaccaccgtggcggcggccgtcatctgcggcgtggttctgctgggcggcgtcaagtccatcggcggcttctgcgagaagctgacccccgccatgtgcctcatctatgtggtgggagtgctgggcgtgatcatcataaatctggaacatgtgcccgccgcctttgcggcgattttccgctatgcgtttgcacccatgcccgctgtgggcggtttggcgggctccacagttgcgctggcgctgcggcagggcgccgcccgcgggaccttctccaacgaagcgggctgcggctcatcgcccatcacccatgcgaccgccatcaccgatcacccctttaaggaggggatgtacggctgctttgaggtattcgtggatacgctggtggtatgcacgatgacagccctcggaattctctgcgcgggccctgaaatctggcagtccggcctggaggcggaggcgctgaccatggccgccttttccacagcgtacggcagcacggtcggcaagctcctggtcaccattcctctggcgttgttcgcattctccactatggtggggtgggagatcaattatgaatccgcgttcttctatttgtttcccaagggaaagcagtccaaggtgttcaagtacgccatccgcatcctgtggctggttcccggtttcctggctctggggaagacgccccaggtgatttggaccattgtggatatagtctcgggcttctggtgcatccccaacgccatcgcactgctggccctgtccggtgtgttcatgaggatttaccgggattatgagagcaaatacatcagcaagaccaagccggtctcccagccccttgagtatgtcgggaaggattgactgtcaggcggcgcttgggcgttgacaggccgcttccaagcgcagaaagctgtggacagagcatcaggcggcatccgcaaacgacgtggatgccgcctgatttttgggaccggcggagatcaaacacttttttcgcagacctaaaaaaatatttgctaaaacattgcaatctcggctggatgctggtatgatgcagatatgaatatcgctctggaaagtgagaaggtgatccccttggagagcaaccggctggagatgctcaagcagattgcagatgccttggcggcccagttcgggccaaactgtgaggttgtgattcacgatttgtccgcgcagaatgcggaacaccccattgtctatattgtcaacggccatgtcacaggccgcaaggtgggggacggggcctcctatgtcgtggtggagcagctgaccaccaatgacccggcgcctcgggaccatttggcctacctgacccggacgccggacggcaagatcctcaaatcctccacagtctatatccgtaacagcaagggcaaggtctccgccattctggccatcaactacgacatctccaagctgctgatggtggagagcgcggtccacgatctgatctccaccggcgaaccccagcaggaggaaccggagaaaatcgtcaacgtcaatgatctgctggaggagctgatccagcagtcggtgtccctggtgggcaagcccgtggccctgatgaacaaggaggacaaggtgcgggccatccgcttcctgaatcagaacggcgcgtttttggtgaccaagtccggcgacaagatcgccaagtatttcggcatctccaagtacactttgtattcctatatcgacacaaaacaacaggagggcaagtaagtatgattgatctgaccatcaacaagacgggcctggagcacaatctccgcaaggcgaaggaaaatcgcatcatcatccccaccatcgcccagatgcagcacccggagaccatcccggagaagatccgggagcggctgaagaccgtgggcctctgggatgtggatcccctgaacctgttccgcatcacctggaagaatgaggccaaggagagcggcggactgttccaggcggtgcccaactacatcgagctgcccccggcgctcaccggcgtcccctgccggatcgtggccatggtgggcaagtggttccccaccggctgccacaaggtgggcgcctccttcggctgcctggccccccgtctggtgaccggccagttcgacgtgaacaggcacaaggccgtgtggccctccaccggcaactactgccgcggcggcgccttcaactcccggctgctgggcgcccagggcgtggccatcctgccggcggagatgagccaggagcggtttgactggctccatgagatcggcgccgaggtcatcgccacccccggctgcgagtccaatgtgaaggagatcttcgacaagaccaacgagctgaagcaggatccccagtacatgatcttcaaccagttcgaggagatgggcaaccccctgtggcactacaatgtcaccggcaacgccctggcggatgtgtacgaggccatcaagcgccccggtgaccggttcgccggcgcggctttcacctctggctccgccggtaccatgagcgccggtgatctgctgaaggaaaagtatccccatctgaagctggcggtgggcgaggccctccagtgccctaccattctggaaaacggcttcggcggccaccggatcgagggcatcggcgataagcacatcccctggatccacaacgtgaagaacaccgacatggtcatcgacatcgacgatgaggacagccagcggctgctgcgcctgttcaacacccctgagggccaggcgtatttgaagaacgagctgcacctggacgacgagctgatcgagaagctcacctggctgggcatctccggcatcgccaacgtgctgtgctgcatcaagatggcgaaatactatgagttcaccgagcgggatgtggtgggcaccgtcctcaccgactccgccgtcatgtacggcagccgcatccaggagctgaacgaccggtatggcgcctacaatccccatgaggcggccatggaccatgcactccacatgctggggctgaagctggacaacatgcaggagctgacctatgcggaccgcaagcgggtccacaacctgaagtattacacctgggtggagcagcagggcaagaccgtggaggagctgaacgctctgtggtacgacacggagggcacctgggacaccgtccacgcgcaggccaaggacctggatgacctgatcaacgctttcaacgaggccaccgggctgctgaaagacctgtaaaacgccgcagggcggggcaaccgccccgccctgcttatttatgtctcctccgcgcggatataggcatcctcagcctcctgctgaatgcggaccagaatatcccaggcccggctggtctcctgctggtccagggccttcagagcgtcggcgatgccgttgaacaaaatcgtataatattgggggaaattttcgcgttccatatccgccacctccataatatgtattatattgcactataaattgtaatgcaatatgcaatattataaacgtgcgcataacgcaatacgattcgtcatataaaaatatggcgaggtgtgctatgcggaaattcaaaattcctaaaccagaatcaacaacgaacaaaacgattcgtttccccaacagcgttattgacgcggtagaggaggcgattcgtggaacagaatgtacgttttccgcctttgtgatcgaagctacccgggtggctcttgagaatcttctggaggaggaaacgtcaaaagaggagtaacgctatgaaacacgttttgtacggcaaatgcgtcaagtgcggcaagacctacgacgctgtgccggatctgaccaactgcgaatgcggcggcattctggacatcgtctacgattatgactacatcaggacccggctgacgaaggaaaagctggcggcccgacaggaccataccatgtggcgctaccgggagctgctgcctgtggaggaggacacgcccaacacccccctgcgggtgggctggagtcccctgtacgaggagccccgcctggcggagcagctgggcctgaagcgcctgtgggtaaaggacgacggccagaaccccaccgccagtctgaaggaccgggccagcgccatggcggtggccaaggcccgggaggcgggggcgaaggtgatcgcctgctcctccaccggcaatgccgccagctctctcgcgggcaacgccgcagcggcaggcctcaagacctacatcttcgtcccctcccgggctcccaagggcaaggtggcccagctgatgacctttggcgccacggtcatctccgtccagggcagctatgaggagacctttgaactgtccaagcaagccattgaccgctggggctggtacaaccgcaacgccgccatcaacccctacctctccgagggcaagaagaccgtggccctggagatcatggagcagctctcctggcaggtgccggactatatcgccatcagcgtcggcgacggctgcaccatcgccggcctctggaagggcctgaaagacctgtatgccattggcttcattgaccgcctgccccggctgatctccgcccaggcggagggctgctgccccatcaaccgggccattgcggagaacaagccctgggagcccatggaggagaacaccctggcggactccatcgccgtgggcgtgccccggaatgcggacaaggccctgacggcgatccgggagtcggacggcatcgtggtgaatgtctccgaccaggagatcatggccgcccagcagctgctgggccggacctgcggcgtgttcggagagcccgccggcgtcactggcgccgccggcgtgaagaagctctgcgagcagggcgtcatcggcaaggatgacacggtggtcagtgtggtcaccggcaacggcctcaaggacgtggccaacgccattaaggccgcgggagaacccatctccatcccttccgacatggaccgcctgctggtggcctttgcagaaaaaggcatcactgtggaataagcggcaaggggccggcgggagaccgccggccctttttctcgaaaaattttctgatccgcgcaacgatcctctcccgttttccgatgatataggtgaaagcagctttcataaagagagggactaccgtagcggatacggagaggaagcggggcgttcctccgggaagggcctgctgggcccggtcagcaggcggcacagagccttcttgacttttcccgcgcagattatataataatgtacggtgcctcccgggcaccatccacctgagggaatgagaaagaggaggcacctgatatgacgtatcccatgaccgtggcgggcctgcgccgggacctgcccatctgcaaagtgacggatgacctgtacatcggcgcgtttatcgtgttcggcgatgcggagctgactgtggcctgcgcccgggagcttttgaagctggtcccggcggaggactatgactacatgctgacggcggaggccaagagcatccccctgattcatgagatggcccgccagtccggtgcgaagaagtatttcatcgcacgaaagggtcctaaggcatatatgccggatcctatccacgtggaagacacctccatcaccaccgcgggaacccagcggctgtatctgggccgggacgatgcggagctgatccggggcaagcggatcctgctgatggacgatgtgatctccaccggcggttcccttcacgccatggaacagctggtggccctggcgggcggcaccgtcaccggccgggtggccgtcctggcggagggtgaggccgcagagcgcagtgacatcaaatttctggaaaagctgccggtgttccatgcagacggtactgtaaaagactgaagtgaagagagaccgggcgcgccgctgactcgcggcgcgcctttttccgcatacgcttgcaaaatcctggaagaatggtagaataaaggcacgatgaaaacgaagcatgtggtctattgacttccgcacgtcaacgcgccggcggcagtgcgctgcaccgccgccgtcaccggccgggtgccctccaggtgccgctgtggtttctgttcagcctgcctatgctgtaccacatcgtggtggaggaccggcagaaagtgggctggcctgtccatgactggctgccggaggccagcgccttgtgctgtatggaggtactgccgtactgttcgctggctatgcggcgccggtatccggcggaggggggagtacgtccgccgctttggggaccgggacgacggccacctgcttcggagcctgttctgcatcttcgctgtgtcgccctatctgatgaagacccggaacatcgcccaaaactatatccgggacgcagtggagatcgcccgagcagaacaggatatcacacagaagcgggcggcggggatggagcacttcggcctgctgcacgtgcggctggcggtctatgtgcgaacggacctgtgcccgggaccgggagatcgaggtgaacatgaccgtcaaaaaggagatgtccccggacacggtcatcaagctccggttcgacccatcggacacggcggacgtggtctatcagcggttcaatgccaaagtccaggaggtgaagaacgtcttggaggacacctccttcggtgcgctggccggcgcgttccatctggcgccgggtctgctgctgaaattcttggtgtgggccctgcaggtcagcgactacttcggctgcctgcccggatccatcacccatctctcgcacttccacgggtcgttgtacatcacatttatggcatcgctggggattccgcccattttccatcgcctgtacgatttcggcaatgtgccggtattctggtctttcggccggaagcggcaggcgtttgagtaccagtgggacggcacggtggcccggcggaggtaggtggacggctgcttcgtcacggacgagtggattgtggacggattctatttcgcggtcgccatgcacagttttcagaatctgatccacggtccctggcagctggacgagccgccggaggaggccgtgcaggatcagccctgatatagagaggaggtcgtttatgacggaccacaccgtaccgcccatcggaatgcggatgatcaaaaccgcggcggcagtgctgatctgcctgctggtgtccatggccgtggaccgggaggatatgcgcatctattcctccatcgcggcgctgctgtgcgttcagccctatgcggaagatacgaagcgcatggccatccagcggattgtgggcacagccatcggctctgtgttcggcatcgccacgctgctgctggagatggccctggatatccaggggactttggtgggctacatcgtcatcgctgcggtgaccgtgcccaacctgtggatcgccgtggtgctgaagtcctccaatgcggcggccctctcaggcatcgtgttcctcagcatcaccgtcacccatgtgacggatgccagcccctggatcttcgcctggtaccgggcgtcggagacgctggtgggcatcgcggtgggcatcgccgtcaacgccttccagctgccccgccggaagcggcgggacgtgctgttcgtctccggcctggacggcttgctgctgacggagcaggggacgctgacaccgtacagccgggtgagcctgaaccggatgctggacgacgggatgcagttcaccctgtccaccatgcgcacacccgcctctgtgcgggaggccacccgggacctgcggctccgcctgcccgtcatcgtcatggacggcgcggcgctgtacgacatggagaagaagcggtatctccatgcctgcgtcctgcccagggagctggccctgcggtgcgaggcggtgttccgggcccagggcatccactgctttctcaacggtgtactggatgataacctgatgatctactacggggaattccaccacgagacggagcgggcgatctttgagaagctgcggacatccccctaccggaattatgtgagcagaagctactacaaggattgccccattgtgtacctcatgggcattgatctgacggagcggatgcaggcgctgtatgacgcactgggggaggcgggcctgttggaacaggtgaaggtgcggttctaccctgcggcggagtatcccggatacagctacctgaagatctatgagcgatccgcctcacgtgaggccatgctggagcggctgaagcaggatctgggcatggagcggagcgtggtgctgacgacgcaggagggctgcggagacgtggtgatccgcggcggcgccaaccaggcggtgaagcggctggggcggctgtttgagccctatctctgggagcagaaataacacggacggagctgcggctccgtccgtgttttgcattcggaaagaaaaccggagcagggacttgacaagtgtggaagcctgtgtataatatgaagtatccttcatgtgaaagacgcttcacgagaagggaccttcacatttatggaaaggggagagagaccatgaaaaaccgtgtacgggagctccggaccgaggcaggcatgacccagcagcagctggcggatctggtccacgtgtcctcccgcaccatcatctccctggagaaggggcagtacaacccgtccctgctgctggcgtaccgactggcgctggtgttccgcaccacggtggaggacctgtactgcctggcggagaacaaggaacaggaggaccgggaaaatgaggaatggacataagggccgtatggcctgcggaattctggaactgatgctgggcgtggggctgatcttgtacatctgtctggcggaccggcagcggattggtctggctgcggtggccgcggtggtggtgacggcgggacttgtgaccttctgtaccggtgcaacggcggttccggcgaagcgtaaggaggaaactgtgcaatgagaatttattacaaaaagaaattttgggccggcgtgggagctctgctgctgggcctggccctgccgggcacctgtttgttcgtgggctgggagcggttcgacctgaaggacgccgtgctgacaacgttcatggtcctcagcggaatcagcggcattctccggagcctggaccgggagaaggcccggcaggaccgggacgaggaccgggacgagcgcacccggtacaacacgtaccgcagccgggccctcacgttccgggtgctgttttgcctgaacttcgtcatactggccgggtgcttcatcggttggtggcggtcaggtgaacaggaagtctacatccagacggctgttccctgcatggtgctgtttatcgtgggctggatcacccggatcgccagcgatttctactatgagttcaaggggtgaaaatgagatgcgcatttataataagcggaattttgctgccgggatcctcagtctggctctggcggtggcttgcggcgtggtcctggcggtgacgggattccagacgaaatggctgatcgccctggtgctcctgctggccgctggcggcttcgatctgtggtggtctctgtcccgggagtccaggctcccgcgggtggatgagcgggaccaggccgtcagccggaaaagcgcctggctggcctaccggattgtggctaacggctgctggatcgtgagtcttgcggccctggtggtctatggaatcagccggatcccggcagctctggcggtgaccatcacgctggacgctgtgaccatcggggcttttgccgccctacagggggctgaagtctactatgaaaaacggatgtgaggccgccggccctctggaaaaggagaacgtatggatcgaagcgaagatttgaaacaggtgcgggacctgcatctggtccgggatgagcgggacagggaggtggaggcggccgccggactccgggcgggaaacgcggtggtgctggtgagccagctgctctccgccgtctgcctgctccaggatgatccggcctggatggcgctgctgtccctgacgctcgtctgggggggcgtgaagggcttctggcgattcagacaggaccaggagaggatctatttggtgtggggcctgctgacctgcgccggagcggcggcgctgctgggactctatttccaccgggcctggtctgccgggatgtcgttcaccagactgctgggctacgcagtgctgtgccaggtgctgacggtggccgccggactgttatttgtggcgctgctgctgggtatcttctggctggcccacaagctagggcatatagagggagagcgttgggagcagtatttccagtccgtgtccaccgccggacttctgctgcgggtgggtgctgtgatggcggtggccctggcagcggtggcggccctcagcgttcccctgttcgcccggttgggctttcaggagccgggacttctggccgcgctgttttttgtggcaaggggcgcgtacctgcttaacaaattcagccgccggcgggacgaactgatccagaagctcctgaagctgaaacgctgagctgcttcagcctggtgaagcggcacgggggcagacttgtacaacctgccggaatctctcggtgtttgcagggagaattttctccagaggtgcctattatgcggactgccgtgagatgctatcataaaatggaaatcccatcgtggaaaaacaaatactgagatagaaataagtccgctgggcgtagtctatggagcgataggctgcgccctctttttctgctcaggacaaggagtgtttcgatcatcatgccaaaaacaactgtacagaaagtgatcttcggtctgctgatgtcctttttcatggtgctggccatggagatgtacaacacaggcctgcggaacggcggtcttacaaacgccgggatcctgaacgccctgcgggagctgccgctgatgtttgcgctgtgcttcctgaccagcacagttgtcggagaacccctggccgcccgcctggcggcacggctggcagtgccccgggagtggccctttgccgccgttctggcccggtccgccatgacggtgtgcgtcatgtgtccggccatgagcctatgggctacggtgatcttccagcagccggggatcgagttggtgccctcctggctccagacggtggtctgcaattttcccatggcgtttttctggcagatctttttctgcggtccgctggtgcggcggctgttccggctgctggtgccctccgcggcgcttgtacccgcctgtgcggaagaggcggcggaatgagggacatgtgcaagcggtcccggacgctggtacgtccgggaccgcttgccattatccctccgggtgcgtttttaaataggtgaggtagccctctagaatcagcgatgccgccacagcgtccaccacctttttccgcttcttggcgttcttgccgctgctcatcaggatctggtgagcgtcgatggtggtgcgccgctcgtcccacaggaccaccggcaggccggtggtctccttcagcagctgccgcatggcctgggccttttccgagcggggcccgcgggtgccatccatgttgatgggatgccccagcaccagccgttccaccctgtgctcctttgccagaagtgcgatctgtcccgtcacccggtccgggcggtaggcgttgatgacggtggtgaagccggccagcaggccggtggggtcggagatggcgatgccggtgtgggcgtcgccgtagtcgatggccatgatgcgcatggtggtctcctttccagggaagaataaacgccggtatggcgcgttttgcctgcccacaggataccacatcggggcaggccgcgcaaggcggaaaaaacctgacatttttttcaaaaagaggttgaccggcgccttgacctgtgttacaatcattcttacctgtgaaaaagggttttcttttcatgcgcttttttcgcttttcagccatggaggtctgcccgccaagctgcagggaggcaatcgggactctcccggtccgccggagagagagccccaataataaggaggtgccgttagatgcgcgtgaaggtcactttgagatgcaacgagtgcaagcagagaaactacaacaccatgaagaacaagaagaacactccggacaagctggaactcaacaagtactgccccttctgcaagaagcacacgctccataccgagactaagtaaacggtcacgaatgatgagaaagggcgtgtaaacgttatggcagaagaagtcaagaagaaaagaagccgcggtcagtggttccgcgaaatgaaaagcgaactgaagaaggtcgtctggcctgaccggaagaccgtgatgaaaaacaccggcaccgtgctgctgtgctccttggccatcggcgtgtgcatctggatctttgactttgtcatggtcaccgctgtccagatgattctcagcctgttcgcctgattgaggtagaaacatgtcagagagcgcgaagtggtatgtggtgcatacctattccggctacgagaacgccgttaagaccagcattgaaaagttcgtcacaggccgcggaatggaggacatgatcctgcggatcgaggtccccatggagacggtgacagaggtcacggactctggcgccaccaaagaggtggaacggaaggtattccccggctacgtgctgatcaagatggtcatgactgacgatacctggcatctggtgcggaacgtccgcggcgtcaccggcttcgtgggctccgccaacaaagccatccccctcacggaggaggaggttctggccatgggcatggaaaagcatgagatcgtggtcagatacaatgtgggcgaccatgtgaagatcgtggatggcccactggccagctttaccggcgtggtggaggagatcgagcccgagaagaatcgggtcagcgtgatggtctccatgttcggccgcgagactccggtggagctggagctggaccaggtcgaggtccaggactgatcgaatatctgccgggcgccccagggcgccggcccgccggacattccggcggaaaagtgggaggggctgaactgccccgccaaagacggccccgtgccgccaccacattcatagatttaggaggtgctactccgtggcacagaagattactggttatgtgaaactgcagatccccgcaggcaaggcaactcccgcgccccccgttggtcccgctctgggccagcacggcgtgaacatcgccgccttcaccaaggagttcaacgagcgtaccaagaacgacatgggcatgattatccccgtggtcatcactgtgtatgctgaccgctccttctccttcatcaccaagacgccccccgcggccgtcctgatcaagaaggagtgcaacatcgagtccggctccggcgtgcccaacaagaccaaggtggccaccatctccaaggcctccatccagaagattgctgagatcaagatgaaggacctgaatgcggccagcctggagtccgccatgagcatgatcgccggcacctgccggtccatgggcgtcgtcgtcggcgactgagcccggctttcacagaccgtttcaaacagcgagcggcccgtggggccgcaccatacagtgggaggattcatttccgaagaaccactatgaggaggaagtaacattgtttagaggcaagaaatataaggaaagtgccaagcagatcgacaagaccatgctgtacgacgctgctgacggcatggcgctgatctgcaagactgccagcgccaagtttgacgagaccgttgagctccatgtgaagctgggcgtggactcccgtcacgctgaccagcaggtccgcggcgccatcgtgctgccccacggcaccggcaagaccgtccgggtcctggtgttcgccaagggcgacaaggccgacgctgcccgggaggccggcgcggattacgtgggcgagatggatatggtggagaagatccagaaggaaaactggttcgacttcgacgtggttgttgccagccccgacatgatgggcctggtgggccgcctcggtaaggtcctgggccccaagggcctgatgccctcccccaaggccggcaccgtcacccccgacgtggccaaggccgtgcaggaggtcaaggccggtaagatcgagtaccgcctggacaagaccaacatcatccactgccccatcggcaaggtgtccttcggccccgagaagctgactgagaactataacgcgctgatgggcgccatcgtgaaggcgaagcctgcctccgccaagggccagtatattcgcagctgtgtagccgcgtccaccatgggccccggcgtgaagatgaacacggcgaagatgatctgaggcttttcggaggggagctggctctcctccgaacaccccatcgccgcgtcaaaacaaattgcgcttcatccgtttctgcctgtggtgaaaccggataccgctccgtttgtttttccttttccgacaaaagctgggcttttgttggggcccgacgtggtcactggcgtgcgcaccccggtgcgcgggacgatgaattttcgccgcacacatgttgcggcaaaatgattcggttttcgtcttccgctgcaggcggaagaaccggaaaaaaccggaggtttttccgggcatttttcccggtcctgtgggatctggggaaatctgttatttagttcttgacaaatcgtcgagaattaaatataataccagatgcgttccaaagacagcaggtggcatgagccataaatcctgccgagggcggcaaacttgatttgctatccgtccctgtgtctttgcgcacagggacggttcctttttttgaacgcaccgacaattttcctggaggtgaacactagaatgcctaacgcaaaggtcttatctgaaaagcaggccatcgtggccgagctgactgagaagatccagaaagcttccgccggcgtgctcgtggattacaagggcatcaccgttgaggaggacaccgcgctgcgcagagagtgccgggagaacggcgtcgattacgccgttgtcaagaacaccctgctccgctttgccttcaacaacaccggcctgaacgagctggacgatctgctcaacggcaccacgtctctggctctgtgtgaggaggatgtagtcgctcccgcccgcgtcatgagcgactatgccaagaagctgaacgacaagttcgagatcaagggcggctttatggacggcaagcccgtctctctggagaccatccagtctctggcttccatccccgctctgcccgttctgcgcgcccagttcctgggtactatgctggctcccattaccggtctggctgtggtcctgaagcagatcgccgaaaagggcggcgagcccgtggctgtcgctgccgaggaagctgcccccgccgctgagtaattgaggcggcaagttcttacttttaaattttacaattaggaggctattacaatgtctgagaaagttaccgctatgatcgaagagatcaagggcctgaccgttctggagctgagcgagctggtgcacgctctggaggaggagttcggcgtgtccgccgccgctatggctgctcccgctgccggcgctgccgctcccgccgctgaggagaagacctccttcgacgtggtcctgaccggcttcgacgccgctgccaagatcaaggtcattaaggttgtccgcgagatcaccggccagggcctggccgaggccaaggctactgtcgagggcgctcccaagaccctgaaggagggtgcttccaaggaggacgccgaggctctgaaggctcagctggaagaggctggcgccaaggtcgagctgaagtaatcgaacttccatacttgggcttctgccttttatcctaggcagattctccctggaatattgacccgatgatgaaattgggcctgaggtaatttacgttaccttgggcccttttttgtgccctgaaacagaagatatgggtactcaagccgttttccgaaacaaatcaaaataaaatctcttcacaccatcctgtcaaaatttgagggagaatgcggcaagaattgaagggagagacacaatactggagagaaattccctgtccaatggacgtggaatttaacccaaaagctccccatgcccttggaaggcatggggagcttttgggttaaattcatgcagaactctgcgataatcctataacttttatatacatttgtagattccacattgtcggttttgcattttccactccccctagagagcattgcccactaacatttatgactttgaggctgtattcatttaataatatctgttgaatgtcttgaacagaaatctcgccgtccgcgatctcttcattcatagccgcccgttgaagcacaattcggagttcctccgaagaaagaattcttttccgaatcattggctctgcgatggttgcaaatgccgcagagacagcaattgtggttatcgtgcggataaaatgcgtcaaatctccctcggtatgaatcacagaggagggtcactggagcgataaagagacaccagtcagctcccggatcttaacaagctcctgctccctgattttctccagatcataattcttaggactgattggaatccgattggggttaatcttctttcgctttatggcaaacgctccgctatttctttggagtatttttgactatttctgtgacggccttaatttaacaatatatagaaatggaaagaatgcttgacgcggcagccgtcaaaggtatacatacagcatctgactgatttaaaacggcacttatttcaggaagcagacaaatctgtccaatcgcatttcggccagcagttccgttatcatagatatagaggccttgctctccggtaaaacatccatgcagaccttttctgcttgagtctcgtccctcttgcacagttccatccaaatcacacccttcctcaaaattttttcatgataccacatttgaggaatgagcgcaagggctcgcccatctcagcgggaaaagacagcattcaggaataaagtgcaacacattaaagcgtgcggcgaactggtttgcatagccgatgaagaatgagtccttttgaagaagaagcacaggactatatggatacggcaaaagggttagcagagagtataaaggaataatctgctgactgctatttaacaactatttgtaaaaaggcccggaggcattgcatcgcaatgcctccgagtcttgcctgcaaatactgcaaaaattgtgcaatcccactgaaacacttgtgtcccaataggttttccttttctggagttggctcccggagaatgcagctaatgaggcagcgacattttggcctatctcatcaaaaaatataaacttgggaaaacttctaggacgcagagggttacctaccctaagattttcttccaaagactccgttattttgatgcaaatgaaggcatcaatccgataatggtagactttatctataaaaatttcatgatatctttacacaatttgcatgttcccaaaatgaagttgcgaagcagagtttttcgtgatatactgaaaaatacaaaaattgctaatataacagacaccttgatgataaacaccaacctcaacagcatattcttggggagctttatcggttctaaacgagtgtgttccgagagaggaaggaaagagaggtgttcttagtgaagaaaacagaaaggatacctttcaaaatgagcaaacctcagcagttgtcggagaaatatacgaaggagattttccaagagatcaagtccggcatatattctcgggcagaccgtcttccctcggaaccagatatcgcaaagcactttggcatcagccggaccatggtgagggactgcctttctacactggaacgggagggatttatcagccgtaagcatgggattggtactattatcaatcagcatgtgttggatgtgaaggtgcggttggatctggaagaggaatttctggatatgattcgctccgctggctatatacctggtgtggcatttgtccgtaatgcgatggggaaagcagatgttcgtacagcgcagaagcttggaattaaagcgggggaggatgtagtaatcagtgtccgcctaattacagctgatggtgcgccagcaatctattgcgtagaccacattgcgcgtcggagtatcgtcgcaaaagaatatgacctttcgcttttggacagtcctgtatttgagtttgtggaacaatattgcggcacagagatttatatggacctatctgaaattagtgctgtggctgcggatgcagagcgggccgatgtgtttcagatcccacagggctctccgcttttgtacatcgatgaactgggatacaattttgtgggtcaacccattttgtattctcaggagtattacgcaaacggcatcttcaagcacacaattctgcgaaaaaaaatataaataccccagagttttgtgagagttcgagaaaatcggctctcttttttttcgcaaaagtgcattgatttggtggtgccgctttgatactataaatgtatatctatttgtattacaaatagatactacaaaaatgggggtgctaaaatggcaaaagaaacacagcttgtaaacagcggttcttttctggaaaagagattccatctcaaggaaaaccacaccaatgtgagaactgagatcattgctggattgactacgttcttgacctgtacctatattttggcggtaaatccggcgattctgtcctcaacaggaatggattccaaggcggtactatgggcgacggctatctcggcagctatcgcctgcatcgcaatgggccttttgactaattttccttttgccttagcgcctgccatgggactcaacgcatattttgcctacacagtctgcggtacgctggggctgtcatggcaaaatgccctggcctgtgtgtttgtggaaggtgttaccttcagtatcctcagcgttgcaggtgtacaggagcgcattgttaacggcattccagagtgcgttaagcaggctatttctgcggctatcggctttttcattgcattctcggggctgcataattctggtatcatagcctatgaccctgataatttgctgtgcctgggcaatttgcaggatcccggtgtcattctggctctattggggattctcctgacagcgggactggttattatgagggtcaaaggcgccatcctcatagggatattggctattacctttgcaggtatgctttttgaaaacccggctacaggtgctacctatacccaatggcagggtctggtctctttggaaaaccccattgaggcgctagcacctacctttggacaactgacatttgatggcctgtttgggggcggtgtggcggctatcattggtgttctctttgccatttttagttttttgtttgtggatatgttcgacagtatcggcgtgctggtaggtgtgggaatcaaggctggttttgtcaacgaaaagggtgaactgcccggcgcgggcaaagctctgtttgtgtctgcagcaggggctgcagtaggagctgtgttcggcacccagaccgtcacggtgtttggtgcagagagtaccacaggtattgctgagggcggaagaacaggtcttactgccattaccacaggggtgttctttctgctgtcgctgctcttcaccccgctgtttttgatgatccccagtattgccaccgccccggcactggttatggtgggtatctttatgattgagccgctgatgcatgtggacttgagtgataccaagactgctttcccggtattcatctgcgtggcttttatggcgtttaccttcaatatcgcctatggtatcctcttcggactgctggcttacactggcggacaggtctttgctggcaatgctagaaagctcccgatttccacttggatactgacaggcgtgttcctactgtatctgcttttggaaatcttttttaactgaggcccggcaggacgattcatcgggagtacatttcaatcaagtttccgaaaaacgggcaggggcttccaatccgattgtgggagggagtcctttgccctagaattggagaaaagcacatggggatcaaaaatagcattccgcgtctagacgctgtggataaggtgaccggcgcggcaaagtatacagaggatcttattcctattaatgcactggtgggaaagactcttcacagcaccattgcaaatggaacagtacgcgctattgatgtggacgaggcgtggaagatcccgggcgtagtggatattttaacttgttttgatgtgccggactgggagtatgcgacctgtggacatccgctttccctggatcccgcacataccgatgtggccaacaagcgaatactgaccaaacgagtgcgctactatggagatgagattgccgcagtggtagcagaaagcgatctggcggctcagaaggcactggaggctatccgggtagagtacgaagaactgccgccgctgctgacaccggaggctgctgtgatcagtgggattcctctgcatgaaaaatccccggataatcagggggggcgcatggattttatcattgatgagagccaaaatgtccggttttatcagggaacgttctccatggatccatgtatcggcggctatgtcgatttacgaggaacaaaatttcatgtaccggcccagcaacattgccatattgaaaacatctgttgctttgcctatatgagcgggcggaaaattgtagtggtgtcgcccaatcaggcaccccacaccctacgcaaacatatttccgatgctctgggtatccccacaggccggattcgtgtggtcaagccctatgtgggcggagcattcggcaataagcaggatatgttctatgagccgctggcggctttattcaccttacggctgggaggacggtgcgtggcctttgtgatgagccgggaggagacatttgtcaatagccggactcgtcatgccatggacatctgggcggcggcctgtgtggatgatacgggacgaatcacgcagaagggcattcgcctgaatgcatacagcggcgcgtacggttctaacggccacgctgtggccgcctatgcggtgactaactatttccagctttatcctgctttgggcaagcaggtgggagagtccgctacggtctataccaatatgccctcggcgggagctatgcggggctatgggattccacaggtggcctttgcgatggagtgccagatggatgatctggcactgaggtatcatttggatcctgtggaatttcgaaaaaagaatatgatgggcctgcatttcttggatccctttgaccggtttctctgtgccagcaacggtctggaacggtgcatcgaccgtgggtgtgagttggtggactggcaagcgaagcgtcaggcgtatgatgcgttcaaccatacatcgtccaatctcaagaaaggattgggcatggcagtgtttgcctataagactggggtctatcccatacaattggagacagcttcctgtcggatgctgctcaatgatgacggcagcctacagatacaggtctgtgctacggagctgggacagggctccgatactgtatttgcccaaatcgcctcggagattaccacaattccggaagagaacgtgtatgtagtctcctgccaggatacggatgtttctccccatgatgcgggggcatacgcttctcgccagacttatgtctccggcagtgcggtgaagcagacagcagagatacttcggaagaaaatcctgaacagggctgcctgtttgtacgaagcagattccaaagatcttgcccttgatggcggacggattacaggccgtgatggcgcagtcctggggacggtgagggatgtggcagtccgaatgcagtacaccaacagcacaaagataaacagcgaacatctgacggcggaatccacctacaccatgcgtcataacgcatttgccttcggtgcaagctttgttgatttagaggtggatgttcctatcggcaagattaaaatcaaccgcgtgatagcgattcacgacagcggccagattctcaatccggcgcttgctagagctcaggttcacggtggtgtggctatggggattggatatgctttgacggagcagatgctttttgaccccgagactggtaagatgcgaaacgacaacctgttggactataaaatcccgacagccatggacatcccacagattgatgtggagtttgtggagacctatgagccctccgccccctttgggaacaaagcattgggagagccgcccatgatcccacaggcaccggctatccggaacgctgtgctccatgccacgggcgtggccgtctatgagctgcccctgacaccggagcggctgatccacgcctttatacaagctggactgatacaaccactgtcgtgcgagcatatagcggagacataagcgggaggtatacgctatgtatgatattcgacaagtttatcagccaaaggacctgggagaggcactctcacttctggcagaacatccggatgccattgttatctccggcggaacggatgttttaatcaaggttcgggagcggaagtggaaagactgctctctgctgagtattcaccgcctgccgcagcttcagggtgtgcgccgggagaaggaagaactggtggtagggccgggtacctgctttgaccaactccatgaaactggagtgattcgggagcacgccttttgcttgtggcaggcggctgaccaggtggggagcccccagattcgcactgtggctacgctgggagggaatatctgtaatggcgcagtcagtgctgacagtgcgccgccgctgctggtactcaatgctaggctggaactcaccgatatcagccaaaccaagcggcaactggatatcggtgcgttttatactggtcccggacgcacggccttggaccgaaaaagggaactgctgacggcggtgcggattcctataatccggccgggatgcggcagctattacatcaagtatggaaagcgcaatgccctggagatttccactttgggttgcgcggcgtatgtggagctagatgcggggaaaaagacctttcgggaagtgcggatcgcttttggtgtggcggcgccagttcccatgcgctgtccggcagtggaagctctggtgaaaggactgcctgtggaccgacatacactgcgcctgcttggagatgcagtagggcgggaattgttcccaagagatagctggagggcatctcgagagctacggatgcagttgattcgggaattgagccagagagctgtggaaggggcggtcaaacaagcaggaggaattttgaatgaaagtgatccacatgatagtcaacggaacaccagtggagctggctgtccgtgaggatgagtgcctgacggacacattacgccagcgccttggactcaccagtgtcaaaaaaggttgtggggttggggagtgcggcgcatgcacggttcttctggacggaaaggcaactaatagctgcatctatttgaccttgtgggcagatggacgagaaattatcacagtagaggggctgcgggcaaaaaacggttgcttgcaccctgtacagcaggcgttcgtggacgaagctgcagtacagtgtggtttttgtactccgggattcattcttaccgcagtggaaatcgtcaattccggaaagaagtatacccgggacgaattgcgtaagttaatctccggtcatctgtgccgctgcaccggttatgaaaatattcttaacgccgttgagcgggtagtcggtgtcaatgcaaagtaaaatggtgggaataattcctaattatatctctgtctacctgtgtaaaatagtgaacaggttgtggtaactagtgacacgccattggggagacatcttggcagagtaagaaaacatcgaaatcacagaaacactttttgcgggccatgcggagcgcatactggcagcgcatgtgccgcaccagtgattgggattccttctggacctgtacactgtattccactgtagcctgagcaccatgagtattatctgctgggaaaacattagcatcactatttatgggatcaaggaggctctgctgtcacccataactggccttatccccaagaattcacttctttcttcccttgctgaaagacgctaggcagatgctataaaatatctagggaccaagtctcttcccggagttatcacgaaagattatgatgagctatcggggaggctggggctaacgcaatggaaatccaacgaaaggaaaaagccatgcgcacttttgaagaaattaaagataccattgagacggggcttgggaagcacccttgtgatttgaaattacagaatgttcgactggtgaatgtatattcatcggagatttataacacagatatctatatcaaaaacggccggattatctccatttcaccagaagcaaatctggaggcccaggaagtagtggagtgttgcggacagttcgcggtgccggggctcatcgatactcacatgcatttcgagtcaactatgctttcaccagaagctctggcttcagtggtggtgcctcaagggactactacactgtgcgcggatcttatggagattgcaaacgttgcaggagcggatggattgaaggctatgctggattctatttcccgcctgccataccggatgcttattgaagtttcctcacgagtacctacagcgccgggcctagagactaacggagcctatatgggggccgaagaggtacgcgctattatggactggcaggaatccatcagtctgggcgagctggatccctctaaaatcctgctggtgaaagacgaatacatcgaaaagattgcggataccttggcgcggagaaaaatcgtaaacggtcatgccatcggtcgcctggggcaggaactcaatgtatatgcttctgctgggatctctgatgaccacgagtgcgttaccgaggaggaacttctccaacgcctacgggtgggtatgagtgtgttggttcgggagggcagcaccgaacgcaatttggatgccctcatcggcggtgtactgagagagaagctgcctctggacaatctgatgttctgtacagatgataagcatgctggagagatccaacgggagggccacattaactataatgttgcccgggccatggaattgggtgtgggagaaatagacgcagtgaagctggctacgctcaacgccgcccggcatttccggctggaagatgagatcggatctattacgccgggccgcctagcggatattcttttggtggaggatctgcgggaaatgaagcctagccaggtgtattttgaggggcgcctggtagcgaaagattgcaagctgatccagacatgtgaagttggggaatatcctgaatggttgaaaaatacagtaaagctgaaacagctgattacggaaaagagctttcgggtccccgctcgaacggatcgtccccagacgcaagttacagttatagatctgattgaccggcagattatcaataaacggctaatcgcaacgttgccctgcgttaatggggaaatactggcagatccggtacatgatattttaaagctggccattgtagagcgctacggaaaaactggcggtgtgggagtgggatttgtacggggctttggcctccgggagggggctatggcctactccatgtcccacgatcaccataatatcgtggtagtaggtgtcaatgagctggatatggcacagagtgttaaggtgattcaggaaatgcagggcggactctgtgtggtccgtaacggcgaggtgatggcaaaaatgcgcttacccatcggcggattgatgagtgagcaggatgctggcacggttatgagggaattggacgggctaaatgctgcggcccgaagtctgggatgccgcgggagtgcccctttcatgactttgagctttatctcgcttcccacagtgccggaacttggattgacggatatggggttggtggatgtactggaacatcgactgatcccggtggaaataccagaaaaataattggggatttctggcggcgagttgaagcaacacatggttccggaggggctctcttggctgcgggcccctccatctgacatctaaaatattccttgataactcggatcataggctccatatttcctgtgctttgaagcctaaaacaaagaaggagaatggcgttactattctccttcttctaatttttgtgatgtatggcgcgaactcttttttggcgtaaaattctcttacttccacagtaaggtccagacttcttgtgagatactcagcattgtctgctttaaaatataccggattactttcgatactttctcaggtatttattttgatggctctggtagcacgctggcctgcagggactgcaaaaggatttgtgactatatgctcaaaaacagtttaggattccttgtattcagcaatatcatccaaattgcaatgaagagcagaacacaacttatccaaagtttttgtttcaatattttcatttgctctaagtctgcggatcgttttgctgtcaatcccgcatttttctctaagctgatacatagaaataccgcggctttccatagtagcccacaggcgatgaaagataatcatttgcttcacctctgtatttatacagtgtggggattataaacttgctttttaaggggatataaccctcatattctgctttagaaattaagaagtacggccctatacacgaaatgaacgtagtgggaactttgattgcccgagctgtgaaatgggggggcgggaagaccacatccgaaaaattctgggaatcaatatcacatgtaggaaaccctgtatgttcgatcaggatctcatatagcggtcttttaatatttttaccagagggacctgttcggaaggcgtaaagatacgactcaccacccgcccgattggatattaccccgcctccagtgcgtatcgtgacttgaaggactcattcaggtatctggcggggagtatttcatcaatggtatcctggcggatttagaaaaagaaccaagggaagcggacgtgcaggagtgcagaaggagccaaaaccatgccttatctcaaaaccggttccggggaaaatttgataaggagtgaaccataggaaatgcgctgtcagaaattatttgaaaagggatgtatcggtggagtagagatccgcaaccgtgtcgcaatgacggctatgggaaacggattggcgtcctgggacggcgaggtatcgctggaactgatccgattctatgaggatcgagcaagaggcggttgcggcctgattttcacggaatttactcggatggatgaaaccagcggcgcctgcaatccaaatcagctctgtatcgccacccgtaaacatatacgtagtacggagcgggtccgctgtcacggcgctaggatatttgttcagctctaccacggcggccgagagaccctgtctgtgctgaatgacgggaaacagcctatggctcctagcgccatcctcaactcggcatggcgcagttgaggggcaatgatatctgcgtcatcgacagcggcagcggcagggagacggggcggaaggcgcggcggatcttggacgccaacagatggcgcctgtccaactaccggagggctttgaggtgatcgccctctcagtttccttaaaggtgcaagattctatcccaattgactatggcagtggactgacagagcgttgagggcacattgtagtcaccaggtcgcatcgaaagacgcggtccggtgacttgtagcatatacagaaggctaccactccaatgtaatgcctttattggggtcaagctttgcaattttgaaacctgctaaaatgcaaatcagcgtaaagataggagtcatccagttctggaatgcatacgaatttgtgattatatcaactacgaggacgatctttgggtatgttgttcttcattctgtactgaagactttcggtgtgggagtagatataaaattattttatcagagtattctggataaggacataactagtacgcaggagacttattacgacggggcacaggcattgtatgacctgcgggtccttttgatctgcgcggtccacggatattgtctgggcggcttgtgctatcctgccggggcagatatttctatcgcagtgaaaggtggagaagttatcaatagctctgccaatagaaggcgccggatgatcaaaggagcttaggcccggctgatttcggcggctttctttttctcggagttcccgtcattttgcggtgtcaacctggctcaagaataaaggtgcttcgagacggaaacacggacatatccgctctgatttcaaagataatgcggagtggagcaaaggattgaagacttggggccgtcataacaaggtagcgcctacagttcaaggctgtccggatgggaatggatcatctgccatgaggagtgagcacatgaattgagagatcatgaaaaatcaaatgcttatattaaacaaaaattcaaggggaaaattgttgatattgcgatcttccttgacggcaaaaaaacacgtaaactattggtgttggagttcccaacaaaattgaaaagcctgcatatgctctccatctctcagctgtgcgggtgccaaaaaggaggaaatacataccggtacggctcacggtgcggcagtgtggagacctgttgtaaagcgcggcgcccatcgcggtaccgcgtgagaacgcatccgcggaggcggagcggtcagagccgggaaagatggcaggactgtctttggtaaatgtgaagaagatctatcccgcaacgaacgatcacaagaagtccaaaaagaagcacgagagcggcgaggagaaaaaggcccagctccaggtgaccaatgagggggttgtggctgttcaggaatttaacttggatgtggcggacaaggagttcatcgtgttggtcggcccctctggttgcggcaagtcgaccactctgcgaatggtggcggggctggaggagatctccagcggagaactgtacattgatgggaagttgatgaacgatgtagcccctaaagaccgggacatcgctatggtgttccagaactacgcgctctatccccatatgacagtgtatgaaaatatggcgttcccactgaagctgcgcaagcgccctaagagcgagattgacaaagctgtgcgtgaggcggcggagatcctagacattacgcagtacttggaccgcaagccaaaagctttatccggtgggcagcggcagcgtgtggcgattggccgcgctatcgtacgggaacccaagatcctgctgatggacgagcctctcagcaacttggacgccaagctgcgtaatcagatgcgcgcagagattatcaaactgcgccagaagatcaatactaccttcctctatgtcacccatgatcaaacagaggctatgactctgggggaccggattgttatcatgaaggatggcttcatccaacagatcggtacgcctcaggaggtttttgaccatcctgccaatctgttcgcggctgacttcatcggtacgccgcagatgaatttttttgatgcggagctgcaaagggaaggagaccggtactctgtgatacttggcggcatcaaggtggagttgtcacttgaaaagagtgctgacttgaccaagaaagggatttctggacagcctgttacattgggtgcccggcccaatcacatcatgttggggaagggagaaggaggttatatcttggccaaggtagatgtgttcgaaatgattgggtaatgggatccatcttcatgctatggctgcgggaaagaatgcagtcatcgtcgttcccactatgaatatcagcgggagctatacggagcggtttgctcccgggcgggaaccggacttctgtttcggcggaaatatctgccacatcttcaacacagaaagtgtcaatctggagtactaagagtccagaaacgcatcaaaatccccggccttttcctttatcgaaaaggccggggattttcaacgaagttcagaacaggaagcaaacctgtgggacacgggtttccatggactgaaagggaatcgaaaaagaaggcctcagccttttaccgatccggcagtcaaactggcattcacctgctcttggaagatagcgaatacaatgatgctgggcagcaccgcaatagtgatggcagcaaacattgccgtgtagttaaaactgaactggctggtgaaatagctcagggacaggggcagggtccggttgtctgtggagctggtgagtagcagagcaaaggtaaactcgttccagctctccaaaaaagtcagcaccgccgcactggccaagccgcccttggcgcagggcatcattacctggacaaaggtacggaaaaagccggcgccatcaatataggcggcctcctccagctctgtgggaatagaggcgaacgcagatcggagcaccatcagagaaataggcatattcagcgctgtgtacaccagaatcagcgcaatcttagtatcatagaggcccagctttgtgatgatattgtacacgggactcatcagcgccgtggtgggaatcaccatggacaaggaaagaatggcaaaaatcgtgttcttgaagcgaaacctcttcttggcgaacacataccccgccatagctaggcagaacacattcagaatcgttgtgatggtggcaactatcaggctatttgcgaaaaacttcaggatcggggcgatctcgagtgcctgcacatacccgtcaaagccgaagtgggagggcaaggacaggccattggaaaagatctcgctgttggtcttgaaggaggacaaaatgacccagataatggggagcagcgccacgcacacacatagtgccatgaacagataggaaaatccacgggtgaccttctgggtaggcgttctcttataatgtgccaacattccgattctctccttagtcttccttattcatgccgaagatcttgcggatcagcgtcatagtgatgaagcccaacagaatgattacaactccgattgtattggcatagccgtaattgttggccttcatagtggtgtatagatacagcggcagattggtagtgactgtacccgggccgccgccggtggtgatatagagcatggagaacagctgtagcatgtatgtagcggccataatgaccgtggtaccgatcattttcttgaccaccgggaacatcaccagacggtcgatctggaaactggtggcaccgtcaatctccgcagcctcgatcaagctctcatccgtgctcaacaactgagccaggaccaacgtggtggtgtatcctgcgaacaggaaccaagtcaaagtgacggacgggaacgcagttgccgtctcgaacaaccagttgtgctgtaaactctcaagcccgaccaacttcaagaacgaatttaccgcaccgtattgggcattgtacaagttcagaaagatcatggcgatagcggactgggagataatatttggaatcatgtaagtcacacgaacgaatttccagcctctgggttttttatacaggatgaaggctagtagcgtaccaagagtcacgtggaagatgcaatggataaaaagccacttgaccgtgttgccaaagatgggccaaaagcgattgtcctccgtaaacagctgaacaaaattggaaaatccgacaaaggtgaaggtgcggggcagcaggcggtaatcgaacagcgatgtaacgaacaccattaccagcgggattgcgaagatcaggataaagaggatacatgctggcgctaaaaacagggcgatccatccgccatttttttgtttcatcaaattccatctccttgtccaaggatagggaagatcgggctgccgctagggcaacccgatcctttgtgcgcagattgcggtcacgggcttccggagtttcgtctacgccatctctggcggaaagatcaggacacggcgtttgccgcagcaaaatctgtgaggatctggcagaactgctccggtgtgtaggtgccattggccaggttgggcaactcggcactgaagagatcttgtaggccgggaaccatgttgccggtgaaggtgttggaacgtaccgtgcattcggaggctatgttcagaaactcgcccagcaacgggaagttggtggtagcggtatcagtgatttccacagaggcagcggcggggaccatgccctgcatctccagtgccagctgctgagactcggggctggtgaagaacttcaccatggcgatggccgcctcctccagggcaggatcgtcctgcttggtgacaaacatgccttcaatgggggcgtcatagacgaagttgccgggataggcagccacacccacgttctgatcaaagccatcaggcgtcttggaggtgtcagagaaatcaccgatcatccaggggccgttgcagatcatggccacgttgcctgagaagaagttgttggccgcgttctcataggcgccgcccacagcgtccagcgtggtgtagttctgataccacttctgcatctcggcgacagcgttgacaaccggctcaatgttgtagtcggtgggatacttggtgttcatgaactccaggccctcatcgccgctggtggcaaccatggcgcccatcagcagcatggagacccaagcaccgtcagcggtgtccatagccagtggagtgatgcctgcagccagcagtttgtcgcagttgtcaaaaaactcattccaagtggtagcgggctgaataccagcctggtcaaataactccttattgtagaagtagccaatcaactgaccttcattggaggaagcatagatctttccatcgcggcagttggcagcctgccaggcgtcgttttcatacatggaagcccattcgggatcctcgttcaccacgtcggtcaggtctacaaccagatcagcttccagggctaagtccagcaagctgtatccgccaccgtagaccacgggaggcagtttgccggaagagatttggacttgaattcgatcagcataattggcatctccggggatctcctcaacctcaatgcgatactggcccgcatattcttcgttgaagcgactgaccaattcctccaccacgggggcagccgtgttggtcccgatctggaaagtgggatagttgattacaatctcatcttcagaggagccgctaccatcattgggggcctcatcgctggtgccgccgcagcccatcagaccgaggagcatggccagagccagtgtgcaagacaaccatcttttcatcttcattatcgtgttcctccttcgtttcaggggtatagctacacccctcctgtatgctttctcagtatatcacggaaaagactacaaatattaagactcttttgctctgattctggtataaattcgctcaatttttgccgccgaaggcggagagagaagagggcgggagatttacagatttcagtgttgaaaaaggaaaatcctcattgtacaatgaacccaagagaaaagttaggcggcccgaggcggtgaaggaaatggcacatagacggggaaatgtcaggcggaagcggtctctcatggtcagaatgtttttactggtctgtgtgacgattttgggaccgtcactactgatgcttctggtgttctatcgtacgatccctgctagaatggaatcacaggccaagggaaatgtaaatttctacatcagccaagtgactgcatctgttgccaacactatggaattggcacaggacatcgcgtataatgccatgatagacgatagcctgtgtgcaagtatgcaggatttggacatgtatctggctttgcagggacgggatgacctgcttcgggtcgtggggggagtggcggcttaccaatccacttggaaacggggagcggtaaacagcgtgtacctttttcgcagggatggggcgttcaccttttactcccccagggggtcctatgagcaggagcagcgccgaatgcagagtatctatgaggctgcaaacgaacaatcttcagcagagacgctgttttccatagagaatacgccagagaacaccgcctattttttgctggactataagaatatcgatacgctggaaccgttgggcaagctgattatggagattgatgtagatactttactgaatgctggagacttgacggaactctatccaaacacatgcttggcgctctcagatggagagggaaaactgctatacggggagggggaggacctgcaagaacttctggagcagactgaggataactcttcctatctccaaggaactgccccgggttggcagggccgcttttaccatgtcagtcagcgtgtggacgatgaggagctgcgggtggatatttttataccacttccgtccatgtacgatttggtttgggaggggagttggattttctcagccctgtgtatcgcgattgtgctgctgacggttctggcggctgcggtcgcctatcatcgggtgctgggggatccgctgcagaaaatggaggggatgctgcaccggatggcggagtcagactatgccgcccgtatgcctgacagcggctatcgggaactggctgatctggaaactacatttaaccagatggctgataatctggaggcatcctggaaggatgcctatcaaaagggcattcgattgcaggagagcgaatcacgcctgttggctgcgcagatcaatccgcacttcatctttaatgtgctggagaccatcaatatgcgttgcgtggatgctggattgaaaaatatttcccgtatggttacggacctggcgtgcctgcttcggggaaatatcggtgtgggaagcagccagaaaattacatttgaacaggagctcggttacgtccactattatttggatttacagagagaacgatttggggaaaagctctcttactcagtggaatacgaggacgaggaccttttgcggtacctggttccgcggctgacgatccagcctctggtggaaaacgccatcgtccacgggctggaacccaggcggggcttaggaagcgtggcagtccggctgtgggaggagacacagaatatttgtgtgcgaattgaggatgatggcgtaggctttgatccggaaaatctggatctcgcaagagaggtggaaagtgccggacagcacaatcatattgcactaacaaatgtacttcgccgtctgcatctgctatatggagaccgggcggatctgcagatccgttcgaaacccggtcagggtaccaccgtgctgctgactttgccgcttgatcaaacaaaggggtgagaaaccatgccgtacactgtgatgcttgtggacaatgaagcgataattccccgagggctgatgtgtttgattgactggaaggctcacaactgctgtgtgcgagcaattgcaaacgacggagtagatgctgtccatcaaattcaggagtccccaccggacattctgattacagacattcgcatgccggagatggacggactgcaactttgcggctgggtccgggaacactatccgggcattcagatgattttgcttacaggctttccggactttgagtatgctcaacaggctatccagtgcggggtgacggatttcgttctgaagcctaccacggagaaggcgctctccgctgcagtggacaaggcatgccaacggcttcaaaaggaaagccgtgtgcagaagagcctcctgctggaacagcaggctctgttgggagaactgatttttcaaagccgacactcgctgctttacattctcaataaactcaatgacctgcacattgtgctgcccagttattatgttctgagcctggaggtggttttccggggaactttggaggaatgcacagcgatgctccagcaagcgcaggaggtcatactgtcctgctgcgaggggcatacagtgtttttggtaccgaagagcgatacttgctgctatgcagttctctcattgccggagggaatagaccccgctgaactctgcacttcggctgtagaagcggtagaaggaaaaacggatttcctgctgacgatcggaattagccgcctccacaaaaatccactgaatatgcagaaggcggccagagaggcggatgacgcacagaaatttgcgttgtatagtagccagccatccgtcatgcggtgtgaggacctgccaaagttgtccgaagacacagccagtgctctgtgggagcggttgcgtttggtggaaagcgccctggaaaatcacagtggtgatgcggctctgaaaaacatggaggatctcttccaattgataaaagcacagaaaattcctttctccagcgtgtgtcagatcgcccttttattgcagaacttctgtgtgagtcttctgttcagccacaatctgcccgccgaacagctaacggctttgcccactgggagcatggagcttctggagaacagtgtgcgggagtatgtgacagagaccctgtcccggatcgggaggacagaggagaatatcgacagtatcatttacaaggtaaaacagtacattgaccaaaattacagcaccaatctctcattggatgcgctggcaacgatggtgcatctaagtcccagttatttcagcaagctgtttaagcgggagatgggagagaatttgagtacctatattcttaataccagggttgagcgtgctaaatttttgctgcggaccacagataaaaaagcatatgaaatcgcggaggctgtaggtatctatgacccggtatatttctctaaaatttttaaaaagtcaacaggcctgaaaccgaaagaataccgtgaacgctccggagcagatgaaatggaaaggaagatcaaatcatgagcttgcaagtaacaattggaactgccccctgttcttggggagtctggtggccggatggaactccctctggcaccccgtatgatatctttttggaccaggcggcagaagctggatataaggccctggaactgggaccagtggggtatctgcccacagatattggccaactgagggaagaactggctcgccgggacctttctatctgcggcggaacagcttgctatgattttctcaaggcacgttcctttgccgatgtccgaggggatgtggatgatttgtgcaagcgcctgcaggcattcgatgtgcattacctgatgacaatggacggaaccgccatggactgcaagaccaaggccggcctcaaggagcagcaaatcaggacctataagcttttcggggaaatgggcagttactgccgggacacctacggtattgaggttctgatgcatccggagaggcgctctctgatcgagacccgggaggagttggagcgactgattgatctggatctatgcatttgctttgataacggccactatgctgcggccaatgggaattggaagcagggcgaccgcagcgcgttggatttcctggaggctcatatcgatcatattccctatctccacttcaaaaatgtatctggtgagatcagaaagatggagatggagggtgctctggcaccagatgatccccggatggatgatattatgtgcgatctggaggatgggatcattgattacgaagcttaccgggatttgctggatcgtttgaatttccggggagtcgggatcatcgaacaggattgcccccacgccaccacacaggaggcatttgaaaaggccaagaagaatctggcctatctgcaaaaaatccacctcatccaataaggcgaagtccgaaaacggagagcggtcttcagagaatttctgaggaccgcttcggccaaaacagacaaaagagagcgggcaagcagttctgcttgcccgctcttaatattcattaaacggcacgatgaacaaatttgcatgccaagagtgttttacacccctgcaatgggaaaagcgacaatgctccggcgttatgcaactgtcggggaaggggatcgatgggggtggctgccatggtgcagcaacggtttaaaccggacccgttcaccaacacgctgtttctgttctgcggcagacggcgggactgcatcaaggagttctgcagggaccgggatggatgcatcctgctgtataagctataagcggctggagcaggcgcataccaacggccgcaaaacgaaaaggaggtacggcggttgacgccgcagcagtaccgctgtctgatggaggggctgaaggtggagcagcccgcccggaggatggcctacatatgacagggactttgctgattcactcgctcaacgttgcaacagagggcagcttgaccctatacacctgcccgatgtggcaatggatgaactgtcctgagattcttcgcagctggagagcgcggcaaagccgtgtcctcctctgcattcctcaaaccaccatttgatatttgcagcgtcctccaaatgctccggctttgcctggtgtttccattcccacgcgccaatctttcccggcacctctcaaaatgagaaatctcgagaagcccttagacttctcgagatttactatctgataccctctttgactttttaatccgtcccagtattgacgtatacgactgctccttcacttggcggcagaaacaggaacattggaggggcacttggacagcgattcttcatcggcgatgatggtgacatcctgatgaagctgaaggatggaggctgggacttgtggcgttaccggaccgaaacagcaggcgcagagagcgtctgccttatcgggaccgctggcaatcagcaggatcttacgggcctgagtaatggcctgcatccccatagaaatggcctgacgaggaacatcctcctcccgatcaaaaaaacgggtgttggcagcgatggtgctctctgacaatgctaccttgtgcgtatatttggaaaagcagctgtccggctcgttaaatccaatgtgagcattgcggccgattccaagcagctgcaggtcgattccgcccagggattggattaattggtcatagcggcggcactctgtctccaagtctgaggccatgccgttgggaatatggacccgggcagggttgatattgatatggtcgaagaaattttggcgcatgaaggcgtggtagctctgtggattgtccggcggcagattacagtactcgtccaaattcacggcagtggtagcagaaaaatccagatctcctttttcataccaaataatcagctgccggtaaattccgagaggtgaggaaccggtggctaggccaagtacactctccggcttcaaaattacctgggcggatatgatgttggcggctttgcggctgaggtcattataatcttttgcgtggatgattttcattttgataacctccagaagccttattggacggatggggcggttgtcaactgggccgccgttcggtcagccatggcgtcgctttcctccagggagaggaacccgcgagcggccaggatcagtgctcctagcaccggactgtaccgaggttcattcagcacaaagctctcccggtccatgcaggcgcggaagggagtcatgatgacttctccagcacggaacaggccgccggagtacgagactggcacagtctctcctgcggagaaggtcaactgctgccgaatagcagtggccatttccgtcagctcctcagccgcacggtggtagatacctatggctgctgggtctccccgctgtgcagcccgcaagacaaccagctgcagctttgccaacagcgaggaatcctgccggacatttgtctgcagatatccggagaaatatagatcgtgagtaatggacagctcctgccgcaattcttcatagatggcagatcggggatgccggccatctgcctgctttacaaattcggtgatcatttgccgggctacccagctgcaggaaccctcatctgcaaaaaacagagaccagcctcctacgcgagaggcgtttccggccgaatcttggccataggcgacagaaccggtgccggctacaatgttgatgccgggccggccggccagactgccacaccagcctgccacagagtcattggaaaactgaagagggcagtcaggcaggatggattgcatgacttgggggaagaactcctcggtaccgggaacctctccgtaaacagtcaggctcagcatggcggacgtaatctgctgagaagtgatgccgctgtctgccagcagggtctgaacagagcggaccatcaggtcccggaacccgtcctcaccccaaaatgcaaagttgcagccgggaaaaatccgatgagccagcacttggccggtgtggtctactaggagccactctgttttggtagagcctccatcacagcctaaaaagatcacgagaaattcctcctcttcaacatctttgcggagcagcaggccaggacactggccagcaacgcaaggaatccgaccgtgcggaacatccaggccatgccaagatattctgataggatcccgctgagggcattccctgccacggcaccgataccctgaccaatggccagaaacagaaggtgccccatggctaggtactccccgggcacagtctccagcataaagtccacgcaggcgggggtgaaaagcgcaaaggaaagcgcctgaaacagggctgcaacaaggataatattcagagagccggcgctggcgagagtcagggctttcagcgcatagcacagcatagaaactgccatcaggggggctgctgacaaatgcagcctggagcgcagccgactgtagccaaacatcacaggcaactcactggtggcctgaagaaacagggcgaacccaacatgctgctctgttcctccggcagatagaatcagcacagagtagaagctctccatggacccggaggccagagtacaaagaaacagagcggccagcatcacccaatagacgcgattggatcgcagtgtgcggaacccttgaagtagagtgaccggcttctggtcaagatggctggcgggcggaggattcggtaaagacagggcaaccacacacatcaaaatccagagcacccacagagccacgttgcctggacgaaagccccagcgtgagactaccatgccgaagatggcggcaccgagagcgtaagagagagacccgcctgcccgggtagcaccatagttcagggatgcaccgccgttgatcagacggagagcccaggagtccacaaagttcatcatacagacgacagtgatgtacaaccccattaccgctatggtggtcagccccatctgaccgccaccccaggtcagcagaaaataacaggcgatcccgaccgccgtcccgcctaatgtcacctgcttggcacaggagaaccggtcattgagaaacccccatagggggcgggctaacgtggctgctagggcacccagtgtcattacttggccaatctgtagcttggagtatccaaaggagaccagaatgggagatatgtaagccactgtaatgcagtctatcagcatcataatagcctggagcaggaaaaagcgccggtttagagctttggctggcatatatctccctccatcttgctgcccatgatagagaagaaatccgagtagcgccgatgggaggaatcgatccctctggcagcggaaagctccgcggccagcgtctgcaaagcaagaagaaactctaaggactggagggcatcttctccggcatccagcaggtgaagagcgtccggctggccggtgtcgctgggggagatcaagccgcagcaggccccaactgatttggagaaattcactaggcgcagcatccggtcccgatctggcccttgggacggcagcaggcacaaaaggcaggcatcgccgtccagggcgttttggataccatggatatactcgtccaaaggatagcaggaaactggaagataattggtctccagcagcttcagcgctccttcctgcgcggctccgagactgttgccgcagccgagcacatacaggtgacggaacggcaggaacacgttccgatgcgcgtggctccacgcacgggaacgggacaggttttccggagcgttccggcacagtcgatccaaggcctgaagcattctctgcccataggacgtgtcttggcagacagacaacgctaacagcattaatgtcagcacagtggcggtgacgcccttggttttggcaccgatccgttctgttccgattcgaagaggaacggacagagaggcggctagccctacgggagagtttgcctgttccgtaacggcaatcacagccctgcctgcgttggtcagttgacagaccaaatcataggtattggtgctgacgccgctttgcgaaatggcaaaatacagcgggtgtgctgcagtaaggcgggcatccgctgcctcggaggggacaaggcaggtgacctctgttccccaggcatgctctagaaccgggcgggccatcagggcggcatagtgagaggaaccggaaccgaccagaatcacccgatccggctgaaatcccccgaaacgccgggaaaattctgcggtgatttcctcgcgggaatccagcagagcccgccacagggcgggctgctgggcaatatattcttgaagcagcgtactcttcatcattttttgatcttgccgcagatctcccggaacagtaccaaatcagccatagcatctgcaaaatcggacttaggtgtggttccgttggcaatgcagtcatggaaatactggacctcatcctggaaggggtcgcgataatcaggaccataaagggtggtcttggtatccttctttgtggactcaatcacttcaaatgtatgaggctgataacgcagatagggcgtctcatacttgattttcattcgacgatcatgctgatagatctcgatggcggcgtcgaattgcaccacatcctgatcgttgagaatctcatagacggccaagaaatcattgtatcggaaaacaataatgacatgttctccctggacggagacagattccacctccacaggcagccctaccagttctcgcacagcggccagggtgtggcaaccgaggcctgtgagcatcacataagtggtgcgctgctgatccgtgcagtcgttgccaagcgcgcgagtgatctgatcccggcggcgggaggaactttccgccttgacctcgtcggagatgtcgctgcatagatagggaggacgggtctgatccataaagaagtcgccttccagaataatatcccggaagcgcatgtattcaatcttgcgatcatcgctggccaagagttccttgcatttcaggaagccttggctgtaacggcgcatgtagccgaccatgcacacaagctcaggatgagctttttcagcggcgattagcttttccagatcttcaatacagagcgtcacaggcttttccacaaacacatgctttccggcctcaatggcagcaagggcgtagtctgcgtgatactggtcaggtgagcagatgaagacggcatctacatcgggggctttcaccaacatataggggtctgcataggctttcgcacgataagtctccgcaatatgctttagttgcgtgggagacacatcggataccgccgtaatctggtaaagatcgtgaaggccgctgagaatgggaaggtgcatcatctgagacaccgtgcccaccccgataattccaactttgaccataaaaatgctcccttctgtttgtgtactatgacttgtatagcgatagcatctttattctatccaaatcacaggacgagtacaatgaagattctcgtgagatttctaggatttttttgtccccagaaaaagagaacaaaaaaatccagacatcaggatggaattgtcctaacagtgccggacgatttgtgctatgattgctgtgacagttgcagaggaggaaaaatcatgagagtagttgttgaaaaggattatgaggcaatgagccggtgtgcgactgacctggtgcagaaggccatagagaaagacccgcagtgcctggttagctttccgggcggagatacaccggttgggatgctgagggagttcgtgagccgcgtcaacagcggaatgattgatccaacaggggtgaagtttgtacaactggatgactgggtaggtatcgggcctcaggatgaggggagctgctcccactttgtgaacacccaactgctgactcccatgcaccgcccgtttgccgataagtttctgtttgacggaagcaggattgctgccatcgattgccagctgaaagagcaggatgccttcatccgccgttatggccccattgccgtggaggtgctgggcattgggatgaacggccatttgggctttaatgaaaacggggtggacttttctctgcgttcgcacagaacgccgctgagcgcggtgacgaaggctgtacagaagaagtacttcggtggccgtgagttaccgcttgctgaggggatcacacagggcatcgctcagatcatggagtcagagcttgtgattttgctggccagcggtgttcaaaaggcggagatcgttttcaaagccattaccggtccggttaccaacgaactgccggcctccatcctccagaagcaccccaattgtatctggcttttggaccaggatgctgcaggcctgttgccaagggagttggtggaaatgaaaaatccgtaaagagtacagtaaacaggctccggtggaaaaccaccggagcctgttttctcagtctaattttgggggcctgtggaaagcaagtcgctttccgccagagaaagcggatgaccgaaggcgccatagtggagacagcagtctgcggcgaaatgcgccgcctgttctgccgccaaaagagcactaccgccattttcccagaaagtatataaaaaggcggcaataaaggcatctccggcacctaaagcatccacaggctgaataacacaggcatccgcttgccaaaactggccctgggagattccacaagcgccgcgagtccccatagtaaagattacttgggggatcccacagtcggcggcatattttgcaaaagtgtggacttcttccaaagacctttctccggcagagaagaaggcaaaacgaaggatcggcgcaagttccgccacgtttgtgtgagtaaagccgtcattggagaaatccatggacagatctgcccggcgggatagaccgcccagcaccgcgttggaaataccgctgtggatactggtgtggatcacatcgaaagcggcggcatatgccagatcttgcggcgtcaggtgtagagagaaaagattttgcacggtctctttgccattatttcctgagaacgtgcggtctccatggtcatccaacacaatatagttacatgcggatttgcccacaccaatacggacacggctgacttccacggattcctccctgagggcggccaggaaatgacgacctggtggatcatctgccagcactcccaggtagcctgtatattcagcaccgatccggcgggccagtacggacacattggcggcgttcccaccgggatagagttcgtctcgaaacaaataggcgtcaaatacgttgtcacccagtcccagcagtttcattatgacacctcgtttaaaattttactacgcccatatagcgccgggaactcatgggatgaccggtgagatgggacaactgtaaacagaaatctgaggctagggagtgaagcactagaggcgcaatatactcttgtaattcctctgggatttcagtgagatccaaggcggcggcgtctaagacggttaacttatcggtgacccgctgcagaaacttcacagcccgctcttctaccgggcggcaacggccgagccctagaaaagccacaacaggggtgtcttttccaatagcttcgcaggcgccatggaagagttctccggcgtgaagaggagaggaatgacgccatacagactccataaaagagcagttggtgagaatataggcgatgcatcggtcaagaccagcagagaccgtgtaaatgagctgttccgtgcggtgtttccgggcaaactcccgggcctgaggagcgaagtctgaaaccgcacgctgacatacggcctccagatgttccatagcggtttccatgccggggagacaattactgccgttcaacagatccacaagagcaaaggccagctggtaaacctccggaaaaatggagagcagcagaggatagggatttatcggatcgtcataatagtaaatgggaaaatccaccacagtctcgatagcggagcctggtactgtggtaaacgccgcagtaagcgccccgcgttcgtgcgctaaacgggcggcggaaacggtctccggtgttgtgccgctttgagaattcaagataaccaggctgtgatctcccaaccggtgtggcgggttatggaagaattccgctgcattgacagaggatacatggacggcattcgtctcacgatccagaatgtacagaatggggtacagagtggccaaagagccgccacaggccactacaaagatgtcctgaatggaacgagtctctgccgctctccggagcgccgcgatctggttcttggtgagagctactttttcttcgtgcatagttgcatcctccttaaaattccacaggacgaagttcccgcgcggagcggtaaagtcctgataggatctgcattacgactaaagactgcgctgctgttaccagaggcagccgatgctcccggatggaagataaaaaatcctccagttgcgcccgatttgcgctctgctcctcctccggcatctgatagcgggtagtgaccaagcgggcgccctgtgtgccgctgattgtatagccgccgggaaagagctccgccccggcggctgtgccgcagagcgtaacggtctcttcccggtcttccggcacgtgaagggcccaactgatatccagactcagcaccgtgccgctttgcagcacaacctgtccaaaggcaccggtctccgtccggagcatggcggggtcccaagtgccccaacggttggcgggagtaggggagtctcccgggcctcgaaagatgccggcgcagcaataggccggggaaaaatcgttcagcaaccacagagccagatccagagcgtgagtgcccagatcgatcagacatccgccaccctggactgctgggtcgaaaaagtgcccccaagtggggattcccatccgccggaccatgctggcccgggcaaagtagagggagccgaaggcgccttcccgcagttggcggtaaagggcctgagcggcgggagagaaccgggactggtgccccactgtcaacaggacgcccatctgttccgctgtctcgaccatccgaacggcatcctcagcggagatggccatgggcttttcgcacagcacatgctttcttgcgcgcagggctgccagggcaatttctgcatggctgttgttcggcgtacagatacagacggcatcaacgtcttcacgggccaaaaattccgccagatctcgacagactgcggagcccggagcaccgtattgctgctggaactcctcagcccggccaccatagaaggcccgaagagagacgcctgacatctctgccaggtttttaacatatttccatctggcaacgctgccgcatccgatgatgccgactccgatttctgagcgcatagaagcctcctgtcgtaagctgcaaatttgagtcaaacgtatcatagagacacaggcaagtcaatggaatatcttgtacaaatcttaggatgattttgggcggcaggtcactgcttcgtggggaatgagccgagagatgcctgcccggcccgtccagccagatcaccgttgtcaagccgtctaccaggatggcgaaggtgatcacgccgttcctggaggcggtgctggtggtactgccccggctcgtcaaccgcacaaagatcggtatggatatgcgggctgcctcctggaattttgaggccacgcagctgatggcatcaagatcaacaacatcatctgctcttcacccaacagtgttatacagtttcttaccagcataagccgaatatagaaacgaattactctggtgactctttctggccaagttgccggtaattatttgcggcaaaaatagcccccacagactgcggaatgtcctatccggagaaatttcggaaggcttccccccattcggctctggtttggttataattgcaacgcccctgaaaaaccgctgcaaggaggaaacaacaatgcctgctcttgacaaattcggcaagggcaggcattgtatttttctggaagagattttatactgccggcttggggcatgccaaagcccacttcggtgggcagggaggggctgcagtcatgaagacagtggtctggaatgtcaacggctttgcgcctgcaagcgcaaaagcttttgcgcatccccgccaagtccaaagcagacattttctgctgtcaggaaatcaagatccggtgtccgctttccgctccagggcgtctctggttctggaacccggccaaacgcccgggggacgcgggcgcacttgacactggcacggagggagccaagccccatgcgctacggcatgggcatcggtccctttgacgatgaggggaggctgatcctgcttgagtataatgtagccaccttctgtttttagggatagagaagctgactaacaattatttaaaatgaaacaagggagacgcctccaatcctttatgaatttggctctggcagtgtgtttaccaagcatattccggattatttcagcatctccacgccataatctgcatatgaagccaaaattctactgcatgggatcagttaaagtggattccaaaagacagcacaccggatgggaagatatcctccatcatccggtgtactgtgtttttttaaccggatggtaatatgaagacctgcttgaacagtcgggtatccccataaacaagaaaatcttcgcagaaaatgtctccataaaacattgttttcaagggcttccccttgttaatggagtacccaattcttccgagaggtcatttcgacctgcccatctgtgcacagggcaaggttaaaaatataaccgctactgtaaaacagttcatcataggtgccagaatagatatcaatgtttttctggtgactccttaaaatccatttacctattcgcctaacagatcccaaatatctccatcataaggcttgaaatcctgtattttctttgagctttccaagaaggccagggcatatccgatgtgtgccgcgacaccggttttgaactgcgattcatctacatcgaatttggccgtatgatgaccggatccagtacccaatgtgggatctttaatacccaaattcaaatacatacccggccaaaagctcattacataggaaagtgtctctgatccaaacttcaatggcccctgcactacacgatcttctccaaaaatctccgtcaatgtctgctttgcaatttcataacaatcagattgattgataagagggactgcaatacactcaaactgattatatactgcttcgcattcaaaagcatcggcaatattatcaataattcgccgcattgccttgctgaaaggacggtatgctctttccaaatcaaagtaacgaactgtaccggcaaaatttaaagttcgtccaataatattgggccgctgggactccgttgacaccctgcaaatcgaaaaggtaattgcatcatttggatctaccgcgcgcatacgaattttatccaatgctgtttgaatcgtctgaaagcaatccacaggattattggcccaatccggccttgaaccatgtccgtccttacccaccaatgtgatgtcaaacatcagtcccccagccatcaacggtccacttcgaatcgcaaattttcctgcgggaatatcactgtttaggtgcatgccccaaactccatcaatgtcccaatggttcttttgcagataatcaatgagataccggagattgccgcccccttcttcaccgcgttcaaacatgagcacaattcgcccaggaaaatcccgacgggctgcaagaatcttccccacagtgaccagcatggctgcatggcagtcatggccgcacacatgggacacgccggggatcttgctgacacattctttcttgcgcaaaagattgcacggatcctcctgaacaggaagtgcatccacgtccgcccgcaaaagcacggttttgccaggagcatctccctcgattaccgctaaaacaccaccatcttgcacttcgatgggagagagtcccacagcacgtaactcagtacaaatacgagcaattgtttgagtttcctgcccggacaattcaggggattcatggaaatccctgcgcagagcgatgcaaaaatcttcccatttttttgcagcattcagaatttcttcttttgtcatcatagatcgtgatctccttttcatttagaaaggcccatagttcattaactgtgcaataaaaagaagcgccatggccaaggcattccaaagcaggaatagcttccagaagtatttaaaccattttccgtaggagatgctggtagcaccaataaatcccatcagcggagcagaatgcggaaggatccagttggaaaagccatcgccgaaattgaaggccagcacagcggtttgacgagtcagccccaccaaatccgcaacagggatgaacaccggcataactgcggcagcctgcccgcttccagaaataatgaaaacattgacaaccgtattggcaatcagcatagccggcccccgcagcaacgtgggaagcccgttcaaaatcgcagcgcagccgtaaataacggtgtccagaaccagcgcctcatccagaatcatgctaatactgcgggaaagccccagtaccagagctgcggccagcatccccttggctcctcgcacaaagacccggactgtctcattgggattgaacttaccaacaatcgcaagaatcacgctcatgcacagatagatctgcatatgaactcgattgccccagttcaggcgaaggctgccatagatgatcaggcacaagcctaaaataaaaatcaccagaatagcgatctgttgagccgaaagatcggtgtcatagtgcttttctacttcttgattcttctgcacctgctcaagatcgtaaacatagctctttgagggatccaaccgaacttttttagcataccgagcaataaagagggctgtaacaatccacaaaacaagcatgcagattatccggtaagacaggccggaatacagcggcagttctgcaattccctgggcaacgcctgtggtaaagggagtgatcggtccagcagcagcacccacagcacctcctagcagcaccagagagacgcccacaagcgcatcatagcccatggcccgggcgatcatgacaaaaatgggcgcaaatccgatgaaagacactacaccgccagcaggagctgcgatcacggcaaacaccagcgtaaagaccagtataaacgccatgtcccgcactttccatttggccattctggctatgatcgcctgaagcactccggtgtgcattacgatttcatagcagccaccgatcgtcagcaggaagaaaatcatttccgcttgtgcaatcgtaccctctacaataaagtgtggaatacgcaggagactgattttttcgctttcaatataatggaaagagtttggatcaacgatctgccgtccgctggcatctaaaatacggtcgtattgacccgaaggaataaaccaagtcacgatgacacacagtatgatgactccaaggacgatcaacatgccgtccggaaaagcaggctttcgacgaatggaatttttgggttgcatagtgaatctcctttcttttatctcatccgtttacggaacaggaaatcgtggagaaacaccgttcagaacggcgaaaagatcttccactaccgtaatccccatacgataaagcgcctcctccgtattggctcctatatgcggagtgggcagaaaattgggtaaagacatcagcggcatatccacaccgggaggctcgacggcaaaaacatcacttgctgccgcagccagctcattacgggacagcgcttcatagagcgccacctcatctacaatcccgccacgtgccgtattgaccagaattgcagtggggcgacagacgcccagttccgcggagccgatcataccacgggtgctgtcattgaggggcacgctgatgttgatcaaatctcccgccctcagcgcttctttcaaacaatctgctttctcaatgtcgagcgtagccattttttcccgggaaacatatgggtcatatcccacaaggtggcagtgaaaaccgactcctagaatctgtgcaacctgctgtgcaatgtgtccaaggccgatcagggccactgtctttccgctcaactcagtgcccgtcagctcagggggcgcgatcctggtgcactctccggaacgtatcaatttttgagcggaaaccagctttcgggccaacgcaaggaaaagagataccgccagttcagccaccgagttgacattcgccaaaggagtatagacaacagcaatccctctctccttcgcagatgcaatgtcaatattgtcgtacccgatcccgtgctttccgatcacgcgcagctgcttcgctcgatttaaaaaatcaggtccaatttttgttgtccgcaccaatgccgcgctgacagccgggacatcctcccattcggagacaacttcagcccgtgaccgcagcagttccattgctgccggatgtatgggttcgttgacaaaaattttcatttggatacctcataaatattcacatttcaattctgccagcttctcgtccacccaggggcggatatatgtactatgctgcttcatctcactgagagtgcgggactcgttggccatgagcttttcgacctgctccaaaatctcctccgcatcctccggacgtattacaacaattccgtcgccgtctcctgcaagaatatcaccaggacgaataacctgtccacctacaacaactgctccaccgatttcacctggcccgttcttgtaggggccattgggcgtaactccccttgcatatatggggaaattcatcgcccgaatggcgtctgcgtcccggatacagccgtccaccacaatgccggaagcaccccgtattttacagtaacttaccatcagctcccccaatatagagcgttcttcgcagccgaaagcatcaatcacaaaaacgtctcctggctgagccatatccatggccttatggaacatcagattgtcccccgccgggactcttacagtaaatgcctgccctaacagccggcgcgggccatagggcctgatggcggaggagagcgctgctgtacgtcccatgcagtcgtcaagattcgcaaccgggatattgcgaaaccgttccaccagaccgggatctgtacgtgcgggatgcgtgtggattctgcaaccaacggataccatgaaaattcccccttttcttcaaagcaattcacaatcgctttaaacaagtataaagcaatttacatgccatatccatataagaaaatccagccgatttctaccgaaaaaaggcaaaaatcggctggaacagttgcatcatgcaatggggactgtgcattatgcaatcatcaaagaggaatttctgtatcaaaatcccgtagtttccgccacaaagttgaggggtgaatacccagcagctgcgcagcagctgtacggctgcctcccgtctgatccaatgcctttcgaatcagattggattccgcttcctccagggtagggaaatggccctccctagaaacaggcagctcttttgtggcctcattctgcgcaagggcgcgggcgttctcccccgtaataagcggcggatcagacaaaatcatcaggcgttcaataaagttggacagctgacgaatattccccggccattctaggctttggagaacttccagcgcctcaggagcaaatcccgtaacgtgtgtattcagggccttgttcttgttctgtaaaagggactgtgccagtagcggaatatcctctctgcgccaggacaaaggcggaacctttaattccagtacgctcagccggtaatagaggtctgcccggaatgccccctgctgcacaagagtcctcagatcccgattgctggcagcaaggatccgaatatcaacgggtatcactttgtcatcaccgatccggactacctgacgttcttggatcacccgaagcagacgcgcctgcatgttgggtgggatctcactgatttcatccaagaaaatagtacctccatttgctgcttcaaataaaccggttttcccgttgctgcgggcgcctgtaaatgcaccttttacatagccgaacagctcactttccagcaactgttccggtaaggcagcacagttaatcgccagaaaaggttcgttgcggcgaggactcgcattgtggatcccctgggcaaacaactctttcccggtgcccgtctctcccaggatcaaaaccgtgctgttgtactgagaaaagcggcgcgccatttgccgggcctgagaaatagcctccgatttgccaataatattggaaaggcgccatgtggcaacatggccgttcaactcatgaatgcgtttggcagagcgttccagcatccgaatatccgccatgtcgtgaatggagagtaatatgccaacagattttccatccagttggatcgtgttgcgctgcaaaacgaccggatgggcctccggatcagccagaccactttcattggtaagagaatctacaatatgacgattcgccagcagctggtcggcattctgcccgcaggcttcctcatttacagtgccaataatgcgctctgcagaggcgttgagctgtgaaatgatcccgtcgcggtccgtaataataagcccttcttgcgtataattcataacagcgtgtattagctgatcgttttccgcgcggtgtactacaaaatccagcaaagaacgcgcagtctgtatggaaaactcaaccattttttcatcaacgtcaaacaaaatcccgattttcccgttgattcgcgcctgcttcacgccaggcgtggacgaaatgaccacgtcaaaatcgccttggtcaagatattcttgaacctgctcttcaaaggggcggtcgagagacagcacagccgcctgaatagaatgggttggattttgaaacaactccagactgcgctggacaaaataattaacataggtactggcaactatgagaatcttatcggaaaaagcaagtccctcctgaatggctctggcaaactccgtatttgtaaaaagcagttccagaacaggcacagaaagatgcttgcgcaaatacagagccgtcagtccggtgctgacaatcacccggctcccctgagcgatcatccgcttcgcaatttccaaagctccggacatggttccataatataccggatagttaacatcacaacgctgcataacccgttggacagtttcaataatccggtcattcggaataatataaaggacagaaatatccatcgcaaatgcacctctttgaataaaatatcaagctgtctaccaaaagggaagtttgaattttaccatggaaagttcagtaatatatggaattgttcatgccatattcccgcatatagattctgcatttcgtattcccaagaatagatacggtctccttctttatcgtattgaggttcaacattatcaaaacattttcctgtgtctgcggcagcctcgtctaaaagatatgcgattaagccaacgatctctgtagtgtcttgcagttcttttccgtaatggctctgttattgcttctggtacatatggcgcatattgtgaagtatcgagtagtttgcacttaagtagtctctaaaatggttgaatcccgttttatattgtgcgcaagatcaaatctgtttccaatgacaaaaaggttgcgcatactttgctcctttgaatttctccatacatctgttattaactgatccttattgctatatagcaaagcagatatcggaaattcttaattttaacaggtgtggtgtatattgctttttattatatcatcaacaatggccctgctgacaagaacgcaagaaaaaattcttttttaacctgtaattaacaaaaaagagcaccgcaatcgaattgctctaattcgattgtggtgttctcaatttacctgctcaaagatttaaattcggcatttttctatgcggaaacaccctgctgctccgcatggaagtcttctgctgccctataaagaaagagtgccacaaacagttcctctatccattttgaatcctaattcctatgcttttgaaaatggagggaaacaccgccacagcctgaaagcttagtttgcagggctgggcatagcctttgcagagcctgttgcagttgtcagccatcatctatgtgttttcctaacagagagcggtttctgggattttatcgatgcaagttttagttgataatttccatgtaattaggtatgatggaaaagaaccatccgaccttgtggtttgaagagaagcaactaaccatataaaagtatcacaagcaacttacactatacgcgtggaatcatgcgtgatgtaggcggaagtttttggagatgcacacgaatcagttaaagataactttgattctatataaaaaatggattttgcctgtggaggaaaccacatctgggggtagatgtggcttctttcttgcggccttttcacgccctgcgtcagcatgtccaagtgacagggtgtcgcggggcgtctttctgtctttggaaaggagtcaacgaatatgagcctgaaatacgcctgccccggctgtgggacctctttgggctatgagggattgtgctggaaatgtaagtgcgagcaggatcggcaagctgctcttgcctggacgccggaacaaattggcgaaaagcagaaaaatctcattcagaacatccagaggctggcggagatggaggacccggagttcaccgacttctggcagctgctgggggaccgggatgccatcgccccggagatccagcgggcggcactggccgcagaggtgttctggccctgtgagatctattatcacgctcccgccgatgtgcgggatggcctgattcatgcgctgttgtccgcggaatattccagcgaggcctccaacctgatgagttgccttgctatgcagggagatgacaaggcaatggagacgctgctggagctggagcgaaatccccggccctggcgcaagggcctctatgtggacccatccagctatgcgcagatcggaggctggaccttcaacaaggagggccagaaaatccagctcaacttcgacacctgctatcctatggtcaagggaaccgctggcgagaaatctcccgtccgcattggccgggcgcgggaggacacctgtccccactgcggcgggcgtatggtggacatgctggtattggatggcagggatgagcggctccggttcctggggctggatggtatcctgaccgccacctgctgccccagctgcgtgggattcctgaaaggccccgccttcaaccgcttttctctggatggcggcgtggaggtctttccctccgaactctttgacggggcggagaagatggactgctatgtcagtcccgaggactacaaggccctcaccgaaaatccctttgtactgggcaaagcgcctgtgcccctgttttacggcgcggcctgtgaggatgtgaacaccatcggcggctttgccaactgggtgcaggacgcggaatatacgacctgcccccactgtgggaagcccatgaagtacctggcccagatccagtgggatacggtgtttgactgtgcagagggcgcgctttatgtggagttctgcccggactgccagatcgtatccatgcagcaccagcagacctgaggggagaacctatatgagtttgccaaagcgtgacggcgtacatggccgttattatctgatccataagccggatactgaccctgaggtgctggtggaagcggatctctgcattcaggatgtgctgagcggcgccgcccgtgaaaatcacgccgcctacccgaccgtggtgcgaaatcataacggaacgccctttctccccaatcagctgctggagcggcatctttcccggttgccgctgaaggaatttccctgcgaggatgcggtttccatctgcgacgccatgcggcggctggtgggctgggaagagatccgctatgagttggagaagtacatagaaaagcaggtgcaggaacgctgcttccttgtgggagagcgggaagatggctttaccgtctttccgccctgcgcagtgcggccggaattgcgtccggaggatgtggacgaaggattgctgcgctttgcctgctatgtggctgtctgccataccgtgtatgggcagagttttgaatccctcaccaccgaacacattttcggcttggtttcccaaatccgtcccgacatggtaaagaaactgaaaaccaacggcagcggcaaattgccaaaggacatccaacaacgtaagacggtgcatttcaccgcatcggccaatgacgcctttgccaccatccgcatcaccgccagggactccacggaggagtgctatgctgaaatcctggactacctgtgcgcggtgctggagcaggaggaattcccccgcagttactcggtggagtgcagaggaaaggagaaaatctatctgcccattcccggcttgcccaagaagggagtcaatcagctctttgcctgcgctgtgcaacaccccaatctgcatccggctatagagcgatacgctcgtctggctatgcgggagtatgagtggtaccaaaacctcgcggatgaagcctgcgccatgcccggctcttttgctgtgttcgctctggggctggaaggagaacagtgggcgccgctggtggcggagtatctggatctctgcgatgacgagcactcctccctgcaagagaaattccttcatgccttgatccggaagtttggtttccaaccatggacactgggcgtattggtacggggcgcattgtccatgcagaatctaaagcctgcaaaggagttccgcagcctgattgccaacgcggaaagcctggatgcgctgctgacagtcaagcgccgcttttccgcgtatctcctgccggaagaggacaaggacccgaaattccgggccatcgcttggcagagcctgctctgggccatctggggcccgtcctctgaaaacggcggcagcaaggtcatcaagacggtgccaaaggaactgaaagagaaataccagcaggtatttgcgtaaggagaacgtcatgaaaaagagaacggtcaaggactttattgccctgtacgcccaggaagatggggaaaagctggtgctgatccagagcggtaccagcgcggacaaaacctttctggatactttctggacggcgcatacccatgcccttgccatggcggatgtccagaccggacaggtgatctccggccgatgctacctgagctggccgctgacggacaaggagcgggaatccggcggctattccaagcggtttgccaagggccggatttaccggatcaaagcccgcggctggaaaggcgatgccctcagcgaacctcagtggtatgtcacggagatactggaggaaggcgtaccctgtccggcactggaggagctctgggcggaatacacaaagcccattcttctggaggacgaggtgctgggaaccctcacgctggatcgtgaaatgagtatgttcaccgggacctgccggtggatgggaaaagaagtccagatctcgctggatgtggagattgaaaagaaagcgtcctggacccgcgccaccaatgtgatgaagaaactgctggcagatcaggaagtctgggataagtccctgcgggcgatggctgcccagaagctcaccgctcaggccaacgaatggctggcggacaatgaccagaccgaccgggacccggagaaagatcccatcaccggggatgagttcgcccggcgcatcattctcactgagttttcggtctcccccggcgggcgttttaccgcttggtatgaggacgatgatatgttctggggccatgtggtcactgtggatggaacactgaaaaaaggccccattggtgcggatatacaggggtgatacgggaaaggcggtgaagtcatgaatcaggcggagacagcaaagctgtcggagctgcttgaacagtggaatgatgcggacgagttctcccgatgtattgaggccatcgaagctatcccggagcaggagcggggttattttctgaccgtcaagctgagccgggcttacagcaatctggcggtgctgggggatcatagagcgcatgggaccgacggtgcagtggacggggctctcatccggcacgccattgacctgttggagtccgtctgcacccagggggagaacgacccctactggaacgccaggatgggctattcctgtctgatggcatacccctccgccgccaccgcctatgaatacgcaaaacactggctggacctggccccggaggacccgaatgcccaaaagctggtccgggactgcgaggaatatctggaggaggaaaaagccttggagatagatcagaaagagcgggaggagattatccggcgggaaactcccgatgatggaaagagggttatatgtaaatgaacagcgggcagattacggcttttttacaggagcattggtatattgcctcggtaatcatcggtgcagtgattttgatcggagcgatccgcaactggaactggctctgcgaccccaccggtacgcgggatgcccaccgccacggcaggggataccggcgggtggttttctttttgttgggtgtcctcctgatcgtggtgagtatctggggatttgtgctgaaattgaaataggaggagaacggctatgatgcctgaaaaatatcccacctggctggaaggccatgtgaaagagtggacggagaagcgtctgcccaccgtgacactctgttcctccaccggcaaggaactgctggaggtttggtattgcggagatctgctcacggtgaagggagagccccaatcctatatcgtagatggggatgaggtccccggactggtggcagcccgtgatccggagagcggcgaggagttcgtcatctttgacggtgggcggcatggctacgacaatctgttctgcgatgtacacgatccatccaagctggagcaccgtcccctcaagcggtatgggatccctgcctccaagctggtggtggagctgggttacagcgttgactatgaggacgaaaaagaggacttcgaaccggatggggcggataccgtggaactgatcaacggtgagcggatgccttgggagcaggtcaggcgggacggcattgattatatcgccctttactatgtgaacgaggaagggaagcaagtccagattttggacgcagagctggcatgagtatggtgattcaatcctttgaccatctgcacgacaacagggtcctgtgctattgcgctgactttgaagcccatatcctgcatgtggatacccggactgaggccggagagaacgtatccgttcacttcaccggcctgctggcccactggtttgagaatgtgatccgggacaacatcctcttcggcatggatgagatcaccgtggacggcttttttgaacagtacaaagacctgctgggcggggccgtctcttacggctttcccgcctgttgcagcatcgaggaactgcgggagcgcatggatcgggagcacatccgggtatttgtcatcgacgcttcccttgggctgtgcggatttgtactggcacaggaggtggagctgaaatgtccataactgcctatcaagtggaagccgtcggccatgaccggaccggccgggacttcggctatgtgaatatcatgtaccgctatggtgataagaaatcctgtccccggccggatcaatgtgaaaagctggaggtcatgtgggcggacgagagcgtctacgggccgcccgcccccggcagcaaggtgggagactttatccagacctggctggtgggctcctggaactgcggggtgtttacccaccgggagattgcccagcggctcatagataccttcactggtctgaagctcaaggaactggcgtggtttgagaaccccagagagaagacgctgaaaaacggcaaaccacgtgtgcgccgggccaagtggctgccggagcgagaggtcgatctggtgtatctctactccgactactatattgacgcaagagaacctgcttctgcccaaacccatttcttcaccgtcacaaggatggacgcctggggcgtgagcacctggttcatgtgtaccccggaggccgccgaaaaactgattgctatggattatgacaatctggccgtaaaggaaaccaccattgtaggatagagaaagtaggtgccctatgtacgaaattgcctatcttggccgctgggagactctcccggaaacggctgccgccatctgtgaccatgacactcccaagctggaggcgctgcttcaaggtggcctggatttagatgttcccatccagctcagcgaatacatcaagctgatgccattggagatcgcggtttttcggaatgatgtgcctatgatccacttcctgctggagcatggggctgattccagtctggcagaggaacagcccctactgctcaccgccgcccgctgttgtgggccggaggtggtgaaactctttgtgggacagaccgcgcagcttacccccaagcagaaagagcgggccttccaggaagtgcgctggggcaagcgcccggagaatatcccggtgctggagcaagccgggatcacagtggacaagtttggcggcgaggcattccgggccgctgtgtccgagggcaataccaaacttgcccggctgcttctggaaaaaggggcagacatcaattaccacaagccggacatggtgtttccgaacgcccccaccgctgtcaccgaagctgtccgacacaaaaatcttcccatggtgcgctggctcattgagcaaggagccgacatcaccattgctgacaaatacggcgaccggccttacaccgtggcggtgcagaacaagaatcaggagctggccgactacctgaaagccctggaaccggaggaatggcacaacgagcaggaaaagctccggcagctcatgccctataagctgcctgcccggctggtggaatacttgaagaccggccccctgcggctggagttcccggagcagaaatgggtgaagtgggcagagctctactctttcatggatgtgcaggagatgacctggaagcggaagaagctgctctccctgatggcggccatggacaattacagcgactatctgctgctgtggagccccagggacaaaaagctgtggtatctggatatcgagcatgaggaattccaccctctggccaaatgggatgacttcatcgcagatcccggccggtatctgaacgggatgattgagggcgagtttgaggagtaaagccatgacatcaatagactttctgaacaaggtacataaaagcctggtctcgcaggaatatagcctctcttattctccagccaagtccaagaattatatgctgtactgcaatggcaacttcatcggtggcctgttcgatgaggagctgtgcttcgtctacgccgacagtgtgagtgaactgctgggacagccggaacccgtctaccgtggctactccagcaccgcccagcacaggatgctggtgattccggaggagcactgggcaaaggcactgaaactgctctatgccgagaaatttgactggagccggttggtgtacgacatcacatataccagcattggcgcggctgtggtggaggacttctacgacgagaatgcagtattcctgcgcttctgctttgaaaaggaactgctgaaaaagaaccctctggatcgacagggccgtatcctgcggatggtctatctcaatcaggatctgacagaggcgggcaaatatctattccccagactgatgcagaagtttctcgtttttacagatcgtaaagggaaaaccggtctgcaaaccatgctgaaacggtggtacaccgcgctggagaaggagtaccgcagccagacaacagagtaaggagggcggcaacatgacagaggaaaacaggacctacatcacccatctcaaggtcacggatgtcccgtggcaccggctcaccaccgcctatggccgggggacggattttcccgcgcatctggcggtgctggagcagatgcgtgatttggcgtccgtcaaagagtctctctatgagctcaccaccaacatggagcaccaggggaccctttggcacgccacgcctttcggcatggtgttcctgagccggattctgggcaaagcactcaaagagagcggccggaatcctgtggcccatttcctggccggggaactgctggacttctttgccggcatcctccagtgctttcgcgatggggatgagatggagcacgccgagccgctgccgcagttctccgatctgctccgggaagaatatctgtggtcggaagaatacgacggggaagcggatgagatgcgctacgaggaggacgaggttttccccgcagacgaattttacagcttctattatgactcctggcagtcggtggaagcctaccgggatatattggagcaagtcccggcagagtttgccaagcccgccgccgcggtgctggaactgctgtaaaggaggtcacgccgatgtttgaagaattctatgagatgtacgagcccgaggagcaggaagtggtcgctctgattaatcgctgcattgggggcggatataacaacaggggcaacttttgggaaatgactgttgtgacgctgggcatggtgttctgtgacaccggcaaggtcagcaccaaagaggagcggctggattggccggtcaccgacgaggagcgtaacagcgaaaagggctggggacgctttggcaaggagcagatctgccgcctgaagatccgccgaatgaaggaagaatgggcaaaggatctggtggcgtggccctggtgtatcgcccaggtggtcaaggcccacgaggactgcccggagcttcaggccgttctggacgagtaccacaggccggtggtgctccaggatgagacgctgggggagctgacgctggacaaggactataacacctttgagggtgagatccagtggtgcggaacggatgtgtacctgtctctggaggtcaatgcggagagcaagccctcctggacccgtgcccgcagtgccgccaagaagctgctggccgactgcgagacctgggacaaggccatgcgggagcttgcggcaaagaacctgaccgggctggccaacgactggctctctcaggatgaggaaaacccccgcaatccgggaacagaccccatcacagaggaagaacttgcccggcggatcagcatgacgagcctgtccgtcacctccggcggcagcttcaccgcctggtttgactgcgacgagatgttcaccgaccatgcggtgacggtctacggctccttgaaaaagggcctcaaagctgccaacattgaggggtaaggaggcgcctatgaaactgtatgagtattggcttgggttgtatccccttgattgggaattttgctttatgccagtccaaacctataaaaacttcatcacagagcagtatcataaaaaccccgctttttacaacatatcagcgggttctattgagaaggtattggcacacattgacgccattttatctgcggccatggaggactggaataaaaccacgaaccatgctgccctgcgttgccccccaatgatctttcctctcccaaagggacaggagagcaatgtggcggaatttgctgtcattctcaagatggatcatgatggagatacagtagtctattcgccaattccattaccccatctggaaaaccaatgaggaggcatctctgtgaagctgaactgtaaacgcattgattttacatatacacccggcgaggagatattcaactttcccgaggaatcggggctgccctttctcttcgatgtggaggaagaactgaccgctgattctgctgccatggatgcggtaggagaaatgctggatgaggcggagagattggcggaaaaggccaaagctgccatcaaagcggcgctggcggacgagggcagcccctaccacgatgccgtggtatttttcatggagttccaccgggacgatgtaggcccggatattgcggcggaactttttccgggaaccgacccggccaagctgtcctttgccgagatggcggactttttgcggctcaagcggttcggcagcctggtggatagcgagatgaatcagcaagttttcattctggacctgtccttcaacccagagatcaccgacgagctgatggtggtctactttgacttgaaccaggagattttctgtatcacccacgagagctgaggagagagttacctatggaaaaagcgactgctgttaacacttgcttaggtgttttgatgggacgggactgtatctatctggaccaggtgaaacaggatgctctgaacaatctgacctttacgggggacatcaatggccatctgatctcccagcacagggacgaaaaagactggtttccctacacactcaccttccggcgggtgctggcctattttgcctgcgaattgggcacctatgaaaatctggcggggatggggcatctggatggcagttctttcgatttgatcgaggatagcacttggctgaagtctctgccggtgcgggaggactttgacaaaggcatctatcggctgtttacatacgatgatgtttacaacatcattgcggtttcttatgagtttgcggcagagttgtaaatgcctgaaacatggaagaccattggaaggatctatcaaggaagaaggtatggtgatgaaacagaataagcatcagttggagcatctgcccatacttctggttcagcagctccgcctgcaatggtataaagactgccggggcggaaatgcggccgcacagcggaaccagtatcccagagccatgcggctgccgaaagacttcttctcgtattattcctttggtctgcctacacactttgtatcgatcttacagaggcccaatggatttcagatcgataaggactgtcgcaggctgatcgaatggaagccgaatggcccaatgcgaattcatccttttgaactgattcagaaggagtccggactccatgtgcgttaccgcaatgattggcacatcggtgcaatgccggagcgatatacctacgatgagaccgggcaaaaacagcccctcaatgagctggcattggatttggctcccggtgagtatgggagagctgtctgcaatgggcggttccgggactgggatacaggaatctggtattatgtgctggacattttgaatgtgatgccgcttacggaacccaccgactcattgaccagttttacggacagagagcctaataagatatatacccggatcgcccggctgtggtgacgaaagacaggaggatagccacatgatttccacaaaagatttatccggcctgcccaatgcggagcgtctgaaaaacttctgcaaaggactggcggctctggacatcatcatgctggaggaggaatggagcttcatccgccactatacctacaaccccgcatggcgaaagggcaaagaggcattttttgccactgatggcagtgaccggagcatgatcgtcatgtttgcgccggaaggctgtgtaatcaacggtgtggattccgaactctatgactgggaggaaaaacttccccgtgtcgaagacctgacagatgggatgccctctgctttgcaaaaactcatgggcagccgagaggtcaaaaagatgaaaagcaccttctgcgtctggacggaggatggcgccacctggcactgcaaccccatagacggcgaggacgcatccaaagatctgctctccacgattgatggcaatccacagacctatgtggagtacggaaagtggttttatcacgccgacctgcctttggaagctgtgcgccagcttgctgacggggtgccggtgacaaaagaactggccgctgcgttgaaccctacgcgcagcgagagggaggaaatcaaggcgggcttggataagatcggatatccaaaggatctttgattggcagcagacaggagattgattcgaatgattaaagaacgcatccccatctccggcgacctcaaaagcaaggtcaggcagctgatggagtacgccggatggcaggaagggcgaaaagtggacatctccattgcggagcagtattacgccgaccacggcgtcccgatgatgaagactacccagcggttttaccggaaatatttcggcctgtgctgtgagtggtacctggagcagagaaaactgaactgggcggctgattttcaattcgctttgtttccttacttggtcaacggaatcaaaaaccatttggaagaagcctattttcgggatatgtccggctgtgaactggcagagatcgaacaggctgccggtgaaaaatgtcagcccatcggtcatatcggctactactacccggcagaggtttggatctccgagtgcgggaaactgtacgcgaaatatgaatatcaggatgagattgagtgctttccggatgtgtttgccctgattgagcgggaactgcggcagtgcaaattggattccgctgccatgaaacctgtggaggcactggatggaaaactttgaatcgctcgaaataggagactctattatgtcagactgggcacaaattatatccgatgcgctggacattctgaaatttgacggagccgtacaggacacgctggcggagcttcggcggaaatggagcgggcagatcccggcgctgctggaggaacgctttgatacgctcggcattcagtatatgaaattaccccacgaaatgggcgtggctgcgctgggacaggagctgtccactttcggctgggcgctgtatgacctggacgaggaggacgagtatctgtttgtcctgattccagcggaagaacgcaacaaatgggaacgctactgcaaaaagcaggggcaatattgccacctgatgaaacagcaagggcgaaaatggggcgaccatgccaaggagcaggaccctgggaagctgatgccttgcgaggaatacatactccaagatgagtacgattatttcttcaactctctggcaggagactttgcagcgggagaatggaaaagcagccattcggaggaatggaaatacggctgtgtggcagatctgcgctgccgcccgccaaaagtgacccgctccaagagcctgtaccagttcgggcacctcgcctattcggatcaagccggagtgtatgccgcctccggagcctctgcaagcgggcagatcggaaaggtgttgcttggcaaaaaccccagtacacttaatttttttgagccttctcccatcggatacgagggggcgccccattctctccggtgggtgggaaactccctctgggtgggcgatcccaccaatgccacacggattgaactcaccgaccggggcacctgtcaggatgtgaaaaactggcccctgccggaagatggatggagcaccaaataccattgtggcattacgacagacgggctgggccgggtctacttttccaacgagtggtacaagggacagatctaccgctgggaaaacggcaaggtaacaaaacacaccttctctctggatggatacgaccatctctccgaggccgttcccgttcccggcaccaactgtatctatatgatacactctgtcagtggcaagtggcggatggaagaatgcctgctggaactggacatggacaccgggcggtgtcgcatcgcccctctgcccggcctgggcgaggagctgaaacttcgctggtttaccggggactggttgctggtgcagggaaacggcgaaatcctctccgatgactttgcccagctcatcaacatgaacacccgtgaagtgctgcgtatccgtccgggaatgttcggcggggagaaaatgcagcacattggaatactcaccgatggcacagtggtcatcgtcacccggcgggatagggtcgggccggtgtttcgttatcccatcgacttctggggttttcttcggacggcaaacaagcccaaaaagctagaaccttggcgagagtacaaagaagtgtacccgaatctgcccatctttcttgcgggcgaagaaccagagccgccgaaggatggcgcaaacagcatttccgataccgaaagcctcctgcttcgccctcagtttgaccgactctccccggaggaaaagcggcccataatggagcggctggcagcacagtatcgcctggattttgtgcggatggagcactttggccgctggggacagcactgcaccaccggaatcttcaaaaaagatggccgggagttcgtctttgtccccggcgataccgtcatactgggctgggaacagtttgccgcaggactgaatcaggaaagccgcgaggaattggagtacctgttccgggaatgggaaatggagcgagacccgacagaactcattggagagagcatggcccctgtccggcgggcggccatcggccccatgctggtgggccgggagctggaggagatcaactgggagccggtcaagctggatgacccacggctgcgcccggaatggttggaagattttcgccaattcgctttgactgacaggaacagtcttactctggtaggccgtgcccgtttcgagcgggatggcgacagctggcaggcaagcctctatcacgaggtagactatccggactttcaaaaccggctgcaaaaacagggtttctccctgcccacggcggacgagtgggcctacctgtgtggcggcggatgtcggaccctgtttccatggggagatgggttagactactccatgcgtctgcactggtttgaggacatggatgaggatgagaaccggccctatgacatggaggaacccaacttcttcggcctgtccatcgcctacgatccctatatgcgggaagtggtacaggctgacaggctcaccacctgcggcggcgacggcgggtgcaatatctgcggcgggctgggaccgttccttggtttcctgccctgctcgccccactgcaagccggaagtgcaggaggataatgcgctgaacggcaactatgacttttaccggcccatcgtccggataccgctggaaaagaaaggagaaatcgaaatgcctgcaacacaatggctgaacaaatatgaatccatcaaagacaaactggcctgcaaaacagacctggacgctcatttcacagagaaagtgattgggaatagggaagtggatgtgctggacatcggcgccgtccattttcccagcggaacgatctttgcctgcgatccgctggtggagctggaggatacaccgccctttatacagacgatccctgccggaacttatcccgtgaagatctgcgtggtgcccagtgaaaaatacggcgaccgctacgcctgcgtcaaggtggaggtcagccgggaaaagcctgtccgctatgagttggggatgacgggcaaagaggatctggacgaggaactggatgaggacggttattttggctttggcgtagacgccgggatgggctgtgttgcggacatccagacccaggcggccttcaaaacatactgggccaagcggctggaggaagacccggacattgatccgtacaacgacctgttctgtgacttgctggaggaaaacgccaaagcctgtcccaaatatcagttgagccacggcgactggctcaactggacggtgccggacacggactgcaatctgcctatcttcgcttccggctggggtgacggctactatcccgtctacttcggctatgacgcaaagggagaagtctgcgccgtgtacgtgcgcttcatcgacattgaagccagctaccaggaacaggcgtaagggggtaagcagctatggaatggccgaaacgggcgcggacagcggactgggaaaacggtgtcctgaccctggatggagagaagaagtttgagatcccggagctgaccttggccctcatggaacggctggctggttacaccctggtaggcttccatgtgaaaggctatccggtgacggatgaactgcttgcccccttcgccgaacacaaaagcatggtcaacttcggcgtggaagacggcgcactcactgacgcctgtttccccgtttttttcgctatgcccaagctgcgctatctgctgttggacggcaacgccgccatccacggcagcggtctgtccgccctgcaaagctgcaagctggaccttctcaccctcaaccgcaccgggttggacgacgccggtttgctccaggcggcctccattcccaagctctcccacatccagatcgaccataccgccgttacatacgagggtctgctggccatcgccggcaacaaccgcatcgagccggtggcccatgtgcagttcaccaaggagcagatggaatacttctctcaaatccagcgggaaaagggcaaaaagcccgtccagctggacgaacaggcggcggtggaatgccgcagggtgttgtctgccttctttgctgaaatgacagaatgggagcagtacatggaacaggccgggtttgaagatgctgaggctgtgccccgcctgctggtgatctgggagaagtatgtgagcgaaaagccccgtatgggcttccgacccctgggcctctcgtacagcgcccagggcacctacaagggagagcagttcctggacgcggagcagatcacccgaaacaagctctacatctacaccagagagaaaaacaccggctttgtccgccgcttcctcatgaagcgtgtgggcgagggctggaggatcgacggggtgcaggagcgactggacggctggcagagaataggactataagctatcagggggaggcacaggtatgaaagcacaagccggaggggtctatacagtctacaatcgatacttgaaatgctacaccgcctgccaggtggcctatatcgcgccgccggacacggtgagcagggagtcctgggcagtgatcctctctctggactgggcaggtgacgcccctctgactgcggaggaactgcctcatctccgcccgctctacatagatttcatgtactggtcccgtgaccttcatctgctgcgggtgccggtggaggtcccgccccagtacacgctggtgggtaccctgccgcccttcaccgaccagccctgccgctcctacggcggctggaatgacggttatgatgtgtacctccagatccggtggcaagccatcccggaaaagcggcggcgggccttcaaggaggccacggagagcgacggggtgacagagatcggcggtatcccggtgaaggtcagcagccatcggatcatggaccagcacgagccattcgattcggcgctggaactaaaggcgctgccctgcctctccgacctcatctgccagcggtggcacccggatctgctggagtttttgcggggaacccccttcgttgatgaactgactttgctggaccacggtcagaggacacttgatctgcggggcaccagcatcagaaagctgatgttggacatgacaggccttcaggaactgtggctgagtgaggatacagagcagctcctgttccagaacaaggggccggacgcctgtaccatccatgcccccgaagatggcagcggtctgaccctccaatttatcggggaataccgcccgcacacggaactgccgaacctattggaactgcatggcatccagctgaaagattttgatctgagcggactggctgctgtccatccccacctgaaggagctgaggctctggggcgcgccgggaaatctgcaaaacttctctgctgtgcgagagttccgggagctgacgcacctttccaccttcgacctgttcggcttcggggcggacgacatccccaccccggagcagatgccggagcttcgctggttctggatgaccagcctgccggagacggcagcaaaagcggcaaagcagctctggaaaggtaaggcgggaatggacctgcggatcaccaagccccggaaaccggagtggctggcgcaaaacctgggcaatcccttccggggctgggacggtgcggagcatattcctgtcagtgccgcgagaaaggcagccaatcaataccgcaagacccgctcccaattgatgaaactggccgctgagccgggcgaggacgcccaggcccaggcgctggatgcggttgcagcatacacccagaccttcaacaagatgggctttatcgaaaccgaggagcgggatgaaatttacatggccctgcgggggattctggacgcactgccggacaacacactccaaaaagatgccctgattgagaagtttgagcagctgcgggatttttgaggaaaatgagaagcatgatagagttcggcaaggatcacagcccggcgtggttggaactgatgtcagcctaccagatttttcgggcaaggctgtttgattggagccgcgaaccggatcaggtaaagcaaagagatctgctactggagcttggttcctgggaaaatcgggatctcaacagaagaacgctggtggcggatcttctacgcagcgccgagatgtgggatgaaaaagccctcctcttggttcagaaagaactgaccgcgattgccctacaggaacaggaggtgattgccgcctttgtacgaatggcattatcaaagctcaaaggcagatcagagcggcttgccattgccgatgaggtgcttcgtctggtagcagaggaggaaggaaaagcggagcccgaccctgttgtattccacaacggctgcctgttgctgtatgatttgcactgtgaagcagagttctcgcagtatgcggatcggtatgggactttgattgagcaggcatacgggttagatgaaaaaggcttggcagacatgaagaaaacgctgtccgccgggccttagatagaaaggaatgtgcgggcgcatgagccgaattgttgatgaaccctactttacatacagtgcatacaacgccctgacctccggcattcaggtgaaatgccccaagtgccacggcgcaggtatggtgacagcggatgatgacaacgcctatttccggtgcctgagctgcggccatcaggagacccgtgaccggacgatctaccgctacgatgtccataaccagtgcaaaaactgcggaagatactatcgggtggatattgaagatgaggaaaagcagcacttttctgttctccatgtggcctgtccctattgtgggacaaccatgtcgggagaagttcataaaacagctgaagcattttcctacactgctgagattcaggacggacgagaaccttatttcggcctggaactgtggtttttgacctccttccagggcaaaccggcctgggcactcaaccgggagcaccttgcctatctgatcgactatctcagcgccgacctgcgggaaaagccgctgggaagagcgaaaaagactcaggccgatcatctccccgccttcatgaaaaccgcaaagaatcgggagcggatcgtgaagctgctgaagaagttacaggagggatgaggatggaacagaaagttattttcaacggccaagtttttactctgacccggttttgggcaacggaagagccttgtctgcggatcaccgacccacagcagatcgagatgcctaaaatggagcttgtgggggccacccagatgaatactgcattttcctgaaaaatctgacggaaacagagttggcacagatcacatccctggacggcgctccgctggatgtgagagaagaacttcgacagtttctaacaggaaaggacaaccctatggcactacaagataagaaaatcatgcctcccccttggatggccttcccggagatcgagcgatactccattggctggcgcatgggctatggggaggattacatataccgatttggcgattggctggacaccctctccccggaggagcggacggaataccgcgccctctttcccgagccggtaacctggaagggctggtgggaggacgaggacagcggcgaagtgctggtacacggtgacttcctggtggaggcgtggcagccggaaggccggccaaagtacacccgccagtggctccagcaggagtttaccgccgggcgaaagcgggaactgtgcctgttctggggccatcagccttcccaggacggccagctgacaaaaagctacctcagccagtggtggatggaggacttctatacgacggctgccccctacctctgcatggagcaatacatgatggctgccaaggccgagctgttcggcgacaaagagatccgggaccagattttgaaatgcagcgaccaaaagcagatcaaggccctgggccgcaaggtgcggggctttgagcagaaggtatgggacaagttcaagtacgccattgtgctacttggcaactggcacaaattcagccagaaccgcgaactgcgggagtttctcctttccaccggggacagcgtgctggtggaggccagcccctacgatgccatctggggcatccgcctcgcggccagttcgccggaggcccaggacccgatgaagtggcgcggacaaaacctgctgggctttgcgctgatggaggtgcgggacgagctgcgcagagtgacacagaatgaaatgctttgcgattggagtatggtatggcaacaatgaaactctatgaactggtcaaccactaccacatcggcacggaactgacctgcgccgaggccgtgttcatggcctgcaatgagtattaccatctgaatttgtccgaggagacccggaagatgttctctgtcatgggcttgggcatgcagaccgagcagtcctgctgcggtgctttcactgtggcggtggggatcattgggctgatgaccgccaaagagggccagaccgatgtgagcaacatggagggctaccaaatgattgctgacttgacagacttcacgctgggcatctatggaacgctccactgtgtcgagctgcaaaagctggagatcgtggggggtgagaatccctgccacgccattgtggaggcgttggccaaaaagctggaggagctgctggcgggccgcaggatcttccgcccggtaaatgcgggacagattggttcctgatatgctggaaaggggggggagtccatgtctaaactatcccaggaagaagtacaatcacttcgcagcaggatctgccacggagagcagggactaatttccactctgacgccggagcaattccttgccctgctgtcttacgactatgataccggcttcgcggccggcaaagcctccgcgcagaaggagattctctgtatgctggcggcggacgggatgcccccggagaaaattgccctactgctgcggatggaggcggagacggtgcgggagattctggccgccaagcgggcccacattgagaaatgcagaaaaaagctggaacaggaggtgaagccgtgaaggacctttttcaatacggaaatcggcgggaggaggaatgggagatcctgccctggatccccgacccgcgcccgcccttcaagatctgggtcaaaccggatcagatcgcgcccttttttctcattccccaccacccttatgcgatctccctcctgctgaagatcagcgacgggttccaggtggaggaattctgccggctgggacggactggcagcagcaaagactgggagcggctggtccggggcgtgatccgggagttcgagaaaaacaacagcggcagggatctgtttcacttcgactccgacgaggatgtgttctgcgtgtactcccaatacatcgacgatttgatgatgctggccaaactgatccgggcggcctgtgccgatgaaaaaacgatggggatgtatctgaacatgagcgaggcagagaaaacatgaaagagttgaccactcaaacaggaatcatagtaaaatgcaggaaaacggccattgaatttttccaaaatgctcagtcagcggattccttttctgcgctgaagattccaaaggaattccaaggtatagcggttgagttttatgatttgattctggaaaacgatcatctcgcggccttgctgggctgtcgcggcaatgatgatattgcaatacagatagatgaggtaaccggcaccatgacggggtggcattggttcaaatgaggataatggaatgatcgagtacatcaagctcttttgggagagcgcaccagagggagaaccaccggtcatcctctatgaagtggataccgaaaatgagcggctggtcctccgctccatcgacatctttgcagatggacgcacccgcaatatccctgacctttatgaaggcgctatcgagatcacgccgatcccaaccgtggaggaattgaacgcccatatctggggcgaggagttccgcgcctgcgccatagagaaagcggaatttgaggccatctgggagagccaattttttgcttgagaatggaggatctgctatgagtaaggaacttgaactgtatcaagcatttattgacggccttgtggagcggaaagacagcatgaccgccctttgggtcaagggcgatggttttcccaagacagaggacaacaaggcgaaaaacgagcttctcgccacactgaccccggagcagaaaggtgtgctggccgatatgctccaggacgagcatatcgcgggtatccacgataccctggcatatatcaatgagatgatggatctggatgggctggagcttcgtcaggacggggaatccattcccaacgattactttgagagcctgcactatgacttcatcagccggtgtgacggcgatgagtggccggaataacaggaggcgtgacgaatgtatatcaaaaaatactggggcaactttatcggaggttctgatgacagcctgaaccttgtggcctttttagaagaccagaagaaagcggaaatccccctcagcgagatcttcaccaagattgggctggacaagcagaactggaacttccgccagactgtggggtatctggaattcacccactccaatggcgtggagatggacttccacttcgccatggatgtggtcaccgatctggccgccatcctgctggagtgcagcgtcagcggcggcgtggacctccacgacctggacgagtataacaccgcccaccgccgtatccgcatcaccgccacgtcagaggagcatgacgccatgaacaaggccctggcggattttgcccaaaatcctctgtcctatgatctccacgaaatgatggatgacgaggagatccgggagatggctcgggatatagaggcgctgcggaaggagctgtatgaggccgccggtcgcaaccgggactactatgtaaaggcagaggacatgcagaatctgctcccagactgggaggaagccaatggctgcatcgccacgagccgcattacggtggagggctgcaaggttggctactgctaccgggaggagccggacggcgactgggacagcggctggcgctttaccgccggtgatgagagcgacgagtacatggacgaccccaacaacgccgggatctacggcctcaactccatctgcaacgacgatcccgacattattcccctgctacatacgcccgccccctgcgcctttgagcgggatgagaatggcgtgttccagcagatcaaagactggaaaccggatgaggacgaggaggacccagatatggacattttaaggcagtgccagaagtggaatgaaaagagcgagtaccagaagatcattgacgcgctggagaccattccagcccaggagcgcaccccggagatggacagcgagctggcccgggcctacaacaatctgggggcaccttccaaccgtgcgctgctcaaaaaggccatcgctctcttgagcccccatggggaatacttcgagggagaccactgctggaacttccgcatgggttactcttacttttatctggatcaggagggccgggctctgcgatactttgaaaaggcattggaggcccgccctggtgacgaggacaccatagagctgatcgactggtgcaagaagagcatttctctgcctcagttttcacagtgcttccgggagcggacagtggactggtgggaaacctttgccgaaatggaagcccagctgcgccagatgatggacgacgacaaggatcacacccgcggcgcggagatcgtggcccaaatggaagatactttgaacctggtctttgacgagatttccttcgagatgggcttcaatggcgaaaagcatgagctgatcctcaccccggagggcgacgaggtcaagctgtttgagctggtctacttccggaagcacgcccccaaggaggtgctggagcactggaacatcctggtgggccgccagcccagccaaaacatcggcctgcggaccgacgacggctgggatatctccggggaagatgtgcagatctggctggaggaacagggcgaaaacagcttcgccatctccgcctactgcgaaaagctgctgcccatgctccgggaggaggaaggccgggtctggtggatgctcaccaccctcactgaccaggtgctgggcgagatcccccacatgagatacatagacagcttcgatgtactggaggagcccaaggcagagccgtccattcttatgtcccagcttcctgacgcgttgaaggagcggggcttggaactttccaccgatccggaagcctatctggagagctaccttggctacaaaatggaacccaacaaggacccggacgccgactggcggctggatgtgatggctggctccaccaactgtgtgccgatcatcaacggctatctgaatgccgacaatgactttatggacgagctccatgccgacggcgcagcggcgggcttcttctgctatcccctggataccctgcgggaggaggaaggaacggagaagatttttgacttccgggacaaactggaagaagtgttcaccaccggggacggcccggaggtggtcaccctcaccggcggagccaccggactctactgcggctatgtggacttcatcgcctgggatatccgggcggcactccagatggcaaaggaattcttcaaggacagcgacatcccctgggccagcttccataccttccgccgtgaagcgggcactgtgagtctgaaaaatccgcccgatgaggagccggacggtgaggcgcaggccgccgagttggacgagacgccgacgggcatggactatatcccttataccccgcagaatgcagaggcattctttgcacagctccagcagtggaacgacgaggacgagtacacccgctgtattcaggcattgaatgccatcccggaggactggcggaactaccgcaccgcctacgccctggcccgggcgctggagaactacgcaattctgggcgaccacaatgagggaacccccaactacaagggggacaaggctctgcttcgagccatcgaggtgctggagtccgtccgggaggaaggccgggacaaggcggagtggaatatgcggatggcctacggatatcagtatctccacggtcaggaggaagaggccatcccctatgcccggcggtgggcggagctggacccggaggacgaggacgctccggtggtgatccgggagtgcaaggcggagatccggaaacgccggagcagccggaacaagaaggacaaattcgtgccgggtgataccccctttgagggcttcgacctcaccaatttctgggacgacagtatgtatgcgctgaaagagtacgtcagtgatccgccttccgatgagctgatcgccagcgtggaggaggaactgggctacaaacttcccgcctcctacatctggctgatgaagcagcacaacggcggcattccggtgaacacctgctatccctgcgatgagcccaccggctgggcagaggaccatgtggccatcaccggtatgttcggcatcggacgggaaaaaagctgctccctctgcggaaagctgggcacccagttcatgatcgacgagtgggcgtatcctgccatcggcgtggccatctgtgactgtcccagcgccggacatgatatgatctttctggactaccgggcttgcggcccccggggagagcctgcggtagtccatgtggatcaggaaaacgactacaagatcacccatctggcagacagctttgaggaatttgtacgtggactggagcatgaagccctctacgatccggatgaaaatgagggcgatttcgaggaggatgatgctgacggggaggaaaccgaccgcacaggcgtcttcaccggctttgttctcctgtccaagggagaatgggacaaggaccagttcatccgggacatgaaggaaaaatgggacatctctgtggaggagtacgacgccagtgaggagaaggatgacgatgcgctggtgttcgaggtgggtgatatgctcgctgctgtcagtctggcgacctatcccatccccgacggcgaagcggaaataaacgcagagaacaactacatgtgggaggatgccgtccaagtcgcacgggagcaccgcgcccatatcatggtggcggtgctgggcaaggagaaaaaggttctggagaagggcaagctcttcgccaagctggcggctgcctgctgccgccaacaatacgccaccggtatctacaccagcggcgtggtgtttgagccccgcttctacgagggctttgctgatatgatgaaagaggacgaactgcccatcttcaactggatctggttcggcctgtaccggagcgagggcggcttgaacggctatacctacggcatggatgtgttcggcaaggaggagatggaggtgctgaacgctgacgccgagccggaaaagctgcgggactttttggcaagccttgcctcctatgtgctggcgtgtgatgttacgctgaaggatggggagactatcggcttttctgcggacgataagcatgccatcatccgcagtcccggtgtctctctgccggaggagcagatgacgctgaaaatctcctgggaatccggcggggatggaccggacggaggcggtgaagacccgaatggcggcggggatgactgcccggacgaggaatgctttcaagacgagaaatccagtgaaccggaggtctacaccgaggaggagatggaagccgtcgaggggcacatccagcagtatttcggcccgttcgagaatgtgttccatgagctggtctccccggacatccatgtggacatctgcgtggtaccgccctcccgggagcgggactactacacgctggtcactatgggcatgggcgcccaccggatgaatgtgccggaggaactggcggaatacaagctggagcgggcggagctggccattgcactgcctgcggattggaagctggatcaggagtccatgaaagatgagcggtggtactggcccatccgcctgctgaagtccctggcccgtctgcccatcaactgtgacagctggttgggtcatggtcatacagtggagaaccgggaaccctttgcggaaaacacgaaactgtgcactgcgaccctgatcgatccccagggtacggaggacggcagtgaggtctgcactctgccgggcggcgaggaggtcaacttctatcaggtcattcctctttatgcggatgaattggactataaactggaacatgacgctgacgctctgctgaacaggatgagggggatcagttttgtcgtaaatcccacccgtcaggatgctgtcactcgtggcaccctttccaatgatgattttgacggtgagatggatgacgcttcctatcaccttgagagcattgaggaaaaggaactgcctattgaccccatcaatgcctataaccacatggccatctacctgcgctggtgcatagaacacgacctgatgggcgaggacttcttaaaagaatacagcgaagtggccaaacaggtcaaagttgatcctgccagtgtggatctgcgggagtttatccgggatgagctggacggctgtctgttctctgtgctgttcaatcagcaaggccgtgcctttgcaggctattactacggagagggcgacagcccctactatcctgccgatgttgacgataacgcactccgtttcttcggcccggagcggtatcactccgaggagttccgggacgaagcctacctgttcattccctttgacgaggattattatcaggctatggcaaaggtgatcggggaacgctttgaaaactggcagggacaggactttgacgaagacacgctggagccctccgaggtggcggatgctttgatggagtatctggactgcgagtgcacctatttcccatccatggcagatgatgaccccatcatgtcggcgtacagctatgccaaacgggaaagtgtcaaagagggatttgtaccggtgctcatcaaggcggatgacgaaacactgctggagtgtctggtgatgaacgctgacccggagcatgacgcggactgctacgaatttgacctcaaagcggtaacggagtaccggaagaagatgctctccgcccccatcaaggacagcaaggcggttctggaggaactgatcggccagcgcaaagcagaggccgaagatgacgatatggactgggaggaggagattctgggcgagatggctggcggctatgacaatgaccgtttctcctgctactgggattcggacagccacatgacccaccccctcgttttggccaggatcccggtgaaaaaaccctgggagatcttcgcctacctgcccttcggcaactggaatgagtgccccaacacgccggaactgatggcagtggcaaaatactggtttgagcagtacggcgccatccctgccgccatgagccacgatgagatggagtttgaacttccggttcctgtccccaaggaaagagctgtggagttggctgtggagcaatatggcttctgcccggacatcgtggatcaggagcaggatgatcccaccgtgggcaatctggcggatgtcctgcggcagtccactgtctggtacttctggtgggattgacgggattcctgcaccctttgaaacggagaattgacctatgaatagtgaagtattggcaataaaactcctggacctggccgagggacgggaaactcccgaaagctggcggagctggtgggacgagcatgagccggagctggaaaacctgctgagccgaggcgaatttttgaaactgaaaccttgccggcatgacttccgatgggtcccggtgctgaccagccaaaagggagccatcgccattctggaaaagagcggcacagcatttgaggtcagcaatctctaccaggagcggtatctggcggagctggacgctttctgcaaggagcaggagcgagtacagcggaaaaagcaaaaggaattcaaggccaacaatcctgagctgttttgccgttaccccaagttctccaaggcgctggcaaaggcgctggagccatctgacgagatccagcctgccgccacggaggagcagatcgcaagtcaagaaagcgtgctggacttcacgctcccggcccaggtgcgagagttcttcctgctgaccgctggcatccaggtatccacaggcgtgatcctttcactttccgggatgtttgatctaaccatccatggagagcggtattgtgtgctgggcgagttctggaaagaagcggatggcgaccagctcctgctccgccccggagaggaaaccatctggtactacgcccatgagcaggacaaggtcaagcgactctgcaatgatatgacagaactgctggagaagaaattggcgaggtatctcaatgagcaatgaaaatatcgcctataaaaagaaaatagcgcggcggttgatggctgaactgtaaatcagcgaaggaagaatgaaaatgacattagaagaaatgttccgtgatctctatgataaatatggtaacgattttaactggtatatgatccccttcgcacaggcggacggggcatttgttgcagaactaaacaaagaaataggacaagaccacttcttatacggcaaaaaaatcttggcggttgcgaagtgtgaatccaatgatgatgtgttatatgttctcagaaacggaacaggaagagacatctactatctgttccatttaacttactcagcacataatgcggacggatttccccagtatgaggagtttgcagatctatttgcagtaaaagaatttatagaacgatcatatatcgaggattatatgtaattttcaaatttcaatttattgggaatccaccttacccgcagtggcatcagaaaggaggcggtacctgtgtcaacttggagcggaatccgaaacaagctggagaatgactacctgtgcccgacgctccgtgggcacatccagtattttgccgccagctactgggaaagccatgaccaaacaggccgggcagccattcgactggacggcgtggaggtgctgcgaagtaactactatgcctatgaacagaactactggaacagatatcaggccctgcggcgggagggcatcggccaggacgatcgaacggccccttttcggctggcccatgaagggacactgaacgatggctgttttgacaacggttttttctatgaggcatttcatgaatttgacaaccagagcattgagaaaagccttgtcagcaagaatccccttgtccgcatcctcgcccttctggaccgcaggctgggaaagcgccgcctgctggctttggaggaatccatggagcaggaactggactgggtacgggctttctatgtgatccggatgcaggccgaagggctgatggagaaagaataacattcaggaggaactgccatgtcacagatcgcatccttttatctgctcaaagacggtcagcggcaggagctgtccaacggtgactgctccggcgcggtctacatggccatctgggactggtgtgagagcgagctggatctggatgtccgatttcccgctccccagacggagaacactctggactgcgctctgctggagggagagctggcgtctgaactgctggcaactctgcgggagcagagcctcccggagctggccgccgaaattgccgcagactgggagctgcccaccgaggcggtgcaaagcggacttgaaacgctgcgctcccatctggagctggtgcagagcgacgctgccctgctgtatgagatgacttgacgggactatgcccatgccaaggatgcaggttaagaaacggagagaaatactatggtgagagatggacttgtgttcaaagatgagaatggtcaggtcatcttcaaccagtatagcttctgcgaactggtgaagcacctgctggtggagctggtggggatctcctatgaggaagcctctcagacagtggaacgcgcaccgctggcagagccagtggccgatgccgtgggagtggcgatattcagccatgaccggccttattactgggccatgtttttctactatgggaacggttattggtgggaaaagggtattccagcgcagccagaggatatggatgcctatgaagctttggaaaagaaaattatggagaaatgccacttaaaggagccctttgagtggaaatagtggaggtgtgcaatgctggcggaggattttgacaccatcttacataatcttggtatggcgtggctggaacatccgctgttccatcatgccccggtcgccatccggtttgaaatcggcggagatgaaccagtctatctggaatgcacctattcggacgagaacaccgagaaactaactccaaaccccgcctatgttcaaggcgcactggagcgggcgattatgatctaccggaaccttccagcgccgccgggtattctgcggattgacgggtatcccgaagaaaaacctgtcgagtccctgctgacggccatccagcagagggccgcacttcctgccccgcatgagcaggtcacagcgaccatgatggacgaggacggggatacatatgcacaagtacagttttactgggatctcagcaaaatcagctttcaaccggagcggcttctccaggagatcattctgggggacatcggcggctggaacggctttgtgtccagcgtctatctgaccgggccggggccattcctctaccatctgtacgatgaccgtgggttggatatactgggcggctcacgggagctgctactgccgctctatcatcaattcaatgactggatcttggaatacaatctggagaagattgaccgactgttcgctccggcaaaagaatgaccgtacagacaaaaaaggaggcatcataatgggacttgatatctacgccggaacattgacccggtactattctcacaactggaaaaccgttgttcagcagtgggcggaggaaaacggatacgccttcaaccgcatcaccccggacggggaacccgctgacaacgaggaggaactgtccccggccgaggtccaggcggcggtggagaactggcgggatcagattctgaacgccatttctcagccgggccagcccccctacgctccctggccggagaataacgagagcccctactacaccgacaagccggattgggatgccttcggcgccatgctgctggcggccgcctgccatacatacgaggaaccggtgcctcccactgtggagaaggactggaacttcggggagcatcccctggtcgcccgccttgcggcggaccaggagcgggtatggtccctgttccgtggggctacctggtggctgcctctgccggacgccttcttcttccaagcacctctgcctaccgacgacaccgccgccatcggcacggtgggcggactgcggaaggagctggagaagctgaaccagctggcgtggcaggccgatgaggataccatccttgattgggcagacacggagggatacccggcagacggaaccgtaggcccggatggacagtacagcaaggcggacatctcggagcatacccagtatgatacccagtcccttgccaagttcgccttctccatgttctggcgggccatgcggtttgccgaggaacagcaggtgcccattttactggattattaaggaggagctttatgggatacgatgtcagttttcacccgatttcgccggaagaaatgcgggaatggtattttaccccgctttcctgggtacagcaggggcaggaggaaaaggtgctggcccttgccgcacagcacggaatggaggacttctatgcggaaaaatatctggatactctgcgggtcggtgcggggacagagccggatgaattgtttgataagagccacggcttttatattgcggtgatccagggctttttccgggattactattacaccagaggcagtgccttttctttcctggtggaagaaaagccggaatatgcccggtatttcaccccatgggcacaggtgacaccaacagcttttccaaatccggcagaaaatcagatcattgaaaactactgttccggcgtgtacctgtctccaaagcaggttacacagcttctccgggatctggagcaggacccaaaggtgctggaggatttggagggactttggagtaacggacagcttgccgtgctgaaaaaggctctcactgccgcggcggaactgggtgtcggtctgctggaagctaccgaggtggtggagcctaaccctatccgccctaatgagagtacaagctactcaaacctgtaccactgtgatcgggatggggtgtatctctacatagatactgtcagtgctcaattagcggatgtgactggaaaaagtgaggaacaagcataagcggttgggaggattttatggaacaaaaacgcccggcagatatatttcaggagcttctggactacctgtggaacgggctggggctggaggaaaagggctggaagcgtctgaaaaagggcaacttcaaaaagagaacgaaaaacggcctgacctacctgatctggtttgagcggagccgctacaactacatagactacgaaatcggccatggaaatgtggaggtgggattcagctgcttcattaagcagggggatgactttctctactctttcaaaatagaaccgataacaggcggttcgttcttccagatgctgacagaggacctgcggttggataccgagttgctggacacttttctgcccttaatcaaagcccgctaccttgactttatcgaccgctttgaggaggacccggcagaggcgttacagccggtctgcgccccctttacccagccggaggattacagttggcgtattcatgtggaggagcaggcggtggaaagatacggaacaccagagcagctggcggagtaccgccgtcaggcggaattgcgtggaacgccggaaagcaaggtgcgccggtggatggggatgcagatcttctatttctcccatgctggcgatgtggaccatgcttgggccgccagccgctccgtggaggaattggacgtggtcgtgggaaaccatgtccaggccaagaagcagtatgacacttggacggaggaggacgaagcgggctatcagatctaccttcaggagcaggacatggaaaagcggacttatcgggcttggtatctaatcgccaatccccgaaagctgcccaaggaaatcgttaatcaggaactggcgtttcggttcaagctgttccctgacaaaatggataaaaagaaatgaatggtattattattctggtttgtggtctgctgcttctcttggccataaaactgctgatagagcgcaacttcatcggattggttctatttagtgtggctctttttttgatttttggagtaaccccgcatacaaagtagcgatcgcccgttgttacatggtctgctgctataaggaggacaaaaatgagtaatcaagtgttccggcaaaacctggatgacaaaaaagggccccagcccggcggcccctatctcattcaaatgctgttcaaagagccggtagacatgccggacaaggatgagatgaccgctgtgatgaaaaagcacatcggcgcggtagagtgtttctgccgtgataaaaagatggcaggctttgctgccctggatcatatcgcggaatttcaggacggcaaatgcccggtgcagctgatggtgatgggatgtgacaaattcaagggcaagggcttcgatgcgttccttatgagccagatgtgggactgccgggaggaccgagagcgaatctttcgggagtgccggtatcaggtcgtggccactgatatgctggcggcggcgcttccggccctggagagggccaacctggacgccgacttcgtggaggccctggcagagctgtaccccacctgtgaggcgttctatttccagaactgcggcaagctcttgctggcggaatatgtgcgttcccaccagatcgagggctcggaccgcttcatccgatttggtgtcaatgtccgcttcttcaacattgagggcaccgaggatatgctcatcgacacagtgggcatgaacaccctgttcctgccggacctccagtaccacttccatagcatggatcccaactgggtagtgaaccacgcctataatgcggcgtcgtacatactggagcatgataaccccattggggatggggaaacgattgacggcatagagaatggccggatgagccgggagattcagtggaagtgccagtacgaggatgccctgatccagccgcccaggggagtggtggacatccatatgggcgactatgcttccggaaaacgctgaacggatagaatgactgcatgtacagccggagaaaatgtttgctccccttaagcggattttacattcagcgggttatcttggctattgtatgatagaaaataacaggagagagtacacagctgatgtgtggatgaacgcatcggggggagccgatttatgagaaagaacatttccccacagcatattgtggggggcgtcgggactgcgcagccgcgtgacttcctgcgctgcggataagggaggagtgatcgatttgcatccagaagaatgcctgatctgcaaggcaccgctggaatatctggtccgggacgaggacatggagtgcgccatctgccataaaaaggaatccagcaagacccggtgcgtcaacggccattatgtttgcaatgactgccatacccagggcatggacaccatcttcggcctgtgcttggcggagacttccgccgaccccgccgctatcctccgccggatgatggacctgtccttctgccatatgcacgggccagagcaccatgtgatggtgggagcggcgctgctcaccgcctataaaaatgccgggggcaagttggacctggagagcgctctccgggagatgtacagccggggcaaagctgtccccggcggggcctgcggcttctggggcgcctgcggggcggggatcagcgcggggcagttcctggccatcgccacggcatccacgcccctggcccgggagccctggggattgagcaatcagatgaccgcccgggccctggacagcatcggcaaggtgggtggcccccggtgctgcaaacgggattcctggctggccgtccaggctgccgtggactttgtccgggagcacctgggggtggagatgcagcacagcgtgcccgtctgctcttacagtgcccgaaacagccagtgcatcggaaaacgctgccccttctcggcggcaaagcaaagggctctcgaggcgaaaacagccccgagtttctgaaaggccagaagctccgggacatacttgtttttccggagaatctgctccataggggtcccttgggcagctcgtccaccagcttgcccagataccggatatcccgtatcagcaggtcccatacccggacaccgcagaccttgtcggtgatgagggcacggtcaggattcatggcgggggcacgttgaaaaaagtgagcgcaggtgacgctggaccgctccagccgggcgaggtccgccagcgtgtacccggtgagacaggcagttacctggtccacctccgcccgggtgcggccctttttcacttatgatggatacaagatcagcctgggcaaggagggcaggaaatgaacctgaaggaggccctcgtttccggaacaggctgcaggtcctgacggaagagcggccgcccggggcgccgctgcttgaggcgaggggtgataatccctcctgaaatgcacagactatttctgctctttggatgtgaaggggcgggtggattggagaccttagcagattatctggcgcaggcgaaagcgccgcagcgccgcgtccgtatggcggaggtgctggagtgggcggaacggacgttttccggcctggagctcagggttgcatggaaccagcctgtgttcacagatcatgggacgttcatcgtcgggatcagcgtctccgccgggcatctggccgtttctccggggcgggcttggagggctttttccgggaaatcgcccggggcggctatgccggggcaaaatgctgttccgcatcccgtgggagagggacgtggattacacgctgctgcgccggatgatcgccttcaaccgcaccgaaaaggcccactgcaagactttttggcgggggaaggcatgacgacctggataccttggcgggccagggcgctacttgccggaatctacctgcccggtccgacaccaggggcgcgctttgcccggccgctcccgccggatctggcccgctgaggcggaagtccgcggaacaaactgcggcccccggcccgtgccggatggggaaaacgccttgtataagcagggggcaagcgcggcactggacggaaaacctgcggaaccatgcgggcggcagtgcgccgcccggtcaaaggaggacgacccatgcccaaccggctgcaatttgaacaatccccgtatctgctccagcaccgggaaaatcccgtggactggcggccctgggggagcgaggcattccagaccgcacgggaggaggacaagccggtgttcctcagcatcggctactccacctgccactggtgccacgtcatggcccatgagtcctttgaggacgagacggtggcggaggcgatcaaccgggattttatcccgatcaaagtcgaccgggaggagcgcccggatgtggacgcggtctatatggccgcctgcgtggctatgacaggctccggcggatggccgctgacggtgctgctcacgccggagcaggagcccttctgggcggggacgtacctccccagacaggcgctgctgtccctgctgcagcaggcggcgcgcctgtggcgggaagataggggcagtctgctgaccgccggagaggcgctgaccgaccggctcagggaagcggagggcgcaggcaccggctttccagaccgggcactggcaggcatggcggcgggcctttacgcccggagttttgacacccgctggggcggcttcgggcacgcgccaaaattccccacgcctcataatctgatcttcctgctccggtacgcccggcgcacaggggagtcccaggccggggccatggcggagcagacgctggagagcatgtaccgaggcggcctgttcgaccatgtgggcggcggctttgcccggtactctaccgatgaaatgtggctggtgccccactttgaaaagatgctctatgacaacgccctgctggcactggcctatacggaggcctatcagcagacccggcgcccgctctatggggagatcgtccgccgcacgctggattacgtcctgcgggagctgcgtgattttcagggcggattctactgcggacaggacgcggacagcgagggcgaggaggggaaatactatgtattcaccgaaggcgagctgagagacctgctgggaccggaggacgcagaggcgttctgcggctggtacggcgtcaccgagacggggaactttgcggggaaaaatatcctcaacctaatcggccgggaacaggtccagcgggagccggtgcgcatcaggcccctgcgggagagggtgtatgcctaccgcttggaacggacctgcctccacagggacgacaaggtgcttgccgcatggaatggactgatgattgcggccctggcccgggcgggactggccctggatgagccccgctatcgggacgccgccgtgggagccgcggcatttttgaagcggagcctcacagaggaaaacggtcgtctgctggccagatggcgggcggggcaggcggcccaccccggaaagctggatgattacgccttctgcgcctggggcttgctggaactctacggcgtgaccttccggaccgcctatctggcggaggccggggacctgacggcacggctgctggagcagttttttgacgggaaaaacggcgggttttacccctacgcggcggatggggaacagctcatcacccggacaaaggagacctatgacggggccatgccgtcgggcaatgcggcagcggcgctggttctctcccgcctggcccgcctcaccggggaggcccgctggcggaccgccgccgatctgcagctgggctatctggctggggccacccggacctatcccgccggacacggttttgccatgctggtgtttctggaggagctgtggccctcggcggagctggtctgcgcggcccggaccatgccggaggagttggcggcttttctgcgggaggcctccaggcccgaactgacggtgctggtgaaaacgccggagacggcaaagccgctggaggagcttgcccccttcacggaggcctatccgattccggagacaggcgtccggtactatctatgccggaacggcgcctgtgcccggccggtggacagtatttcagaagtcagacggctgctggaacagaactgaggatcctgcccaaagggctccgccggaccgcgcggtttgccgcatgacaggttccttttccgtggcctgccgctctgcaaaacaaggatacaaaaactgcccggaggaatctgttccatcagatactccgggcagctgtgttcttttcaggccgcctgcatcccggatgcctgcattttgaacgggatgggcatatatgcgggaggacttcagccgttctctgccgcatttcttcgatcaggcgccgcctgccagatattcttccgccatgtggaccgccatggccccatcggccacggccgtcactacctggcgcagcggcttcgtccgtacatcgcccacggcatagacgccggggagattggtccttgtggtttcgtccgccgtcacatagccgccggcatccagctccagctggcctttcaccagctccgtggccggctttctgccgacgctgatgaagagcccgtcgcagggaaggacggattccgccccggtctgcacatcccgcagccggatgccggtcagcttctcttcgtgcagcagctccgtaacagtgctgttccagcggaattccacgttctctgcctgtatcagtggctcgtggtagatcttcgtggcccgcagctggtccctgcggtgcaccaggaccaccctttcggcgatacggctcaaaagcagggcgtcgccggcggcggaattcccgccgcccaccacggcgaccgttttgcccttgtagcgcatcccgtcgcaggcggcacagtaggccacaccccggcccaccagggcctcctcgcctgcaaggcccagctccctgggattggctccggtggcaaggattaccgtcctggcataaaaggtcccctcgctggtcttcagcgccttgggggcagcggtcagttccatgcgctccacctgtgcgtacgctgtctgcgcaccgaaccgctctgcctgccgctgcatcttctccgccagggtgaagccgtcgatcccgtcctcatagccgggatagttgtcgatctcctccgtcagggccatctgcccgcctgccgagagtttctccagcaccagtgtatccagcccggccctggctgcatagagcgccgccgtatagccgcccggcccgccgcccaccacgatcatgtcgtagacacgagtttcgcccatggattccgcctccttacttcgccatagcctcctggatgaactggtcgatggccgctttggacccggggttgacgatagaatccacggctttcccgtcccgatacaggaccagcgtaggaatgacctcgatctgcgccgcctcggccagcgcggcctcctcgtcgatgtttaccttcgccacggtgagacggtcgccgtattcgtccgcgatcttctcatacgcgggcccgatccggcggcagtagccgcaccagggagcccagaaatccaccaggatgggcttgccgccctctgccatctgctggaattgttccttgtttagattgatagccgccatgctggtcagctcctttccttggtttggtcctagtataaccgaaagtccgcgatttttctgtgacgacatcacccaaaacacgggattttccgaaaagcgggccggttgacagcaaagctcctgtcaactatactgagaacacgatgaggagggacacggaatgacctttcaggactattttcccatctggaacaagctccaaacagaccagcaggaccggatccgcagcaatctgaatttccgaaccgtgaagaaggggacgatcctgcacaacggggacatggactgcaccggactcctcctggtgaaggcggggcagctccgggcctatatcctctctgatgaggggcgggagatcaccatttaccgcctgttcgaccgggatctgtgcctgttctctgcgtcctgcatcatgcgctccatccagtttgaggtcaccatccaggcggagaaggacacggacctctgggtcattcccgcggaggtctaccaggacatcatggagacgtcggcgcctgtggccaactacaccaacgagctgatggccagccggttctccgaggtcatgtggctgatggagcaggtcatgtggaagagcctggacaagcgggtggcggcctttctgctggaggaggcttccatcgaggggagcagcgtgctgaagatcacccatgaggccattgccaatcacctgggcacccaccgggaggtgattaccaggatgctgcgctattttcagagcgagggcatggtgcggctctcccggggcatggtccggctccttgatgaggacaggctgcggcagttgcaggattgagccgcgtgatacggcacggtcatgtgcggctgttccttgctttgcagatcagctgtgtcatggtgcccatggggcagtagacacaccagctgcggggcttgaacagcaccatggtgattagccccaagactgtggatgtgagcatgacgccgtagaagccgaaggcgaactgcgccacgccgggatggaaaagggtgccgtggtaggcccagttccagggcagcttgaaggtccacagcagggtgaccgcctgccccagatcccgcacaccggcgaacaccaaataggtgttccacagcatcagaaagaacatggcgaagaaaaaggcgagaaatccgtatcggaacgccttgcttttcatccatttggggatgtctttcctgcgggacagcccgaagcgcccgcccagcagcccaaacagctggccccggccgcagtagcggttgcagtagctcttggtcccgctgaccacggagatgatgagggggatgaagaagcacagcaggcccagccaggcaaacagaatgttgaaaaatcccagcaggaggtacaggagcgaagcgatccacagatagtcgtaccagtgcttcttcatgcctctacctcccggattttgatgacgctggccggacactccctggcgcacttgccgcagcccacgcatttgtcctgccggacctgggccataacgccccgcacgatctcaatggcctgcaggggacagaccttcacacagcagccgcaggccacacaggctgacgggtccaccacggctctgcgccgctttttcacggaattcatagcatgcctccctaaattgagtgggttcatcataccgcatatctatgaattgcaccgtgatgaaatcacaaatgccgcaggcagaatagcaccgcacgcaccggcctaaacgggatgcggggaaggtgagggcacgtccggggcttgtgccttggagggacagctgtgaggaaggtcatctgtttcgccgattccagcacctggggctacgatccccggtcccggctgggcgggcgctgtgccccgggcagctgatgggtggacatcctggcggccgaaaccggatgggtgttgggcaactggggcgccaacggccgggagctccccgacgcggcacctgacattccggcggacaccgacctgctgatcgtgatgctgggcaccaatgaccttttgcagggccgcaggcccaaggccacggcggagcggatggagcgattcctgaccggcctggagctggcacgggggaagatccctctgttcgcgttgccgtcccggtccccgggggaatgggtgccgggccaaatgctcattgccgcttcccggaccttcgccgggtgctgccggacccttgccgggcggtggaacgtctccccggcctatgacggtgtgccacttcgcggagcaggggcacagggcccttgccgccgggatttcgccccatgaaacgcatcgttccccggcaccgtgcgcctgctggagggaaccatcaatgggagaaccggtgccgcccagagcgggccgctgcggctccggcgggatatggggatatcagcaaatccggcagggggcttatggagcgctgccccgagcattgacggcgggagcctttcgcgcagacgcgcacggaaacgagacaaggaggagcaccatgcggattctgatgctgggcaacagcctcacctctgcccaagatatgccggacattctggcggaactgaccggggcggaagtggtctgccatacccggggcggggcccggctgtccgagcatctgaacccgaacacccggctgggcgcccgaacgcaggcggcgcttgcaaaggagcagtgggactatgtggtgctgcaggaaatgagccacggccccatcaccgctcccgggagctttttcgccagcgtggagcggctctgccggcagatccgggagaacggggccatcccggtgctctatgccacctgggcctatcagaagggtggggcccggctgtcggccaagggatgggactatggtgggatggcccggaacctgtccgcggcgtaccgcagggcggcggaggaaaaccgcgccctgcttgccgacgtggggcggcggttttaccagctgcccggcacgcaggacctctacgccgccgatggcgtccaccccagcgggcagggggcccgcattgcggcggagaccatagcggcggcgattcaacgacacaaggaggacccatcatgattcgggacatctgcaaagaccaggcatttctggcccaaaaggccgagcccgcctctccggaggacctgccggtggcggcggatctgctggagacactggaagtccacagggacggctgcgtaggtatggcggccaacatgatcggcgtgaacaagcgcatcatcgccttcgacaaccagggcggctatatggtcatgttcaatccggagatcgtgaaaagggccggcccctatgaggcggaggaggggtgcctgtccctctccggcacccgcagagcccggcggtgggagtccatcaaggtccgctggcagaacgaaaaattccaggagcggatcaagaccttcaccggctggacggcccagattatccagcacgagatcgaccactgcgagggcattatcatctgagggggaggggaaacctatgaaacttgccattctctccgacacccacggcctgctgcggccggaggtcacggagcatctaaagaccgccgacgccatcctccatggcggagatatcaacaggcagagcatcgtggatgagctgcggcagtatgcgccgctgtacatcgtccggggcaacaacgacaaggactgggcggaggccatcccgcacgatctcaccgttaccctgggcggcgtgacctttttcatggtccacaacagaaaggaggtcccggcggacctggccggtgtggacgcggtggtgttcggccactcccacaagtacgtgcaggaggagaaaggcggcgtcctctggctcaacccgggctcctgcggccctcggcggttccatcaggagatcaccatgatgacggcggaggcggaggatgggaagatccgggtggagaaggtcatcatcccccacgggacggcgtgagaacggcgggaagactgcttctcaccggcggttccgccgtctgcgggggcggggcggcgcaccccgggcgggggaggggacagggcattgacaaccgcctggcacaggcagttctgccctgagatgggggccggctttggcggcgcaccggggatgcggcggctcaaacagactccgccgggccggagttccggagcgtgccgctgcggcggcccgcttgctgaaagccggggaaccggcagtgtattcgaattcttgcagacctcacagctgcacacaagccggcgcggcctgaaatcacttgatttcaggccgcgcttctctgtccatagcggggggccttccatacgccgccgtgcatactgtgcggccccggggcttcagcccacgatgcgcaggagctcatccaagtcacggacggcgccgcacatcacctctccgccgctgaccgcggcgaagtgtgcgcgggcgcactggagtttcgccgcctccacgccctggggctgtggggccctgccgctggtctctgccacgaaatagacgggatcccctgcgcggtcccggagggcgatggcccagtcgggcgtgtaccgccccaccggggtgggaatgaagaaggacttgggaagtcggacatataatctgaccgcctcgctggcctccagcgcctcggcaaaggcccgttccctgtcggtgtcacagatcacatagtctgagatcgaatgggcggcgggcacggcggtgcaccccagcctgccccggcggacggcattggtgaagagggcggcgtcatacgacgcgtccagccggtggtatgtgatgtgccggacgacggcggccgccttctcccggttgatgagcctggaggcctggaggaggaaatcctccggattcaggcggaacatggcaaatgtctcaggggctatgccctggagaatggctgccgcagtggtacgggtcaggccggtttcctccaccagcctgcccactaggtcataccgtacaccgcccggcgccgggggaccggcggcctgcacacggctttccctgcggcggaaggcccggccctgaagcagctgttcccgggactgcagctgcgtcgcctgctcgccatacaccgtccggacagagacgggggtcacctgtagatgcgcgtccagagcctggatgacgttcccgatcagctcccgggtgtcaaaggagacggtgtagaaggacttggggccgacccgcgcccaaagggagcggaacgcctcggtctgcagcttctccgggtccgcccgggcggtgacgttgccgccgtgggcgttctccgcggggatggcccggggggtatagacgccggagaggacttgcgccacggcggcgctgaggtcctgaaggcttccgcccagccggacggcaccccggtcccggtccgcaaagaagctgccggtgaggacgcggtccttcacatagccctgtttccggagagcggcacagatctcatctgccagctcccgcgtcacccggacccgtgccccggtggtgccagtgaggagcctgccggcaaacaggcccggctccaccatccgggggcggccggcaagggacgccgccagcccctgctgcagggcctccgcgaatctgccgaactccatatcggtgatgagcgtcagcttgttcagctcctgcaccgccccgcccaggacgctttcgtccatgcgttcgccctcctgattgacacacaggcgcagaccgcggccgatctcctggcggctgcggatctccgactccgtctggggcttcagcatacagatctggaacacattggggttgtcccacccctcccggagggcggagtgagagaagaggaaccgcacaggttcatccaggctgagcagccgctccttgtcccgcatgatcaggtcataggcgtccgcgtcgaaggaggttcggctcttgcggtcgatctttccctccacaaagcgggcctggcggcccttccgccggtctacggagaagtagccctggtgggtctcgcgggcatcgatgccgtccagataggcccggtacgccgggtcgtcgatctctcgccggaacgcctccgccacggcgacgtactcctcctcaaacattttggcgtactcgccgctgcggccgctgccgctgtccccgtcgtacaggcggtatttggacacctcgtcgatgaagaagagggacagcactttcactcccctggaatacagctcccgttcccggcggaggtgggtgcggatggtctcccgaatctgcacccggcgctggagagctgtccgctcctcgccgccgctgaactgaccggcatatagcttcaggccgttgagaaaggtcaccgagctgtcccgaccgtcgatctctgccaccacatagcggtcggcgtattcggccaggccgttggacgccgcgaacagatccgccttccggcgcagctgtttcaccaccgtccgaatgccggacgcccctttgacctcaaaaccgatccgggcggcgggggccctgtcccggctcaggtccacgccctccagatagacaaagccgccagcggcgggggaggatgtgaaggtcacccccagggcggcgatccgtttcaccagatgccggttataggcgtccagggcgtccagacggtacaccatgttgtacgcctcccggtgggtggcggagtagcgcagggtgaacagggcgttgaacttgcgcaggctctcccgagtctggcggccctccacgctctggggctcgtcaatgatgagaataggccgggtggccgcgatgacgtcgatggggcggcggccccggaagctgtccggccgctggtcgatgatccgctggttcctgcccgagttgaacgcctgcatgttgataatcatgacctgaatggcgctgtcggaggcgaagcggtccacctgggcgaggcggtcggagttgtagatgaaaaaccgcagccgcctgccgtactccccggcgaagtgctcctgggtcgtctgcagggaacggtagacgccctcccggacggccaccgacggaaccacgatgatgaaccggctccagccgtagcgggcgtttagctcgtagatggttttcacataggtataggtcttgccggtgccggtctccatctccacggacaggttgatccccggcccggccagggccttggacagaggcaatccgacgcgccgctggaccgcgtgcagatttttcaggatccgggcgtcggtcagctccggagccaggggttggttgcacaggccggtgccggtccctgccagggacagcggcctgtcggccgcggcgcccaggccctgccggtgtgcctgggcgcacagtgactggccgcggaacacatcgcagaccgctgcggccgcctccgcctgaaagggctggtgcttgaattggagcttcatgaggtcacctccttatgtccggtgcgctggggacacatccgggcaagacggggaaagtttctgcggaatggaaccaggcggacggtctgcactcagagtacctggacgcgggtgccgggggacaggcttttgaagatctccgtcacgttgatcttggcggcgtccgaggcgaaggcgctgtcccggaagacagcccactgggggcgggaagcagctatgtcccggatgaccgtgtccggaacgccagcgtcgaaacaggccgccaggacgccgccgtccacccggtggacggtgcagccgccgaccacccggctggtgtggggcaggtggatgcccaggcccaggtccagcaggcaggcatagagcagatccaggtcggtgcggtcctcccggatattggacaccgtctgcccgatcagcggctgggatatctcctccgggggatagaggacctccttccggcagccctcgtccacccggaagacccggaagccgatgtccggacaggcaccggggaattcggtccggatctgatccccggcacggcggatgcgggctttgccgatctcacagatggtctggaagcccgcctgggcggcctcgctcttctcaccgcagggctcgggcagctgcaccataatgaagctgcggtggccaccgtcctccgtgttgaggcgcatcaccgcgtgggcggtggtggcggagccggagaagaggtccaggcatacgaaatccttccccggaacagagccgatcagggtcctcaacaggtccacggactttgggtagtcaaacaatttccggccgccgaacagcttccgcagctccgcgtctccgttggggatgtcgggaatgacgtccttgagcagcgtcctgccgaagtccctgatcttggtgtggatctcatacctaccggacgctgtggggagcacgatcagattatatggctcgtccgcaatcttctgccgggaccaccgccaggcatggtacttgtgcacgccatccccatttgcatggggcggcagctcgacccacccgggccgcctctccccgatggcgcctgtggagatctcctgggtctggggctgatagaagatggagaacacgaggttcggccgggtctcttcgttgaacttgcgattatgattgtagaggggatcgccgaccgcaaaggggcccagccggtccgtccgaacgtccctgcgaaagcccttgtacgcatcgggcatcttctccctggcgaagcggatgtcaatggacaggctgccgcacgcgtcgatgtccctggcgtaggccaggacggactcccaggttttggccgcgcctctgccggatatctggcggcccgtgatattggagacccacgcgaactggttcaggtagttgctttcgccgaacacctcgtcgcagatcttcttcaggttcgctgactcatggtcgtcgatggagatcaggatgacgccgtccggggagagcaggctgcgggccagcagcagtctggaaaagagcatggagcaccagtcggagtgatacctgccgtccgaaaacgtgtttttccgctgaaagttgatcttcccctccgcgtcccggtatccgctggcaccgtgatatgcgccgcggtccatcacaaaggaatccggatagatgaaatcgctgccggtgttgtagggcgggtccaggtagatcaccttcaccgcgcccagataactctcctggaggattttcagcacttccagattgtctccctcgatgtagaggttccgggtggtgtcccaatcccggctgtccgccttcacggggcggagggttctggaggtggggcgggcggcctcggccatggcggcccgtttgccgacccaggtgaattcgtagcgatcctccccctccgccacgtcgggggccagcagctgcttgaggacctcgaagttgacggcctttttcaccttcccgtccgcgcctcgcgtctccgtgacggcggcgggaaacagcgcggcgattttttccacattccccgccgtcaggccgggggcttccaagtccagatagtccatgtctgcttcctctcgtttcatgcagatgcgggcgcttccaccggatgcagatgccggaggcgccccggcgcgctccggtatccacggctgcaccccgtccggcgccgcgatacgtccagtttaccgcacaaccggcaaagagacaagctgaaaatcgcccggcccggcggggcattgtcgcatttccctcccggctgtatgatatctctcataagaccggcggagaggagcgtgcacaatggccaaggaaaatggcgcatatacttttttataagttttacctcagtgggcgcccctgtgttttctgcaagggtcccatttgtctcccaaacgagacccttgcagggagggaaccttccttgctcaggccagggcttggattgcatcgcagagcgcttcatcagagacgctggcgaccagctcctcatggaccgcacggcccacagcagcaaagacccataatcggattccgtcacggttagcccgggaacttcggctttcatcttctcgatataataggcatcctcatcacgcgtgatctcgttgttcttttcccggatctggtccatgcactcccgcagaaccgtctgaaggtcctcgggcagcttggcatagttgtcctcattatatagcacggtagcgcagtttccgacagcctccgcgatttccacgatgtccagccccgggatcacggggaactggggctccatcgtgataggaccccgcccggtctgcaggtccgcatagttgacctgacgccctccacccgggtgcgcatctgcgcctctcgtaccttggcgtgacctgctcccccggcggcgggtattacgaccgctacctggagtactatcaggggcccgccattctggtatgccccgaccgcctgctgcagccccgcgtaccagtgggcctccatgaccgccgggtacccatagtggccacggagacgcagatctggcggacaggtgcggcgctgtgaggtgctgggcatttttcgggatgcacgatacaaccggcccgccctcccggctcctggggagtggtccgcttccgcagcggggtcttccggagggaggccgccgcttcaggacggcggcagccgtcctgattttttcttgcggttttcacaagagacggcgcgctttgccaagagatgtctgtcaaaccgtaccaaatccgctgtgaggacagatttcctcacttgacgtccttcggcggagctgttatactcttcccatcttccaaaatgcgatgaaggggaaaaggcgatcccacgccccgtttcagagagccgccggtcggtgcaaggcggtacggaggggaccgcgtcactggcccttgagcagccgcgctgagaggcgtcgcctttaggtgcggacggccgctgtccgttatcatgcagacgcgattcgcccccctcaggaggagccgatcgtacagagtggccgggtctcccggcaatgagagtggtaccgcgggtacagcattttttgctcccgtctctcaaagactgatggtctttggagagatgggattttttgttgtcctccttccaaagacaagaccttggaaggaggactttgacatgatggacgcgacgaaatatcagattggctactatcccccgccggtggagccggggcacgtgtacgagtggatgcagaaggaccatatcgagactgcccccgcctggtgcagcgtggacctgcgggacggcaaccagagtctggtggtgcctatgagcctggaggagaagctggagttctacgagatgctgctgaagatcggcttcaaggagatcgaggtgggcttcccggcggcgtcggagacggagtatgagttcctccgcaagctgatcgacgaggaccgcatcccccaggacgtgacgatccaggtgctgacccagtgccgggaccacatcatccgccggacctttgaggcggtgaagggcgccccccgggccatcatccacttctacaactccaccagcgaggcccagcggcgggaggtgttccacaagtccagggaggagatcaagcaaatcgccgtggacggtgccaagctcatcaaggaattgagccgggagtacgagggcaatttcctctttgagtacagcccggagagcttcaccggcacagagccggagtacgccgtggaagtctgcaacgcagtgctggacgtgatgcagcccacgccggaccgtcccatgattatcaacctgccggtgacggtggagatgagcatgccccacatctacgccaaccagatcgaatggtgctccaagcatctgaagtaccgggatgccgtggttctctccacccatccccacaacgaccggggctgcggcgtggcggacgcggagctggcggtactggccggtgcccagcgggtggagtgctgcctcttcggcaacggggagcgtacgggcaacgtggacgccatcaccctggccatgaacatgtacagccacggagtggacccgaagctggacttctccgatatgcccgctatctgcgaggtatacgagcgggtgacacggatgcacgtctatgagcgcagcccctacgccggcagcctggtgttcgccgccttctccggcagccaccaggacgccatcgccaagggcatgacctaccggaaggagcaccaccagcaccggtgggactgcccctatatccccatcgacccccacgacatcagccgcacctacgacgcggacgtcatccgcatcaacagccagagcggcaagggaggcatcggcttcctgctgcagcagaactacggctataacccgccgccccacatgcgggagcagctgggctaccgggtcaaggaggtcagcgaccacgaccaccgggaactctccgtccaggaggtgctggaggtgtttgaggacaactacgtcaacaacgcggccccgctgaatgtcactgccgcccactacacacagaaccaggacgggtccatctccgccaacctgactctgcgccgcggcagccggatgatccagtgcggcgccgccggaaacggccgcctggacgcggtggccaatgccatcgagcaggcagcgggcatggacttcacactgatccattacagcgagcacgcactggaccctgacaccgacagccgggcctgcagctacgtagggctgaagtggccagatggcagagagacctggggctgcggcacccacacggacatcatcgtggcaggcgtccgggcgctggtcagtgccatcaataaccggtaaacagcgggggagacccctggacttcatcacagagaacggaggcacaatacccatgggaatgactatgacacagaaaatcctggctgcccactgcggccaggagcacgtcaaggcgggacagctgatcgaggcgaaccttgatattgtcctgggcaacgacatcaccactccggtggccatcaacgagtttgaaaaggcgggcttttgcgatgttttcgacaagacccgggtgaacatcgttctggatcacttcgtccccaacaaggacatcaagagcgcccagcagtccaagcagtgccgggagttcgcctgcagacacggcatcgtcaacttcttcgacgtgggcaagatgggcgtggagcacgccctcctgccggagcagggcatcgtcaccgccggagactgcatcatcggcgccgacagccacacctgcacctacggcgcggtgggggccttctccaccggcgtgggctccacggatatggccgccggcatggccaccggcaaggcgtggttcaaggtgcccgccgccatccgtgtggagctgaccggcagtctgcggcggcctgtgtccggcaaggacgtgatcttgcacctgatcggactcatcggcgtctccggcgccctctacaagagcctggagttcatcggccccggcgtgcagagcctgactatggaggaccggctgtgcatctgcaacatggctatcgaggccggtgccaagaacggcatcttcccggtggacgagacctgcgaggcgtacctgaagggccgcagccggcgggaatggaagaaatacgaggcagatccggacgcagagtacgagcggaccatcaccattgacctggacaccctggtgcccaccgtcagctggccccacctgccggagaacacccacccggccgccgagggcagggacatcaaaatcgatcaggtggtcatcggctcctgcaccaacggccggatcgaggacatggaggccgcttacaacattttgaagggccgccacatcgccgacggcgtccggggcatcatcattcccgccaccatggaggtgtacaggacctgcatcgagcggggctacaccaccgcctttgtcgacgccgggtgcattgtctccacccccacctgcgggccgtgtctcggcggctacatgggcattctggcggaaggggagcggtgcgtctccaccaccaaccgcaactttgtgggccgcatgggccacgtgaacagcgagatttatctggccagccccgccacggcggcggccagcgccctgacgggccacatcaccgatcccagggaggtttgaacaccatggaagcaagaggttctgtattcaaatacggtgacaacatcgacaccgacgtcatcatccccgcccgctacctgaacacccagaatgcccgggagctggcggaccactgcatggaggacattgacaagaccttcatcacccgggtgcaggcgggcgacatcatggtggggggcgagaacttcggctgcggctccagccgggagcacgcgcccctggccatcaagaccgccggcatcgcctgcgtcatcgccgccagctttgcccggattttctaccgcaatgccatcaacatcggtctgcccatcctggagtgcccgtcagccagcactgccatccgggagggggacacggtgtctgtgaactttgacaccggcgtcatcaccgacgagaccacaggcgagaccttccaggcggagcccttcccgcccttcatccagaagatcattcgctccggcggcctgatggccagcatccaggcgcggtaaggaggcggcagtatggagaagaatatcgcggtgatctacggcgactgcgccagcccggagatcgtcacccaggccctgcgggtgctggacgcggtggctgagaaatttggccatacctttacctatactaaagtcctgatgggcggcgaggccatcgacgcctacggggatcccctgccccagtcggaactggacaagtgcctgcaaagcgacagcgtgctgctgggggccatcggcggccccaagtgggagggcctgcccggtgacaagcgggcggaaaagggcctcctgcggctccgggccggcatggggctttactccaacaaccgccctgccaaaatctggccccagttggcggacgcctcgcccctgaagcccgccatcgtggaaaaaggcattgactttattgtggtgcgcgagctgatcggcggcgtctacttcggggagcacaggacctacgaggaaaacggcgagaaggtcgccgtggacaccatgccctattccgagcacgagatcgagcggatcggccgcatcggctttgagaccgcccgcaagcgccagaaaaagctcacctgcgtggacaaggccaatgtgctggacaccagccgcctgtggcgggaggtgatgcaccgcctggcggcggagtacccggacgtggaataccgggagatgttcgtggacaactgcgccatgcagatctgcaaggatcccgcccagttcgacgtgattgtcacggagaacatgttcggcgacatcctgtccgacgaggccagcgagatcaccggcagcatcggcatggtgccctcctccagcctgggggacggcacccgggggctgtacgagcccatccacggctctgccccggacatcgccggacaggatatcatcaaccccatcgcctgcatcctgtccgcggccatgatgctgcggtacagcttcgatatggcggcggaggcagactgcatcgaagctgcggtgaatcaagtgctgaacgacggcatccgcaccgccgacatctggcggcccggatgtgagaaggtgggctgcgctgccatgggcgatgccatcctggcccggctgtaagaaagatggaatatgcggacggcgtcgggcccgaaaaagcccggcgccgcttttttcgtggaggctggaatttactttgcccaccggatatgatatcatcccatcaagagaaccgaccgacggaggctctgacagctgtccgtcccatcttggaaaaaggagtgctgcatatatgaagctgcaatttctgggccatgcctgctttctgctggatgacggcgtccacaaagtcctgacggaccccttcctcaccggggctggccgtcctgaatgggcagagaaggtggacccggacgtgatttttgtcacccacggccatggggaccacgtaggggatgcagccgccatcgccagacgtaccggtgcgccggtctgctgcacagcggatctggcggatgcggtgtttgtccctgcgggggtggcatgcgtcgccggaaatctgggcggcacggtccgcctgtcctttggctgcgccaagtttttccaggccctccacggcggcggtgcggcgggctgtcctgcctgcggcttcctttttgagatggggggcaggaagatctatcacgccggagacacggccctgatgaccgatatgaccctgctggcagacgaggacatcgacgtggcgctgctgcccatcggagatttctacaccatgggcccggcggatgccctccgggcagtgaagctgatccggccccgactgacggtccccatgcactacaacaccttccaggccatcacccaggatccggaggcattcgccgccgcctgcaaagaggcgggatttgccgccaaagtccttcagccgggagaggagatgaccctgtaagcagcctgggacgggagcgggcggagcaccacagcggctgccccggcacgggcgaatgaatcgcttccgtgcgaagccaacagagagttcttggggggacagatctgcccgatcatgcaggcggccagtcaggcggtgctggaagcatcggcattgaaattgctggcggagacttcacagcgactccaaatcttacagggcaatcgaagcgaaatttgatatatcccttgctggtaacccgttacgaacaatccctggtattttccggctgtaaaaacctcctgaagcattagcccttcaggaggtttttacagcttgtgttgacagaagagatgcggacattggagctccgcacagcaggacggtgcgtttgcgcagtacaagcgttttgccgcaggcggaaccttggcggaggcagaattcatttccgccgagcatttgaatcgccgaagggtttcgcgggccaatggcctgcgaaacccaaaaagaaagacacgacgaaagtcgtgtctttctttttggtgacccgtcggggattcgaaccccggacccactgcttaaaaggcagttgctctgcctgctgagctaacggatcacatggtattctatttcggccgtccaatgcgggcgggctggaaagtcttggctgggacggctggactcgaaccagcggatgagggagtcaaagtcccttgccttaccacttggcgacgccccaatggaaaggaaaacaggggaccggggtgaccccgatcccctcttttgtggggtgggagatgggactcgaacccacgacacccggaaccacaatccggtgctctaaccaactgagctacacccaccacatatcgagatcctaaacaggatgcgtgctgaccgaccgccccggaaggagttggtacgccagaagggactcgaacccctggcctactgcttagaaggcagttgctctatccagctgagctactggcgcgaatttgattggagcaggtgacgagaatcgaactcgcatccccagcttggaaggctggtgccctgaccattgtgctacacctgcgtctgccctccgtggaaatcgtcagcttagatatattaccatggacaagcccatctgtcaagcggaaacccgcaatttttttctaagattgtcctgtgccaccagccagcgccagccaggcggtgaaaaggcaccctccatctgcggctccggacagggataaggggccggccagccgctccgggtgccactggacaccccacaccggcagggactggtggatgaccgcctccaccgtgccgtctatggcccattggaccgcccgcagtccctgccccagccggtctgccgcctgatgatgggcgctgttcaccaccaaggtctctccgaaaaggtcctgcaggggagagggggctgtccgtacccggtggagccggtcccgacccgccgcctggctgtggccgggcaggtcctggatcagtgtgcctccgaaaaacacgttcagcacctgcagtccccggcaaattcccagaacaggctttttctccataatgaactgctccagcaggaacagctctcccgcgtcccgctctggctccagcccccggctggcggtgtttgcctggccgtagcgccggggctccatatcgccgccgccgggcaacaacagggcggcacaccgcaccgcatcccgcagatccggagaggccaggggccgtccacctgctatctccagcgcacgctcgtaattgatgtactggcccggcaggccccagagaaacactgttggacgcaaggcgatccctcctgtcaaatgtctcaggcccattctatccgggcagcacgtccagagttccgcccggtggttaaaagcggggcgaagagaaacgaacgaaaagttaaaaggttttccttgaaactttcccgaaaatatgccataataaaaccgcttcccgtctcgcaggacggaactgtacagagtggcatcgaagtggtcacaacgagcttgacttgaaatcgctacgtcggcgggacgtgctaacagccaaaaggctatgtctcccaagggcttccgggcgcgggtgtgagcggcgcttcggaaaaacgctaacaaaatgctcacagttatcctgatttgcgttctcacaactagatatgcagcggtatcgaagtggtcataacggggctgactcgaaatcatgtgatccattcataaaaactgcatatttctacacggagtggtatcgaagtggtcgcaacgagcttgactcgaaatcaagttgtccgcaagggcacgtgggttcgaatcccacccactccgccaggaagtccttgaagcacaatgcttcaaggacttctatttttcccgaagatttctcaattcccatcgtcagcagcaaaatggtgcccatggtgccgaggtttgtggtgcccggccagtgaatgagatattcgggatttccttgctgtggtgctcaaatggtgcccgtcacctcaaaagcgacctataaaaagcaatatcaaaatacgtgagatttccacagttcgagaggtcacaaaaagagattcgcagcactgcggtgctgcggcaagcgcggaggtgcgcgcgatgcatgagcatcgcgcgcacctccgcgcttcatgttttctcactggaacccaggaccgcttcatggtagatgtttaggacatatagcttcctctccattctcacatctacatactgcgccgtgacggcttccaggttgttggagagctggagctgaatgccgatccccttcaggctgtgccccaggatctgtccaaccgtatagaagtctccggtcagctggtgcatattggttgctgctgtgtgccgcagatcgtgaaagcggatatggggcatctctgcgtgacgcagcaactgtccaaaattcgcggagatccgctcccgccgcttgggagagccgttaggctttgcgaatacaaggtcgttgtcaaagtacagattccctgactgctttgcaaaacgcttctgttccttctggagttccagatgccgctcaaagtatggtctgacgagcggtgtaatgggaagcgtccgctcactggatttcacgggagccatctcagagatcactgtggtgttcgcaggcgtgttgaatgggagctgctccacaacgccaaaggtattttcagccagatccacgttcctccaccgcagtccgatgatctcgctgaggcgaagcccatacaatcctcccagcactacgatcagctcccactccgtccccatgacaacagccagcagctgccgcatctggtctaccgtgtaaggatctggcgtcttgctctgctttccgaacttcgtcaaaatatccctggccggattgctgctaatgtagtgataccggcgggcatgttccagtgagacgcccatgatccggtgtgcgtatttgaccgaggactgagagaggcccttttcagcaagctgccggtacatatcgtccagcatggccggggagagctggttcagaaatacatctccgatataggggaagatgtggttcttcatgtgactccgatagctggcctcggtgctggggcggagatttgcagagccatgccggtcgatccactccgtcatgtactcctgcacagtcatttttcgctgaacagcagagggcggcgtgtatgccgggtttgtcagcttcgctttcatctccgcttcatgctgtaaggcgtccttctttgtcaggaagcccttgcgggaataggtcttgctctttccgccggacttgtacttgacattcacatcgtacacagtgccggcctttccagtgagttctcccgcgctgttgcgcttatttctcacggttcgttctgtaacagccatacattattcctccttttagaggtgggcggtggtttgctctccaagcaaaccaccgcccacctactcttgacgcgcctagggccagatggtaaaatcagggtaacgcatcctttcaggccgcagccggtactttggcccgcttgtaatagtccagcagagcctggacggttgtcagccgccggttgccgactggcagatactccaactgcccatcctccatcagctggcggatgcggttgacgccgaggccgctgatttttgctgcctgatccggggataagaagagcgggagatcttcacgctttttcttgctgggcatcgtcttcctccctctttgaaatgatatgtggtccaccttccgtggaactttctccccttagccacgcaggcgttcgaggctgttgttccaaagttccatgggattcgcttttctttagagagattcccacatgtccttgccggttctcttttccgatacggatgcgcttggcgtagacgcctggaattccagacaaaaggtcatggaactggctgagtgagagtgcctccagcccattctgtgcgcaataatccacgaatgccgcaaagaggtccgtattgaatacgcgagcctccggggagaggatacagcgttcctttataaagccggacaggacgtttgatcgattgacaaacgattccagaaatgccttagaatcctccggtagagcaaacacaaaattccgttccatgaggtcctgcaaggcatgaagcgcaagggtcacgatggagtccgcctctttgcaaagcctatccagcaggctcttatcctgtttctccggcgggatgctctgattgaagagtaggaccacgagccggtttgcaaaggcggcggtggtatccgcctcggtcgtccgcggtagcgtgttgcctgcaaacagcagcttgcaccgtgggatgaaatagaagaggtctttccctttgaactcgcccgtgatacggtcgccgccggtgacagacttgaaaatggagatgtcccgtaaggctctcccagcaatctcgccggcgatattgactttcttgcccgccaattctgctcgggaaaaccgttctcctagctgatgaagcggtacattggacacgagcgatggatcaaataaccgactgatgaactcggcgatgacactttttccggaatttggttgtccctgtaggaagaaagcacacttcccaacggtcaggtcggagcaaatgtagccgatcatctccagaagcagctgccgctttttagggtctccatcgagagaagaacggcagaaatcttcgagaacgggacatttgatttgctcaggatcttccaggtaactggccttaacctggtaagtaaagtggaaccggggatcgtgctccagcagctcgccagattccagattgaaaaccccattttccagattcaccagttctttactccggttgaactcatcgcggcagcaccggaggtcttcccgccaagtcaggcgctgggcaatttcgcggagatcgttcgccaaaagactccgggtcgtgatttccgggaagaagtttgcaagccatgccgtcagttggggaatgggctggtagcagcccagctcttcgtcataggcgaacggctccccgtcctcggtaaacaggagaattttggcttttgcgatctgctccaccagatcggagaagaaattcgcccgcttccgagggcttttggctgtgggagccggcggttcaggctcctttttctccggaagcccctggcgctcccgtcgggcggcttcctccgccatctcgcgcatacgtccacagagatcctgcgaatcgtcatcctcgttctcccaatcagggaacagaaatttcgtactcatcttgactcctccagatagtgtgtagtagccggctcgagagctatcatatacaaactcggcaattgccgcgaacgcttcttttttttcatgcggcttattttggttttcagaggacaaatcagaatacagagggggctcaattttgctgtgccccctctgtattctgatctggatttagggatattcaccatatttttcctgttttacggcccgctttttctacgaattagtcgcctgaattaaattaagcaatgctaaaaaaggaagagttctatgaaaaattgggagattatagcatctcttttggaacgagaagaacatgccttaggctccgtcgtggagtatatgatacacggatatcagtcacggaatattccagcacaaaacatccgcgaagaaagcaatagtgaatgtccagcagataatgagttattgatgccttgtaagaatacacaaaccttctgggaaactatagagcgtgaatttgaacatcactttcaagatatcgatgcgcatttcaataagctgtttaagctgcggacccggcgaccaggagcgaagaagcttcagccattagacccatggtggtatcttgaagatttggaagactcttttgaagatgtcaaagaatatttgctgataagaaatcgcacaaaatgcgagtgcctttttaaaaaattaaaaaacgaaatcaaaaagggcatggagcctacaccccctacttgtccgagtgttcttggaagcataccattagaacgaaaattcaggtatgttcatcaaatgctcaatttggaagaatcggctgtttgtagtcttttgcccttcctcttgactgcttatatatgcaattttagtaaaaatttttttattctgagagggagtacctctgtcgagaacgcctttatcaatgaagaatgcggagttcctctttcgcaatataattttattatcgaatcccttaaatcattgagccgaatatttggctttaaggatttctttaccgaaatcaaggaagtggaaccccctaaaaatagtgaaatggtgcgtcctgcggtatttcagccttcatcttttccaaatttagaggatcgccacatacgggatttagtctttgaaacatggtgtgttgtgatttacaaatacttagcaggtaatacagatcctgtttgtaattctcttttggataaaataagcttctctgacagctatattttatatctgtattacaataatcaacacctatacagtcactatttggcggaaagcggaacatattcggactccgagattctatctgatattttcttgcgttatgaggggcatttaaatatttagctacggttgcagagaaaatattcgactgcttccaaagtcaaacgccaagagtgcccaatccgaactgccggcagctcccccgactttaagagccggtacatggtgtttttccccacaccgagaagatccatggcctcggcggcggtcagcaccaccgggagacgttcctgcttataggcgtccagagcttctctgtattcgctatgatccatttcaaattcctccattccggttgattatccccctgtttcccagatagcgccttgtttgcttttcctgtccctttcaaagaaatatcattcttatagagcggcggcgattgctgaatgcctttggcattcagca

SEQ ID NO: 4935 - DNA, 769 bp, Unknown
  gut microbiota DNA sequence
attcggtcccaagggttcggctgttcgccgattaaagtggcacgcgagctgggttcagaacgtcgtgagacagttcggtccctatctgttgcgggcggaagagatttgaagggagctgtccttagtacgagaggaccgggatggacgtacctctggtgcaccagttgtcctgccaagggcatagctgggtagctaagtacggacgagataaacgctgaaagcatctaagcgtgaaactccccctaagatgagatctctcacctcgaaagagggtaagggcccaggaagactacctggtagataggccggaggtggaagtgcagtaatgtatggagctgaccggtactaatagcccgagggcttgacctacgagaaagcaggcgagcctgaaagcagcgtcacattgttcggttttgagggtgcagggaagcatgctcaagggatttgcacctttagctcagttggtagagcaactgactcttaatcagtgggtccccggttcgagtccgtgaaggtgcaccatggcccgttggtcaagtggttaagacagcggcctctcacgccgttaacatcggttcgaatccggtacgggtcaccagacttttcaagggcgaaagttcttgacaagggaagcgaaatacaatataatacagtttgttctccggcaagaccggatgacatagagttggtgctgattagggcgagggtccacccgttcccattccgaacacggcagttaagctcgttcctgctgacaatacttggctgg

SEQ ID NO: 4936 - DNA, 236900 bp, Unknown
  gut microbiota DNA sequence
tccccttatatgtaacaatcataccggcttcctagcgttcagaatgttttctgctgtctgctgtggtgtttggttggaattgtccaaccaaaagccgatccgtggtgttgtctgcattttactaaatacaaattcaatgtatacagaaagatataaggagtgggagggattccgccgtagttggcattgtaggaaaatccaaaagtttagattttcccacaatgcttatcttttggtctttggttcggaatagtgtagtgctggcggtctatctcttgttttcggttgcttgcttccttaccgtacatgagcattggcgccgggattgtcattaccataaccttccagcagattgatcgcaccccaaatgccgaggccagcgcccagcgccacaacgagggtctgaagaacaccaacagcagaattaaagaaagccataaatagtacctccgaaaaatatgttttttagattttggagggtacatttctcccacgaagtttcatcgagtcgttgtcaaattagactgccgccgtcaggcgacaggttcaccggaaaggtctgcctgatacacctcaactgcatcatccggcttgagcttgaggcgatgggacagaaaacgctctatgtcaaaggcgtatttcttgtcataatccgctgtgtagcggtagaggggatgctttgtgagatcatatttgttggacagaaacgggcggacgccgcgaagctgcaagatgcacttgccgccatccagcacggcaagctcatccacgctcatcagctccttgcccaatttctgatagttcagcgaatgggaaacctcgcggccacggctctcgccggtgttatagctgtcgatggtttccttacccagcgccgccgccagctctttcagcgtaccgggttccttaccacccaaaaagatggaacagtccatgttgccgatgatcgtatccgcgctgtctttatacagggctttgagctggctctgtgcctgcaagacaaggcagcaggagatttctctggaacggatcgtcgccaccagcttctcaagcctcggtatctgcccgatattcgcggcctcgtcgatcaggcagcggacatgaaccggcaagcgtccgccgtacacatcatctgccttttcgcaaagcagattgaaaagctgggtatagcacatggaaatgagaaagttaaaggtatcatccgtgtcggacatgatgatgaacagggcggttttccggtcgcccagcgtgtccagttgcagctcgtcataggccgtcagttcccgcagctcctgaatgtcaaagggcgcaagccgtgcgccgcaggaaatcaagatactcttagcggtcttgccggcacttagcttgaatttggcatattggcggacggcgaagtggtctggcttgcgctttttcagctcgtcgaacatcaagtctaccggatttttgaagtcctcatcgtcctcacgcacctccatcgcattgataaactcaatgagcgtggagaaattctgttcctccaccggcgcttcatagtggatgtacccgataagggcggtgtagagcagcgtttccgctttcacccagaaatcgtcaccggctttgccctcgcccttggtgttggcgatcagcgtcgtgaccagcttcaaaatgtccttttccgagtggatgtaggcgaacgggttgtagtgcatggacttcttgaagttcagggaattgagaatcttgatctgatacccgttcttttgcagcgcatggccgcaggaaaccacgatgtcccctttgggatcggtgacgacgaagctggtgggataggtttttgatgtgcattggagcagattgggcttcaaccaaaagcgggtcttgcccgaaccgctgccgccgacgatcaggacatttttgttccgcgccgttttcgggtctttggggcggctattcatcgtcagccgctccgtctgcgtgagaatgatgttgttctcaaatgcgggatcgacgtagggcttgatgtcctcggcggttccccaacgggcgctgccgtactccagatttttgcggaatttcttggcatttttgcccttgatatagaccgccagccgaatagcgatggcggcggcaacgcccacgcacaggtcaatgggatgaaagctggggacaagggagtgaaacgccgtgttcagaccggtcataatgttcagcagcttcgcggaagcgtccgaaccgggagccagccgcaccgcctcgctgaccttggtggccagcagcgcgatgaacacatacggaatattgggaaggatgagctttttgacgttgacttgcttcatcgttccagctccttccgctttgtcctgtccaccacagccgcctgaatgagcgacttgaagtgttgcagcttttccagcaccgaggggcgttccgctttcctgacctgcttggcggtatattccttgaacgcggcggtcatggcgtcggcgtccggcgctttgaagaacaccatgtaccgcttttcgcccttgaccttgaatggagcgaagtcaatgccatacttccgggcgatccgattgaatgagccgatattctgatcggtgacttcaatgctctgcaatcccttatccttggcggcgagctgcttgacggtcatttttccgtggggattggccttgctgtactgatgcttctgatggccgttttttagctgctccagcagcttggcaacggccttgcgaaattcctgttcgcccagctttccgcaggagatcatcagggatacgattctctgttcaacttcttcctgcatgacttatcacgctcctttcctccgatttgcagggagaacgccgggacactaaggcggtaccaccagccggtgcagaagatgctcattcatttctgcgcccctgtcccttgacggtcaggatgccgtccagcgtggtggcggtgatccgcaggcgctcggccacggcgatgtcgtttttcacgctttcattcacggtgccgccgcaaaccaccagcacacgagcgcggcgcagatactcccgcgccatgtcgatgcagtccttgtgctcctgcggaatctcatcgcgtaggaatagcggcaaaaacagcgcggggcagacgggcgaaaagcccgcgtcatagaccgccctgcaatacttggcggcgttttcggtgttctcaaactcattctcgctccacggagcggtgatgtaggcaagggggcgtttcatcggtatcaaatcctttctcccggaatcgggcatgaaaaatgacggcctttaggggccgccgtgaaaatcgtgattgaccagcatggcatagtgattgtcgatggtggaaacggaattgaacagcgccgccatgagataggctttcgtattccaaacgcgggtggtgttctcgcggataccgtccatgaccttttcgatgtgcatggaggtgatcttttcaaagcgctgttggacgaagccggtgggatactccgcatcccgcccgatcttgactgtggggctgcggttcatagcaacctccagcataatctccaccagctcatcaagctgcatccggtcatactgctgacagagaatgtcgtattcgatttgctctctgatctccgcttttttctcaaatccgtccgtcattccgtccgccgcaggcagaaagaatgaatgagtgcttgatagatcagtatttgatttttgagtattagatttcttagtatttaattgcgcgggattatccgtatccggtgcctccgtatccgggttgtccagatacgggttttccgtatctggtaaagtcgtatccggtggagagggctttcggggcttctcgaagatggtgtactccgtgtcggaaatgcgcccgtccttgccgcgaagctgacggcggatgatgtagcccgccagctccagctccttgagcgttttcccgatggcgtccacgccctccttgcagatcgcagccagcccccgcgtggtgtagttccactcgtcggggagggagagcatcatggagagcagccccttggctttcagggaaagattgctgtctttcaggtgatggttgcacatcaccgtgtaatcccgcgtccgttcaacgcgaaatacagccatattgcttcaatcctttccgcagggcagtcaacctgtttggccgtcctcctcggcaaaccgcgtatccagccgctttacgctccagttctgcttgaactgtcccagcgggccggtgccgaactgcgccagcgcacggcgatccagctccagcagcttttcccacagctccgggtgatgctttcgcagcttccgcagctcgtcgatacgctggaacggacagcaccagcaggacgcgcggtggtaaatctcatacagcccgccgaagtcaaagccacggtcgtaacaggcttggagcgcctgcgcctccgtgatgccccattccacgaggggataccgctcatccttgcagcgccacgcttcatcggcggcgataccgacatagtggatcgcgcccagctcgcctttgagccggttgacctccttggtgatgaggtgcgttttgagctgcccggtacaccagcggacgcggattcccggccagccgttgccgtagggcgggatgcccagctttgcacggttttccagactgcggggcttctgcttgggttcgtcgaacatcaggtattcaaagcccttgggatgccgcagcgtagtgatatggatgccgcgctcccggaaaagatgctcgtccagtttggcaaggtgttcatacatttccgggaactccatgccggtgtccgctgacagcaccatattgatgggcatatcccgttcgatcatcaaaagcagcatggcggtactgtccttgccaccggacaggctgacggcgtgaaactgcttgccgtttgcgttctgaatggtttcccgcatggggaagccgctccgttttcactcctttcccacatcacagctcatagatgggctgctcgtgttcgtagtagggatcgcacagggcggcaagctcggccaccaagtcctccaaatccagagaaatctcgctgtctgcccaatcgctgcccttgtagacgcgatactcggtgacgtattcgccttctccagcgttcacgctgaatttggcaacgacggcaaagcccatatcctctaacagccacagctccatcgaccgggcagcaaacaccgcgccgatatagctgtcgcctacgtcctcatagagaagcgtcgctcgctgcttgaacagctccgagctgcgatagtccaagctcagcgcatttttgccgtctgcgcggtaggcatagaccgtttcggccttgttccaaacggcttgcagcagggcgtgatagtcaatgttttccagaaactcgtcgatctccgtttccgtgtagccgacctccgtacccttgcggaacagcgtggtcagcgctttttccagctcagttactctgctcatagtaattcctccaatcactttagtgacgccgctttttccggtcaggaaggatatgcccctcaatgacggcggcgtgtttgcggattttgatttctccgcgtttctcggatgcctgcgccttggcatatcccacgtcggagaggaacaacctcagccgttcgcccttttcacccacaggagatttccatgacaggacatcaaaaataatcatgtggcgggtttcgtccataaagcgctccagcgcaaggatgctgtgaccgccgacaaaatcatcagcattcatattcggcaccttgcgctctgatctgaaaggcggcaagcccatagcgggcgatcagagtggcgttgacgatcaggcgcagcgcctccgggtcgatcacctccggttccgccaagtccgccatcgtgacagcctccgtcttgtcgcagaggtcacgcgcagccatgaacagcgcgtagttgtgcggcgaagtgtttttcagaaccgcatagccgaactcaatccagtccttgcagaagcaatttgccgtgcggcggtaaatgtcgtcgttagaggtcagcaggtacatggccgcataataggcgttagtatccctgcggcggcggtagccctgcacggcgcattgatactgcatcctgcgctcatgctgctcgttgctccaaaggcttccgtgatagtgcttgatcagcaggttcaggcgctggaacaggcggcgttcatggggaaatgtctctaagactgcctcgcggtagccgaccacaccggcctcaatgcgctcggccagccacgggcagcgcagggcggtacagcccagctttttcacatattcggtgcaaagctggcagcttacatccttgggggtgtatttgaatgtgttgatatacatggcgtcctccttttggcatgaaaatagcggacaaacaaactgcttgtccgctcaacggctctggtcgcgctggcgctttttctgccatgcgtccagtaatttgaagatggtgttctcgatctggaacggggtataggaacgcgggaagtatttgcggagcttttcaccggaaagggtaatgtcgtttttctccggtttcttctgctccatcataatggagagcatggtgtcctcgttcagctcgccgctctgactgagctttttcatccgctgcgcctgcgagagcgagggggtggcctgttcgctgtcgatggtttccagaagcagcccctgctccttgggtgtcagcgccgcgatctgataagcgggactgagggcgattttcttttcgtccaccatttgctgaagctccgggactaactgcgtcagggcgatgtagttgcggatggtatcgccgctcacaccggcatcctgaccaacttcatcatcgctgcggaacttcgccgaaattttcggcgaagtcagatccgtccgtgcgccctgccgcttgatggcctccatcttcatcttgtaggctttggcgcgttcggatggaagaatattctcgcgctggaggttgctgtccaccatgatgatggtggcagtgtcccggtcaatgtcgcggacaatgacgggcatggtggccagtcctgccagctcgcaggcgtgtttgcgtcggtggcctgcgatcagctcataaccgccgtcctcccgtggccgcgccagcgcggggacgaggacgccgtattccttaacactttcggcggtttcctgcatggacgcatcctcccgcacctgaaaggggtgatccgggaacgggtgcagttcggagagtgggatttggacgactacttcctgctgcggtttcggctttttggatggcacgggctttttgcccggttctttctgcgctgctttttcaggcattgtgttcctcctgtcggcatctgattttgggtacaaaaaaaggacatttcttcttttcagaggaaatgtcctgatttcttggacgggctgacagcccgcccaaacggtattttatttttgtcgttactataacaccccctacaatataactacttcgcggctcgatttttcggtttggaaaaggatgaaaaaccttgccagataaccgaaaatccttgatatacggggcttttccggtttgtcgtaattataccgtaagggcatacctttgcaaccatggcactgggtagcgggatggatgtgaagaccctctcctcgatgctgggccatgtgtcggcggccactacactggacatctacacccacatcaccaatcccatgcggtctgaggcggcggcaaagatcgaccagaggatcgcaaaggtcgatcccaaagagaaagaggtggcctcagagcgagcaccggagacagacccgcagtcattcatccccttcattccctacaacggcaagatccgaaaggccggcaccggctgtatcacccagatcagtgaacactgctgggaggggcgctactctccggtctggccggatggcaagaagcactcccgcaatgtgtatgctaaaacgcgggaggaatgtgaggcactcttgcctgggctgatcgagcagatgaaggcggaaatcaaagccatcaaggagagcggaaacctggaggctatcccagacgggatcagcgagaagaagaaagccatcgccgcctatatgcgggagcatccggaagttaccagcaagagcgccattgctaaggcagttgggacagacagaagcacggtgcgaaaatactataatgagatttgaaatgaggtgagcctgaagtaagatcaagagttgtaccccggaagataaggcaaagagtctcttggtctggctccggagactctttgttccatgtgagcagtttatcatgaggtgtctatacgagatttgattgatatcattcaggacatttataaaggggaaccaaatctgttaaaagcggtagtctgcctttaaaaactatggtataatgactaaaaactacaaatttagtggaggtggactccatgacaccagaacaaaaagctcgtgaggcaatcgatcagcggctgattcaagccgggtggatcttgcaggatatgcgccaactcaatccaatggcaggcccaggtgttgcagtgcgggaatttcccaccagcactgggccggtggactatgccctttttgtggatggcatcccggttggcgtcgtggaggccaaggcggacgaaaagggtgagaacatcaccactgtggaagggcagtcaagccgatatgccggaagcacttttaaatgggtcaaagcgggataccgcattcggtttgcctatgaggccactggaaagctgactcgtttcaccgattataacgaccagaaatatcgttcccgccgcatcttcagttttcaccgtcccgaaagccttcgtgccctgctaaagtctgaggataccatccgcaacaacatgaagcacttcccgcacttcgacaccatgggcttccgcagttgccagatcacagctatcgaaagtctggagcagtcctttgcccaaaatcgtcccagagcgttgattcagatggccaccggcgcaggcaagacctttacagccattacggcggtatatcgtctgctgaaatatgccaagatcaaccgagtccttttcctggtggacaccaagggcctgggtgaacaggcagaacgggaattcctggcctaccgccccaacgacgacaaccgttcttttcctgaaatctatggggtgcggcggctgaaaagctcttacatcccccaggatgtacaggtgtgtatcagcaccatccagcggatgtactccattctgaagggggaggaactggatgaatcggcggaggagacttccttcaatgagctgacctcggcagaccgccaggcagccaaagaagtggtctacaacgagaagtacccgccggagttttttgactgcatcatcatcgacgagtgtcaccgctccatctacaatgtctggcagcaggtgctggattactttgacgccttcctcatcggcctcactgccacgccggacaagcgtacctttgcattttttaacgagaatgtggtcagcgaatattcccgggagcaggccatcatcgacggtgtcaatgtgggtgaggatatctttctcattgagacccaggtgaccaaaagcggcgcccacatcatgaaacaggtcatcgagtgccgcaaccggctttcgcgtgaaaagcgatggaagcagttagatgaggatgtggattaccagcccactcagttggaccgggacattgtcaatcccagccagatccgtatggtgatccgcacattccgggacaacttgtttaccacgctgttcccacggcgtaaggaagtccctaagactctgatttttgccaaaacagacagccacgccgacgacatcatccagattgtccgggaggaattcggcgagggaaacgagttctgtaaaaagattacctactccgccgagaatccggagggtgtgctcagtgagttccgcaatggctacaatccccgtattgcggtcacagtggacatgattgccaccggcaccgatgtcaaacccatcgagtgcctgattttcatgcgggatgtacgcagcaagaactattttgagcagatgaagggccggggtacccgtaccctcagcaaggacaacctgcaaaaggtgaccccctcggccaccgagaacaaggaccactttatcattgtggatgcggtgggcgttaccaagtccaagaagtccgagacccgtaccttggagcgcaagccctcggtctctttgaaagagctgatgatgacggtagccctgggcgctcgggacgaggacaccctgacttcccttgccaaccgggtgattcgcctcaacagccagatgagctccggcgagcggaaggaatttgcccaggtggtaggcgttccggccagtcagctggcggaagatttgcttgatgcctttgacgaggatatcctcaccgcccgagcccgggagcagttccatacccaggagcctacggaggagcagctgaagtcggtgcagcgggaggcggcggcccaagcggccgcgcccttctgccgtccggaggtacgggactttatcgagaatgtccgccgcagccatgagcaaatcatcgacaataccaatccggacacgctgctctttgctgggtttgatgcccagaaggaggaaaacgccgaccgggtgatccggaccttccatgagtttatcgaggagaacaaggacgagatcattgccttgcgtattctgtatagccagacctatcaggaccggcccatggccattgagaagctgaaagccctctatgagaagctgcgcagcaagggcgtgaccatcgagcggctgtgggactgctatgccatcaagaagccggaaaaggtaaagggaacggggacgctgcgccagctggccgacctggtgtccatcatccggtttgagatgggagaggcggagggtttacaacccttcgccgataaggtaaactacaacttccagcagtggaccttccgccgcaacgccggtgcggtacatttcaccccggaacagatggagtggctccagctggtgaaggatcacatcgccacctctctgagcatccaaccggatgacctggacctgagcccctttgacagcaagggcggccttggacggttttatgaggtgttcggagagcagtatgaggcgattttggtggaaatgaatcgggaattggtggcgtaacttaaaaaggattatataagtatggaaaaactgaaaatcagtgagatctgttcgatcaatcctcgacaggatgataatatcccagaaaacagcgaaatatcttttatccctatggctgcggtatctgcaaacggtcaggtagatttatctgatacgttggaatccagtaaggtgaaaaattacactgtattccgaaatggtgatgtgctatttgcaaaaattacaccttgcatggagaacggaaaaggagcaatcgttcacaatcttgtaaatggatacggcgcaggaagtacggagtttattgttttaaggccaaacgcagatatgattaccgctaaatggctatacctgtatttatcacaacgatctttccgatgggaatgccaacagcatatgactggaagcgcaggacagaaaagagttccgcctaagtatttggcatcttgtgaaattcctgttccaccagttccagaacaagagcgcattgtctccaaaattgaggagatgttttccaagctggaggccagcgtggcggaactgcaaaccgcaaaggaaaagctgaaggtttaccgccaggcggtgcttgaggaaagcctcccttatgattcctttggtgccatttctcaatatatcgagagtatgggccaagggtggagcccaaaatgtgcgaataaaaatacgattgatgatgatgtgtgggcggttattaaaacgacagcagttcaacacggttattttgactatacagaaaataagattttgccagataacttagagccaagaaatcaacacgagatttctgttggagatattctaattactcgtgcaggaccgcgttctcgttgtggtgtatgttgtttggttaggaaaaccaagcaaagattgttaaattgtgataaagtgtatcagattaagcccaatagagataaaattttgcctgaatacatggagtatgtacttaactctccacgatttttattagaaataaaccgctgtaaaacagggggaaatgacagtggagtaaacttaacgcaaagccgatttttgactataaaaattcccgtcccatcggtcgatattcagaaaaagattgttgagcaaattgaatcccgtctctccatgtgtgatagtatcgagtgtaccattgacacctctttgcgacaggcagaagccctgcggcagagcattttaaaacaggcctttgaggggagattatagtgggtaatacagatgagtatgaggtgtttcacgccatttctgggttaattgttgatacactggagcccgtgtccattggcgattttacattttttcagtttccacgagattgcagagttgcgcttcaaaagtttttcctcaatccaagccaagaagcaattgattcttggttccgggatcttaaagaaagtcccgcagttattagtgtaaaagtgaaggctaatgatactgaggcggccgagatagaagcggaaaatctttttaagcgtataaccaacatttttcgtttccagctttttagcataggcaacgatttatttgacgtatctgtttatgataaatctcatataaccaaaagcacctatgttgtcatatctaaaacagatgggaaacatcacttttctgtgtctggagtaagacggcagatcgaattaagcaagtttcttgaaacagattgtcgtggatttgaaaacctaattcaacaactaactattagtaaattgacgaattttcagaaaagagttttattagcagttgacttcttaggcttagcaacgagaaacattggacagccaagtggatttgttcatgccattacggctatagaaacattattatcaatggggaaaatgggtatttctcaaaatattactgataattatgcatttataatgggtactgatttgaaaaacaggaagacactaaaacaagacactaaaaaactataccgaatccgttctgaactggctcatggcgaaaaatccattataagcgttgaagattgtaaagatgcaatttctcatgcatatgctcttatacttaagtttttgttcgatgataaactgagacatattcaaaacaatgagcaatttgttgaatacatagaaaatataaagtttgcagataaacgagaggaaatataatgtctgaacaaaccacaaccatcatctctaaggtttgggggatgtgcgggccgctgcgggacgacggtgtgtcctatggcgactacctggagcagctcacctacctgatttttctgaaaatgtccgacgagtacgcaaagcctccctacaagcgtccgaccggcatcccggcaggctgcggctgggcggacatgaacgacctcagaggcgcggagctggaggagaagtataaagccatcctggaatccctgggcgagcagggcggcaccctgggcaagatcttcaggggcgctaccaacaagatcaacaacgccgccatcctgtaccgcattgtccagatgatcgacaaagaaaaatgggtgtccatgtccaccgacgtgaagggcgagatctatgagggcctgctgcaaaagaacgccgaggacgtgaaaagcggcgcgggccagtattttactccccgcccgctgatccaggccatggtggagtgtatccgcccagagcccatgaagaccgtggctgatccctgctgcggcagcggcggctttttgctggcagcccagagctatctggctgacccgaagcactacaacctggaccgggagaaaaaggagttcttgaagaaagaggccttccggggctgggagatcgtgcccaccaccttcaagatgagcctgatgaatctatacctccacaatatcggcgacctctatggtcaggtgcccattacccttggggacgccctgctcacagatcccggcgagcggttcgactatgtgctcaccaacccgccatttggcaaaaagtccgcccttaccttcaccaacgaggagggagagcaggaggaagaggatctggtctacaaccggcaggacttctggaccaccagctccaacaagcagctcaacttcctccagcacatcaatactctgctgaaagccaccggtaaggcggcagtggtggtgccggacaatgtgctctttgagggtggagccggcgagaccatccgcaagaagctactggagacctgtgacttccataccattctccgtctgcccacgggcatcttctataagcccggcgtcaaggccaacgtgatcttttttgacaagcgcccggccagcccggagtggcagaccaaagaggtctgggtttacgacctgcggaccaatatgcacttcaccctcaagcagcatcccatgacctttagggatttgcaggacttcattcagtgttacaaccccgaaaaccggtatgaacgccatgagacttggaacgaggagaacccggagggccgctggcgccgcttcacggtggaggagatccttgcccgggacaagaccagtttggatatcttctggatcaaggacaagtccttggccgacttggacaacctacccgccccggaggaactggcccaagatatcatggagaacctgcaatcagccatggacggattcagtgagttgttggcagaactgaaaaaatagttgcttttttggctttttcaacctgatgcaaactcatagtcccatttttatatttcaaaattgagagatatagtcagccgagttcctcaatttttgatggactgtaaacaaaattaaggccctctggaatttattccagagggcctttggtccgagtagtgcgactcgaacgcacgacatccagctcccaaagctggcgcgctaccaactgcgctatacccggatattcgatttttctgcatgataccatgcggagaaggaaaaagcaagtttttcgtgtctgtgggcagtgctgtggtcaagcccggttttgcggggggatcttcaggcgggggatttccgccgcaggctactgtcccaaggacttccaggctttcactttttggggaatggataggctctctatcctcccaaatcacgcgtgctgccaactacgctacatttggtcatagatatttctcccgcccgggggcgttcttccccacatacgtgcggcaatatactctgcgatccgccgcgttggcactctggcaccatcttttactggatcggggacagcacgatgggttcattttatacctctctattttacctgtttctccgccaaagtcaagtctattcgcttccggccggtatgtcggaaaggccgtccggaggctatggggcctccggacggcttgaccaggtctcttcacttggaaacgcagagtcgattgttctccacggtaagcttggcggtgtcaccggccttgagggtgccgtccagcatcttctcggccacggcgtcttccaccttgctctggatggcccggcgcaggggacgggccccgtacttgggatcaaagccctccttagccagctctgccacagcctcgtcgctggcatccaggtggatgcccatggtctccatccgggcggagacggtcttcagcatccgccgggccacttcccggatgtcctcctccgtcagggggcggaatacgatgatatcgtcgatccggtttaggaactccgggcggaaggtctgacgcagctccgccatcacctgctcccgggcggtctcgaacttcttttcagcgtcaggatcggagtcccgctcctcggcggaaaagcccagcttgctgcccatggcagtgaggctgcgggcaccgatgttgctggtcatgacgatgacggtgttcttgaagtccaccgtcctgccctgagagtcggtgatccggccgtcatccagaagctgcagcaggatgttccacacatcctcgtgggccttttcgatctcgtcaaacagtaccacggagtagggcttgcgccgcaccttctccgtcagctgaccgccctcctcgtggcccacatagcccggcggggagccaatcagacgggacactgtgtgccgctccatatactcagacatatcgatccggatcatggcgttctcatcgccgaacatggcctctgccagggacttgcacagctccgtctttcccacgccggtggggcccaggaacaggaaggagccgatggggcgcttcggatccttcagacccacacggccccgacggatggcccgggccacggcctttacggcttcgtcctgacccactacccgctcgtggagggtgtcctccatgtgcagcaggcgggtgccctcatcctccgtcagacgggtgacggggataccggtccagccggccaccacggcggcaatgtcgtcagcgttcaccgggcggtgctgggtgttgttcttgcggcgcttctcccgctccatctccacctgctcctggtagtccttctcaatgtcccgcagcttggcggcggtctcatagtcctgcttctcgatagcagcctccttgtccttggccagggcggcgatcttctcctccaggctcttcagctccggggagatctcctccgtctccatccgcacccggctggcagcctcgtccatcaggtcgatggccttgtccggcaggaaccggtcgttgatataccgggcggagagcttcacggcggcctccagggcctcgtcggtgatctggaggctgtggtgcttctcgtacttctcccgcaggcccttcaggatctccagagacgcctcctggctgggctcacccacctgcaccggctggaaccgtcgctccagggcggcgtccttctcgatatacttccggtactcgttcagggtggtggcgccgatcacctggttctcgccccggcctagagccggcttgatgatgttggcggcgtccacggcgccctcggcgctgccggcgcccacgatggtatggagctcgtcgatgaagaggatcacattgccggacttcctgacctcctccagcagcttcttaatccgctcctcaaactcgccccggtacttggtgcccgccaccatgccgctgaggtccagggacaaaaggcgcttgtccagcatctcgtcgggtacgtcgcccataacgatcttccgggccagaccctcagcgatggcggttttgcccacaccgggctcaccgatcaggcaggggttgttcttggtgcggcgggagagaatctggatcacccgctggatctccccgtcccggccgatgaccgggtccagcttgccggcccgagcgtcggcggtcaggtcccgggtgaactccttcagggtcttgttcttgccgttatcctcctttgcggggctggtgccggagcggccgggatcggcggcctgactccggggcatctcacccagcttctgcatcagggctgtgtacaggtgacgggcatccacgccagcggtgcgcaggatgcggacggccatattgttgccttcccgcaggatgcccgccagcaggtgctccgtgcccacgtagttgtagccgccccgcatggagtcctccatggccagctccaccacccgcttggcgcggggggtgaggccctgggcgggattgctgccgggcagaccggcacccacgctcttcttgatgatctccacgatcatgtcatcggtgaggcccgcctccgtcagaacggtgtgggccacgccctcctcttcccggatcaggcccagcagcaggtgctccgtgcccacgtagccgtggcccagctcaccggctgcctcctgggaaagccgcagggcctcctccgccctgggcgaaaatttgttctcattcatagtgtcttaccttcctttccatgggaaagtcccgtttacttgttttccttctgctccttgtgagcggcctccagagacctgatctggtcccgcagctccgccgcccgctcaaagttctcctggtgcacagccttcttcatctccagcttcagcgcgttcatctggcgcagataggcaaagcggctctggtcctcctggcctaccaggtcgtccttcttttcctgctttgcctcctgctgctggacaggagaggcgctcagggccggcatctcggcgaagaagtcgtcaaaggggtcctccagcatcttcattctccgccccagcaggctgggcatgggagagaagaaatcgtcgaagaaatcgtttccaaagaggctgttcccgaagaagctttgcatcatccgctggctctgggcacccagccgctgggtatagcccagcttttccgcgcagtcgctgcacaggtgcttctcttccacatggccgttcacgttgctccgatacacaaaggtaacttcattcttaccacaattttcgcatttcataaatcaattcctcctatcatctggaaactgtgcgtgcttattgaaacatttttccccgctgcccgggtcccggctacacctgcaggatcagcacctgcttcatgatgtccgcccggacggtgtcccggctctcccgcgggaccgcggccagggccttgtcgccgacggcggccagaatgctccgacctgcgttctcctccagggcgccggcctggaccagattgttcaggatggcccgagcggaggccaggtccacctggctgcccagggtgttgatgacctgcatcagcagcgtctggcggtccacccggacccgggtgatccggatgtagccattgccgccccggcggctctccacgatataaccccgctccggggaaaagcgggtggacatcacgtagttgatctggctgggtacgcaattgaagcgctgggccaggtcattgcgctggacctccagcacaccaccgtccgtctcctccaaactctcctgcaggaagctggcaatcaaatcggaaatccccacggatgattcctccctttccaaagaacgccttgtctctttgactttgactttctttaaccttttgttctgtgtttagtataacacgcccgagcaaaatgtcaagagctgaattttgactttctttgacctatttgaaaacaatttatgaacagttagtcttgacaaacgtcatttttggacgctttcccgtattttttcgaaaatttaaccatagaatttgaacggctggtacttgctttttttaatttgtatgctacaataggggtacaattctgatggaggtgcttcccatggcttacaaaatcacttctgcctgcgtgagctgtggctcctgcgcggacgcttgccccgccggtgctatcagccagggtgatgaccagtacgtcatcgatgctgccgcttgcctggactgcggttcctgcagcgacacctgccccaacggcgccatcgtccccgaggagtaatcgaggatacataaaaggtccgcgagccaaagctcgcggacctttttgtcgtttcggcaactgtaagaaatctgtaagagatttctccatagagttgtaagaaattggtgttatcctgccggtgttccccgctggagtgaagaaagaggccctttactcccgtaatattggggacagccgatttgaaaggagacacacgatgaaacacgcttggaagaagctgctggcagcagcggtgctgccctgtctgctggcgggatgcggtgccctgggagggccggaatctgaggtcccctccatggaccacttgcttggcttgacccaggaacagcggctggaggactacgactacctggtccagacactgggggacagctatctctgcatgggtgtccgagaccgggacaacccggaggacccgtcggcggccatcttccaggcataccgggagatgatccaggaaagcgacagcgacgaggtattctattccgctgtttacagcacactgttccgcctggggacgtacggccacctctggatcgtggagccggatatgtaccgcgcctactgtgaggcctatgaggacggcggcatccaggaccgggagcactggcgggaggtgctgacggacccggtgaccgtccggggctatgaaagactccagacgctgctggatgcctacggcgaagaggacggcacggtcaattcagccgattcggaggagcctgccgcgaacctccacaccctgctcctgcccggcggagacgtggggtatgtgaagatcgacagcttcccggcggaatatgaggacagctacgccacagaccgggcggccctgacggacttctaccgccaggcggcggactgcacggatctcatcatcgacctgacggacaactccggcggaagcgaggtctactggcagcagctgctggcggcgcccctgacggaccgtcccctctcctgcaccaactatgccctgctggcggagagcggcaacaaccgcccctatatccaggaggtgttctccccggaggagctgcaccccatcgcggacctgccggatctgcccaagctggagcgggacggaatccaggccgccacccactttgtggagagcaccctctctgtggagccagcggcagagcgggcccccttccacggccgcatctgggtgctggtggggccagcggtctactccgccagcgagtccttcgccgtgttctgccaggagacaggcttcgccaccctggtgggcagtcccaccggcggcgacggcatcggggctctggatccagtcttcctgcagctgcccaacagcggcatcctggtgcagttcaccatgatgttcggcctgaacggtgacggctccagcagtgaggaaacgggcaccacgccggacattctctcccctgccggggaaccggctctggtgacggccctgcgggccatggagggagtcgcatgaccgaccactgtctggaggaaagccgcggcctttccggaggaacgccacaggggctgcccgcctgccctcccccgtccgctgaatgcctggagcggtcccggggcgggctctccctcaatcatctgaaggccgtggcggtggcggccatggtgatcgaccatatcgccttcgcctttgtccccgacggcaccctgttggcgattctcctgcattccatcggaaaaatcaccggccccaccatgttctttgccgccgtggagggctgtcaccacaccagaaacctcaaccggtatctgctccgcctggctgttttcgcgctggtcagctggtttccctttctgtacttccacttcggcggcgatctggccgccatccagctgatgcgccccaatgtcatctataccatttttctgggcgttctggcggtccgcatccgcaggagcccgcgcctctgctctgcctggaaggtcctgctgattttgctcctgttcatcctgtctgtcccggcggactggggctacacaggcgtggtgattatcctggtgttcgactattattatggcagttggaagcaccaggcgtttgcctactgcatggtggtcatgctggacatgggggtgctctccctgctgatccacccgtttttcggactgttttacgaccatgtcttccagatcgactgggagctctacgcctactccgtcgagtacgtgggggcgtttctgccgctgctgctcctctcccgctacacaggccggcacggaaccagcggcggtttttccaagtggttcttttatatgttctaccccctccacctgctggtcctgggctggctccgggccgtgctgtaagtctcggccctcacgacccgcaggggcctggaccggcgggcgatgagagcatcggcctgctgcagaaacttccatcacccaccgggccagcggcagcaaaaagagaaggagagaacatgcagtggccgctccgcgccgtccgcacgatccgccacggggcagcaactacaggaatcgcaaaaggcccaaaggccagaccaaatcggcgcttgcaccgatcgtcgcgcggagggccactgcaccggagcgcgcccaagcggccttttcttttgaaccgtgccccccattgcaagaatgatgatcttccattataatatgaatatagacatcatccaatggggggatcgacttgcagcactgggaactcctctgccccggcggactctccttcgtctgcgatgacggcctgttccagcccagtaccgactcctttctgctgggcagctttccccggctgaagccggggcttcgggtgtgcgacctgggcagcggcaccggactgctgggccttctgctgttccagcgccagcgggcactgtccgtcaccggtgtggagctgctgctggacgccgtccgcttggcggagcaggccgccgcccggaacggcctggcagaccgcctgatcttccgccggggagacctacgaaagatccgcggcctgctgcccgccggtggctttgacttggtggtgtgcaaccccccctactatcccgccgggtccggcaggctgccggagactgaggccctccgggctgcccggtccgagactggctgcaccctggaggatatctgcaccgcagcagcctggctgctgcggtggggcgggagcttctgcctggtccacaagccggagcggctggcggacctgtgctgcgccctccgggcccggggactggagcccaagcggctgcgcctcgtctgccgccgggcgggggacgccccttccctgctgctgttggaggcccgccggggcggacggcccgggctggacatcgccgcccccctctgcctggaggacgggaccggccgccccacggcggagctggacaacgcctatttccgaacaaaggagacgaacgcatgagcggtacgctgtatctggtggccacgcccatcggcaacctgggggacttctctccccgggcagcggagacgctgggagccgtggacttcatcgccgcggaggacacccgggtctctgtgaagctgttgaatcactttcagatcaaaaagcccctggtgagctaccacgaacacaaccatgccgctgcgggccaggccatcctgcagcggctgctggctggggagtcctgcgctctggtgacggacgccggtacaccggccatctccgatcccggagaggatctggtgcggctatgtgccgaaaatggggtggaggtgctctccatccccggctgctgcgcggcagtgaatgccctggcggtcagcggcctgcccacggggcggttcacctttgagggcttcatcaccgtcaacaagaaaagccgccgggaacggctggactctctgaaaaacgaggagcggaccatgatcttccacgaggcgccccacaagctgcgcgccacgctggaggacctgcgggagaccttcggcccggaccggcgggtggccctgtgccgggagctgacgaagctccacgaggagactgtgcgcaccaccctgggagaagcggcggcctattaccaggaaaacacccccaagggagaatacgtgctggtggtggcgggcagcccgccccgggagaccgccgccgtcacgctggaggaggggacagagcaagtcctgcggctggtggcccagggaatccggctgaaagatgccgcccgggaggtatcggcccacacgggtctttccaaaaacgagctgtacgccgcggccctggagcggtcatgacccgcgcaggacatgcagcgcagaagacgcccatgcggagaactccgcatgggcgtcatgttttcagcgcacagggcgctcacagctctttcaattctttcaggcacttggggcagatattcttccccttgaataccgtgatgtctttggtggcgtcgcagaaaacgcagctgggcttgtattttttcagaatgacggacgagccttccacatagatttccaatgcatccttctcgccgatatccagcgtccggcgcatctcgatagggagcacgatccgtcccagttcatccacctttctgacaattcccgttgatttcacgatgtatctcctttttcagcaatatgtcctaactatccatttataagaacatatcacagacggtcgcattttgtcaatttgattccaaaaataaagtgaatttaccaatttgcttttttgaaatctcagttgtcctctctatattttttgtgaggcaactgggtatccgtcacaaacacagggggaatgacaatggcaatgacctggatctggaccgggatggtggtgctgtccctggtcttcggcctgttcaccgggaatctggacgccgtggccgacgcagctatggacggcgccgcctccgccgtggagctcagtgtctccatggccggcattctgtgcctgtggagcggcgtcatggaaatcatgaatgtctgcggcctctctgccggattggcccgggccttccggcccattctgcggcgactgatgccccaggccagccgggatgaaaaaacgttggcggcactctccgccaacgtgtccgccaatctgctgggactgggcaacgccgccacgcccctcgggatccaggcggcccgacggatggcccgcggctgcagcggcaccgccagcgacgaactgtgcctgctggtggtgctgaataccgcttccatccagctgctgcccgccaccatcgcctccgtccgcagcgccagtggagcccagtctcccttcgacatcctgccggcggtgtggctggcctcggccctgtcggtggtggttggcgttctgacggccaaattcctggccgccgtggggaggtgccggcgttgaatctcagttctctggtgatccccgtactgctggccggggtggccctctacggcatggggaagcgggtggatgtctacggcgccctgacccacggggccgaagaggggctcacggtcctgctgaaggtcctgcctgccctggtgggactgctgaccgccgtggccatgttccgggcttccggcgccctggagtggctcacgggcctctgcgccccggcgctggagtttctgggcattccgccggagaccacgccgctgatgctggtgcgccccgtatccggcagcggcgccctggcagtcggctcggacctcatcgccacctacggccccgacagctacatcggccgggtggccgccgtgatgctgggcagcacggaaaccacattctacaccatcgccgtgtacttcggctctgccgggatcatccgcacccggcacacggtcccggcagccctggccgcggacctgacggggtttctggcctccgccttcgcggtgcggctgttcttcggcgcctgatggggcggcgtcccgcgccgtcaagctgcgctgagataaggctccagcacagcggcgccgccgtaggcggaggcgaactcaccgtccaccagataccgcacctcttccactgcccgcagggacagcagggagtccgccagtgcccggagggccagggacagatccgcctcctccggcagacccggcagagccgccgtgggcaggtctacatagcacgtgctctcttccagccggacggaagtcacctggaatccctccggaatggcggagagccagtccttttcctccgtcccctccagcagggccttgaccacggccccggcctgcgtgtccccctcgtacaggtccagtgtcatctccaccggcgtcaggccgccggtctcatccagaaagtacagggtggcgttcagcgtgtcgatcacatcctcgttgctggaaaacaggacatccctggctgtgaagatctgccggtcccggtaggccagcggctggccccggaccgtcacgctgacagcggagatctccggcagctgggtcagcgtcagggtgatggcatagtctgccaaggccagcgccacgccggagagcagccggtagcgggaggagaggtccaccttggcccgggtaccatccagctccagggacagcagggtagtctcctctggaatggcgctggtgagggcggcgtcctccggtcccgccagcagctccgtcaccagatactccgccagctcccgggtgtcccgcacctcgcccgactcgatgtacagcggctccgcccgcagggcatcgccgccaggggcgtcggacagatccgcctccaggaaatagaggtcgtatgtctcgccctcgccggaaatgcggggctgtccccagccgaaggccgccagaagggcggcgcacagcagcacggcaatccatcgctttttcatgtctggccgcctccttcccgccagggccagcggacggtgaaaactgcgccgcctccaggacggttggccgcctccacagtgccgccccgcttttccaccgtgtccctgacgatggccaatcccagacccgtgccgccggcagcgcgggaccgtgccttgtccacccgatagaaccgctcaaagatccggggcaggtcctcttccgggatgccggcgccgttgtcctccaccgtcagcaccacctgatccccctcccgaaacagggagacctggaccgtgctgcccggcggcgtgtacttcacggcgttgtccgtcagattatagatgatctggtggatctcatcccgggtggccagcatcgtacaggtcccctccgcccgataggtcagttccgttcccttctcctgggccaccaggctcatcatccgcatcacctgctccagcaccggcagcgcgtccactaccaccggccgctccagcacgttgctgtccagccgggtcaggcggagcagatcctctgtgatacgggagaggcgctccgcctcctgcccgatgtctgtgacaaattcccgggccgtctcccggtcgatgttctccgtctggaggatggagtccgtcagcagccggatggccgccaggggcgttttcagctcgtgggaggcgtcggacacaaagcggcggcgggcgttctccgtagtctggaggcggtccgtcaagctgttgaactcctgggccagctgggcgatctcgtcgcgtccgggcacctccgcccggtggctgtaagcgccctcccgcacctcccggatggcggtgagcagctggccgatcttccgggtcagcgcccgggacagcaggccgctgagacacagcaccaccaccgcgatgccggcggagagccgcaatagattgccctgcagcccctccagcagagcggcctgctccgtgtcatactcgtatgcgtatacggcgccgatgatctggttctggtacagcaccggcgaggccgcccggctgcggaaggccccgtcccggtagctgctggagaacacgtcgttccccagcagggcctggacgatctctgtgtagaagctgtactcccccagggcgtcgttggtctcccgggtatcgtagaggaccttgcccgcactgtccgtcaccaggatgcggctgaggcccgtctcctccaccaccgccatggcctgggacacattctcctcggtcagccggtccaggccggacagggagtagaccatcacggacacgctgctctggagcgtggttgccttggagcggaacaccagatcctgcgatacccgcagcggataggtgttcagcagcagcagcacgcccgcgataatcaggatatagctcaggccgaacttgaactgcaggctgtcccagatcctgcccttatcctttgaaatagtatccaactccccacttggtcataatatactccggctccgccgggttcttctccagcttctcccgcaggcggcggatgtggacatccaccgtccggtagtccccggcgtaggcatagccccacaccacgttcatcagattctcccggctgtacacccgccggggattgcgcatcagcagctcgatcagatcgtactccttggcggtcagatccacggtctttccatcccggatggccacccgctcctccgtgttcagggacaagtcccccgcggtcaggacggcgccccggttccgctgcgtgccggcggcccgccgcagcagcgcccgaacccgggccttcagctccagaatgttgaagggttttgtaacatagtcatccgctccgcactcaaagcccatcagcttgtccgcgtcctcgctcttggcggtgagcatgatgatgggcacattggagaactcccggatccgcatacatgcctcctgcccgtccagctccggcatcatcacatccagaatgatgagatcgaagcggccgttgcgggccagctccacggcggaggcaccgtcataggcacactccacctcgtacccctcgttctccagattgaatttcacgcctttgaccagcagcttttcgtcatcaaccaccagaatcctcatttgtcacctctcctttgccgttgtccacagtgacgcggtcctccagctcggcgaatttcgcctctccgatcccgctcacctccatgatctcctcaatgctcccgaaggggccgttggcctcccggtacgcgatgatccggcgggccaggctctccccgatgccgggcagcgtgtccagctcctccgccgtggcggtgttcagatccaccggcgggaagtccggggcgatctcctcccgggggacctccgcctctgtctcgatgactacgcccgggacgcgatcctgccgatcccgaagagacaggcccgccagggcgcacaggaacaccgccgtcaaccccagcagaatgatctcactttttgtcggccttccccgtccactcactgttgaactcccacccgttttttgatatactatgaattgaaatgtcgaaccgcggcgcttttcgccgccgctgccgcgcgatgcaagttgattataccacagatggtaggagtttgatatgaaaacacaccgctttttctctgtttttttgctgctgatcctggcggtctccctgctgacaggtcctgcctccgccgcagaggtgcctgaccccgccatccaggccaaggctgccctgctggtggacgccaacaccggccgcatggtctatggaaagaacgagcacgaggagctctatcccgccagtctcaccaagatcatgaccgctctgctgacgctggaggcagtggacagcgggcagctgtccatggaccagccaatcactgttacggagagcgccctggaggggctggcggcggatggcagcaccgccggcatccgggccggggaggtgctggcggtggagcagctgctggagtgtatgctgatcgtctccgccaacgaggcgtgcaacattctggcggagcaggtcagcggcagcgtggacgccttcgtgggcgccatgaatgaaaaggctgcggctctggggtgtgagaacacccacttcgtcaacaccaccggcctgcatgacagccagcactacacctccgcctgggacttgtacctcatcacagcggaggccctgaagcatgacgacttcctgcggatctgcgatatgaagagcgccaccatccccgccaccaatctcagcgaggagcgggtgctccactccaccaactacctgatctccaactggcgggccttgggatatctggacagccgggcccacggcgtcaagaccggctccacctccgatgccggccactgcctggtatccactgccgcggagggcagcctctccttcatcagcgtggtgctgggggccgaatccgtgaccttgcccagcggcggcacccaggtccagagcttttccgagacctcccgtctcttcgactggggttttgagaacttctcctatcagacggtgctggaggaggctgagctggtgaaggaggtcagcgtggcgctgtccaaggtggaccatgtgtccgtccatccggcggcggatgtggagctgttgctgcccaagggcactgatcccgcctctctggagcggacgctggacctggagagtcctgtggacgctccggtcaccgaggggcaggtgcttggcactctctccctctctctggagggagaggtgttgaccacggtggacctgctggcctcccatgatgtggaggcctccggcctgctgctgttttggcggaacgtgcggaacttcttcagttccaccgcggtgaaggtggttggcatcgcgttgctggtgctggcggcggcgctgatcgtctggaagctgacggtaggccgccggcgctaccggtacggccgtagcgtaccccgccgccgcgggggcggctaccggggccggaggcggcattgacacaaaagggccctggggcagcatccccagggcctttttacagagagaggcacaaagcgcagctgttgagatacggaatcctcccgctctgctcttcactctttccagaaaatccggaatagaattcaggggcgcacggcgtgcgcccctgattctagatcccttattgtcacagataccgcaccagctcttccaggggcttgcggtccgtgtgcaggcgggagggatgggcgccctccgccggatagcccataggcagcagggcgatgggtgtcagccccgccagctccgggaatgcggcgtggagcttctccgggtcgaacatgcccacataggtggtgccgaggcccaggtccgcggcctggagcatcatctgggtgacggcgatggccgcgtcaatctcgccgtggttcttgccgtcgtcctcccgcttccaggcggcctccgggtcgtatgccaccagcagcatcaccggcggatggaagtgagcgccggtgcagccgtccaccttttccagcgcctccgagctctggagcacaaagatgcgctggggctggaggttatgggcagtgggggcattgcggccggcctccagcacggcggagagcttctccgcctccacggggcggtcgctgaatttccgcagagaatagcgctccgcggccagtttcgcaaaatccatggggatgcttcctttctgatgtagagatacctgattttagcacatccccgcggccgccgcaactgtttttctcacatcccctggttgggcatccagccgctgcggaggacctcgtcgcagatgtcccggcagcgggtgtcgtagaactcgatgaatttcagggaataaatgtccgagacgatgtagcggtcccggccctcctggtagatggtcatatagtcgttgcccacatcgtacagaatcccctcccaggaggtggtgctctgggtgcccaccaggaaggtggccaccacgtagttgcccacgtttttcttcagcatggccttcaaagatccccggtaggcttcctccatggagatggggtccgtgatgacctcgctgggcaggtggttccgcatgtccagggaccccatagactggccgccctgctcctccgcggcgttcaggcggtccatagggcggccggcactggtgacggtgcggccgggcgcctccggcatgggcgggtcggcgggcatgggtgtgacttcaccggaccagtccgtcattctgggcgcgacctgcgccacaggaggcgccccgtttccgccgttgtagatattctgatagtgtgccatttccaacacctctcaagtctgataatacgcgtctgtgggattatagaagcagtggtcgccgatccgggtctgccagtatcccaccttcgagggaaagaaggaccggcaggtggggccgaaggggttgtaaaaccacagggaatccgccacatccggcaggcggttgcccgcgatggcccagtcggcgatgtcatagtggatctgttcgggtctcatgttgtagatattctgggggttgtaggcgccgccctccgtctcgctggcgcagacgaactgatagggctgaaagatgatattgcggatgctgccctgcccgacccgggcatactccccgcccttggcgtggacccggttcattacaacaccggccaccgccttcatgccgtcttcaccctctccgcccgcctcgcactggatcaggcgcgccagcagctcccggtcggaataagccattggtcgatcactcctctgtcggggcctgccatacgtaccaaacgccggtccggcagaccgcctggcccggacgtttcaccctcaggatatgcacagggactgcagaaggtgtcagcggcagcctcccggtcccgtgaaggggggagtctcccagcgaaaaagtcggtctcgattttttccggatggaccggcccagccggaatgtggtatactggattctcagcgaacgagtcaggcggccgcggcatggaaaatacgcctcaagatcccgcacatctgcggagggagttccagccgtgccggaaccgattcaccgcctttggcggcgagacgcggcaggacctgctgcgcgtcctgttgtctcccccgcctgcaggttctgcgggagacaggcgtgataaaagcccgaaaagaagcgactcgcgtcttctactatctggccctgcaggacagtgggatcgaaaacgtagcgcgcctgttcgcagacattctgcagatcctgagaaacgctccggacaagagcggcgaggattgactgcggctatcacaggaggaatacagttatggatttgttcgaggccatggagcaccggcatgcggtccgctcctacgaggaccggcccatcgcgccggaggcgagagaagcactgctggcgtgcatcgcccagtgcaaccgggagagcgggcttcacatccagcttgttctggatgagcccagaggattcggagggcttccggcccactacgggaagttctccggcgtaaaaaactacatcgcgctgatcggaaagaagtccccgaacctggaggaagcctgcgggtactacggggagaagatcgtactgcgggcccagcagctgggtctcaacacctgctgggtcgccatgacgtacagcaaggtcaagaccgcctttcagatcgccccgggcgagaagctctgcctggtgatcgcggtgggccacggcaccacccagggcgccggacacccggtcaagcagccggaagaggtgtccaaggcggattcccctgtgccggactggttccagcggggcgtgcgggcggcgctgctggcgcccacagccatgaaccagcagaaatttaccttcacgcttcaaggcggcagcgtggccgcgaaagccggaaccggcttttacaccaaggtggacctgggcattgccaaataccattttgaaatcggggcggggaccgcgcagttccgctgggctccctgaccgggagccggtcttccggcagcctccgggcctcccgcccctgtcaggaggattttgatgaatatcgaaaccatacaagccccgcggggcgccatcgcagtgctctccggcgggaaggtgcagatcacggacgcgggtgcggccctggacctggccatgtccgtccggtatgagaccggcgcgtccaggctggccatcgacaagcgcctggtgtgcagcgactttttcattctcagcaccggcgtggcgggagacatcctgcagaagctgatgaactaccggttcaaggccgccatttacggcgactactcccactacgccagcaagccgctgcgggactttatccgcgagtccaatcatggcaaagacttctttttcgtgtccaccatgaaggaggccgtccagcggctgacagacgcggagtgagcagccccgcggcggcgcaaaagggacggcagcgatttcgctgccgtccctttggttcttctgcgtgttcggttttccgggcgcttaggctttcgccccccgctgctccgcaatggcctgacggaacatctcctccgtctggcggatggactcctccagagagtactgtctagcgtgttcggcatagcggcgctccattgcctgccgctcctccgggtgctcgatccaccagtcgatccgctgggccagcgcgtctgtgtccccggccgggaacaggctccgctcatccagggcgaactggggcgtggcggaccggggggaatcggcgatcaccggcaccaagccgcaggcaaatgcctccatacagctcatagcctcgatctccgcgtcggaggtgtggacgtacagatccgccatgtggaggatctccagcaggcgggcaggctcatagaactccatgacgatgggattggggagcttctccgccagacggcggtattttttctccagcggaccctttcccgccaggatcacctggatctcccgggcgtggcgggacttggcgcaggcgtcgatcagctcatcctgacgcttttccccggcgtagcggcccaccatcagcacattgaagaggccctgcatccagggttccttttcccgcttgccgtagatgtactccgggctgatgccgttggagatcacgtggagccgggcggtgtagccatgttggcggagctggttcgcgatcatattgctggggcagtggatgtgggtgaaccggttgaagaacgtatcccggaagcggttgtatacaaagtcgttgacgcgcctgctgttgcccatgtgcagggtgaaggtgatgttctccggctggcagtggaaggccgccgtgtgagggatgcccagcttttccacatgcttcaggcccatgatgcccaggggcgacggcatcatgaaatgcaccacgtccgcccaggccgccgccttttcaaacacatggcggttggggatggccagccgcatcccctggctggtgatgagatgctccaccactggaaagaacctcatctgccgcacggcgtacttgtagtccgcgggcttgccggtggcgatgacccgcacctcgttgccgtggttcttcagcgcctgggcaaaacgccgtgcgctgatggtggtgccgttgttcgcgtcgtcaaactggtcgatgaccaaaacgatcttcataaacgtctgaaccgtctttctttggtttggcggcgcttccgccgctaacggtttagtttaccatgttttttatcgcttgtccagggaatttcgtcgcctgcgggatctctgaacggactctgaacaacaggccctgcggcaggtgccgcagggcctgtctcaggcttatttctgtttggccagggcggactccagcccgcaggcgaactggtctgggcaggaggtgctcttggcaccgcagcggatgcccttcaaacggtggatcgcctcctgggcaggcatccccaccaccagggcggaaatcccctggaggttgccgctgcagccgcccaggacctccatcttctggatgatgccggcgtcatccacctccacgcgcatctcctgggagcagacgccccggggacggaacgtatacgtcatggtcgaaatctcctcttttcatgatattgcccgtttaggatatcacatcccgccgggaatggcaagaggcggcacaatttgaagaagggggggaaattctccgtcatttcagcggaacatgcggcggttcctttccgttccccaactgtcagggtccattcctgccgtttcggatttcaggcaaagcgcgatgtaagcacagccatgatagataccagcagcaggccgctgcacaaagccagtattaccaacattgcttttctgagctttctatttgccttgacggctctgtctatccggtccgaaaagatcagaaggaaaaaagcaggaatcagaaaccaccagtatatctgcatgtaatttgcctcctccccaatccgccgaatgggtcttgcccgtccgggaaacctgcattttttattttatcagatcatctgatccggatcaaggccgcctggcgaaggcggcagcgtttgcgtcatcatcagtcatctcgaaaagagactgcaggcgggataaagaatcccggcttgacaatatcgatattcgatgatatagtggtctcaaagcaataacgatattcgatagtaggaggcggcagcgccatggcccggggaaaatttcagaccctgaccgagcagatgttctacattctcctgtgcctgcggcaggagcggtgcggcgccgacgtgatggcctgggtcgcagaggccacgggcagccgggtggcggtgggcccggggacgctgtacaacctgctggagcagtttttgcaggctgggtacatccgggagacgaaggtggagggccggaagcggagctatgtgctcacccccactgggcgggaagccctggaggcagaggcccggcggctgcggcagctgacggcggattatgaacggctgatggaatcggaaggaggcgccccatgaagcacacaaagcgggagtggatgcccctgtacagctttttggaccggaagcgggtcacagaccatctggcagacatggccgccaggggctggatgctggaccggctggggacctggtcctggcactaccggcggacagagccgaagcagctccggttcgccgtcacctttttcgccggggccgggcggttctctcccgctccggcggcggggctggacacctttcaggactactgcgcccaagccgggtggcaccgggcggccagctccgaccaggtacaagtgttttacagcgaggatccggcggccgttcccatcgacaccgacccggcggcggagctggagaacatccgacggagcattggaaagcccatgatacgcaattacctggcgctgctgctcctctgtctgctggaagtggcgtttcaatgctaccagatttggacggatcccgtggacaccctggccagccccactgccctactggcggccacagcctacctgccgctgctggtgctgacgctggcaagcctgctgctctaccgccgctggcagtggcgggccgaggccgccgtcgaggcggggctgcccctgccggacctgcggagtgcccggggacttggcattctggtgttgatgtggtccggactcctgattgcaggcttgtttgcctccataagccggtccaccgggatggtcatactgaccatcgggatggtattgtttttcgcactggtctattttctggccaacgccgcccggaaggctctccaacggctgcggtgcccgccctgggccaacctcctggtaatcgtaggaatctgcatcgccatgtttgcgggcgggacaacaggtctgttcgccctcatgatacgcaatgccggttccggctggttggaggaccatccgccggtggagacctacaccgcccacggcatgacttggtccgtctacgccgatcccatccccctgcgggtggaggacctgatcgatatcgactatgacggctggtccacggaggcggatgtggagtggtcccccttggccgcccacggggagtaccggcaggacgcccggctgggggacggagacctgccggagctgcgctatgagatcgtcacggtgaagcttcctttcctctatggcctgtgcaagcgtgatttcatccagtgggtggagcgggacaacgatcagctgcccatggagtattgggaggagtacctcaccgtgactgccgccccctggggtgcggaggaggttttccagcggtactccggtgcagagccggtgaaccaattcctgctgtgctggccggaccggatggcagaggtcaagctgccctgggactggcgcttgacggcagaccagatggctgtcatcggagaaaagctcctgtacgcctgacaacagccgggagaggataccctctcccggctggttttctgtctgttttcttacgctctccggtccttccgctgctccagcaccaggcggtcggcgatcatggcgatgaactcgctgttggtgggcttgcccttggcattggagacggtgtagccgaaatacttctgcagcgtctccagatcgccccggtcccaggccacctcgatggcgtggcggatggcccgctccacgcgggagggcgtggtggaaaaccgcttggccacctccggatacagcaccttggtgacggcgttgatcacatccatgtcatccacggcgatcatgatggcctcccgcaggtactgatagcccttgatgtgggcgggcacaccgatctcatggataacagaggtcaccagattcttcagctccgccgggtgttcctccaccggggcaccccggctgaacagcgcccgcatccgatccagcagggcgttctcctccacgggctttgtcaaaaagtagctggctcccagatccacagcctccgacaccacgctgtcgctgcagaaggcggagattaggataaccttggggaccttcccctcctgctcccgcagctgcttgagtacgccgaagccgtccagccccggcaggaccacatccatcagaatcaggtccggcgcttcctcacgcgccaggcgcagggcctccgtcccgtctcccacagaccccaccaccgaaaactcctctgtctcgtctatgatcttccgcacaagggtgcggaattcctcattggcatctgccagcaatacagttcttctgatgtccatgtcttcccctgtcctctttccacaattttcgtttaccaggcacaaatgcttcagagcaggccccctctccctgccggaaaaaagtgggcgctcctgtttacgacggattcatgaagcttcaaatcgcgttttctataaagtagcataaacggacacgatttgcaacaagaaactgtaaataacttccaagaatcattcgacactttctgcgccgcgcctcctaactcattgtgccgcaaggggtgcagagtctcccggcagcagtggcttcccttttggacggggccgtggtacaatggagccatctcaagagaaaggatgagacatgtgacgctgctggaggaattagaagcgtatcgcccctggaatgaccaggaggaacgggaccgggcggaactgctgcggcggctgcggagcggcgaggcgctttacacccgggacaacgctgccgggcacctgacggcctccgcctgggtggtgagcccggacctgacacaggtgctgatggcgtaccacaacctctacgactcctggtcctggctgggcggccacgcggacggggaccgggatctgctggcggtatccatgcgggaagtccgggaggagagcggactcacggcggtgcgtccggtatcgccccacatttactctctggaaatcctcactgtggacggccacgagaagcggggcgcctacgtctcctcccacctgcatctgaatgtgacctacctgctggaggcagacccggcggcccccgtgcgccggaagccggatgagaacagcgctgtggcctggttcggtctggaggaggcggtggccgcctcgtcggagccctggttccgggagcgcatttacaggaagctcaacgccaagctggcgctgttctccggggaacaggggatgtaacacctctgcagctcaggggccatgtgcgtctgcgttgcttgccgcaacggcggttcccctggtagaatgatcccggaaaggaggcaacgcaatgcttgcagagaatttgaaggccctgcggaaggccaagggcctctcccaggaggagctggccgcccgactccatgtggtgcggcagaccgtctccaaatgggaaaaaggccggtccgtgccggacgcggacctgctgatccggctggcggaggagctggacaccacctccgcggctctgctggggccggaggtcccgccagaggcggagcgcggcggaacagcggagcagctggcccgcatcgccgagcagctggcggtgaaaaaccgccgggcccggcggatctggaggatcgtggccggggtgctgatcgcctttgtgatggtcaatttattgttgattctattgaactttgcggcgttccgcagtttccaggcggaggccgaatccactgtccaagcgcaggaactcccgcgcggagagtcgtaaatctgtattgtaaaaaattccggggcggcgggaagcaaaatgcttcccgccgccgctgtctgcctgggagaccatgtcaggccacgggttcttctgagaaatctcccgctgccagcatagtttccaccaaaattccataccctttgcttggatcgttcagcaggacgtgcgtcaccgcaccggcgaattttccgtcttgcaggatcgggctgccggacataccttggacgatgccgcctgtggcggccagaagctccgggtccgtcacagagatcaccaggtcccggccgtctgctgcattctctacaacctgtaaaatttccacatcatattcctgaacggcatcaccctccacattagagaggatggtggcaggaccggcgtggacttccccggcggccgcaaccggcatgggatcgcccagccgctcggtgaattcgccggggtccagcgtgccgaagacgccgctggtggtgttggcgtacagatcacccaaatctgtggccaggtcgaaatccccccgcagctcaccggcctctccgatggcacccttcttcaccgctttcacggtggagggcagaatggatccggaggcaaagggcatcaggagcgccgtgtcggcgtccgtgatcccgtgacccagagcgccgaaggcgccgctttccgggtcgtaatacgtcatggtgccgatgccggccatgctgtcccgaatccaggccccaatgcagtaggcgcccttctcgttctgttccggggaaacagagagcgtcacgctcccgccttcccggcggacctgcaggtcggtggccgtctccccattctcctggagcagggattggaactgctctgaggaggttacggagacgccgccgcatttgacgatgatgtcgccggtctgcaggccgcagtcatccgcgggcgtgccgctctccggcgccttcaccaccatcaccccgcgggcaaagagcttgatgcccaccgtgtggcccacggggaccagcatccgggcggaggtgtcctggtccgcgccgccggccgtcacaccggcagcgcgcgccggcatggccgcgcacaacagcaatgccaagaccagcgccgctccgccccgcagcacgtgtctcgctttttgaaatggtccatacatgaaatcacccctttccgaaacgcggccggcaaatccgctgatctgccggcgagattatcatctgccgcagacggaaaaacacgccttgcaaaatgcggaagcagccccatggcaggctttgactgtgccgccgcggcggcaaaaaaacaggacccgcaggcaaatacccgcaggtcctggaaaaaatcgttcaatcccgcttattgaaaattttgaaaatatcctcgaaagggtcatcctccggctcctccggcttgggcacgtcctcttccttcaggggcatgggctccgccgcggcgctctgctggcccgcggcccccgcctggatgggcggcaccttgggcagctgctccggcaccttgtcaaagccggtggcgatgacggtgacccggatctcgtcgtccagcgtctcgtcgaaggtggcgccgaagatggtgagcgcatcgggatggaccgccgcctggaccaagctggcggcctgttccacctcctccagaccgatgtccatggagccggtgacattgatgagcacgcccttggccccctcgatggaggtctccagcagggggctggaaatggccatcttggcggcctcctcggccttgcccttgccggcggcccgacccacgcccatgtgggccatgccggcgttcttcatgatggcggtgacgtccgcgaagtccaggttgatgaagccggtatcccggatcaggtcggagatggactgcaccgcctggcgcagcacgtcgtccgcgatctcgaaggcgtttgcaaaggtgatcttctggtccgtggcgtgcttcagccgctcgttggggatgatgaccagggagtccaccttgtccttcagctccgcgatgccggcctctgcctgctgcatccgccggcggccctcaaacccgaagggcttggtgaccaccgccacggtgaggatgtccatctccttggcgatctccgccacgatgggggcgccgccagtgccggtaccgccgcccatgccagcagtgatgaacaccatatccgtgtcctccagtgccttggcgatctggttgcggctctcctccgcgctcttgcggcccacctcggggtcggatccggcgccctgaccgtgggtcagcttttcgccgatctggatcttataggtggcgctggatacgttcagcgcctgcttgtcggtattgaccgccacaaagtccacgcccttggtgccgctgcggaccatgcggttgaccacattgttgccgccgccgcccacgccgatgaccttgatattgacaacggtatcgggaccggtctccaatccaaatgccatatagtggtgcctcctactatcgtttgtgtaaaaagggaggatcgtccctttggattcacaatatcctgtatctcataacatttagtttattgtatgacactttcgccctctggtcaagagtccatcgggcttttccctcagatttttgtccggaaaaaggaggggcggcggtccgtcccccctgtctcggcaatcttctgccaaatccgccactctcagtccagcgtgaggatcggcggattcaggtccaggcggatgctgcctgtctggttactctccagcttgctgattcccgcctccaggatctgcagcatccggtcatagtccgcgttgtactccatctccacagaaaagcggccggcgtagtccatggtcagccgggacagatcgtccaggtggatggcatccacccggtccgtcaggcccgcggcgtccagcgccgccagcagcgccagcagactggtctgctgattggcgaactctgtggacagggcgatgtccgtgcccaccgagggggccagcagctcacagccgtcgatcaccgcatagtccccagcttgagacgccggcagctgctccacgatcttgcccttgggactcagcagccaggcgctgccgtcctggatcaccgccaggggtgtaccgcactccgccacatcgatcagcagagtgtccggcagctcccgccggatgcggatgtcctcaatgtcgatgtagggcagttgctccgcgatgctgcgggcggcctcgtacttgttcagcagaaagaggttgtcgcccagctggataccgctggcctcgatcacgtccttttcggtgtaccgctcagtccccgtgacctcgatggtgtccacccggaagaacagcgtcagggccatcaccacggccgcgcagatcaccagcacggacagcagcttatagaggaagccgaagtttcccctcctgcgccgccggttggaatgtctgcgtctggccatgtcgtctctcctacccgttttctgtctcttccacgcgcaccgcgtccgcccccagagcccgcaggtcccgggccaggtcttcgtagccccggtcgatgtggcagatctgggagacacgggtctccccctccgccgccagagccgccacgcacagggccgccccgccccgcagatccgtacaccgcactggcgcgctgtgaagccgctccacacccgtgaccaccgccacccggccggatacccggatgctggcccccatgcggatcagttcgtccacatggcgatagcggttttcaaagatgttctcctcaaataccgtggcgcctcggctgcgcagcagtgccgccatcagcaccgcctgcgcgtccgttggaaagccggggtagggcgccgtctgcaccggccccacggcccgcagccgctcccggcacagagcccggatgcctccgctgtctgccgtgaccgtgcagcccgcctcccgcagggcggcggtgactgtggacaggtgcccctcctccgcgccccggagatagatgtccccgccggcagaggccgccgcgcagaggtaagtagccgccgcgatccgatccggcatgacccggtacgtacagccgtggaggtcctgcccgccctctatggacacggcggagctccccgccccggacacccgagccccgcaggcgttcaggaagttctgcaggtccaccacctccggctcccgggcggcgttggagatcaccgtgacgccctccgccccgcaggcggccagcatcagattctccgtggcccccacggatggcatccgcagcaccacttcccggccccgcagccggtccgcccggcagtggaggaagccgccctcctcccggatctccgcccccaggtcccgcaggcccgcaaggtggaggtcgataggccgggggcccagctcgcacccgccggggtagctcaggtccgcctgcccgcaccgggccaggatcgcccccaggaaaatggcggaggagcgcatctcccgcatgagtacatccgaaatctcacagcggcgcagggcggtggtgtccaccgccagggcatccgcctcccaatgggcgtcgcagcccagatgccgcaggatgcggatggaggcgtccacatcccgcagccgggggcagcccagcagcgccacctgcccccttgccaacagcgtggccgccagaatgggcaggacgctgttcttggccccctggatcgtgacctctccctccaggcggcggccgcctcgcaccgacaaaagctggctcatatccgttcccctccgaatccagaatggttcaacagtccatcctatggccggcggggtttcgtggttactggcagatttccagcacggtttgataaattcgctctgtggcgtcccggattcccagggcggacatggcccgctccatggaggcccggcgcgctccgtcatgaaggatgccgcaggccgcctggaacagcgcctgaccggagcagtccttctccagcagcaccgcggcaccgccggcgttttccaggaccctcgcgtttttttcctggtggttgttggtgacatagggggacggcacgatcagcgccgggacccccagtgccgtcagctcgctgatggtggaggcccccgcccggcagagcaccagatccgccgcccgcatgacggcggccatatcatagatgtactcccgcacctgcagcgccgggtggtccgccaggtccacccccttctcctgcagcagcttcagcaacaccggatagccatcctttccggcgccgtggatgtggtggaaaggttccttggccgcctccagcgccaggaagtccgccatctgccggttcatgcccgaggcccccagggacccccagaaggacacaagcaggggccggccgtcttccacgcccaggcggcgcttggcctctgccttcgtcagatggaagaagtcccgccgcaccggcgtaccggtgacgatcaccttctccgggtggcggtagtgctcccggcaggcctcaaaccccaccatgatccggtccgcgaagggctccagcatctccgtggtgaggccgggcaccatgttggactcgtgaacggccgtggggatccccgccttggcagcggccttcaccatagggaagctggcgtatccccccgttccgatgaccacgtccggccggaactgccgcagaatggcccgggcctctccgggcgcccgaaggaggttccccacagagaccaggttgtgccggatctcccgaggcttgaaggaccggtggaagctggagatgtggacggtgcggaagtcgtatcccgccttggggatcaggtccttctccagtccccgctccgctcccacgaacaaaaattctgtctccgggtccttttcgcgcatcagctgggccagcgcgatagccgggttcacgtgcccggccgtgccgccgcaggtgaagatcaccttcttcaatgatgcttccactttgctgcactccaatcgaaagatatgagataaaagtgaagggagaagagattcggtgtccggcacagccggacattttgagattccgcctttatctcttatcttttatctcttaactcctatctgggtcgtactaccccgcctttgtaggcttcatctgccgggataccgacaggacgatgcccatctccgccagctggatggacagcgccgtgccgccatagctgaaaaacggcagggagatgccggtggtgggcagcaggcccgtcaccacgccgatgttcaaaaaggtctgaaggcccaccagggtcatgacgcccaccaccatcaggctgccgaaccggtcccgggcatggagggcgatccagaagccccggagaatcagcgccgcgaacagcagcatgataacggtggcgccaatcaggcccagctcctcgcagacgatggcgaagatgaaatcgttgtgctcctccggcagatagagaaacttctggcggctcttccccaggcccacgccccacagcccgccggagccgatggtgatgaggctctggcgcagctggtaaccggctccctggggatccagccaggggttgtgccacatctcgatgcgggaggcgttgtagccgatcacgcccagcaccagatacagcagcagtccggctgcacccatagccagccccacccatctccagtggatgccgcccaccagcatcatcaccgcgccggcgcccatgatgaggatggcgccggagaggtggggctcgatgcccaccagggctgccaagacaatcagcagcaccgcatagggggcgatgccgtagcggaacgtctgcatacggtcctttttcttggagatgctgtcggcaaaatagatcaccaccgccagctttgcgatctccgagggctggaactgcagcgaagtacctggaatgcccagccagcgggtggcgttgttccgggtaatggccaaggggttgcccggaacaatcaccaggatcagcagaatgacggccagatacagcagcggctttgcaagaccgcggaaccgctgatagttgatcttgccaatgaagagcatggccgccacgcccatgatggcgaacacgccctggcggataaagtaggacatggggttctggccgtccgtctcgtaataggcggaggggaagctggcggacagcagcatcaccaggcccacgccggtcaacagcatcaccaggatgaagaagggcaggtcaatgggccccttggccaattcccggctctcctgctccagctcccgccggcgctgctggcgctcctgccgggccagggcctcttcccgactcatgggtcgccggcgggccgccggggcttttttctgccgtaccatactgcttccctcctctcggggtctgtggatcttgccgcgctccgcagcgggccggcgcagagtgctcagaatcgtccctggacgcccagataggccaggacgcagcccgccagcgtcaccagggagaataccgccaccagctttgcctcactccagccggagagctccaggtggtggtgcaggggggccatcttgaagaaccgcttgccgtgggtcagcttgaagtaacccacctggataatatcggacagcgtctccagaatgtagatgatgcctacggggatcaacaccaggggcatatcgaacacaaaggccagggctgccactgcgccgcccagaaacaggctgccggtgtcccccatgaacaccttggcagggtggtggttatagacgaagaaggctgccagccctcccgccatagccgccgggaacagagcctggatgccgtaggtgctccagaggacgccggctacggtgaagaacgccatcaccacaaaggtgacgctggcagccagcccgtcgatgccgtcggtcagattcacagcgttgacgcagcccacaatgacgaaggccgcgaagatcagatacacgatccagttgatggtaaagctcatgttcaggaaggggatatacaggtcgttggtcagcaggccctcgtaccgcatcagcaccaggaacaccaccgccgccgccagctgaaggatgaacttctgccgggccgtcagtccctcgttctggtgctggcggaccttgcggtagtcgtccacaaagccgatcaggccgaagatcagggcgaagagatacacgtagaggtgccagaacaccccctccagcatgaagctccaacccaggatgaacacggtgacgcccgcacccaggatgaacatgatgccgcccatggtgggcgtgccggccttggacttgtgccacgtgggtccgtcctcccggatctcctggccggccttcagcttgcgcagctccgggatgagaaatctgccgatgagcagcgtcagcacaaagctgacggccgccgcgatcaaagaaagtgtcatatatccgtctccctctccttcgccgggcacagccccggccctttggtacgttcctgattccagcggttctccggcggccgatcctccgccggatgtcccgccgtatcccattgtccatgcggcgccgcccacggctgaccgccgcatttcacgcggaccgcccgaagtgaattcagccgatttcaagggtttgcctgcggcaaaccgcttgacgccggacgcccggcggtcacttccccgccaagtgctccgccacgatctcccgttcgtccatgtggtgcttctcgtggttcacgccccacaaaatctccgattttgtggggaccccgcatttgactcaaatcgcccgaagtgaattcagccgatttcaagggtttgcctgcggcaaaccgcttgacgccggacgtccggcggttacttccccgtcaagtgctccgccacgatctcccgttcgtccatgtggtgcttctcgtggttcacttcctggtaggtctcgtggcccttgccgcacagggcgatcacatcgccgggctgcgcgtggtccatcgcccagtggatggcctccacccggtcgcagatcacctggtagggggtgccgctgccctccaggcccggcaggatgtcggcgatgatggcctccgggtcctcggtccgggggttgtcggaggtcaccaccacaaagtccgccagctccgccgccacgctgcccataataggccgcttggtccggtcccggtcgccgccgcagccgaacagggccacggtgcgtcccttggcaaagcccttcacggtgcgaagaatattctccagactatccggcgtgtgggagtagtcgatcaggaccgtgtagtcctttcccggtgtggggaccacttccacccgccccttcacatggggaactgcagccagcacccgggcgctcttttccagaggaacgcccagagccagagccgcacccagcacatccagcgtattatataccataaacccgccgggaatgccaactttgatgggcgtgcggctatcctttgtcaccgcatcgaaggcgatgtggtccgccgcaagggtgatatgctccgcccgcaggtctgccgcggcgtgctctgcatagaagtactgccgacatgcggcgttttgcagcagccgctctgtccagggatcgtcggcgttgcagacgcccacgtcgcagttctggaacaggatggccttggcgtcgcagtaggcttccatggtcttgtggaaatccaggtggtcctgggtcaggttggtgaaaatgcccaccgcgtagtggataccgtacacccggtccagcgccagagcgtgggaggatgcctccatcaccacatgggtgcagccagcggagcgcatccgggcaaacagctcctggagctccagggactccggcgtggtgcgctcagtgggcaccacctcatcgccgatcagatcctggttggtgccgatcaggcccaccttggcccccagctcctgttccaggatggccttgagcagataggtggtggtggtcttgccgttggtgccggtgacggccaccatggtcatgctgtctgccggatggccgtaatagttggcggccatcaccgccagggcccggcgagagttctccaccaggacatagggcacggagctgtcctccggcggtcgctcacacaccaccgcggcggctcccgccgccacagcctttccgatataggcgtggccgtcggtggcaaagccggtcatggccacgaagacgtccccgggtgccgtggtccgggagtcatagctgatatgggtgatctccgtctccatgtccgcggtagcggaccgcagggagagccctgccagcagcgttttcaaatgcattgtatgcacaccccttttgttcagtctggcagcagtttgccgtccctcattataaacaaggggatttgcaaagtatacggaggaaggtgccaaaaaccatgcagaacctgctttctcaatccaggacagagttgtcgccgaactggacggtcaccaccgtgcccgccgccacctccgtgcccgcagggagagactgggtaatggcgtagacattgccggagctggctgtggtggtaccggtgaccttcatgataagtccggcgttggtgatggccttgttggcctctgaggcgctcttccccaccacattgggcacggtgcagggggtgtccggcttctcctgccccaggtagaggatgatggaggcatttcccggcacgatggcgccgccggcgggggtctggtcggtgaccgtgtccccgtcccccacagtgcggaaggtgaagcccaggtcagccagccgatcttcagcggcctccctggtctgtcccaccacattgggaactgtggtgtcagcgcccaccagctcctcggcggtgtaatccggctcaacgcccagcagaggcaggatctcgctcatgatctggctggccaccggggccaccatggtgccgccgaacacggcggtgccggtcgtgcggctgggagtgtccatggtcagcagcatgatgtactgtgggtcgtccgccggggcgaagcacataaaggacaccaccacgtccttggtgccggttttatccgcagtgccggtcttgccgccgatgcggtagcccgtcacctgtccgttgcggccgccgccgtcggacaccacccactccaggcactcccgcaccttggcggaggtctcctcactgatgacctgccgcaccgctgtggtctcgtgctgactgaggatgttgccctcgtcgtccagcacctgttccaccagatagggggtgtacagatagccgccgttgatggtggctgcctgggcccggatcagctccaggggcgtgacgttgaaggtctgtccgaaggagtaggccgccagggaaaccacgttggagttgaagctgtcctcattggcaaagatgccctccacctcgcccggcaggtcgatgccggtggtctccatgaggccgaaggacttcagatagcggtagtatgcctccgtgccgatcttcaggcccatggtgacgaaggccgggttgcaggagttgccggtagccaccttcagggtctgggtgccgtggccggcccgcttggaacagttgatggcttttccccagccctccacgtggatggagccggtgcaggtgaaggtggtgttcatgttcaccacgccctcctccagggccgtggccagcgtgatgggcttgaaggtggagccgggctcgtaggtgtcctgatagcacttgttccgccactgcttatactgagcgttggcccgggcatccgacagggccttgttatacttttcctccgtttcataggttccacggttctgctggatctccgccagagcggcatccaattccgcctgaagcccctcagtatagatggtggaaaagtctcccggatcatagttgggataggaggccatggccacaatgccgccggtgttcacgtccatgacgatgccggtgccgccgttggccgcgtcgtacttatccagcatactctccaggcccttttccagggcgtactggacgttggtgtccagagtcagcaccaagctgctgccattctccgcatcaaacatctgctcgccgccgctgaacagcaggggtgtgccgttgacattggtgggcgtgacagtcaagccgttgctgccgttgagcacgtcatcataggacgcctccagcccgtaggcgcccacattgctagcgttgacgaaccctatcacattgcctgccagagagccgaagggatacagccgcttggtgtccggcgtcagatggataccctggagagaggtaggccgcctgctgggattggaaatcaggacggtgttgccgtcctcgtccaccgtggtgagctggttcccctcatcgtcgatctctccgttgatgaaccggcggacctcgtcggccacgtcctggtctaccttcttctttatcacttcattctgtcggttggtccgccccaactgctccagaatggtctcctcctccacatccaggatgcggctgaggccccgggcgatgtacgcctggtccagtatctccggcggtgtgtatgatttcccattttcagcggcagtctccgcagcctcctcaatagcctgctcctgtttctccacccaagattcaatggccttggggtcaacaaagactgtctccgtggagtaggagatggccatgatctcgccgtttttgtcgtagatcgtcccccgggaggcgctgatgaccatgctgtcggtctgctggctcaccgcctcggccttcagttcgtcgtgccggttgatctgcagatcgtacagcttccaaaacagcactgtgaaggaggccacacccaacagcagcatgatgagcatcgtcctgccccggattacctggttcgcccggcgggcggcgtcgctctttcttctgggtctgtccgtcatgcctgttctcctttcggaacgccggggccgcttcccccgtccatacgcaataccaaagcaaggagtaagaaggcccccttcttactccccaccgttcgcttcattatagtgcggccgtcactcgaaatattccaccacggcgtaaatcccgtggttcagcgaggtcagcaaacggctgagcagattggactcctcctgctgatagaccacggcactgtcgccctccgacagatcgatgtaatagatctggctgctgctgggcttgctcatgcccgccgcctccgccacctctttcacggtggccaggtcaaacatctgctcgtgctgggcggtgagtgtgacgttctccgtctgcagctcctccagctggttctggagggacaccacctcgtcggagatgatcgtcagctggatgtagcccatcagcaccatcactgcaaggccgatggccgcgcccacgcccaaaacggagaggacggacaccttctgccgctggcgcacctgcgccttggagaggctccgcacccggggcttcgccttggggacggcctctaccgccgtctggtgacggggagcctctccggcgtgccgaagagcgcgctcccggacttcccggtccaggtcgtacgccaagtccccatataccgcgctgcggctgttgtaccgcagttcccgcgctgctgccaaagaaggtccctccttttgctccgccataccggcacggagccgttctcacacacattaacaccggatggtcccggtgtggtcaaaggtcaaagccgcacttttccgccacccgcagcttggcgctgcgggcccttggattctcctccagctccgcgccgcccgccgtgacgggcttgcgggtcaccagccgcacctggggctttttgccgcacacgcacaccggaaactccggcgggcagacgcatccccgggccagctccgccagcgtccgcttgacgatccggtcctccagagagtggaaggtgatgacggccaggcgaccgccggggttcagcccgtccaccgccgcccgcagcatggggggcagggcatccagttcaccgttgaccgcgatccggatggcctgaaagctccgcttggccgggtgctgcttctcccgcagagctgcgggaggcatggcgctcttgatgatctccaccagctccagggtggtcttcacaggcgcggtctcccgcgcccggacgatggctctcgcgatggcgggggcgtaccgctcctcgccgtattcaaacaggatgcgccgcagctcctcctggctccaggtgttcacgatgtccgcggcgctcaggggggcggaggtgtccatccgcatgtccagcggggcgtcctgcatataggagaagccccgtgaggcgtcgtccagctggggagaggacacgcccaagtcaaagagcatcccgtcggcgccgctgacaccgcaccgggacaggacctccttcaattccgaaaagttgctgtggatcagcgtcacccggtccagccagggggccagacggtcctgcgccgcgtcgatggcggcctggtcccggtcgatgcagatgagccgcccggtggtcagccgcccggcgatctcccgagagtgtccggctcgtcccagggtgccgtccacatagatcccatcggggcggatgttcagtgcttggatgcaggcgtccagcagaacaggcttgtgcgtgtattccatcggcactcacccgcggctgcgccggacacgggccagggcgtccatggccgcggccatatcgtcgctctccagcatccgctgctcccgctccgtccaggtcttctcgtcccagatctcggcgaaggaattcaatcccacgatggtggcggtctttttcagtcccgcgtgggcccgaaggctggcagggatcagcacccgcccctgggcgtccggctcacactggacggcgttggcgtatagcagcgtcagcgcccgggcctctgtataggagaggtcgtccatctcctcggacatctggtcccacttggcctgagggtaaatggtcaggcagtgctccgcgccgatggtaatgtagaacgtgtcgcccagggcctcccgcatggcggaggggatcaccagacggcccttggagtcgatgctgttgttggattttcccaacagcctggccacggttgatcccccctttcccgcgttttttgggtctggatggggtctctttggcacttagtctctacttttacccacttttccccaccacatgctctgagtataagcgaaattggccgggattgcaagcaattttttccgggaaaaccgccgctaagaacgccaaattatggcatttttcggccaaaatcgccattttaaaacagatgttcgacatctcttcgacaagtttacgtaaaataaaaaacaccccatgacgcaagaacttgtgccatggggtgctttttttcattttctccgcaacatctagagtattccaaaaaagtttcgccaaatcctttggcgtttttcacaaatttttaagattacggttgacctgcggcatcactcctcgccgccatcctcctggggcagggtcctgccgtccagcttgtcccgctgctcctgcattttggcagcggaggcactgcggaaccgcacccgctgctgcttcacctcatccagcgccatctgcaccgcctcctccgtgcgggccagggcgtcctcggcatactcattggtcacctggtacaactggcggcagcgctcctccgcccgggccaccatctggcgggccttctccttggccgcatagagtacctcgctgtcggacaccttggtcttggcatccagctccgcctgacgcatcatccggtccacgtcccgcttggcatcctccacaaacttgtcccgggcggagagcagctcctgggcgcgcttgatctccaccggcagctgggcccgcagctcgtccagcagatccagcagctcgtcccggtccaccatgctcatattgggtttcagggccggggacttggcgtcctcgatccgctcgtacagcatatcgatcaaacggttcacatcatttgccatgggactcatccttccttcttttccgtcatctcccgcaccagaggcacgatggacgcgggcaaatagttttcaagcggctggtgatagcggatcatctcccgagccatggaggagctgaagtgctgatatgccgcgctggcaggcagcagcagcgtttccagctccggatggatcccccggttgatgagagccatctgatattccacgtcaaagtccgtggtgttgcgcacgccccggacgatggcggaggcatggtgccgcaccgcgaaatccgccagcaggcccggccacagctccgcctccacattgggcaggtcctccaccgccgtccgcaccagctggagcttctgctccggtgtgaacatctggtttcgcttttcagcgttggggctgacacagacacagacccggtcaaagcaggcagccgcccgccggatgatatccaaatgccccagggtgatggggtcgaaagagccggagcaaatcgctgttctcatgggggtcattcctcgttttctcggtctccgccccggcggatcagcgtcagggcgatcctgccgtaacggtaggtgcggcgcacccggtagggcgccgcaggcgccggaaggctccggtccgccgggtgttctgccacaattataccatggggattgagaatgtcaaacgctgtcagatgggcgacggcgggctccagcagccccgcctcatagggagggtccagaaacacgatgtcaaaccgctcccgcagtgaccgcagaaactccatggagtcccccgccactacccgggcccggtcctggagctccgtcagcttcaaattctcccgaatcagcttcacggcgtcggcccgccggtccacgaacacggcagaggcggcaccccggctgaggcactcgatgcccagctggccggttccggcgaacaggtccagcacccggcgcccctcgatgtcgaactgcagggcgctgaagagcccctccttcacccggtcggtggtggggcgggtctccgtcccttccagctccttcagccggcggccgcgggcagtgccggtaatcacacgcatggtttttcctcctctcggtgcctccggttctcgcgggcgccggagatcaggtacaggatcagccccgtccagacgaagccgaacaaaatggcgtgggtggcggtgaatgcctctccatacagcgccacggacagcagcagctgcatggtggggttgatatacatcagaatgccggagagggtcattggcgtggttttcatgccggcggcgaagaacatcagcggcacagtggtcaccacgccggacaccggcagcagcagccactgccaaccagagaggaccccggcggcgccggtgccgtgggcctccatccagaagatcagcaccagggcaaagggcgccagggtcagcgtctccacaaaggtggagaccgccgcgtcggaacggacctgcttcttcagcgccccgtaaacagcaaagctgccgccgatcaccagggcgatccaggggatctgccggtagcggatgacagtgattaccagtcccgcgaaggtcaccgccaccgccagccactggagctttgtcagccgctcccggaacaggaccgtccccaacaggatcgccaggatgggattcatatagtaggcgaggctggagtcgatcatgtgcccgttggccaccgcccagatgtagacgccccagttgacgcagaccacgcagcccgcagcggccagcagcccccactccctccggtcccggaacgcggcccgcacaccggccagccggtcccgccgcagcagcaggatgcctccggtgagcaccatggaccacacgatgcggctggccagcacatacagggaatccacctgggccagcagcttccagaagatgggcagcaggccccagatgacatagcaggtcagcacatacagcgggcccttgtttttcattgggtcgctctcctttcccctccagccttcacctctgtggccttcagtttctgaaaaatcccgtgatttgtctattttacggcaagccgcggaagatttcaatagctttccgcgccggagccgggtcttttttagacttgtactttcacggggaatcgtatataataaggttctcaaagtacaggctgtggacagccgctgtccagagcaggcggcccgccgcccttcgtgccaaactcctgggaaagaaaggacgttctcatgattcaattcaagtctgaccacggcgatatcaccgtcagcagcgccgtcttctccaacatcaccggcatggcggccaccaactgcttcggcgtcaagggcatggcctaccgctccatgacggacggcctggtgcatctgttgcgccgggaggccatgagcaagggcgtcagcatcacttatcacgacgacaactccatctccatcgagctccacatcatcgtggaaaacggcgtcaatctccccgcggtctgccgctccatcatgaatgaagtgcgctatgtcgtcacccggaacaccggcgtcaccgtcaaggacgtggacgtgtgcgtggattccatgaccctgtgagggaggaacgagacagatgaacgaacaaatcaccggcgcactgttcaagcggatggtgctccacggcgcagccgtcatcacggcccagaagcaggccatcaacgacctgaacgtctttcccgtgcccgacggcgacacgggcaccaatatgtccatgaccatcggcaccgccgtgacggagctgcgcaagagcgagcccgccactgtggagcaggcggcctccgtcactgcctccgccctgctgcggggggcccgcggcaattccggcgtcattctctccctgctgttccgaggcctgtccaaggccctgaagggccgggagactgcggacgccgccgctttcgccgccgccatgcaggagggtgtctccgccgcctacaaggcggtgatgaagcccgccgagggcacggtactcaccgtctcccgtcttgccgccaagcaggcggtggacacagccgccgccggagagacggacctggagcgggtcctggaggacgccatccgagtgggctatgccgccctggcccagaccaccgagatgaacccggtgctgaaaaaggccggcgtggtggacgccggcggcaagggctatctcctgatcctggacggcatgctggcggaactgcggggcgagcccatgcccgagacggaggctggcgagtccagagaggagaaggcagacttcgccaccatggcggcggaggacatcaccttcgccttcgacacggtattcatcgtccgcaaggccatggccgatatctcgctggagccgctgcggacatatctcaacagcatcggtgacagtctggtgatcggcgaggacgacgaggcctttaaggtccacgtccacaccaacatccccggcaacgccctgaacgaggcccagaaatacggtaccctggagctggccaagatcgagaacatgcggacccaggcggacgacctggccgcgggcaagcacgtccagagcaccgatgacctggacgcggtggaggcggagctggagtccgtccccgtggaagaaacgcccgccgtggcggcgccggagaagccctacggctttctggcggtgtgtgctggggacggcctggccgccgtgttccgggacctgggggccgacggtgtggtgtccggtgggcagaccatgaacccctccaccgagagtattctggagggcgtgaacaagatcccggcggagacggtgttcgtcctgcccaacaacggcaacattattatggcagcccagcagtgtgccgccctgacggagaagcaggtggtggtgatccccaccaagaccgtgccccagggcatcaccgccatgatgaacgtggatttcgacgcgccggatgcccagaccattactgacgccatgacgggaagcctcagctccgtcaccacggcccagatcacatacgccgcccgggactccgacttcgacggcttcgccatcaaggagggcgattatctggccctggaggaaggcaagctcttcgacacggacggttcccttgacacgctgctccacaagctggcggaggacgccgccgggcgggaggcctccttcatctccctgtacttcggcgaggatgtgcaggaggcggacgctcagaaggccggggccctgtttgaagaggtgtgtcccggtgcggaggtggcggtcctctccggcggacagcctgtgtactattatattatcagcatggaataaagcatcaggaggtgtttctgtttctttcaagcagagacacctctttctttttgaaaaggaggcgccctatgaagacctggaagctcctgctgctggccctggtgcccggcctgtggggctggctgtgcaactggctcaccgccgtgtccctgaacggccctgccttcctgtttacactggcattttatatccaggtgcctgcagccatcgtgttctgcctctggctggggcatctgtgcggccgctccgaaaggagctaccccgcctgcctgctgctgacccagtggcccagcctggtgagctttgccctgtacgtgtggcagttccactttgtctccagtgaggcccggagcttcctgctggcggggctggggcagtaccccggcctcccgctgttttccctggcctgccggctggtgatccccttttccaatcacagctgggggccgccggaaaccttggcggccaatgcgctctccctgctgatgctggcggtgctgttctccctgggcttcctatggggccggcggaggcggtgacccggccccctctcctgaaaaatgccccagcccgggccgtcaggcccgggctggttctttaatgcctgtaccagatcagcatactgagttgagtctcctccgtccccgggttccggtagcggtggggctggtccgccgggaagcgcagggagtcgccggtccggagccggtaggtctcccccggcaggccgatctccgcctccccggcgaagacggtcacatactcctccgtccccggcagatggggctgggcctccagtgcgccgccggggagcatcacgatccgataggtctcgaacccccgctccccgtcaaaggggaaggccgggcagttccggtacctccccccatcctcctccagaatcggcgcgtcatcgccccgcagcagcaccggccgctcccgggccggctccaccagcgaggtgaaagacaccttgtaaccgttggcgatcttccacaccatggagatggtggggttcacgtcccccttctcgatctgggccagcatactgcgggacacccccgttagacgggcggcctcgtccagcgtcagccgcttctcctcccggagccgccgggcgttctccgacaccactgcgttgatctccaaacgtttctcccctctctattgacaagatattagatgaatcatataatatacaggaaatccagtatcttgaaaaaattccattggatattgtactgcacccggaaacggtccgtcaagagcggtgcggtagtttcccggcgcggcaccaaaaggaggagtcgtatgcgcagactgagagccgccgcactttccgaggtggagctggctatggacatcatcaaccaggccaaggcccacctgcgggcacaggggatcgaccagtggcagacgggctatccggaccgggactgcctggaacgggacgtccgaacgggaaaagggtattttctggaggaggacggcatccctctaggctacctctgcgtcgatttcgacggagaaccggcctacgaccatctgaacggcacctgggcccgggaggagccctatgtagtggtacaccgcctggccctatccgacgcggcccggggccggggcgccgccggtacggccttccagctggtggaggacctgtgccgggatcgggggggccgggaatttcgggtggacacagacgcgggaaatcataaaatgcagcatatcctggccaagcaggggtttcagtaccggggcaccatccggttcgacaacagtgagaaaatcgcctatgaaaagctcctctgaccgccctccaccgctgaatcaggaacagccggcccccaccagggccggctgttctcagttttccatacagggttacagggccgccatctgggccgccacgctctcctcgcagctccgctgagcctggagggttttttccatcagctcttccagcgtccaccccagccgctcagccccggtcttgatgacgtcccgggagcagccggcggcgaacttcttgtccttgaacttcttcttcagggagctgacctccatgtcctggcagctcttgctggggcgcatcagcgccgccgcgccgatgaggcccgtcagctcgtccgcggcaaagaggaccttctccatctcctccgtgggctccacgtcagagcacaggccgtatccgtggctgcatacggcgtgaatgaactcgtcgctgcagccgatctccgccagcagctccggagcctttttgcagtgcgcctccggccacttctcaaagtccacatcgtggagcaggcccacggcggcccagaaatccgcgtcctcgccgtaacccagctcctgagcgtaccagcgcatgacgccctccaccgtcaggccgtgctggatatggaagggctcggcattgtacttgcgcagcagcgccagggccgcgcttctctcgggacatgctttcatctttgatcgctctccttttgtaaaatcagaccggggcagcatcccggggatccgggtcgccctccagggtgacgaagtagtcgtaatagggcagcaggaaggtgaagtcctgtctcaggcgctccacgatgtcccggctgaacagctcgtccgtcagcttgtcattgtgacagatggtgaagctcctggcccggtaccagggctccagcagtttggaaggggccggggccctggggcgcttgtagtcctccgtctccaggacaagttccttctggcggttcagcttccgcatcagcttctccatggcggcggggtcccggtcgatccgggcccgcagcttggccatcgtcagcggcttgggcatataataccccatgccgcaggtccacccctccggcatcagctcgaaccagaaggtggggtgggccgtccactcctccgagggctgctcgatagagaaccacaggctctccttataaggcccccggccgtggagccgccggacgtcccggtagatccgggtcaccttgcggatgagccccagatccggccgcttggcggcgatgtagtcatagagctcgtcccccagctcccgcatgggctgataaaagtgcgtcagataaatctccttgtgagcttcaaaccaagcccgctcgttgttgaagcggatgccccacataaagtccacagtctcgtctgtaaagccggtaaacatcccgttcctcccgctggatttcaaaatttaagatttagtataacacattttccggccatggaaaagaggggaacggcgttttttcggcgcccttcccctctttccgctcacagcgcccgctccagcagggccatcagctggtccgcctgacggtaggattcctctcccagctccttcagcagcctccccaggcaggggtctgtggtctcctcccccgcccgcaggtagttcatgccgttgcaggcctccacatggtaccgctcccgcagggcggggcaccagctatctatggaaatccgtccgctggccaccgccgggcggtagcagttcccagtgatgaggtagtaggccgtcatcagccgccgggcagctgcgcccgacgcgtttgccaaatcccgcatcgtcccccgggcgaaagccggtgcccgccgggcgaatgcctgataggtccgccggtctgccagctccacctcgatgaacccttcgatcactcccagttcctcctgcgccatggtgcccatgcagcaggggttctcctccgcaccgggcaggtgctccaagtcctcaccggccggcggctgggaagcccgcggtgcggcaccagaggccaggggcgccatcgcgggcaccgccggctcccgcaggtcgggatagggctccaggttgggggccacccgccgccagatctggtcgtatttccggaagtcataggtctccggagtatgtatggtctgttccatccaggtccctccttttctccccagtgtatgcgctttggaaaaaaacggttcctgttgcaaaaatcacacgtatgaaattcgccccagggttaaaatatcataggacgagagttccctttttcattgctttttcccgttgtttctgttaaaatagggaaactgcgaggattgatgccagcaaaggaggttccgattgtatgctggaattgaaacatatcagctacgccgtccgggagggcgacagtgagctggggatcttaaacgacatctccctgaccatcgacgaccaccgactggtggtgttcaccggtcccaacggcggcggcaagaccactctggccaagatcatcatgggtctggtgaagcccaccggcggccagattctgtggaacggtcaggatatcacggacctgggaatcacggagcgggcccgtctgggcatcagctacggcttccagcagcccccccggttcaaggggctgacggtccgcaacctgctgaccatcgcctccgggaatgagaagctgtccaaggaccagtgctgccagtacctgacgaaggtgggcctgtgcgccaatgactatctggaccgggaggtggacgcctccctctccggcggcgaggtgaagcgcatcgagattgccaccatcctggcccgcagcagccagctgatgatcttcgacgagccggaggcgggcatcgacctgtggagcttcgcccggctgacagagacgtttgaacagatccacgccagcggcaccgcgaccatgattatcatctcccaccaggagcggatcatctccctggcagacgagatcatcgtggtgggcgacggggagctgcgccaccggggcacacctgaggagatcctgccccagatcctggcggacaccctgtccgggtgcccggtgctgacgaaagaaggtgctgctgtatgatggacacacaggtggaccgggagctgctggagaagatcgcggacctgatcggtaagcccgtgggggccttcaacattcgtaaggactgcggctgtgacggccgggtgtccacggagcacatcaagatcgacgaccggaccgacggccacgccggcatcgacatccggattctggacgggaccaagggcgagacctgccacatccccgtcatcatcaccaagtccggtgtggaagagacggtgtacaacgacttctacatcggcggggactgcgatgtggagatcgtggccggctgcggcatccacaactgcggcgaccaggagtcccgccacgacggcatccacaccttccatgtgggcaaaaactcccatgtccactactcggaaaagcactacgctgagggggacggcaggggcgagaagatcatgaacccccagaccatcgtgtatctggaggagggcgcctccatccagatggacacggtgcagatccggggcgtggactccaccaagcggtacaccaagatcgtctgcggcaagggggccgaggccgtcatcacagagcggctgctgacccacggccgccaggtggcggacagcgacatggtcatcgagctgaacggtgaggacgccaagggccgggtcatctcccggtctgtggcccaggacgagtcctcccaggtgttccgcccctgcgtggtgggcaacgccaagtgcttcggccatgtgcagtgcgactccattattatgggacaggccaagatcagctccgtgccggagatcgccgccaacgacaccgaggcccagctgatccacgaggccgccatcggcaagatcgccggggaccagctgctgaagctggagaccctgggcctcaccgaggaggaagcggaggaccggatcctcaagggatttttggcataaagacagaccgcggggcggctggccggagggccggccgccttttttgcttccccgcccccagagagggggctttcttccggaggcgccgcaggggcggcaatctgccgcccgggtggattcagccatgaggatggctgggcaatgcccggtccaaaagaaaaggccgcttttggcgcacgccggcgcattcgcgcctctgtgctgacgggggtcggcgtatcggtgcaagcgccgatttgggcttgccttcgggcacgctatcatcttctgcgaggtcgtgactgctgtcccgtggcggatggtgccgacagcgtcggggtgcaaggatgcattcgaccagcttctctttctgcgccttccgcttcgccaggcgctgcctgcttcttcgcgggagcgtgagcggcagcggggagaggggcagggggtatccctgtacctccccgggctggaggtttccccaagggcggcgcgtttccgtctctgactgccgcaagggactgccaaccttcccccgccggcggcaggagggctgcgcctgcgcaggccgacccgccgaacatgttttcttttccaccgggcgcggcgcattttctttttgatgtctcaaaaagaaaatggggcgcgcatcccctgcgggagcggaatcccccgcggccgccgttcggcggcccatccctctccctgccgggatggagaatttttttcaaatccgtgtaacgaatcccccgccagccggacatacctgacagagaggagggagatgcccttggccaacatggaagaaatttaccaggcccatgccaggaccgtctataaatttctcctctcccagtgccatgacgccgacctggcggaggagctgacccaggagaccttctaccaggccgtccggtccatcgaccggttcaacggctcctgcaaggtgtccgtctggctgtgccagatcgccaagcacctgtggtaccagcacctgcggaaacgaaaaccggaggagcccctgccggaggacggcctgccgggcccctccgcggaggaggacgtgctcacccggcagggccatctggacctgctgcggcagatccatgccctgccccccagcacccgggaggtggtgtacctccgggccttcgggggcctcagcttccgggagatcggggacgtgctgggacggacggagacctgggcccgggtgacgttttaccggggcaaggaggcactgcggaaaggaggagcagaccatgaagaacattcctgaattatcctgcgccattgtggaggacctgctgcccacctatgtggagaggctgacctcggaggaaaccaacatggcggtggaggcccatctggcgtcctgccccgcctgtgcggccaagcggaccgccatgggggcgaaggaaacggaagcggcgggtcaaaacgccgaagagaccgcccgggaggtggactatctgaaaaaggtgcggcgcaggaaccggcggagagtatggctggcggtggcctgcaccacgctggtgctggcggcagtgattcttacaaaaatcttcatcattggcgggccgggacaagccaatgatgtgggggttcgcctcgtggaaattgtggatggggacaccctgtctgtcaatgtggactgcctgtatgctgtcaatgccttctacggctgggaacaggatgagacagaagatggggttgtttctttcaccgcccgtgaagcgagagcctctttcattcacccaaacgatctagtagaccttcgggtcccactggaggggcttaaggaagtctgggtctgtggcaggctggtctggcagaacggcaccactattcttgaatccacactgtggatctacgacgcccgcaccccctatgtaggcgacgccactgccgtggggaacctggtccatgagatcggcctctggctttccagtatggagctcccctataactacaccatcagcctgcaaaccaccagcgagccctatggcctgaccattcacttcgacagcgtcaccgctcatgtactgggtgtggagcgcgacatcgacaagcggatgtatgccatcgctccctccctgctggcgctgatcggcaacctggggcaggtgcagtggacctacgccgccccggacggcaccgcagtgacccgctctgtgacactggaggaagtggaccaggccctgccggattggatcgaagcctacaatctggatgccggcgcggattggactgccccggagagtgtcaaggattacgccacctcaccggcagccctgcagcagctgctggacctgacatgtcacggcttctatgtggtcacggaagaagatggaaccaccattttcaccccgcaattctaaaacagcgtcagaagtgccccgtctcaaaggagacggggcgcttcttttgtgcaaatgaagccggctcattcaattcccttgccgttgttccacttccactcccggatctccggcaggtccacgccgtgatccttgatatactggcggtgctccaccagcttgtcgttcatccgctggaccagataggccccccggttacccagggagtgcagccgctggaccacgtcgatcaccagatggaaccggtcgatatcgttgaggacccgcatgtcgaagggcgtggtgatggtgccctcctccttgtagccacggacgtgaagatgcttgttgtgccggcggtaggtcagctcatgaatcagcgtggggtagccgtggtaggcgaagatgatgggcctgtcctgggtgaagagcatatcgtactccatgtccgtgaggccgtggggatgctccgtgtggggctggagcttcatcagatccaccacgttcaccacccggatcttcagctctggcagctccttccgcaggatcgtcaccgccgccagcgtctccagagtgggcgtgtcgccgcagcaggccatgaccacgtccggctcctccccctggtcgttggaggcccagtcccagataccgatgccctgggtgcagtgcttcaccgcctggtccatggtgagccactgggggcggggatgcttgctggccaccatgacgttcacatagttccggctcttgatgcagtggtcgaacacgctcagcaggcagttggcgtccgggggcagatagatgcgcaccacgtccgccttcttgtttgccacgtggtccaggaagccggggtcctggtgggtgaagccgttatggtcctgctgccacacattggaggagaggatatagttcaaagaggcgatatcctgccgccagggcagctcgttgcaggtcttcagccacttggcatgctgggcgaacatggagtccacgatgcgaatgaatgcctcgtagctgttgaagaagccgtggcggccggtgagcaggtagccctccagccagccctcgcacatgtgctcggacagcatggagtccatcacccgaccgtccgggtccaggtgctcatccgggtcctcattctcgtaccgctcccccaggaagcggcggccggtgacctcaaacaccggatggagccggttggaggccgtctcgtccggggcgaagatgcggaaattccgggattccaggttcagcttcatcacatcccggacgtagccgcccagcaccagcatgtcctgggcctccacctcgccgggggcgggaacctccaccccgtagtcccggaagtccggcgtccgcaggtcccgcagcagcaggccgccgttggcgtgagggttggcacccatgcgccggtcccccttgggggcgaaggagcgcagcagatccaccggccgtccctcctcgtcgaacagctcctccgggtgatagctgcggagccactgctccaggatgggcaggtgcttttccgtgtcagggcccatggagatgggtacctggtgggcccggaagcagtcctccacggggttgccgtccacctccttggggccggtccagcccttgggggagcggaacacgatcatgggccagcgggggcgggtggtgtctcccgtggtgcgggcgtgctgctggatgcgcttgatctcccggatggcccagtccagggtggcagccatctgctggtgcatcttctccggctcactgccctccacaaagcggggctcccagccgcagccgcggaagaactgctccacctcctcatgggagatccgggagaagatggtggggttggcgatcttgaagccgttcaagtgcaggatgggcagcaccgcgccgtcagtgatggggttcaggaatttgttggagtgccaagatgtggccaggggcccggtctccgcctcaccatcgcccaccacgcaggcggcgatgagatccgggttatccgccacagcgccgaaggcgtgggccagagaataccccagctcgccgccctcgttgatggagccaggtgtctccggcgccacgtggctgggcacgccgccggggaaggagaactgcttgaacagtttccgcatgccgtcctcatcctgggtaatgttgggatagacctccgtataggtgccgtccagccagtcctgggccaccatggcgttgccgccgtggccggggccggagaggtagatcatgtccagatcgtccttctgaatgacccggttcaggtgggtgtagatgaagttctgccccggcacggtgccccagtggcccacgatggtctgcttcaggtcggaggcggccagtgggcgcttcagcaggggattgtccaacagatacagctggcaggcggagaggtagttggacgcccgccaccaggcgtcgacctgtttcagctgcgccggcgtcaacggcggctttttagacaggcgtgtattggttttaggctttgctgcaattgtcttttgagaagtccgtggcatattattacctcctttttcttgttcctttcgcaattagtatatctcttatttgaaaaaaggcaagcgaaattgaaaataattttatcttaatttacaattatttcattttagcattcctcttttaggcgttttacccttattctatcccttccgccgcgcttgcgtttttccgccggatgtgctactgtaacggcatggaaacgtatgaactcatccgctccggccggaagaccctggccctggagatcacaagggactgccgcgtggtggtgcgggccccccgccgcctgtcccaggcccgcatcgacgactttgtggccagtcacgccggctggatcgcccggcacctggaacagcagcgccgccgggctgccctggccccctccgcccccacccaggcggagatcggcgccctgaaggaaaaggcacggcaggtcctgccgccgaaaatcgcctattacagtgagaaaatgggcctgttccctactggcgtcaggatcacctccgcccgcacccgctacggcagctgcagcggaaagaacagcctgtgcttctcctgttttctcatgaactgtccggatgcggccatggacctggtggtggtccatgagctgtgccacatccaagtgaaaaaccacgggccggatttctacgcgctgctggagcaggtactccccgactggcgggagcggaagaagctgctgcgataacgtgtaaaagcacaaaccggaggcatggcttggccgtgcctccggtttatgtctgatattacgcccccaccgacgtgagccagaccgccgccagcagcaccgccagcagcgctgcattccaggcggtaaacaccgccagataccgggcggggcgggcccccggggagcgaagatacagcttgagcgtgatcaaacttgctagggatgctaccggggttcccagaccgccgatatccacgcccagcaacagctccctccaattgtccgtgaagcccgacagcagcaccgccgccggtacattgctgatgatctggctagtgagcacgccggtcagcaaggtgctgcgctccagcagactctggagaaacccatgaacggcaggcagccgtcccaggtttccggataccacgaagaagcagatgaaggtgcacaacaggctcacatccagcttccgcagcagagcaggttccactgcggccagcgtcccaagcaccagaaccgtcagcagaccatagggcagaatgcggaacaccgtcagcaggcacagcaggaacagtgcgccgtacagggccagcttcccgggctgccgcaggggctgcgggtgcaccggagggatctggagatccctgggcaggaccggcaaggccgccgcggtcaggcaggccagactgatccccgccaggggcagcaccaccgggaaaaaatccccggcagagagtccataggccccgtaaaggtagaggttctggggattgcccaccggcgtggccatgctgcccaggtttgcggcaatggtctgcagcaccagcagcggcaccgctgcggcccggcagtccatctggtccagaagcagcagcgcaaagggtgcaaaggtgataagagcgacgtcattggtcacggccatggagcagaaaaagggcagcagcaccaggatcactgccagggccctgggtccggtcccccgggacagcagatggccggccagccactggaacgccccgcaggactggaagcccgccaccaccgccatcaggcacagcagcaggcatagcacccgcaggtcgatgtagcccagataggcggcgtccggcggcaccaggaccatggtggccagtgcgcagagtgccgccacggtcagcaccgcctcccgcttgaaaaatgccaacagtctcatttctgtccctccaaaggctgacaaaatccgcgttccaccatatcacactttttccgggaacgcaaacctttttggggaggctgtgctgttctaccgcaggcagcccgctagccgccgggacagcatccacgccaaggccagcttcaccaggtccggcaccacaaaggggaacacgcacattcccagtgctgcccacaggccgatgggccccgccgcccgggcataggccaccaggaaccaggcggtgccgaaggcatagcacaccagcaggcccagcaccatggccgcggccgtcaccgccggacggtcgcccagccgggcggtcatgccccaatacagcagggccgaggccagaaaacccaggatatacccgccggtggtgcccagcagaacgcccgggcctccctgaaagcctgagaacaccggcaggcccaccaggcccagcagcagatatgccaggatagccaatgtcccccgccggccccccagggtccccagggctgcaaacacgccaaaggtctggagcgtgaacggcactgtcaggggaatgttgatccaggcgcacaccatcagcagcactgcgaacagggcggcgtacgccaggtccaccgtccgcagccgggtcctagtcttggaagtctgtttcaaatcagatcgctcctctcctgtgtctggaggaagtatagcaaggctttccataattgtcaaccttaaaaaaaataaagtttacaatatagataaaaaaccaggaggcagtgcctcccggttcagcagtccgtgtgggtgcagatctcccgcaccttggcctgaatagctttcaggtccacaaaggtctccggccgcttctccacatcccgcagcagcgcggagggatggtagatagccgtcatctggacgccgccccgctggaaccacttcccatgctcggcggtgatcttgaagtcctccttgatgatagccttggcggcgatccggcccagacagacaatcagcttgggccgcagcagcgccgtctgccgccggagccagccgatgcaggcgtcctgctccacattcagcgggtcccgattcctgggcgggcggcacttgacgatgttggccacatacaccttcgtccggtccaggccgatgatctccagcatatcatccagcagcagccccgccggccctacgaaggggatgccctgctcgtcctcccgctgaccggggccctcccctaccagcaggatctccgcgtcccgggcaccgtcaccgaacaccacgtggagccgggtctccgccagggcgcagttccggcattgtccgcaggcctgctccagcgcctcccaggtatccgccatccgcctccccctccttcgtgcctctctccggggcaccacaccggcggcggatgcccctcggccgcccagccaaatggcagcggcctctttgcggccattgtaacacaaaatcttccgccgcgcaatgaggtatgaatctcttccgtccggacagactggacagggagaggagggggacgcttgtctctgtggctatggacattttggacatacagctttctcggctatctgctggaacgggggtacgccatcgccacccacgcggaccggcaggcccggaagtgctttctgctgctgcccatgtgcccggtgtacgggctgggggccctggcggtgctggccctgccggaatcattgagcggcagcttctggtctctggccctgtggggcggtctggcggccacagcagtggagtatgccgtacacgttctctatgaccgtctgctgggtgtgcggttctgggactactcccaggtccggtggaatctgcggggccgggtctgcctgcccttctccctggcctggagcctgctggtggcagcagggctgccggtgatccaggcggcgatagccccggcgctggccgccgtgccgccaaccgccacctatgccgcgctgctggtgttcaccgccgacacagtggtctccctccagctgctgcgccgggcaggagatcccgcagtgctgtctctgggaaatctgcgggctgcgtaagaagccgggcatggggaaacgtccatgcccggcttccttttgcgtccggccggtcactgttccggcaggtgggcctccagccagtgcgccacgtccgcatagaccttctcccggcccgtctcctggaggatctcatgccgcaggccctgataaagcctgatctccacgtcccggacaccggagcggcggaagctgcggtacgcccgccggacacccttgcccatgtcccccaccgggtcgtcctgcccggagaggaagaggaccggggtattccggttcatccgcttcaggttttcttgcttctcaatgcaggcgatcccccgcagcatctcccgaaagagtccgatggtggggtcccctccgcagaggggatccgcaagatactggtccacgttctccgtgctggcggagagccagtcgtatcccgtgcggttgggggcaaatttctgattgtatgcctcgaaggccagcttgttcaccaaggggctggaatggcggtcccccacctttctggcctcccgggcggccaggacgcggcccgccgccaccagcgccgggggcatctgccccgtgcccatcaggatggctccggccacggtgccggggtagcggatcagatacgtccgggccaggaaggaccccatggaatgccccagcaggaacaccggaaggccggggaaccgctgccctgccagctcccgccgggcatagaggtcctgcaccgcccagtcccagctgcccctgggtccgaagtacagccggggcgcccccgccgccacggagagaccgtgccccaggtggtcgtggcccgccacggcaaagccccgcttcgtcaggtaggccgccaggggttcataccgcaggatgtgctccgacacgccatgggagagcaccagaaccgcccggggtgccatgtccggcgtccactccaccgcatggatgccggtccgcccgtctgcggaggggaaggtaaattcgtttctcaccatggaaaaatcatcctctctgtgctatactgtgtgccatcaggcgtaggatgcctgctttctgggtcgatgataccacacttccgtcacaaacgccagaggaggccgcattcatggaaacatacatcgctgccctggaccagggaaccaccagctcccgggccatcctgttcaaccgggccggggagatcgtctcccgcgcccagcaccccttccgccagatctacccccagcccggctgggtggagcacgatccgctggaaatctgggccacggagaagcgggccctggcggaggtcgtgggcgccgcccacatcgaccccaagcggatcgccgccctgggcatcaccaaccagcgggagaccaccatcctctgggaccgctccaccgggcagccggtctgcaacgccatcgtatggcagtgccgccggaccgctcccctctgcgacacgctgaaggccgacggcctgggccccctggtggcggagcggacgggcctgctgatcgacgcctacttctccggcaccaagatccggtggctgctggaccacgtccccggcgcccgggaacgggcggaacggggggagctgtgcgccggcacggtggacagctggctcatctggaacctcaccggcggggcagcccacgtgacagactactccaatgcctcccggaccatgctgttcaacatccacaccctccaatgggacgaggagctttgccgggcgctgggcatccccgcttccctgctgccggagccgctgcccaactgccatctctacggccgtgtggccccggacattcccggactggaggatctggcgggcatccccatctgcggcagcgccggggaccagccggcggccctgttcggccaggcctgcttcacgccgggccaggcgaagaacacctacggcaccggctgcttcacgctgatgaatgtgggcggtgagccggtggcctcccagtcgggactggtaacctccgtggcttggtccctggggggcgagactacctatgccctggagggcagcgtgttcaacgccggcagcaccatccagtggctgcgggatgaactggggctcatctcctccgccccggagtgcgaccggctggcggagagcgtgccggacgccggaggcgtctacgtggtgcccgccttcaccggcctgggcgccccctactgggacatgtacgcccgtggcaccatcgtggggctgacccgtggcaccaccaaggcccacattgcccgggcggtgctggacgccatcgccttccaggtgacggatctggttcaggccatgaacgccgacgccccttgccccatcaccacattgcgggtggacggcggtgcctccgtcagcgacatcatgatgcagacccaggcggatctgctgcgactgccggtggaccgacccgcccaggtggagaccactgccttcggcgctgcggccctggcggggctggcggccggagtgtggggcagtctggaggaagtggctgccctgcgccgcagccagcacgtatttctgccccagcggccccaggccgcctgcgaggcccagtaccgcctgtggcgccgggcagtggaccgggcgttgcggtggattgaaaacgatgtgtaaacaaatccggaatttgttgcgttcagtggaaaagtgcgctatactgaagccaagtgagaggcatgaaacggaaatgaagacgatcagtgcggcgtttggtccgcaggtgaaaggagtttatcgacatggctttttttgaggatctgaccaaaaagacaaaggacctggcctacgtggccgccgacaaggccaaggatgtggccgccgtggcagcggataaagccaaggacgcggcggagctgacccgcatctccatggccatcgccggggagcagcgggagatcgacaagaactaccgcaccataggcgagtggttcgtcagcgagtacgagggggagatccccgacgccgtccgggacctggtagaggccgtcaacacctctaaggccaagatcgccgagctggaggccagcaaaccccgtaaggacgatggcgctgaggttgaggcagcggctcccgcccagaagatctgccccatctgcggcgcggcctctgacagcaagttctgcccccagtgcggcgcccctatgggtgactgagttcccgccataacaaagacaagcccgccggcctgatggccggcgggttctctttctctttcaaaaggtcaggcgcatgtcataccataccacgccgccgtgggtggactgggagacgccctcgttcacaaagccgaatttttcgtagtagtggaccagcttgtccttacaggtgaggacgcagccgcgtcttccctgggcccgggcgtcggcaatcacccgctccagcaccgctccggcgcagccccggcagcgataggccggcagggtgttgacgccgaagatcatctgccaggtgccgtccttgtcgtggagggcggcgttttcatacatctcgtcccggagcgtgggctcgtcggtggtcatgccgtccacaaagctcaccaccgtgccgtcgtcctcctccaggatccagaagtggtctgcgtagtaggccagacggtctgtgatctccgccgccgtggcagcctccgctggtgggaagcagtcggcctccaccgccgccagggcagccgcgtccgccagagaggcagtccgaatgtgcatgaaaaaatcctcctcatttcaaataacggtaagtcagcagcaaccgggcggtgccgttgaactggttttccagccagaagggctgatccgccgcgaaccgcagggcgtcccgctccagcagctggaagtcctgcccctccgcgtggagcagcaccgtgccggagaggctggtggccaggcacacgcagccgggcaccatgggctccggcgcgtaccggccgctgatgtacaggtccagaaagaacgtctcctgccgcaacacgtcgtcatagggcagcgagggccgcaacagcgccttgcccccatccagccgggcggccttgttgtccagctcccgcaggagcagcagcggctcgaagtcatcgttctccaacagcacctccgccgggacctttaatgccccggccagcttgcccagcagccccacagaggggttggcctccccccgctcgatctgccccagcatggagcgggacacgccggcctccgccgccagccgctccatactgagcttcttgctcttgcggatgcgcttgagattctcccccaccgcccgggtcagctccatggcgcgatctcctctctcggccaaaaaggccactatgttgcacaatagcggttctatagtatccggtttgtcggattttgtcaagaggaaagcgggacagccctgctgccccgccgggcaaatttggaaaaggacttgcaagcgaatcccaatcgtgatatcatcgatatgaaaaacaaaaatgcggcagtttccaggtgcgccaacacctggaaacctatgcaggtgatgatgcacctacacaacggccgaaaggccgcaccgcatgaattatgatacgacattccggcctttttgtaaagggcggcttttctcgttatccattcatgcctgtgttgcacaagaagtctcttcttacgccgtgtaggggaaaccctgcgtggcgtttttgtttttcacccgccgcctggaggcgccagcccccggggccggtgcggtgaaaaacagggagaggcggtatcccgcttccctgtgcagttttgagaaaaagggaatcctaaaaattattgcggaggagcggtggtatgattattctgggagatttgcagcttggtcacaaggatctggatacatggaagccaggtcccaacagcgcgggcggtgtcagtgtacagattatctttcaaaatgacacgcagaaaaccatcaaatacgtctactttgatgtggtcccctacaacgcggtgaaggatgcctaaagctgtaccatctccggcaagaccaaggccggactgaaatgtaccgggccgattcagccgggcaagattttccgggacgtatgttgggaaaatgtctggtacaactattccattacaacgctggacctggtcatggtggaggtcctctacatggacggcagctcggaaaagctcaccggagccaacatcaagtacggcgatcctcccggctgctacatagccactgcggtgtatggctcctatgactgcccccaggtgtggaccctgcggcgtttccgggatcataccctggccgcctcctggtacggccggaccttccttcatgcctactacgccgtcagccccacgctggtaaagtggttcggccggaccgcctggttccagaagctctggcggggccccctggaccggctggtggcaagactccgggacgagggcgtggcggacaccccctatcaggaccgggagtggtgaccccgaaaacaaatcctccccgttatcaaacggggaggatttttctgtctgtattgcgtttagacccgcttccagcttgcgccgcccttggtgtcgatgatctcgatgccctgggctttcaactcatcccggatgcggtccgcctccgcaaagttcttcgccttcttcgcctcgtaccgcgccagcaccagcgcatcgatggccgggtccccctcgccggtgacggtgtagccgctctcggtttgggtggtcttggcctgggcggcctccgcccgcttggccgccgccttctccagcaggcccagggacagcacgctgtcaaagtccccgatcagggccagcttggtggcgtcgttggtctttgccttcagcacgtcgaacagggccgtcacgcccatggaggtgttcaggtcgttgcccatctgctgcccgaacttctcccggtagggcttcatggcctcctggtccaccggaccgtccgccgggtctagggccgcgatgcgggcgatcagcttggtgtaggccgccgccgcgttgtccaggttctcccaggtgaacaccagcgccttgcggtagtggctctggaggcagaagtaccggtaggccagggggtcatagcccttctgctccagcaaggacacagtgagaaactcacccttggacttggacatcttgccgtccgaggtattcaggtgatggacgtggaaccactgggggcaccagggatggcccaggtagctctcgctctgagcgatctcgttggtgtggtgggggaaggcgttgtccacgccgccgcagtggagatccagatactccccattgtacttcagggagatgccggagcactcgatatgccaccccggataccctacgccccagggggaatcccacttcagggcctggtcctcgaacttgctcttggtgaaccagaggacgaagtcgttcttgttgcgcttgttgggatcctcctccacgccctcccggacgcctacggccaagtcctcctcgtcgtggtcgttgaagacgtagtaccgccccagcttggaggtgtcgaagtacacgttgccgccggcgaagtaggcatagccggtatccatcagcttggagacgatcttgatatactcgtcgatgcagccggtggcgggctggaccacatccggcgtcttgatattcagcctgcggcagtcctcaaagaaggcatcggtgtagaactgggcgatctccatgaccgtcttgtgctcccgcttggcgcccttgagcatcttgtcctcgccctcatcggcgtcggaggtcaggtggcccacgtcggtgatgttcatcacccggtggacatcatagccagtccagcggaggaacttctccagcacgtcctccatgatataactgcgcaggttgccgatgtgggcgaagtgatacactgtggggccgcaggtgtacatctccacgcggccgggggtgtgggtcttgaactcctctttcttgtgggtggccgaattgtacaggtacataaacactgctccttttacgtttccgaaccggcggattcctcccgccggctcttgagatattgttcatccatgagtttttccaaaaattccagacgggataaggctgcattcaacttttcctctacggggtcccggacgctgatctggtccacctcgtcggcgaaggtggcgatctttccggccactcggaccacatgggcggggacgcccacggcggtgcagtcctccggcaccgcgctgaggaccacggcgcccgcggcaatgcgggcgttgtcccccacggtgaaggggcccagtaccttggcgccggaacccaccatcacattgttgcccagggtggggtggcgcttgcccttgtccttgccggtgccccccagggtcaccccctggtagagcagacagtcgtctccgatctccgcagtctcgccgatgacaatgcccatgccgtggtcgatcaccagccggtggccgatggtggcgccggggtggatttcaatgccggtccagaaccggctccactgggagacgcaccgggccagaaagaatcgatgatgccggtacagccaatgggccacccggtggtacagaacggcatggacaccagggtacaggagaaaaatctcaagcttgctgcgggccgcggggtcgcggcgctggtaggcggccagcaggccgcccagtcgggttactcgttttgccatatcgaattgctccttgtgcggatcgggaggccatgaaaaacgcctcccgtaccaaggtacgagaggcgacggatcgcggttccactctcttttatcactcaaggaggcccgttgacgctggccagacggagggcttccacatcccccgcgctcccgggcgcacgttcacagctcccgccgcaggcgcgcttgcagccggtgacgcgccctctctgttctttggaagtgctgttactcttcccgatcaacacgctattccatttacgctttgtatcttaacaggatttgagagaggtgtcaagagacaacttcacgcaggaatatcccggccctgcgccctgcgccttgacagcgcacctgcttctccatacagaatatgccggaatgtggaaaccgtcccccctgtcaacaggcggttgacaaaattccaatggctgtcgcttgccaagcgcccgccttttcggtatgatgggaccaaagaaaaggaggggatactccatggaattgaaggaccgtatcgctgccgtccgcaaagcggcgggattgacccaagagcagctgggcgagctgctgggtgtcacccggcaggccgtcagcaagtgggagagcggccagaccacgccggacgccgccaccatcgccgcgctgtgcgaaaagctccatgtgtcggccgactatgtgctgttgggaaaggagccgggggagggacagaccgccgcctatgagccgccggacacctgtccctgctgcgggcggaaggtctccggcagcatctgtccggaatgcggctatcagctgcccaatcatccgccccgtgggccccaatacgctgtcgttgccacccgccccggctttgtgcagagcacggagtcgtctgcccagctggtgaaatactgcggcttcacccaagaggatgccaacaatgccatcgcccactatgtgaacaaccagtcccgcatcctgctgcagcggggactggttgacagtgcggcccagtacattgccgcccatctggaccaggatttcttctgcccgcagatcgtagtggactgcggggaatccgaggaggcgctgctttacaaacccaaagccttcgagacaccgtctcccgtcaagagtcaagagggcatcggcttctggggcgtggtgggtgctgttatcgttgccctgctgatcctctcgttcttctgatgatggaccggtcctttctgcggcggtacgccgcctccggcgcggtcatcgccgggctgtatctcctgaaccgctttcttttggtccccctgaccagctgccgcctgctggcttggcacggggcggacttcctggccggcggcttgatgctgtgcctgctgaacggtctgctgtgtctcacccgccggcggccagtggagcgggccctgcctgcctcgcttttcctgctggcctgcggccttttctgggaagtggtcacgcctctgtacctgccccgatccgtgggcgacctccgggatgtcctggcggtgtggctggggggcgtggctctgctgtccctctggcgggtgtgggaccggctggggcctggaagctgaacatgtcaaaacgcccccggcgggagtgacccgccgggggctcgtctgttgtcagagtcacgccgaggcgatgacatccttgttcttcacgaaatactctacgccagagtacagggtggtgagggtgatgacccacacgcagagcgtgttcaccatcggtggaatgggcaggaacatcagcaccacgcacaccatagtggcggcagtcttgaccttgccggaccatccggcggcgatgacccgtcccttgtcgctggcgatcatccgcaggccgctgacggcgaactcccggcaaatgacaatgagcagcatccaggcgggcatctgcccgatctccacgaaccacagcatggcggcggtcaccagcatcttgtccgccagggggtcggcaaacttgccgaagtccgtcaccaggttgtacttccgggcgatcttgccgtccagcatgtccgtgaggctggcgatgatgaagatggccagcgccacccacgtggcgccggggaagccccagtacagcaccaccatgaaaaccgggatcagaataatgcgcaaaagcgtcaatttattgggcaaattcatggatgtttactcctccgccaattctccggtcagttcgccgtccatgacgccggtaagccggacggtcacaaaggtacccggttccacctcccggttcgcgtcaaaccagatgcggccgtcgatgtccggggactcggcgtagctgcggccgaagtgcatctgggcctggctgtcgaagccctcgcacagcacctcccgctccgttcccagaacagactcgttgtacgcgtcgatgatgtcggactgaacgtccaccaccagctccgcccggcggcgggcctcctccatgtccacatggtccatctgggccgcccgggtgccctcctccggggagaaggggaacaccccggcccgttcaatctttgtctcccggagaaagacacacagctcttccagctccgcctcgccctcgccgggcaggccggtgatgaggctggtccgcagcaccaggccggggatgcgggcccggagctttgtcagcaggtccagcagctccgccttggtatcccggcggttcatggccttcaggatcccgtcgttgcagtgctggatggggatgtccagatacttgacgatcttgggctcctccgcaatggtgtcgatcagctcctcagtgatctcgtccggatacagatagtggagccggacccagtggaagtccagcctgcacagctcccgcaggagagacgccagctggtgctcgccgttcaggtccgttccataccgggtgatatcctgggcgatgaccagcagctccttcacgccggcgtccgccagctccctggcctcttccagaaggccctccatggggcggctgcggtatttgccccgcagggaggggatcacacagtaggcgcagtggttgtcgcacccctcggcgatgcggaggtaggcataccaggggggcgtggacaggatgcgtcccccgtcctggggggcggtgtggatgctgcccaggtggcagggcctcaggccagaggcccccatcacctcgtcgatggcggcgcagatatcgccgtagctgccggtgcccagaatgccgtccacctccggcagctcgttcagaacgtcctgcttgtaccgctgggtcatgcagccggtgaccaggatcttctgtacctggccagcccgcttcagctccgccatctccagaatgttgtcgatggcctcctcgcaggcggactgcaggaagccgcaggtgttcaccaccaccacgtcggccccctccggctggacctggatggtatggccggcggcctggacagaggccatcatctgctcacagttcacctggttcttggcacagccaagggagataaaggaaatgttatatggcacgatcgagtcctccaatcgatggattgttgcaaaatgggcccggcggggccggcatgtgtgtcccattggacagggaatgacagccatgatgtggctgggcagatacgcccacttgtaggagcaggcaccccataaccgccattcggcggcccgtatgcctccccggagggaataccccctgcgagacgggactcattcttcgagaatctccgctcccagacggctccatgcctcccggacgtctccccaagcaaacccccgccgcagcagtgcgctggtgagccgccgcttctccgcctcctctggggcccggccccggagcttggccgcaagaaatcggtcaatctgccaggcgctgtccggtgcctgatccagagcctcgtcccacagctcccggggtacgcctttctcccgcagtttctctcgaatgcgggccgggccataaccaaggccggcgcagtggcgcaccaagattgctgcgtaatctgcatcgttgatggcaccaatggcctccagccactcagcggcgtaccgcgcctccgcctgactggcccccttctcctggagcttccgctccaggtcgcggcggctcatggcccgcttgccgatgaggtccgccgccgtggccttcacgttggagacgctggcagccttcttcagctgctccagacgtctgccgtccaaatcatctccagtccgcaggccgaagtccagcgcctcctgctctgtgatcttcaggcaggcgccgtcctccaggaacaccagcacccggccctttttgtgggcagacgcctggacgcgctcaatccgcatcttcgaagtcgtcggcgctcacatccaccgcccggcctgccgccttggcggcgatgcgggactggttgctcatcagcttgtcgaagttccggcggatgtccgcctccagcttgtccgccgtctccgggttctcctggagataccgcttggcggcgtcccggccctggccgatgcgggtctccccgatggagaaccaggagccggacttctgcaccagctccagcttcacgcccaggtccagcagctcaccgaagtgggagattccctcgccgtacatgatgtcgaactccgcctcccggaaggggggcgccaccttgttcttcaccaccttggcacgggtccggttgcccacgatctcagaaccgtttttcagcgcctcgatccggcgcacatcgatgcggacggaggcgtagaacttcagcgcccggccgccggtggtcacctccgggttgccgtacatgatgcccaccttttcccgcagctggttgatgaagatgacgatgcagttggtcttgccgatggcgccggtgagcttccgcagggcctggctcatcagccgggcctgcaggcccacataactgtcgcccatttcgccctcgatctccgcccggggcaccagggccgccacggagtccaccaccaccacgtcaatggcgccggagcggaccagggcctcggtgatctccagcgcctgctcgccggtgtccggctgggcgatcagcatgtcctccacctggacgcccagtgcccgggcataggtggggtccagggcgtgctctgcgtccacaaaggccacctcgccgccccgcttctgggcctccgcgaccacgtgcagagccagggtggtcttgccggaggactccggcccgtagatctccacaatccgccccttgggcaggccgccgatgcccaaggccacgtccagggacagagagccggtggggatgtaatccacgttcagctccgccttgtcgccgaagcgcataatggcgcccttgccgtacatccgctcgatctgggccatggccgtgtcgatggcccgcttcttatcgtccgccggagccgcgttgggcagcggcgctttctctctcgccattgtattctcctcctgattctctataaaaactctttatttcaactcatctgtaagtcccttacttctctgagagagtccccagcagagggatccaaacagcatccctccatacacgatcaccgcgcggccgccaggcagcgtctcccggacagggtcccaatactcaggcgcataactggacgggcctgtttcaaccgctgcaaaaaggttaggtcaccgctgtggccgccatggaaagggctgacgccctatacgccgtataacgcggcttgggcgagtgcttaacgaaaccccggcgcatcagcgtccagcccgacaccaggggcccggcccacagcagggtcggacttcccgcctcctgcacataaaacggcagccccaccattgccgttcctttctctaaacgtcagagctctgtacacagcgttccgaataccacccgggggatgtcgtggtggtccttcaccacctggatatccccgaagccctgggtccgcatgatccgcagcacgttgtccgcttgaccgatgcccacttcaaaatacagacggccgccgggagccagggcctccttccacttctcggagatgctccggtagaagtccaggccgtcctcgccgccgtccagggccagatggggttcatagtccttgacggaggtgtccagcgtctcgatgtccgcccgggggatataggggggattggacacgatgcactggaactctcccagggatttctccggcttttcccgggcgtccgcctgcatgggcaccacccgggcggtaaggctgttgcggcggacgttctggcggcagatcttcagggccccgtcagaccactcccccagcaccacccgggcctggggcacttgggccgccaccgccagcccgatgcagccgctgccggcgcacaggtccagcacccggcattcccccaaggtcttgatatagccaatggcctgctccgccagcacctccgtgtccggccggggaatcagcacgtcccgggagatgtccagcgggagcccatagaactcccactcaccgataaggtatgccaccggctcgccctccagatgccgccgcaccaggtcccggacccggtgctccagctccggggaggcgtacagtcccccatcccgggccagctcctcccggctcttgttagtgccgaagcaaaccaactcccgggcctccagcgtggcctcctcgatccctgccctccgcagctgctggcggatatccaaatacaaattgttgtatgtcgtcgccataatacgcctcattatcaaaaattcaccattcgtctttccctttttcactgggcaagaccagctccagggaccggatggcgcactcgatcatggagtcgtccggctcattggtggtgaagttctgcatccacattccgggggccgtcaggattttggccagccgactgtcctgcacgtggcggcccacccagcggttgaactcataggtaatgcccaccaccagaggcagcagaatcagatgtgccagtgtccgcagccagacattggtgatgggccagatgccgaacaccacactggacaccaggatggacacaaagatcaccacgaacagaaagctggtgccgcaccggggatggtgccggggctgaatgcggacattctccaccgtcaggggtagccccgcctcgtagcagaagatggtcttgtgctccgccccgtggtactggaacacccggtagatgtccttctgcttggagcagaagatcagatacagtaggaagatagccaccttcagcacgccttcgatcaggttccggccccacatggggaagtccgggaagaagtgcagcagcccgccggtgaggaaggtgggcagcaccagaaagaggaagatggacaggccgatacccagcagcacagagaggcccacgatcagcccctccagcttcttgttggaaaaggtccggtccagccactgttcaaatttggagggctccgtggtctcctcctccggatagaagtccgcggagtacatcagcgccttcacgccgttgaccatggaggagaggaagttgacggtgcctcggatcaggggccagcccaaaatgggatgccggtccttgatgagccgcagctcccccaccttctccaccagattgccctcctggtcccggaccacgatggcctgcttctccgggccccgcatcagaatgccttcaatgagtgcctgtccgccgatgctggtgcggaaggcgcaggattggggttgttttgccatgtgtttcctttctaattccgtacagttgaattctaccatgctctgtacagaaatgcaaacatttgttcgattttcgaaaatcattccttgaccggcaggcagatggtgaccaccgcgccgccgccatcggcgttgccgatggtgaagatgccattgtgaaggccgacgatctcatcgcacaccgcaaggccgatgccgctgccccgggccttggaggagcccttgtagaacttctgcttgatgaagggcagctccgcctccgggatgccgggaccgtagtcccggacccgaaccacctcaaactcgccctcccggctgatggaagtgtcgatccgcttgccggagccgccgtgcttggcggcgttgtccagcacgttgcagaacacctgcttcagccgctcagagtcgccggggatgggaggcaggtcctcatccccgcactcgtagttcagtttgatgccctcctgccggaacagctcgccgtaggtgaagatagcgtcctcaaactccgcctgcaggtccacctgctccatccggagggtgaatcggccgtcctccatcttggagaattccagcagctcctctaccatggtagagagccgccgggcctcgttcagaatgatgcggatgccgcggcgcatctgggcggggtcatctgtggtgtcctccagaatcgtctcgccccagccgttgatggcagtgaggggcgtccgcagctcgtgggacacggaggagatgaactcggatttcatcttctcgttctggccgatcttgagggacatatcgttgatgttgtccaccagttcccccagctcgtccgtgtacttgttttcgatctggaagccatagctcccggcagagatccgcttggccgcctcagacaccacggccaccggctccaccacgttgttgatgaacagcaggctggagatcagcaccagggccatgcagatgcctcccaccgccagaatgataaagaccaccaggacaatctgccggtccaccagcttcatggacgtcaccagccgcatgacgcccgccacccggccgttgaacagcaggggcgctgagaccgccatgatcttctcacccgtctccgggtctctgccttggaagggcgtgatctcctgattggtgatggctctggtaatatcgctggtacccggcgagctgcctgctgtcaggccggaggtggacatctggatacgtccggtgctgccgatgaactgcagctcaatccgggacttgtcctcataggtgtccactgcctgggtcgccatctggttgtactcggagtagctgttcatgaagtagtcgttgaaagcactggacatggcctccgcctgcttcatcaggccgttttccatgctgctgtaatagtaggtggaaacgcccacagataccagcgtcaccagcagcatcagcagcaccagcaccggcagaatggtattgacgatccaccgcttccgcaggccccggaggcgcagcaccgtccatttccgatcccgttcttcctctgccatgggccgctcctcctttccctgcgttccttacgccggcatcactggccggccgattttctcagaacccccacttgtatccgtatccccacaccgtggtgatgtacgtgggattctgcacgttgcttcccatcccgcggcgcgggatgggacccctttcctcagcttgcgcggcggaagtaaattccaccttgcgccaaggttttggcttccgccaaaacgcttgtacgggccatcggcccgccccgctccgcggggccccggacaacgcccggagccgctcagaacccccacttgtatccgtatccccacaccgtggtgatgtacgtgggattctgcacgttgtcctcgatcttcagccgcaggcggcggatgttgacatccacgatcttcagctcaccgaagtagtcccggccccagaccatatccaggatctcctcccgggagagggccttgcccggattttccatgaacaccttcatgatggaatactccacctgggtcagcttgattcgctggccgttcttctccagcgtccggttgcgggtgttcagcaggaagggatcctgccgaatctccccggtctgggggatctcctctccgccggcccggcggaacagggcgtccacacgggcggtaagctctgccggggagaagggcttggtcacatagtcgtcggcgccggtcatcagtcccgtcaccttgtccatctcctgggaacgggcggtgagcatgatgataccgattttggtgttggtggcccggatgcggcggcagacctcaaagccgtcgatccccggcagcatgatgtccagcagcgccacccgggtatcggggttctccttcagcttgtccagtgcctcttcgccggtctccgcctcaatgacgtcgtacccggcacggcgcaggttgatgacgataaagctgcggatgctggactcatcctccagcaccattacttttttcattcggcataccgtcctttcttctctgtcagctgtcgccggcggaccactccgtggtgatcaggctgaacgcctcccgcacctcgtcttccgtcaggccgtattcccagctcccatttgcgtccagaagctcggccgtgtagatgatctccggcagacggcgcaggatgacccggccgccccgggtagctctggcctcgcggccggagcctgtgagcttggtgatccgcaggacatcctgtggtggctccccgctgtctccccggtaggagaatgtgaccgtgacctcctccgtcccggccgtgcgggtaatgaggatctgatccttccacacgtccggcaggcgcaggtaccagccgtcctccacactgtggtaggtgctcaccacagccgctttggtgccgtcgctggtataggtataccagtcgatccgccggcaggggtcctcacccacgtttccccaggccgggatcggctcgggatgggggacctctgtgataccgtcgccgttgatatcctccgggtacagggaactgaagggcgcgatctccgaagacacccccgtcacgtcggacagcaggatgttcaccagttctccatttttcacggtcaggatgtcagtgaccatccaggccgactcctccacccccgtgacgaacagggccggcgtaccgtcctgtaggacaccgctcttcacacgcccctgctggctcagctccgccatggtgctggtgatccgtgcggaggttcgcagctggaactcttcctcctgccagcagtagtaatccgcaatgccgttgccctcctcatcggcccggagcaccaccagctcccacaggccatcctgattcagatcgttgaccgcatatttcacatagctggtgccctgcaccagctcctccggctccccggaccgcagggtgtagacggagagggccaggaggtccgtattgacccgccagcccaccagcagctccttccggccgtcctggtccagatcctcgtaggcaatgctgtaaatgctggtgccggtgccctcaatgacggcagcctgctcatatccctgctttccggcggtaaagatatagatcttcaggggcttctcatccgcagagttgcggaagaaggccagcgcctcctcctcgccgtctccgtccagatcctccagctgtacgggctggatgttgctgccggagacgggggccgcgtactccgccccgctctccagcagctggttgagtgagctgttcagctccgtgtactcctccggcagctgcggcaggctgtacaggtccgtgggggaaaaggaaaatccgcagccgctggcggacagaagcagaagcaggccgaccgctgccgtcagcatccgctgtattcgctgtctcatggcctcctcctctctgccggtgggctgcccccgccgaaaaacgcataattcaacttatatatgatagcacgttttctccctgatgtgtaggggttgtcagcatttttcccgcattttacgttctgttcatttttccgccgtccccggtcggaaggccgcgatcagggccagcttccgcctgcgatccagccgtttgatggcggcctcccgccgcagggccgcagaccggtccggcaccgcctcctggtagaccagctccaccggcaggcggctgcgggtgtacttggcgccccgcccgctttggtgggcctggaggcggcggggcaggtcgttggtgcagcctgtgtacagtgtgccgtccccgcagcgcaggatgtagaccagatagcccataccgtccctcctctgtccgatgagaccagtataccacagcccgccgccccgtcaaagggctttccgcatggggacttccctgcccggcataggaatgatggtacagggagggattctatgttgtctgccgcactgctgctcttcgccaacacgctgctcttctcactccgcctgtccggcggcgggtcgtttccaaagccgctgtccgccgcagaggagcgggaatatctccgccgctacgcccagggagatcaggaggcccgggatgtactcatcgagcggaacctgcgcctggtggcccacatcatcaagaaatactatacccagagcgccgatcaggaggacctgatctccatcggcaccatcggcctcatcaagggcatctccagcttcgacccggagaagggcgcccgcctggccacctacgccgcccgctgcattgaaaacgaaattctcatgtacttccgcagccagaaaaagctccagggagaagtctctctgtcggattccattgagacagacaaggagggcaatgccctccagctgatggatgtggtgggcgtggatgacaccatgctggacgatatccacgaccgggacagcgcgctccggctccaccagatcatccgggagcgtctgaccacccgggaggcggagatcattcgcctgcggtacgggctgggcggcaccatccccctgacccagagggaaattgccgcctccttcgggatttcccggtcctatgtatcccgcatcgaaaagcgggcgctggaaaagctgcgccaggagctgcaggacggccctgcgccccagctggtccggcggaggccccattcctccgggacgtgaccgccggatttggaaaacagagggcgtgatggaaaatttccatcacgccctttctttgcgcgcttccgcgcctttcaatagcgccgcaccacggcggccaccttgcccaatatctgggcataggtgccgtcaatgggggaatatgcctcattctccggcagcagccatacctgaccgcttttcagagacaggcgcttaaccgtcgcctcgtcatcgatcagagccaccacaatctcaccgtgctgcgcagtgggctggctgtgaaccaccaccaggtcgccgggcaggatgcctgcgttcagcatggactcgccccggacccgcagggcaaaatactccccgggccgaccggcggtatcgaaggtcaaatagtcctcgatacactcctccgccagaatggggctgccggccgccacattgcccaccactgggacctgattttcaggcttaggagattcccgcagcgtgatggcgcggcccttgccggcgcccttttcaatgacgcctgcctcctcaagccgtttgaggtgaaaatggactgtggagggtgacttcagccccacggcctccccgatctcccgcaccgagggggggtagccctgctcccggatacaggcggcaatgtactcgtagattttctgctgcatctttgagagctcccgcatacgtgtccacctccgctggatttctggctgtattataccacaacgccgcaggaaaagcaaacatttgttccatcattttcaaacttttttgtcgtctgtccgtacgcttccgcatagctttgatttgtctgcttttttgcaaaatccccttgaaatacagagaaaactatggtatcattaacatctgtgaaatcatgatccatgcgctgcatggctgaaagttttggaggttatcctgtatggacgctttaacgctcgtcatcacgatcctgcagcttctctgcggtctggcagtcattgtcatcgtgctcttccagtccggcaagagcgccggcctctccggtgccatcggcggtgtggccgactccttcctgtcccgcaacaaggccaagactctggacgccaagctggcccgcgccaccaaatgggttggggccatcttcctgatcctgacgctggtcctgctgatcctgcagggctgatttcgcgctgaaagcgcccggtgtgccagcacaccgggcgcttttttatatgtcgccggagcagtacagcacaccggcctccggttggataccgttggcttccagcagttcctgcaccgtcacgaagcggtagccttccccttgaagcgtatctacaatctccagtgccgcgtccacagaggtatcgtagatatcatggagcaggatgatctgattgggggccgcattttccaggaccgccgccttcacctgggctgtattgagcttttcccagtccctgggatcgatggaccactttatcatgggcacctgcagcagctcccggtccgccgcatccacggccccgtatggcgggcggagccaatatggcccccctcccagcaacgcttccagcgtctcctctgtacggcctacctcccgctgcagcgtctcccgggagatcccctgaagccgtacatggttccaggtgtggctgcccacctgatggccctctgcctgcatccgccggaccaggtcctcattgccttcgatctgcttgccaatcaggaaaaaggtggcgcttgccccccgctcctgcaggccgtccagtagccgctcggtagtgttccggcgtgggccgtcgtcaaatgtaatggcgatcagcttgtccgccgggagctgggcatctgccccagcctccgccacagggccgcccggcgcgcagccggacagcagtgccagggcaaggcacagaaaaaacaggcgacctctccacatcgcgcccacacctcctcattcatgcagcggtagtttgcgcggcagctgaaaatttacacccgttaaaattttctcctgttttttcataacacgaaaaaaggaagcgggccccgcccgcttccttcatctcatattccgttcggtgctctgcatagacggtcaggagaacaggtcagaaatggcatctcccaccaggtccactgccagatctgacaccacttccagtcccagaagcactcccccctccttggcagctgaatgggctctctttcgcccgcgtgctgcgggcttctccctctgctgaaattccggtttcttctcgagctgcggcgcgtctccgtcccctgcaggctgattgaaggccccgcaccgggggcagaagccgtctgcatcgcaatcataccgtttgccgcacgaagcgcaggaaatcttcttcacagatgttccctcctttgctctgctgccgggcgctcacaagtccccgccgggcagccgtcgaccgtgggactgctccttcagcagccggcccatggccatctctgcctgacggagattttctcccagttcccgctggagcctccctgtccgcttctgctgtgccgcaggggactcagcggccgcggcggtcccgccgctccggacccagacaggctggttgaaggccccgcaccgggggcagaagccatccacatcgtagtcataccgctttccgcagtcctcacagtgaaccatgcgcatagagatctcccccttcgcttccattgtatcacatctccttcaggtccacaagaacaatcaaaagccctttgtcacaggtcctaggttcccatgacaaagggcttttttgattgcgggttcttacttcaccagctcgatgatggcggtctccgcggcatctccgcggcgcacgccggtgcggatcacgcgggtgtagccgccgttgcgctctgcatagctgggagcgatctccttgaacagcttcttgcagacatcctcgcgggtgatgaagctcatagcctgccgataagcggccaggtcgctcttcttgccgagggtaatcatcttctcagccagaggcttgatctccttggcgcgggcaagagtggtctccatcttgccgttgtccaggaaatccgtcacctgctgacgcagcatcgccatgcgctggtcagtgggcttgccaagtttccgagttccgggcattttggtttcctccttatcaggattttggtcagccggggaacgtccgccggcattggaatcagttgttgttatcttcgtcagccagatggagtcccatcatcgccagcttgttgatgacctcttccagggacttgcggcccaggttgcggaccttcatcatctcgtcctccgtcttggaaatcaaatcctccacggtgttgatgttggcacgcttgaggcagttgaagctgcggacggagagatccagctcttcgatggtcagctccagcaccttgtcccgctgggcctccgccttctccactacggtgggcttgctgcccacgttctcagagaggtcggtaaacagcgtgaagtggtcgcacaggatcttcgcacccaaggacacggcgtcccgggcagagatggtcccgtcggtccagacctccagcgtcagcttgtcgaagtcgctggaagcacccacacgggtgggctccacggtgtagttgaccttatacacgggggtgtagatggagtccacggcgatgacgccgatcacgttctgctgcggcttgttgcggtccgcaggcacatagccgcgtccgtgggacagggtgatctccatgttcagcgtcgcgccgttgtccagcgtggcaatgtgcatgtcgggattcaggacctccacctcgccgtcggccttgatatcgccggccttgacctcgcaggggcccaccgcctcgatgtagaccgtcttcaccgtctcgcagtggagcttggtgagcaggcccttcacattcaggacgatctccgtcacgtcttccttgacacctgggatggtggagaactcatgctgcacgccggcgatcttgatggtggtcggggccgtgccgggcagagaggaaagcataatgcggcgaagcgcattgcccaaagtggtgccgtagccgcgctccagcggttccaccacatacttgccgtatgtggcgtcccccggcgtctcgatgcactcaatctggggcttttcaatttcgatcatgcagtagtaccctccttcatcttcttgttgcgagcacgcatgattgcgcgccgccggcagttcctatcattattgagggtatcctccgcttacttggagtacaactcaacgatgaggtgctcctcgacgggaacgtcgatgtcctcccgggcgggtagacgggtcacggtgcccttcagggcgttcttctcacgctccatccaggcggggatcaggaacacgggggcatcctggcccagcaggcgcttgaagatctcagaggagcggctggactcggcaacctcgatcacatcgccggccttgacctgataggacggaatgtcgaccttccggccgttgacggtgaagtgggcgtggctcaccagctgacgggcctgacggcgggtcatggcgaagcccatgcggtataccacgttgtccagacggcgctccacagcgatcagcaggttgtcgccggtcttgccgggggtcttggcggccgcctcgtaataggcgtggaactgcttctccagaatgccatagatgaacttgaccttctgcttctcattcagctggatgccatattcgctcttcttctttctcatctggccgccggggttgcgattggtctccttcttcgcatagcccatcacggcaggagaaatgcccagagccttgcagcgcttcgcgatcggctgcatattcttagccatttgcttgttacctcctcttcaaatcagacacggcggcgcttgggggggcggcagccattgtgggggatgggcgtgacgtccttgatcatggtcacttccaggcccacggcctgcagcgcccggatcgcggcctcacggccctggccggggcccttgacgaagacctcgacggtcttcaggccatgctccatagcggcgcgggcggccgtctcagccgcggtctgtgccgcgaagggggtggacttcttgctgccgcggaaaccgaggccgccggaggaagcccaggagatcgcgttgccctgtgtatcggtaacagttaccatggtgttgttgaacgaagagcggatatggacctggccccgctcaatgttcttccgttcacgccggcggcgaatgaccttcttgccggcggatgcctttgcagttgccatcttggttctccctccttacttcttcttgttggcaatggtcttcttgggacctttgcgggtccgcgcattggtcttgctgcgctggccgcgcacgggcagacccttgcggtggcgaatgccgcgatagcagccgatctcggtcagccgcttgatgtccagagcggtctggcggcgcaggtcgccctcaacggtatagctgtcgatggcgtcgcgcagcttctgctcgtcggcgtcggacagatccttcacgcgggtgtcggggttgacgcctgtctgcgccaggatgtccttggcgctctttctgccaatgccgtagatataagtgaggccgatctcgatacgcttatccttcggcaggtcaataccggcaatacgtgccatactctcaaagcacctccaattaaatgttagccctgtctctgcttatgcttggggttctcgcaaatgaccatgacacggcctttgcggcgaatgaccttgcacttctcgcacatgggcttcacggacggtcttactttcatagtttttaaccattcctttcagcggtttgtgtcttttcagctcaagtggcgcttacttactgcgccaggtgatccggccgcgggtcaggtcatacggggacatctccaccgtcaccttgtcgccgggcagaatcctgatgaaattcattctgagttttccggaaatatgtgccaaaatcttgtgtccatttccaatgtctacctggaacgttgtgttgggcagggcttccaccacgacaccctccacttcaatcatgtcggattttgccaaacgttatccctcctggtccggataaacctcctcgcggtaagccgcaagggttttgcgaagctcgctgttggtgatcctggcttcgcctctgatcttttcagaaagccggttctcgtccgccgctacaaacagcacgtgtctgcgctttttgcgtttgggcgactccaccttcctggatttcccgtccgccagcagcaggtactccccctccaccgcgagaacgatgaagagctttccctggtcccggccggcaacggatcttacgatgttggatgctgcaatttccatgcgtttcctctcagatggcgggggccgtcaggatctcaggctcgccgtccgtgatcagaatggaattttcatagtgggccgcccatttgccgtccagcgtcttgacggtccagccgtcgctcatctgctggatggccgccgagccggcgttcaccatgggttcgattgcaagcgtcatgccgcggaggagcctgggcccccggccgggatggccgtaattggggatctccggcgactcgtgcatctgggcgccgacaccgtggccgacgtattcccggacgatggagtagtcgtgactctccacgtactgctggatggctgccgagatatcgaacagccggtagccctccttggcaaacctgattccctcaaaaaagctctgtctggtcacgtcgatcagatcctgcgcctccggggagatcctgccgcaggggaaggtggccgcacagtcgccgtgaaaccctccaatgtacgctcccacatccacactgacgatatcgccctcctggaggacccggggtccgggaattccgtggatgatctcgtcgttgacgctgatgcaggcgctggccggatagccgttgtaatgcaggaaggaggggactgcgccttgcttgcgaatgaaatgctccactgcacggtcgatctcatgggttgtgacgccgggctttaccaattcccctgcataagcacgggcagccgcggtaatttttccggcccggcgcatcaattcgatctcatggggggatttgagtgtaatcatacgctcatctccccagtgcgtggaggatggcccgggaggtctcttccacagagggctgattctccacaggcttcaggagtccccgctgggcatagaagtccttcagcggctcggtctccttatgatagacctcgagccgcgccttgacggtctcgggggcatcatctttccgctggaccagcttaccgccgcacttgtcgcacacgccctcctgcttggggggcacagctaccatgtggtagctggccccgcaggattcgcagacacggcggccgctcatccgctccatgatggtctcgtcagagatctcaatagagatcacgtcgtcaaatgtgatcccggccttttccagggccgcggcctgggcgatggtgcggggcaccccgtccaggatatagccgttcttgcagtcatcctctgccagccgctccgtgacgatgccgatgatgacgtcgtccggcaccagctggccggcgtccatataggacttggccttcaggccggtgggcgtgccgtttttgatggccgcccggaggatgttgcctgtggaaatggtgggaatactcagttctctgcacaggatttccgcctgtgttcccttaccggcgccgggggcgcccaacaggatcagcttcaattgaaacgccttctctcttattccaggaagcccttgtactgacgcatcagcatctgggcctccagcgccttgacagtctccagagccacgccgaccacgatgatgacggaggtgccgccgatcgccagataagcgttgccgacagccttacccagcagcagcgggcagatcgccacgatgcccagataaatggcgccgaacagggtgatcttgctcaggactttcttgatgaagtccacagtgggcttgccgggacggaatcccgggataaagccgccctgcttcttcaggttgttggcgatctccaccggattgaactggatggtggagtagaaatagctgaaaccgatgatcatgatgaaatacacgatcatatagatgaaggactgggtatcgatggcgtcgtagattgcccgggaaaccgtctcctcctcgggaataccgatgaaggtccagatcgtcacgggcagagacgcgatgctctgggcgaagatgatgggcagaacgccggacatattcaccttcatggggaggtgagagctctggccgccgtacatcttccggcccacctgccgcttggcatactggacgggaatgcggcgctctgcgtcgctgatgaacacgacgaacacaaccagcgccaggacgcccaccagcagcaacaccaccagagccgggtgcagcgcaccgtccgcggcagcgccgccgttggcccagctcaccacgccgctgtacagagagctgacagaggtggggatccgggacaggatgccggcgaacagaatgatggaaatgccgttgccgatgccgaactccgtcacctgctcgcccatccacatgacgaaggaggagccggcgatgaaggacacgacgatgaccagtgcgggccagatgccggtggcatcagatgccagcaggttgtagttgcgcatcatgaaatagtagccgaccgcctgcaggatggcgatgccgacagtggtatagcgggtgatggactggatcttcttccgtccctcttcaccgccatccttggccagccgctccagggccgggatggccacagtcagcagctggatgatgatggatgcgttgatatagggctggatgctcagggcgaagaccgttgcctgggcaaaggcgccgccggacatcacgttgtacaggcccagaatggtgccgcccatctgatccagataggtctccagcaggccgacatccacgtaaggcaccgtgatggcgttgccgatccggaagatcaacaggatgaggagtgtaaaaatgatcttcttccgcagttcggggatgccccacgctttgcgaatggtttggatcacgttacatcacctcggcctttccgcctgctgcctcgatagcctccttggcagaagcggagaaagcagaagcctggacagtgagcttcttggacagcttgccgctgcccagaaccttgtagccgtagcggcacttggagaggatacccttctccagcagcgcgtggaccgtgacagtatcgccgtcctggaactgatccagggtgctgagattcacgatctccaggggctttgcgaagatgttgttgaagccgcgcttggggatgcggcgggccagaggcatctggccgccttcaaagccaacacggatcttgccgccggagcgggccttctggcccttgtgaccgcggccgccggtctttccgttgccggagccggcgccccggcccttccggtacggggcccggacggagccctcggcgggagacagttcgctcaacttcataattccgtgcctccttatttcacttctgtgacctgcagcaggtagccgatcttggcgatcttgccgcgggtctggtcgttgtcgggctgcacggtgatgtcaccgatcttgcgcaggcccatggaatgagcggtggcgacctgtttttccaggcggccgttcaggctcttgacgagcttaatatttaagtttgccatttttgcgcctccttaacccacgatctcttcgacgctcttgccgcggatgcgggcgacctcctcgggaccgcgcatgctcttgaggccctcgaaggcggcggcgacaacgttgttggggttgttggaacgcaggcacttggtccggatatccttgatgcctgcggcctcgacgacggcacgcacagcgccgccggcgatcacgccggtaccgggggcagcgggcttcatcagcacgcggccggcaccggcctcaccgatggtctcatggggcacagtggtgccggagagggtcacggtgatcatgttcttcttggcggcttcgatgcccttgcggatggcctcggggacctcagcggccttgcccaggccatagcccaccttgcccttgccgtcgcccacgacgaccaaggcggagaatttcatcacacggccgcccttgacggtcttggagacgcggttcagggaaacgaccttctcgatatactcgctctgttctctttcaaatctaggcatgttgtcgttcctcctcccttagaatttcaggccgccctcgcgggcaccctcagccagagccttcacgcggccgtggtacagatagccgccgcggtcaaacacgacagtctcgatacccttggccttggcgcgctcggccaccagcttgccaacggcagtggcagcggcgatattgccgccgtaaccttcgatggccttgtccagggaggaagcggaagccagggtcacgccgttgacatcatcgatgacctgggcgtagatgttggcctcgctgcggaacacattcagacgcggcatctcaggggtgccggagatcttggcgcgcactctcttgtggcgcttcaggcgctgggcgttggtattcggtctcttaatcatatcggcacacctccttacttcttggcgccggtcttaccgaccttgcggcggatgacttcatcggcgtacttgatgcccttgcccttataaggctcgggaggacgcttctcgcggacctcggccgcaaactggccgacagcctgcttgtcgcatccgttgatgacgattttattgggagcggggacatcgatggtgatgccctcgatctcagaaacgatcacctggtgagagaagcccaggttcatgaccaggttcttaccctccttggccacacggtagccgacgccgttaacctccagctccttcttgtagccgtcggtcacaccgacgatcatgttatggagcagagtgcgggtcaggccgtggaggctgcggtgcagcttgtcgtcggaaggacgctccacggtgatcgtgctgccttcctgtttaagaatcatctcagggcgcagagccttcgtcagctcgcccttgggtcccttaacggtcaccacattaccctcggcgacattgacggtgacgccggcgggaacggtaatgggcattctgccaattctagacatggtccaataccctccttaccaaacgaatgccaggacctcgccgccgacatggagctcgcgggccttcttgtcggtcatgacgcccttggacgtagagatgatagcgatgcccaggccgcggagcacgcggggcagctcgtcggcgcccacatagacgcgcaggccgggcttggagacgcggcgcaggccggtgataaccttttccttgcccgcgttgtacttcagggagatgtggatgacaccctgggttccgtcctccaccacctggaagttcttgatatagccctcatccagcagaatctgagcgatgctcttcttcatgttggaggcgggaacatcaacggtgtcgtgcttggcgttgttggcgttgcggatgcgggtcagcatatccgcaaccggatcggtgatatgcataataaatcctcctattttagagttgcggctctctcgagaccgctgcggcagcgaggtatcatggcgaatggagcagtccgctcgcgcgtggtgcccaattcgtcatgacctttcgccatccgatctgccaaaggctccatatcaaaagcccgtggtcacaaaatttggttgcgcggggcgcctctcagaaggaggccttccgcacgccggggatctcgcccttgtaggccagttcccggaagcagatacggcagacgccgtagtcacgcagataggcgtgggggcggccgcacagcttgcagcggttgtatctccgggaggagaacttgggagcccgctgctgcttgagaatcatggatttctttgccatcgtttcttcctccttagcgggcgaagggagcgccgacctgctccagcagggcgcgggcctcttcatcggtgtgcgcggtggtgcagatgaccacatccatgccgcggatcttgtcgatcttgtcgtactcgatctcggggaagatcagctgctccttgatgcccagggcatagttgccgcggccgtcgaaggagttggggttgatgccctggaaatcacggacgcggggcagggccacgttgaacaggcggtccaggaactcccacatcttgtcgccccgcagggtgaccttggcgccgatgggcatatcctcacgcagcttgaagtttgcgatggacttgcgggcccgggtaatgacgggcttctggccggtaatctggctcagatcgcccaccacgttctccagaaccttggagttttcacgcgcctcaccgcagcccacgttcacgaccaccttgtcgatcttggggatctgcatgacgctcttgtagccgaactgcttcatcagggcgggagcgacttcggcagtgtatttttctttcagtctggccatttgtcagctctcctttctcacagctcagcgccgcagtgcttgcacacgcgggtcttcttgccgccctcgatcttgtgggcgacgcgggtgcccttgctgcacttggggcacaccacctgcaccttgcaggcggcaatggcggcctcgcgcttcatgatgccgccctcttcgccctgcttgcggggcttgacgtggcaggtcaccatgttgatgccctccacgacaaccttcagggagccgggaacggtgcccagcaccttgccctgcttgcccttgtccttgccggacaggacgacaacggtatcgcccttcttaatgttcatagccatttcgctgccctcctcaaatcacttcgggagcgagggacaggatcttcatgtaatccttgtcgcgcagctcacgagcaaccggcccgaagatacgggtgcctctggggttcttgtcatccttgatcaggacggcggcattgtcgtcgaaacggacataggtgccgtccgcccggcggacgcccttggcgctgcggacgatcacggccttgacgacctcgcccttcttcaccgtgccgccgggggtggacttgcggacggacgcgacgatcacatcgccgatgttgccgaacttccgcttggagccgcccaggacacggatgcacttgatctccttggcgccggtattatcggccaccttcagaaatgtttcctgctgaatcataacggcacctccttacttcgctttttcaatgatctcgaccacgcgccaccgcttgtccttggacagggggcgggtctccatcactttgacccggtcgccgatgccgcaggcattctcctcgtcatgggccttcagcttgtaagtgcggccgacgatcttcttgtacaggggatgggccacacggtcttcaatggcgacgaccacggtcttgtccatcttgtcggatacgactctgccgacccgggtcttgcgggaggaagttctcttctcttcgttcatgttcgattccctccttcttactgcttgtcagaagctccggagagctccttttgacgcaacatggtcttgactcgggcaatgtcatgcttggtctcccggatcttcaggggattatccagctgattggtggcgtgctgcatacgcagatagaaaagatccttcttcaggcccaccagcttctcgttgagctgctcgggggtcatgctacgaatttcacttgccttcatcttcactcacctgcttcctcggtgcgggcgacgatcttcgtcttgatgggcagcttgtggctggccagacgaagcgcctcgcgggcaacttcttcagacacgccggcgatctcgaacatgatgcggccgggcttcacgacggcaacccagaactcgggggaacccttaccggaacccatgcgggtctcagcgggcttcttggtcacgggcttgtcggggaaaatcttgatccaaacctgaccgccacgcttggtgtagcgggtcatggcgatacgggccgcctcgatctgattgctggtgatccaggcgggctccagggcctgcaggccgaactcaccgtaggcaatggtgttgccgcgggtggccttgccggtcatacggccgcggtgtacgcggcgatacttgactctcttcggcagaagcattactgggctcctccttccttagcgggtgccgcgggcgccgcgggggcagccggacggctgggattggtggcacggttgaaaccgccctggggacggccctggccgcggttgaaaccgccctgacggtcacggttgaacccgccgccctggcgccggtcgccgaaaccgccgcggcggtcgccatcccggcggggacgacgctcacgacgctcctggtagggcttggaggtgtccatggtgcggggggtggtgcgcagggtctgagagaggacctctcccttgtagatccagaccttcacgccgatgcggccgaaggtggtggcagcctccgcgaagccgtactcaatgtcggcgcggatggtctgcagggggatggtgccctcgtgatagtgctccacgccggcgatctcacgtccgcccagacggccggagcagcaaaccttgatgcccttggcgccggcgcgcatggcgcgggccatggcgttcttcatggcgcggcggtgagagatacgcttctccaactgctgggcgatgttctccgccaccagctgggcgttcatgtcgggattgcggacctcgacgatgttcaggcgcaccttcttgccgatcagcttctccacagcgagacgatactgctcgatctgctcgccgcccttgccgatgaccatgcccggccgggcgcagtggaggaagatggtgacgacttcgttgctccgctcgatctcgatcttgggaacaccggcgccgtacagggtcttcttcaggtacttgcggatcttctgatcctcgacgatcagatcgccgaccttctcatcactggcataccaacgggaatcccagtctttgatgacgcccacgcgcaggccgtggggatttactttctgtcccataaaactgttctcctccctcttatgccttttccgtcacagccagggtgacgtgagaagtcttcttattgatccgataggcgcggccctgagcccggggcatcatccgcttcaggatggggccgggagtggcgaacacctcggacaccaccagcttggcggggtccatgccgaagttgttctcggcattggcacaggcggacttcaggagcttcatcagaggctcggaagcggccttgggggtctgcatcaggatcgccatggcggtgccggcgtccttgccgcggatcagatcacacacgatctggaccttgcggggagcgatgcggacatagcgcagatacgctttggcaatcttcatctcttccatgttctgcatcctccttcattaagaatctttccgatggccgcggaaggtgcgggtgggcgcgaactcacccagcttgtggccgaccatatcctcctggatatagacgggcacgtgcttgcggccgtcgtgaacggcaatggtgtggcccacgaaggcggggaagatggtagagctccggctccaggtcttgaggaccttcttctcgttcttcgcgttcatttcctcgacccgcttcagaagctccggggcaacatacgggccttttttaatggatctgctcatattgacttgcctccttacttctcgttgcggcgcttgacgatgaatttattggtggggttcttgcccttgcgggtcttgtaacccatggcgggcttgccccagggggtcaccgggccgggacggccgacgggtgcgcggccctcgccgccgccgtgggggtggtcattggggttcatgacggagccgcgcacggtgggacgccagcccatgtgacgcttgcggccggccttgccgatgttgatgttctcgtgctcgatgttgccaacctgaccgatggtggcgtagcagttggtgcgcacgatgcggacctcgccggaaggcagacggatctgggcgtcgccgccctccttggccatcagctgagcggcggtgccggcggagcgcaccagctgggcgccgttgccgggatgcagctcgatgttatggatcacggtaccaacggggatgttggcgatgggcagggcgttgccgggcagaatgtccgcctcggggccggtcatgatcttgtggccggccttcaggcccaggggcgccaggatatagcgcttctcgccgtcctcatactggatcagagcgatgttggcgctgcggttgggatcgtactccaggcgcagcacggtggcggagccgatcttgtcccgcttgaagtcaatgatacggtacttgcgcttgttgccgccgccgcggtggcggacggtgatgcggccgtagctgttgcggccggagctcttcttcaggggctcagtcaggctgggctcgggcttcgccttcttgtcgatgccgtcgaacccggagaccgtcatctgccgtctggagggagtcgtcggcttaaaagttttgatagacatgtcgcgttacactccttccgtttatcagaccataccttcgaagaactcgatggtcttggaatccgccgccagctggacataggcctttttccaggtcttggtcatgccgggacggccggcacccatgcgcttctccttgccgggcaccgtcagggtgttgacagaggcaaccttcacaccgaagatctcctccaccgccttcttgatctcgatcttgccggcgtccttggccacctcgaagacgtacttcttgtcggcggcaccggacatggcgcgctcggtgatgatggggcggatgataatatcgtaagcggtagccattacgcgtacacctcctcgatttttgcgagggcgtccttgtccacgaccagatacttggcgttcaggatgtcatagacgctcaggatggaagcgggagtggtcacaacgccggggatgttccgcgcgctcttgacgatggtctgatccacggcgggggtgaccaccatggccttgccgtccacaccgacggcggtgaggaacttgcggaagtcagcggtcttgatggcgtccatcttgatggagtcgatgaccaccatctggccctcggccaccttggcggagaggacggacttcagcgccaggcgcttgaccttcttattcagcacatagctgtaatcccggggcttgggggcaaacacgatgccgccgtgggtccactggggagcacgggtgctgccctgccgggcgtggccggtgcccttctgacgccagggctttctgccgccgccggagacttcggcgcgggtgagggcgctctgggtaccctgtctgcagttggcgaggtggttcttgacaacctcgtgcacgacggtctggttgggctcgatgccgaagatcgcgtcgttcagttccacagtgccgacttctgcgccggccatgttcaacactttcatagtagacattgatcaagcacccctttcttacttgtttctggcggaggccttctgcgggttgcggccggaggccttctgcgggttcttgctgatgtcagcgccggcctgcttgaccttgtggaccttgaccgtggacttgatggtcacgaggccgcccttggggccggggatcgcaccgcagaccaccagcatgttcagctcggggtcgaccttgacgacgctcaggttctggacagtcacctgctccacgcccatgtggccggcgccgatggtgcccttgatgatcttggacatgtggctggtggcgcccagagaaccgatctgacgggccacagggccggagccgtgggtctccttcaggcggtgggcaccgtggcgcttgatgacgccctgatagccgtggcccttgctgatgccggtgacatccacgaagtcgcccgcctggaaggcatcagccttcacgatgtcgcccacgttcagctcggcggcattctccaggtcgaactcccgcaggtacttcttgggagccacgccggccttgtccaggtggcccttctcgggcttggtgagcttgcgctcagagatgtcctcaaagcccagctggaccgcctcatagccttccttttcggaagtcttcttctgcacgaccacgcagggacccgcctcgatcacggtgacggggatcacatggccgttctcgtcaaaaatctgggacatgcccacttttttgccgatgatcgctttcatggttgttcctccttaaaggttattggtcggcttagatacgtgcgggttgggtcccgccgcattgctctgccgacatgacccgtctgcctcgcaagtcggcagacatggacagcaaacaattttcaatctattttcgccgcggcgtgtacgtggcgaaaataccttgactcagccgccctgggcggcgccgccagtgcgcacactggcgagggggaatctaaaggggggatttcatcccctctttaattggttacagcttgatctcgatctccacgccggcaggcagctccagggccatcagggcctccaccgtcttgggggtggacttggtgatgtcgatgaggcgcttgtgggtgcggcgctcaaactgctcgcggctgtccttgtacttgtggacggcccgcaggatggtgacgacttccttcttggtgggcagagggatggggccggacacggaagcgccggtgcgcttggcggtctccacgatcttctctgcgctctggtcgatgacctgatggtcataggccttcagccggatgcggatcatttctttctgagccatggttgtttcctcctgatttcgtaggtagtttcacgagtctcgacgacctacggcgagagaatttttctatacgcttaaccgtgcgtatcattccagctcatgaaaaataccggcgcatgatacggccggtatcctgtcatggcgcagcgatctacgcaacgtacagatccttctcagccgcccgattatcggacatactccccggaagttacctctttcgagcaatctcccggttcatcgcagtactcgccgggcgcagttctgccctccacgcgagctttattatcataaaagaaaatcttgctaatgtcaagcctattttctctgttttttatgaaaatatgaagatttttttggagggctggatctttttccaattcttccgaaattttggaggaaaaccgtcggtttcagcccttccggactgctgaaaaagagaggagggggcgttcccctcctcccttttcgttctcaataagccacaccccagtagatgtcggtggtgcatttcctgccgcacacggggcaggtgccctccgtgccgctctggaccaggggcatacagcgggagctgacaccggcccgctccttcatggccagctcacactccagactgccgcaccacttggaccggaggaagccgcccttcccctccacaatggccttggcctcctcgggagtttggatgtcgaaggtgttgtcctcccggttcttcagggccatggcatacagattgtcatggatgtgatccagcagggccttcacggcgctctccagctccgccagggccacggtgatcttctcgccggtgtcccgccgggcaatgacgcactgctccttctccatgtctttggggccgatctccacccggacgggcacacccttcatctcatactctgcgaacttccagccgggggagttatcagagtcgtccatcttgctccgcacgccggccgcgttcagccggtcccgcagagaggccgccgcctccagcaccccgggcttgtgggccgccacagggatcaccaccgcctgggtgggggcgatccgaggaggcagcaccaagccgttgtcgtcgccgtgggtcataatgatgccgccgatcatccgggtgctgacgccccagctggtctggtggggatagtggggctggttgtccttgccagtgaacgtgatgtcaaatgccttggcaaagccgtcgccgaagtagtggctggtgcccgcctggagggccttatggtcgtgcatcatacactccaccgtgtaggtctcctctgcgccgttgaacttctccttgtcggtcttgcggcccttgatgacaggcatagccagcacgttctccatgaagtccgcgtagatgttcagcatctgcatggtctcttcccgggcctcttcggcggtggcgtgcatggtgtggccctcctgccacaggaattcccgatggcgcaggaaggggcgggaggtcttttcccaccgcagcacgctgcaccactggttgtacagcttgggcaggtcccgccaggagtggatgatgttggcataatgttcgcagaagagcgtctccgaagtagggcggatagcgcagcggtcctccagcttctcactgccgcccacagtgacccacgcacattcgggtgcaaagccctccacatggtccttctccttctggagcagggactccgggatcagcaccggcaggtacacgttctcgtgccccgtggccttgaagcgccggtccagctccgcctggatattctcccacagggcgtagccgtagggccggtagatgaacatgcccttcacggaggtgtagtcgatcagctccgccttcttgcagacgtccgtgtaccactgggcgaagtctacgtcccgtgcggtgatggcgtccacctgtctcttatcctgtgccatagtcttcatccttttctctatgatcgcgccgtccttcggcgcagtttacactgaacatttattgtatccactctgggagaaaaagtcaactgttatggctccctggttccgcatttgcagaactgatattgcgccgaagcttgctctctttgatatttgagaggaaagcagggcgctttcctgcaggagattcgtccatataggcaggctatgtgctccggcggctcccatctgctgacggaagtacccttcttcgaaaccaagaacaggcggcgggccgatggcccgccgccttgctgcaattcttatttcgcgtactcgatgaccttggtctcccgcaggacgtggaccttgatctgaccggggtactccatttcctcctcgatcttcttggccaggtcccgggccaggatgaccatctggtcctcgctgacctgctcgggcctcaccatgacccgcacctcgcggccggcctggatggcgtaggccttatccacgccgggataggagccggtgatggtttccagctgctccagacgcttgatgtagttctccagattctcccgccgggcaccggggcgggctgcggagatagcgtctgccgcctgcaccagacaggccaccacggtccggggctccacatcgttgtggtgggcctcgatggcgtggatgatgtcctcccgctccttgtacttccgggcgaactccacacccagggacacgtgggtgccctccagctcgtggtccacggccttgcccagatcgtggagcaggccggcccgcttggcagcctggacatccgcacccagctcggaggccatcatgccggcgatgtggctgacctcgatggagtgctgcaggacgttctggccgtagctggtccggtagtggaggcggcccagcatcttcaccagctccgggtgcaggttccgcacgccgcactcgaacacggcgcgctcaccctctgccttgatggtgttctccacttcccggcgtgccttctccaccatctcctcaatgtgggtgggatggatgcggccgtcggcgatcagcttctccagggccaggcgggcgatctcccgccgcaccggctcgaagcaggagacggtgatggcctcgggcgtgtcgtcgatgatgagatccacacccgtcagggtctcgatggtgcggatgttgcggccctcgcggccgatgatgcggcccttcatctcgtcattgggcaggggaaccacactgacggtcatttcggccacctggtcggcagcgcaccgctggatggcctgggccaccacttcccgggcgcgcgcctcgcactcttccttcatccgggactcgacctctttgatcttgagggcggtctcgtgggtcacctcggcctccacctgagcgatcagataggccttggcctcctcggcggtgaagccggaaatccgctccagcatctccgtctggctgcgcttgatgactttgatctcctcgttttccttgtcgatggccgcatgcttctgggccagggactcctctctcttctccagagcctcggtcttgcggtcgaggttctcttccttctgctgcaggcggttttcctgccgctgcaggtcggctctgcgcgacttctcttccttctcgtactcgctgcggttcttcaaaatctcttctttggcttccagcagtgcctcttttttcttggtctcggcgctcttgatggcctcgttgatgatgcgctttccctcttcttccgcgcttgagatttccttttcagaaacggttttccggtagcgaataccgaggaagaagcagatcacgccgccaactgccagcccgatcagggcggcaacgacgtttccaatcacggtatcttctcctcctgtgtccggtatcctgtacgctttgggttttatatgcaggccgcatgggccgcatgggcagaaaacaatcggaaggccccctgttgcctgccgacaattatccgtttttagtttaatcgttctgccctcttctgtcaaggcaaatctgtatatttacccaaattccgccgaacgcttttggagttttttacgaggtctgtcaggtgtacccctgtctccggcccgccggcttcccgccgcggcgggaagccggcggattctcacgtattgatgtatgccgcggcggcataccccacctgatccccgtagtgcaccacataccagccgttccattcgccgtagatcgtaacagcggcgccgttgggaaggttggcgatcaccttgccggaggaggatggatagtcccgcaggttcagcgtgccgttgctcacagacacggtgccctgcatcgggtccatggggtagataaagggcaggccgaaatactccgtcaggccccgggcaatctgctgggcgatggcatcccagtggccctccagccaggtggcgtcgctgtaattgtcgtggtagccgatctccagcagtacagagggaaaccggggctggcggacctctcccagtgaagtggtggggcgggtagtgaccttgttgggcaatggatagatcttccgcagctcctgggcgatgagctctgcggcccgctgaccgcccacgctgccggggtaatagaaggcaataatgccccgttcctcgccatagcgcccctctggggcggcgttggagtggagcgccagatacaggtcatactccccctgattggcctcccggatggagctgccggcagtcatctccggccggttgcgctggtactggatgccgttggagagcagatagggcaccagggcgtctgccagcaggttcatgttgtactcctcggacccgctgccggtaacgtacatgttccagtcctgagtggacgggctcagatagatcttgggcatggaattgtccctccttttttcccagtctatggcgtttccctcaaaaatgtgatacactggcctggaaatatcagagggaaaggaatcatgccatgaaagcggaacggaattaccccagatacaccgtcacggccaaagcggaggccgccatcctccggggccacccctgggtctatgacgcagaaattacagccacagagggacaggcggaaaacggcggcctggtggacgtgatcaacaaaaagggccggtatctgggtacgggctttttgtcggagcagtccaagatccgggtgcggctggtgtcccgcaacgccaatgaccagttcgacgccgccttctggcgccggaagcttcagtgggcctgggaataccggaagcgcgtgatgtctccggaggacctggacgcctgccggatcatcttcggggaggcagatgcctttcccggcctgacggtggacaagttccacgacctgctgtccgtccaggtgctgtccgtgggcatggagcggatccaggacatcctgctgccggcgctggcggagctcctccgggcggacgggttcccgatccgcgggatccttctccggaacgacgtggccctgcgggagaaggaggggctgccccagggcaaggggtggtatcccctgccgggggaagcggcgccggattctgcagtgacggagatcacggagaacggcgtgaaatatctggtagacgtggagaacggccagaagaccgggttcttcctggaccagaagtacaaccgccgggcggtggggcgcatcgcccggggcaggacggtgctggactgcttcacccacaccggatccttcgctctgaacgccgcgatgggcggggcgaagcacgtcaccgccgtggatgtgtcggagtccgccgtggagatggcccgggccaacgcggcgcgcaacggcctcaccggcgcagtagactgcgtggccgccaacgtgttcgacctgctgcccgcgctggagaaggagccgaagcggtacgacttcatcatcctggacccgccggccttcaccaagtcccgcaggaccgttgccaacgccatctccgggtataaggagatcaactaccgggccatgaagctgctgccccggggcggtcttctcgccacctgctcctgctcccacttcgccacggaggagaagttcgcagccatgctccacagcgccgcccgggacgccggagtgcagctgcggcagatcgaggcccggcagcaggcctgcgaccaccccatcctctggggcgtcgaggagacgaattatctgaagttctacctgttccaggtggtatgacgccgccgtttcccaacgcgccgccctgcgcaaacgggccgccccacaaggggcggcccgttttttatgggacatatgccgttttcagaggaggatctgtcccggatttcagccggttctctcagcccacttccaggaagcggaccacgccctggtacacatacagcgtggcgctgtctgcataggctctggcctcggtgagggtgacccagctcttggtctgcgtgttgtagcaggggacgctggcagggaccgtgtaggtccggccgttcaccgtgacggcacccttgccgctccaagcggtgttgggcacgttccgcagctcgtcaggatagaccaggctgccgatccgctgggtgtttccagaggtgacgatggtgatgcccacgatgtcgccgttgcgcaccacatagccggtctcaaaggtgggcgtgctcttgcccgcaccgtattccacagacagctgggcattgccctcccggttgccctcttcgtcatagttcgcggtatagttggcgcggccgaagatgtagccgccgccgatggcggaattcagcacgatgacctttaccctgcctgcccagtcggtgccggcgtaggtgatctgggaagcgggcacgctgccgtccgcgatctgggacaggctgatggcggtgaggccgctgccgtcgttctggaagacaaccacattgtccgccagattccggctgcccagcttgcgctccgccacattcagctcgccggagacgccgcccgtcaggcgggtcagggacaggccgcccttccggctggaggagacccgcaccagctggccgttcagccgctccacatcgctggcggagagactgaccgagcccttcacctggatgccgcagagcaggtccaccgtggcgcttccgctggagacctcggcgatgccgatggcattgccggtggccgtgttgccgctggccgccaccgcgccggccacctgattgtcctcggtcaggagcagagtgatctggtcgccgggcttgaactgggagaccgtctgcatagcggtgggcagcacgttgaactcatagcccaggaccgtgatcttcgtgggctccttgggattgggataacaatcctcatagtagccggtaatccgggtgtcgcacacgcggatggagttggtggtgctggaataggttgccacgtcgtacttgcgcatatccccggccgtggcgggcaggccgttcttgtagatggcgtatccgctggtgccgccggccagagagctgaagccggaggtggaccccttctcatagatgatgaccgcctcgttggacgtggtcccgccgccgccgacgaacacatagtccacaccgccgcctgcatccagatacagcgtcagggaggtgcccgcgttcagccaggagtagacctcgctccacacggactccttgccgttgtagtagacgccggtgtcgttgtccataacgtacttggtaccggtggtatccgtcagctccgtggccttggccgtggagaggaccacgaccttgctgctgcccacggaatccggcacaaaggtcagggcttcattaccgttcttgctgagcagcagtgtccccttggtgccgttgagcatgccgttggagaccttgccgtccgccagggagtaaactgcgccggaggccatctgcagcgccgttccggcgccccgcggtccgtcagccgtggaggagaccagcatctgccccgtccgggtctcgcccagtgtggcgagatagctgccgccctctttctggtccgcccgaagcagattcaaaaagagcttggccgcctgtccgcgggtcaggccttcgtttccagttccgctgacgccgtcggtcaggccgatgagcgcggcttccgccatatagctgtccggccagacgccgccgacgtcttcgtccttgtagcccagcatccgcagcaggatggtcaccgcctggcccacggtcaccgtgcggtcggggtggaatttcccgtctgcgtagccggagatgatgtttttgcccttggcggccatgttgatatacggcgccgcccaataagagggcttcacatctgaaaataccgtgacggtccggtagcgtcccagctcattgctgccgttcatggcgtagaccgccatcttgcagaactgcgcccgggtgaggacagtgccggggcggaaggtcccatccccatagccgtccagcacaccgagcagacgcagggattccaccgccactgccgtgctcttgtccccgacatcggaaaatgtgactgctgcggtattggccgcccccgccggcaccgccagcagggaaaccgccatgcacacggccagcagaaatgtcatgattcgtctcttcatcagtctctccctctcattctgcccgcagtgcttccacgggctggagcctggcggcctttgccgccggataaatgccgaacaaaattcccagcgccaccgacagcgtaaaggcgcacagggtaatccacgccgccgggtagatggtcatctggaacatcagccgtcccaccagcaggctgccgccggtgccgatgaggatgccgatgatgccgccgattccgcagagcatggccgcctcgatgaggaactggatgacgatgctgctccgctcggcaccaatggcccggcggatgccgatctcccgggtccgttcggtgacggtcaccagcatgatgttcatgatgccgatgccgcccaccagcaggctgatggcggcgataccgcccagaatcagggagatcatgcccatctgcttgttctgctcctgttgccaggagttctcctggtccacctggaagccgcctgcgttgggattaaccactcccttcaaaaagccgccgatgcgggagctggcctcgatcatgtcctcgctgctgcgggtcttcacgatgaactgctccggtgcgtcgccgcccagcacccggcgggcggtgtagggcagaatgatgacattgtcgatctggctggcggatgcgctttcaccggtaaggcggggggcatagacccccaccacctcaaagctctgcccgttgagctggagcaccttgcccacggggtccgcggcgtcgaagaagatctttgccgcccggtcccccagcacacatacctgcttgtagccccggatgtccaacacggacaggtcccggccggaggccagcgtcaggttgttgcagatgctgtactggtcgctgccgtagtaaatgctgggcggcacgtcgccggtgagattgccgttttcatcgtaattatagctcatattggcggtgctcttggtcccgtataccaccgtggcgttgcagtacgcctggggcgtcacgcccagcacatactccttgatgctgttgcagtagtcgtacagcgccggaaagtaatcctgacccaggctgttgccatcttcgtcatacaggtagttccagatgttgacggtgagcttgttgctgcccatggcctcgtactgctccatggtcttttccgtatagccgttgatggcggacacgatggtcatcaccgccgcgatgccgatgatgatgcccagcatggtcagggcggaccggccctttttgccccagatggacttccacgccatcttcacggcctgttggatattcaaagccagtccacctcctgctcccggtcctcaatgattctgccgtccgccaggcggacgacccgccgggccgtggcggcgatgccgttatcatgggtgatgagaatgacggtgctgccctccttgttcagctcctggaggaatttcagcacctcctgcccagtgtgggagtccagtgcgccggtgggctcgtcggccatgatgatgggaggcttggtggcgatggcccgcgcaatggccacccgctgctgctggccgccggacatctccaccggccggtgcttgatgcggttcgccagccccacccgggccagggcctccagggccatgtcccggcggtcgtcggcattcaccccctggtagatcaggggcagttccacattttccagcaccgtcaggctctggatcaggttgtactgctgaaagataaagccgatctgcttgttgcggatgtgggacagctccttgtccgtcagctcccggacgtccgttccacccaggagatacgtcccccgggtggggatgtccaggcagcccagcacgttcatcatggtggacttgccggagccggactggcccaccaccgccacgaactcgccctttccgatggtcagggagacgccgtccagggcccgtacctcgctctcccgcccttcgccatagatcttatagacgtcccgcagctctactaagttcttcgccatgggcatcaaccccacgcctgcagggactggatctgtgtgaagacctcggtcccctcttccacaccggacttgatctccacattggagttgtcggagatgccgatctccaccggcaccgcccagaagccctccgggatctcctcgctcagggtgggcgtctcaatggcgttgtccggccgactgccctttacaaacaccacgttcacggtggagccgtcctcctgggtcacagtacgcacgcactggagcggcaggaccaggcagttgtcattctcactggcagttagagtgtagtcgatatagctgttgacctgcagggtgccctcgctgttgtccgccgagatggtgataggataggtcgccacgccgttgttcaccgtgctggagaggctgaccgtctccacggtgccgaaggccggggtcccccactggctcagctccaccggcatccccggcttgatgtagctgatgttccgctcgtccacattggcggtaatcaccacgctggaggtgtccgagatggtcaccactgcggtatttgcagcgatctcatcgccgggctggatggtcaggccgattaccatgccgtcaatgggagccttggcgttgcagttggccaggttctcctccgcagtcttcagctcctcccgggcagtgtccaggttctgctggatggtgaagagctggctctcgctctcctccccgtcgatgcgcaccagcacctggccgggcgccacctgcaggtagtccaccagattgctggaaatcaccgtgccatccaccgtggaaaccaggtcgccggtgcggtagtacgccagcttgccagcctcataggggtacacggtctcaccgttcacagtggcggtggcagaggccaccatatccgccgtcagggctccctcattctccacgataatgtcggcggagaagagcttggacccctccggcgtgatgcggctgaccatgtggaccgcctccaccgtgccgggaacggaggtcatcagggcagggatcgaaacattcaccgtctgtcccacctgcaggtcgcccgcataggcgtagctgtaatactgctccagccgcagacgggtatcgtcggagaggaccgccaccttctggcccttggtgatggaatcaccgggattcagcgtcacggtctccatcagcttgccggcatagccggcggagagattcagtcctgcgatgtctttctgggcctgggagagctgtttctcatagccctccacattgctccgggccttctgcacggcggtctctgccgccggagagtcgatggtgaacagcggcgtgccggcagtcaccgtctcaccctccgccaccagcacatccaccactgtgccgacagtggtgatggtgattgtctcactgctcttggccttggtcaggccgctgccctggaccgtggaggtgatggaaccgtactgcacaatgtcggtgaccacctctccctcatcgctgctcttgccgcccagcactttcagcagcaccaccgcggcgatcaccagcagcagtgccagtatgcacaggcggatgatccggcgccgcttcttccgcgggatcgcctgccaccgggccttcaggtttacgcgcgtctccgcgggggcggcgctgtccgccgccgtctcctccatcgccggagcggtcgcttcctgttctacattctccaggtctttgacttcagccatggtatgtactcctcttcttgttcttcacagatgcatcaactgtattgcttataatagtacagtatgtagggcaaagcaataacaaaacagttacagtttctcccgcggcctgtatctcttgtaacctgcgggtatgtgtgaaaaagtgctccccggaagccggggagcactttcaaggtcattcagaccatggcggcgcgccgggcgctgaagcgctgatagaggacgatgccaaccaccaacacaaagccggcgatgtcggtggccgtgccggggatcatcatacccaggccgcccacagccatggccacccgcagcagcgcggggatgggccggtacaggaatccgttgagggccgccgccacgccgaagatgcccagcagggcgctgatgcagatctgcaccacctggaaggcaccggtcacatccacaaagagcatctgggggctgaaagcgaagatgtacggcacgataaaggccgctatggccagtttcgtggcgttgaaccctgtcttcatgggatccgccttggcaatggcgctgccggcataggccgccagggccaccggcggcgtgatgtccgccacaatgccgaagtagaacacgaagaagtgggccgccatcttggtgacaccgatggagggatccatcaggatgggagcgcaggtggccgccatgatgcagtagttggcggtggtcggcacgcccatgcccagcacgatgcagcagagcatggtcagcgccagggcgataatcatgtggccgccggagaggctgacgattgtgctcaacagcttggaggccaggcccgtcaccgtgatgcagccggagataatgccggccacgccgcaggccaccgccacagtgatggagcccttggcgccgccctccagggcgtcgatgatcttgccgaaggtgaggaagtcctcccggttgctgctcttgctggcgatctccaccacgttgttgaccaggcctacggccacggccgccacgattgcgatggcagcggagaaggccatggtgtacatattggtggagaccatgaccaccaacagcaccaggggcgccagaaggtagatcttgggcagcagctggcgcacgcggggcagctgctctctgggaatgcccttcaggcccagcttcttggcctccagatggacggcgatgtagatgccggtgaagtacagcaccgccggcaggatggcccgcatggcgatggtgccgtagggctcgccggtgaactctgccatcaggaaggctgcggcgcccatgatggggggcatgatctggccgccggtggaggcagccgcctccacggcgccggcgaactccggcttgtagcccgtcttcttcatcatggggatggtgacggagccggtggtgacggtgttgcccacggaggagccggacaccatgccgcacagggcggaggagatgacggccactttggcggggccgccgggggcggcaccggccacggcattggccaggttgatgaagaactgggcgatgccggtcctctccaggaaggcgccgaagatgatgaacaccacgatgaacttggcgcacacgctgatggggccgccgaagatgccgttgaaggtgtagaacatggtgcggatgacctgatagagggtcatcttgaaatctgcactgccgcccaggttgaagaaggtgtacaccagcagcacaccggccacgcacaggatcggcaggcccacgcaccggcggcacagctccaccagggccaggataccgatgaggccgataatcatgtacaggtcgttctgcatgacccgggcggacatctggaccacgttctgggcattgacggcgtagaaaaagtaggcgccgggcccggcaatcagcagcacgatgtcataccagggcatgtggttgacccgctcgtccccttttttggccgggaaggtcaggaagccgaacagcaggatcagccccacgaacatgggcagccgaacctcctgccgggtggaaaggaacacagtgtcgatgatgcagtaggcggagaacgctaccatcagccagcggatcaccagcttcggcagaccctcccagacccgggtgttggactcccggtcgtattttttcatgaccgcctccacatcggcggcggtccccacggaggtatcgtgggcgccggtatcctccggcggcacaggctccgtcttgtgtttcttgaacagtgccatagggtcccctctcatttcgcaagatatcttccaggccgggaccgacccgaagtcaaggaactacggcggagattccgccgtagttcccgatcaggctccgcctgagatcacttggtgggtacgtcaaagcccttttcggcgaagtacttggccgcgccggcgtgataaggcaccgcggtgacgccggaggcaaattccacatccagctcccctgccttgtcatgggccagattgtccatgttctcaaagatggtgtagcagatgttgtacacatcatcctcagacacatcgtcccgggcgatgacggtggctaccacggctacggtcttggtctccggcacgccctcataggtgccctcggggatgatgtactcctcgtagtagggagaggactcctggagcttggcaatgtgctcgtcatccaggcccaccagataggtgtccttggcggtggccagagtggtgatagccacggtgggggcgcctgccaccacgaaggcggcgtcgatcttgccgtcctgcagggcgtcggcgctggcgccgaagtcctggtactgggcgttgatgtcatcctctgtcaggtcataggcggccaggatatccagggcgttgtagtacacgccggagccagaggcgccgatggagaccgtcttgccctccagatccgccacggacttgatgtccgggtcacaggtgacgatctgcacctgctccatatacagagcagcgacagtggagaaatccgcataggggaacccctcaaacagccgctcgccgttataggcgtagctcatcacgtcggactggacgaagcccagttgggccacgttcatctgcatctgctcgatgttgtcctgggagccgttgctgaccacggccgtgaccttggttccgttgccgttggtggtgatggcctgcgccagcacgctgccgaagccgtaataagtaccctggtcgccgccggtgcggaatttcagctccgtgccggtgccggtgacggaagagacgttccagttggtctgggcagcctgctcagtgccggtgtcggcgggggcatccgtctcctccgtggagggattgccgccgcagcccgtcaggaccgccgccagcatcagcgcggcaagaagcagggataagcactttttcatgtttccattcctcttttcctgttagtcgatacagctcgtatgtcgctttgcatatcataccttatcctcattcattttacaaggttttttttacaattttttaatatttctgcaagtccaatttgcacaaccttcattttcccgtcccacctctctgaaatgccgaaaggccggccccaccggggccggccttctgccgcgtatgcttatttgatgaccaagatgagctggccgcccttgacggtctcgccctccttcaccaggatctccgacaccgtgccggacatccgggcggtgatggcggtctccatcttcatagcctcgatggtgaccagggtctggttcttctccacggtgtcgcccaccttgacgttgagcctgctcaccgcgccggggatagaggagcccacctggctcttgtcctccgggtccgccatggggaccttgacaatgttcttctgggcctcctcgtcgggcacctgcacatcccggcggatgccgttgagctcaaagctgacggtgcgcatgccctctttgtccacttcgcccaaccctaagtacttgatgaccagggtcttgccgtcggcgatgttgaccttgttggtctcgcccaccgccagaccgtggaagaacacatggctgcccagccgcatgatgtagccgtactccttctggttcttgacataatcctccactaccttgggatacaggcagtagctgaggatggcccgccaggagggatctgcatcaaaggactgcatctcccgcttcttctcctcaaagtccacggggggcagcagctcaccgggacggcaggtgatgggcttcttgcccttcaggaccacccgctgcagctccttggggaacccgcctgcaggctggcccatcataccggagaagtagctgacaacactgtccgggaaggccaggctctcgcccttctccacgatgttctccggggtcaggttgttctgggtcatgaagatggccaggtcacccaccatcttgctggagggcgtcaccttcacaatgtcgcccaccatctcattgaccttacggtagttctccttgacctccacaaaccggtcgcccaggcccagagactccacctggggcttcaggttggtgtactgaccgccggggatctcgtagcggtaaatatccgtggtattgtactccaggccgccctcaaaggagtcgtaacgcttacgcacatcctcccagtaatcagtgagggtctggagccggtccagatccagcccggtgtcccgctctgtgtccttcatggccgccaccacggcgttcagagagggctggctggtcatgcctgccatggagctgatggcacagtccaccacgtccacaccggcctcggcggccagcagcagcgccgccacctgattgccggtggtgtcatgggtgtggagctggatgggaatgccgatctcctgcttcagggtggacaccagcttcttggcggcgtaaggcttcagcaggccggacatatccttgatggcaagcatgtgggcaccccggtgctccagctctttcgccatcttcacatagtagtccaaggtgtacttgtcccgcttgggatccagaatgtcgccggtgtagcagatggtggcctggcagatcttgtcctgcttgaggacctcatccatggccacctccatgccggggatccagttcagagagtcgaagatccggaacacatcgatgccgctgcgggcggcctccttgatgaactcccggatcacgttatcgggatagttggtatagcccacggcgttggcgccccgcagcagcatctgcagcagcaggttgggggccttctcccggatcaggtccagccgctcccagggggactcgtggaggaaacggtaggccacgtcaaaggtggcgccgccccagcactccagagagaaagcatccgccaggatctcgctggtgccctccatacccttgacgatgtcccgggtgcggacccgggtggccagcagggactggtgggcgtcccggcaggtggtgtcgcagatcagcagtttcttctgccccagcacccagtccgccacggccttgggtcccttggcgtccagcatctgcttcaggccatcgggccggttgccggtgaccggtgggaaccggcagggatcgtacatcttgtgtccgtcccgctccttcaccacgatgttcccgatgtacttgagcatcttggtggcccggtcctggccctcgttcagctcaaacagctccggcgtctcgtcgatgaacttggtgtggcagcctcccgccaggaaggtggggttctgcaggatgttggagatgaaggcgatattggtcttgacgccccggatgtggatctcccggatggcccgtccggccttcaggcacacgccctgaaaggtgttatcccaggtggtgaccttcagcagcagggagtcatagtagggggagatctcgctgcccacgccggcggtggccgcgtccagccggacgccgaagccgccgggagaccggtaggaggtgatcttgccggtgtcgggagcgaagttgttggacgggtcctcggtggtgacgcggcactggatggcgtagccgttcaggtgcaggtcactctgcttcctgatgccgatgcggggatcgctgaggggacagccctcggcgatcagaatctgagagcgcaccaggtccacgcccgtcaccatctcggtgacggtgtgctccacctggatacgggggttcatctcgatgaagtagtggtgcccttccctgtccaccaggaactccagggtgccggcgttcacatagcccacgtgctttgcgatcttcactgcgtcttcatacagggcctgacggatcttcttgtccacggagaaggcggggctgaactccaccaccttctggtagcgccgctggagagagcaatcccgctcgaacaggtggaccacgttgccctcctcgtcgcccagcacctgcacctcgatgtgcttgggctccaccaggaacttctccatgaagatgtcgtcattgccgaaggccttcttggcctccgccttcaccagatcgaagttggtgcccacctcttccacggtgtcacaccggcgcataccgcggccgccgccgccggcggccgccttgagaatgacggggaagccgaactccatagccagcttctgagcagcctcccggctcttcaggggctctgtggtgccgggggtggtgggtacgccgcaggccacggcgatctgcttggcggacagcttgtcgcccatcaggtccagaacctgggaggagggtccgatgaacttgatgcccgcagcctcgcaggcccgggcaaaatccgcgttctcactgaggaaaccgtaaccggggtgaatggcatcggcgccgtgcttcttagccagctcgatgatccgggggatgtccagataggcgcccagggggctctcgttctctccgatcagataggactcgtccgcggcggtgcggaagaggctgtatacgtcctcattggagtagatggcaatggtctggaggcccaggtcgtgacaggcccggaagatccgcatggcgatctcgccccggttggcgaccaggaccttcttgaatgcttggctcatatatcgttcctccttctctccgccggcaggcgggaatcttttggttcagcttagtatacaccaaccccgccgccggttgcaacggcttccagcccggatttgtcaattttatcccgccgtcatattttgagcctggctgatggggcgctttgtctatttcagcaggtcttatgtctgctatcagcggcactgcggcccgccgggggcacaaaaaagacggcgccctcagggcgccgtctccggctcatctcaggcggtcctgccagcggctgcgaagctgaaccacccccgggcgtcccgcaggacaccggagaagccgtcccgcagtgtccagcccgtcacgctggtgtagaggggcgccacggccccctcctccagcagcagggcctccgcatcgtggaggcagcccatccgggcctccccctcctccgcgccggcgatgaccgacagcagggtatcataggcgctgttagcgtatttacccaggttctccggcttatcggagccccactgcatcaaaaagcactccgcatcgttgcccaaagcccggatctccgttcctgccagggtgaaggtcccctcctgcagggcggtgtccagctcttcccggctgacgccgcgggccgtcacctggaggcccagggcgctctgccaggcgtctaccagcgcctgggccacggcggcgccgttcccctcgtccacgtagagatattccagctcccccaggtcccgggcgtcggcgtatccggcctccgccagcaggccgcgggcctcctccgccagctcgtcccggtgcgcggggtcgttgtccagcagcacgccgccatctgtacggaaatcctgctccccgctccccggcacgccgggagggatcaggccctcagcggcatacgccgtggcgcccgccacctcagcagcggcagaacggtccgccgtcagagtcagcgcccgacggacccgggcatccatcagcgtatcctgcgcgcagttgaacaccaccgcctgaacgctcagctcccgcgccagggtccggctctccgcctcgatcaaggccgtcagctgctccgccgggaggatgcccaggaaatccacctccccggcgtcgtagaggtcctgtcccgcctctgcggtctccgcaaagcggaacgtcagggtctgcggcccggagaaactgttgcggtaggtctcgctggcctccagggtcagcgcctcaccagcctcatacccgctcacctgatacggcccgttggtcacaaggcccgtaaggtcgttccaccaaggggccgcctccgccggctccgccgctgcttcggcggtctccccgtcagcggcagcggtctcctcctgcagcaagtcctgccgcagaggcatggtggcgggcgcagtgcagacctccgtcaaaaaccagtcgaactttccgttcagcaccaccaccagggtgctgtcatcctccgccgtcacctgcagcagcgacacgtcgccggtctcccgcacggcgtcgtagcctgctaccacggacagcagcgacgcgctgggggaatcgttggccggatcggccagccgctgccaggcaaagacaaagtccccggcccggaccgcccggccgtcggaccactcggccttccgcagcttgaaggtccaggtcacggtgccgtcggcattctcctccgtactgacgctcttggctgcgccgttcgtcaccgtggtcccgccggagccgtctcctgttttccgcatcagattttcatacaggtggaccaggacggtctggtccgccgtctctgtggcgtagatgggatccagctcctccggcgcgccgcccacgcagacggagagggccggcccctccccgcttccgccgcagccggtcaggctgagagccagcagcgccgccgccaagaacagcgcccaccggcgcttccaattcttcatatcatcgttcctcccgctctggagtctaaaactggcacccctgccgggcacccctgcatatcaaaggacctggtctattataaagattatcaggcagcttgtaaagttacgagccgtcaaaaagtaacaaataattacaaaattaaaaatttattcacaaaccacagcaagaactcgaaaatgccctgtctcccagccggaaccagtggcgtgaaaagcgccgggcgcggatttccgcgtccggcgtttaaagccgttttcacgctgtggtcaggcggccgtcctcgtcgaacttcaccggaacgatctcgttccgagtcttctgggcgatatcgtcaatccgcatcttggcaggatagtcggagatgaaagtcactgccacgccctgacgcctggcccggccggtccggccgatccggtggacgtagtcctggttttcgtccggcacgtcgcagttgaacacgatgtccacatcatccacgtcgataccacgggccgccacgtcggtggagacgaacacccgcagctcgccccggcggaacttctccattacctgctcccgcttccgctggggaatatcgccgtggatgcactccgcgtcgatgccccgcatctgcaggaacttggtgatccgctctgtggagcccttggtgttgcagaaggccatgcaccggtcgaaacccgtctcgttcagaatcttttcaatggcgtccgccttaccgtcgtggggcacgtccatgcggaactgcttgatgtccggcttgttctgctcatcctcccggacagtaatctccgccgcgtcccgctggtacacccaggcgatgtccatgacctcccgggagatagtggcggagaagagtcccaggttcttccgcttgttcatcttgtccagcaggcgggtcacgtcatggatgaagcccatgtccagcatccggtccgcctcgtccagcaccacggtctgcgccgtgtccacccggacggtgcggcgcttcatgtggtcggaaagccgtcccggcgtggccaccacgatctgggggtgcttcttcagcgtgtcgatctgccggccgataggggcgccgccataaaggcacaccgtccgcacgccgggcttgaaggctgccaggtcccgaatctcgtcggtgatctggatggccagctcccgggtgggggccaggattaccgcctggacgctctcgtcctccgggtccacatgctccacgatggggatgccgtaggcaaaggtcttgccggtgccggtgggggccttggcgatcacatcctgccagtccatcataggcgggatgcagcctgcctggaccggggtggacacctcaatgttgcgtttttcaatggcgcgtatgatctccggcgacaggtgcaggctgtcgaaccggacgccttccgtaaattccatggctctcttcctctttcgtttatccgttggcctggccggcgcggctgcgcccgtagatcatgggcactaccaggactaccagtgccagcagggctgagaagaacgtggtctcgctggtcaccatagcgccggcggccaccaccaggcccgccagcatccaaagccagccggcaaaccggtggacctccttccacaacggcggattgtttaccgtaaaggagaaccgcagggccagcttggcatcctccgtgcagtcgaacatgtgggagcccagcagcatcagcaccagacccagaatgcagggcgtgtagaagttcagacttagcccctggccggaagtctccaaaatggcgccgctgcagaacagcagggaaatggttggaaagccccagcgccccatgagccggttaaacgccggtgggatcttcatccgcttttgatactgcagcagcatgaattgcgcgacagcctccagcaggcacatcaaaccgggcaggaggagcgccaccgcccaccggggcagggagtcatcctggccgccggggccgatcaggccggtctccacaatctccgggatccggtcccacatccgcacgcccaggatcattggcagggcgcaggccgtcagcgtcacgatcagcagcgcccgctgcttttccggcgacaggtgctttccaaatatctcagccccccggatttccaggtcgcggggcagggcctctctcttttttcggttgctcatagtcagccgggtcctccttctggggtccgcaggcagatcgctctgccgtcaaaatttttcttttctccgggcttcctatggactgcgccgggggaaacgggtattattatatatggaaaatacgcttttgtaaagcactgtcaaggaaaacgcccgtccaggcggagccgctccgcccggccgctccttgctctcccggagaaaagcagtcccggaatatgttcgcatttccccgtattcctccgttttttgagtaaatttgtcttataattgtagtaaaattttgtattgtgccccgtaagattcacaaattttatggtacattgtaagaaccagaaagctccagagcggatacggaggtgccacgtgaacggcggaatggattatgtacgcattttgcgggacctgcgggaagatgctgacaagacccagacccagatcgctgaggtgctcggaacatcccagacgatgtacgcccgctatgagcgcggggccaacgagcttccgatccatcatctgatcacgttgagcaaatactacggggtcagtacggactacctgctgggtctcagcaaggaacgctgaaacgcggacagggagagctccctgtccgcgtttttcaggtttcttcaatttgccggggcaatctcctgtgcttttgcctcgaccacgctgctctcgtcggcatcgggcaggtccgcggtaaagtgatctgctgcctgcccggtcatggtgccggaaaactctgtaagcccgttgtcgccgctgacagtctcatagctggtgccgtccccgttgtcctgggacacagtccaccggtccaggtcgccagtgacgtcaatggtgacggtccgggtctcccggctgccgtcctcatgcaccacatccatatcgtaggcgtagtgataggcacccgcggtctccatggcctcggtgatgtcaatctcctcaccctgagcgtggaggatcagccggccgttctccttggtgaccggctccccggccgccacggtgacatacacctcgttgccctggttatcctgggccaggtactgatttccggatgtccagacgatggtgaactgccggaagaactccccgtccgtggccacattcactgccccggcggtgacggccagcgccatcaccatggcagcggcaatggccgcgccccgcaggacccggggcatccgctttctgtgcttcatctcctgcattttctgaaaaacctcctgtttggcttggtcggaggcacggagatgggaaaaggtctcctggtacagtctcttgtcgatcatgactctgcctcctgtaagatcagtttcagcttccccctggcccgcatgagccaggtctgcacggtggacggattggcccccatggccgccgcgatctcctgtacggagcagtcttcgtagtagtagagatacaccgcggcccggtatttgggcggcaggcccatcacgtgctggtagagctcactctgctgcggcgtgtcgaacaccggctccccggcctcctccagaggcccggtccgcctgcgccacggagagcggagcagcttcttgctctcgttcaccgccacccggacgacccagtaccgctcatgctccggcgaccggaagggctttcgctccagatagagcttcagcagcgtctcctgcatcacgtcctccgcgtcggcgcggtttttcaaatagctgtatgccagccggaacacggtgtcgccatagcgctccaccgccccctcgaatgccgcgtctgtcaatctcatcacaccttgctgttgggatgggcggcagcgccgcccggaaaggcctttctatcgggaatatccctcactggggtgaaatatctcacccagtccgaaagtttttcaaaaatcatgcgccccgcgcaggagcgggatctcgaaaaccggaaacggctgagccgtttccggttttctgcgtttttctcagatcggatcacttgtggggcacgtgccagatgttgtcggcatactccgccacagcccggtcggcggcgaacacgccgctgcgggcgatgttgtgcaggctcatgcgattccaggccgtctggtcccgataggtctccgccatgcgcttttccgcctggcagtatgcctggaagtccgccagcaaaaagtactcgtccgcggggctgcccccggcgccgaacagcagccgctggtacaggtcgtcgtaccggacaccgtcccggaagccggtccgcagcgcgtccaggcaccggtgaagcaccgggtcccggttgtacagccgctggggcacatagccttcccgcttcagctgctccacctcgtcggcccgcaggccaaagaggaacatgttctcgtcccccagcaggtcgtgcatctccacgttggcaccgtccagggtgccaacggtcagggcgccgttcatcatgaacttcatgttgccggtgccgctggcctccttgccggcggtggagatctgctggctcacctcgctggcgggcatcagctgctccgccagggagacccggtagttctccagaaacaccacctgcagcttatcgcggcagatagggtcgtggtcgatctgatccgccagggagttgatgaggcggatgatccgcttggccactgcataccccggcgccgccttggcgccgaacaggaacgtgtggggctgcgtgatggcgttggggtcgtcctggagcttctggtacaatgcgatgatgtgcagcacgttcaaaagctgccgcttatactcgtggagccgcttcacctgaacgtcgaagatggcgtccgggttcagctccacgccccgggtcttcttggcatgggcggcgaaggccgccttgttggcccgcttgatggcacccagcctctccagaacagaggcgtcatcggcatagtcatccagctttttcagggcctgggggtgcagcagatagtcgtccccgccggtcaggtcccggatcaagccgtccagtccggggttgatctcactgagccagcggcggtggtcaatgccgttggtgacgttccggaatttccagggctccatgccgtaggcgtccctgaaaacgtcctttttcaggatctcggagtgtaggccgctgacgccgttgaccgccatgccgccggcgatgcagaggttggccatgcggacctgaccgccccagacgatggccattttctccgtcttcttggggtcgtggtagaagtcctccaccttcttctgccagcggcgggagatctccaggataatctgccacacccggggcagcaggaattccaccaggctctggggccagcgttccagcgcctccgaaaggaccgtgtggttggtgtaggccacggatctcgtggtgatgtcccacgcctcatcccagtccatgccggcgtcgtcgatcaggatccgcatcagctccgggatcaccagggccgggtgggtgtcgttgatctggatgacgttcttctcatggaagttcttcatggtgccgtacagttcggtgtgcttggcggcgatggactggagggtggcggacacgaagaagtactgctgtttcagccgcagagacttgccctccagatgattgtcctccggatagaggaccttggcaatggtctctgccatggcctcgtcctccgcggccttcaggtactcgccccgggagaacagggacatatccaccggctgggtggaccgggcgtcccacagccgcaggacattcacatgctccgtgccgtagccggcgatctccatgtcgcagggcacggcctggaccaccgtggcgtcctcattgacgatgtgcaggtggccgttgtcccagaactcccgcacggtgccgccgaagcggacctcctgggtctccgcgggctttggcatcagccaggccgcgcccaggtccttccagttgtccggcagctctacctgctggccctccacgatcttctgcttgaagatgcccagctcgtagcagatggaatagccggtggccgggatctccagcgtagtcatggagtctagatagcaggcggccaggcggcccaggccgccgttgcccagggcggcgtccggctcgatctcaaagatgtcggccgccttgaagcccaggtgctccagcgcctcccgcagctggggcagcagccctaggttataggcattcttcatcaggctgcggcccatcagaaactccagagacaggtagtgcacctgccgggcatgctgctggcgggccttctgacgggtctccacctcccgcagagccatcatgtcccgcaggaccagggcgctggcccgcatcatctctccatccgttgcctccgccgccgtctttccgaagctgaccatcagcttggcggtgagggcgttctccagggtctgtgtggtaattggtgtcatgcgtctccttactccgccggctcctgtttcccggcggtccccttcttgggtttggtctctttcttggcaggcgtcctcctgccgcttttggcggccgtctttttggcggccggtttcttggctgccgtccgctttctggcggcaggcttcttctccggtgcggccggagcggcctcctcagccgccggctcggcggacgattgtgccgcttccgcggtcggctgcggagcaggttcgtcagatgcgggctccgccgcttccgcgggggcggtctcttccgcgggggcggtctcttccgcgggagcggattcctccgccggggcggactcttctgtccggacgggctcctccgcagggggccaaggctggccggtgacggtgctgtaaatgtgcaggtactcccccgcgctccgggcccagctgaaatcgcaggccatagcccgcgcccgcagccgggcgaaggcgtcgggatagtccttgtaaagatacaccgcctcccggatcacatacagcatatcactgccggcgtaatttgcaaaggtaaatccgttgccggcgtccctccaggactcgtacgggctgacggtgtccttcagtccgccggtctcccggacgatgggcacggtgccgtaccgcatggcgatcatctgactcaagccgcagggctcgctcttggagggcatcaggaacagatccgcgcctgcatagatggccatggacagctcctcgttgtagtccaggcgcacggccatgcggccggaatactgctgggctgcccactggaagaactcctcgtacttccggtcccccttgcccaggatcaccatctgcaggggcagctccatcatgtcgtggagcacctcgcacaccagatccaggcccttgtgggacaccaggcggctgacgatgcccacgatgggaacgtagggctcctgccgcaggcccatgagcttctgcagctccgccttgtccgcctgcttgcccgccatgtccgccgcgctgtaattgacggcgatgtggggatccgcggcggggtcataccgcttcacgtcgatgccgttcagcacgccggagagcttgtagccgcaacggcgcatgatgccgtccagccggtgggcgaagtagggcatcttcagctcgttggcgtaagtaggagagacggcgttgacggcgtcggcgcacaaaatggcgcccttcagcaggttcacgtccccgtccatcagaatggtgccgtcatccgcccagccgtggtccaggccgaacaggtcccccagggtctggcggccgtagcggccctggtactcaatattatgaatggagagcacggtccggatactccggaaccgctcctcccgcacgctgtcgtccttcagatagatgggcaccagggcggtctgccagtcgttgcagtggatgacctccggccagaacctcaggtggggcagcatccgcaccacggcccgggagaaaaatccgaaccgctcgccgtcgtccatgtagccgtacaactccggacgccggaaatactgctcgttgtccaggaagtaccaggtgacgccgtcccgttccatggagaacagcccgcagtagctgtggcgccaggccaggtccacatagtcgtagcattcaaaatgcagctggtcgctgaatttctccttcaccttctggtacaggggcagcaccaccgccacatccgcgccctgggccgccagcgccgcaggcagggagcccgccacatccgcaaggcctccggttttgcagaacggaaccgcctcgctggccgcatataaaatcttcatagtcctctcctttcacgctcatgcgccccgccctccggcagggtcagggaccggcgggactccgtcagccggagccccgcccgtctattcgccgtcctggaagccttcctcccgcactcacacctgactgcccttggccagcacgatgggatacgagctgtgtcccatcagcgtccggtccggcaggatttctacatttttatccgcgatcagatgggacaccgccgcgccccggcgcaccgccgtctccttgaagagcacgcagttgcgcaccacagcgccggcctccaccaccacgccggggaagaggatggagttctccaccacgccctcgatgttgcagccgtctgcgatcagggagttctcgcagtagccgtcgggtccgatgtaggcggaggacttgtcagtggccttggctcggatgggccgctcggcacagaacagctccgcccggatggccgggtccagcagctgcatactgcggtcgtaatactcctgtacagagcggatctgcgccgcgaagccgccccagatgtatccctggagcttcaggctgtccttccgggcctggagcacgtcccgccgcaggctgtactgatcccgggtggcgcactcgtccaccagatccagcagcagcctggtggagaggatgtacacttccagcccccggtagcccctgggccggtggaggtgatacaacacatccgtgacgcggccggtgccgtccagctcaaaataggtgccgttctccgtctcaaagctgtcgttgccgcagactacggtgatgtccgcgccggacttgatgtgctggtcatagatgtcggacaggggcaggttcaccaccaggtcgccgtccataagcaccacatagtcccggcggatctcctccagataggagcggacgcccgccaaggcctccatcttgccccggaagaccgccgcctcgccccagtgctgcttgtatgcaaaggggggcaggatcttcaagccgccccgcttgcgggacaggtcccagtccttgccggtgcccaagtggtccagcaggctctgataatggccgtgaagcaccacacccacgtccgtgacaccggcgttcaccaggttggacagggcgaagtccaccgcccggtacctcccgccgaaggggatggacgacgcggagcggatctcccccagctcccgcaggtcattgcgcttttcataggaaaagatgatcccgtgcatgccgttcatctggacacctcctcgccgttcttgttcagcatcacgccggggcgcacccgcttctcatcctccaggacgcagcccggcgccagcaccgtcaggccccagggatccggcgccgtctcctccggcgtgccgcccaggcagcagttgcggccgatgcggcagccctcgcccaggatagcgtattccaccacggcgccgggctccacggtcaccccggggaacaggacggagtaggacacccgggccccctcccccacggtgacattgggagccaggacggagttctccaccgtcccctccagatcgctgccccggttgaaggcactgtggctgatctggcagcggcggcccaaaaaggccggcggcgcgttgacggaccgggcgtaaatgggccaggactcgtccagcaggtccaggcccgactccggggagagcatatccatgttggcgtcccacagggactccagcgtccccacgtccttccagtaaccgctgaagcggtaggcggccatccgttctccatcccccagcatggcggggatcacatttttgccgaagtcattttcggagttggggttggcctcgtcagcctccagataccgccgcagggtcttccaggtgaagacgtagatgcccatggacgctagattgctcttgggctccttgggcttctctgcgaactccgtgatgaggtcgttctcgtccacgctcatgatgccgaagcgggacgcctccgaccacggcacctccatgacggagatcgtgcaggcggcgcccacggccttatggcgctccaccatcttggagtaatccatcttgtagatgtggtcgccggagaggatcaccacatactccgggtcatacaggttgatgaacccgatgttctgatagatggcgttggcggtgcccttgtaccaggtgccgcccttgctgcccatgtagggcggcaggatgtggacgccgccggtggacccgtccaggtcccaaggcacgccgctgccgatgtagctgttcaactccaggggccggtactgggtcagcacgcccacggtgtcgatgccggaattggtgcagttggacaggggaaagtcgatgatgcggtatttcccgccgaagggcacggcgggcttggccatgtcgccggtgaggacgtacaggcggctgccctggccgccggccagcagcatggcgatgcactcttttttcatgtcttttccaactcctttgcctcttgtttcttcctgggtctggggaacgtcccctcgccccgcaggaacaccgcaccgaaggccgggatccggatggcggcggagcattcctttccatgggagggcacggcctccaccatcaccgcctcagaatcgccgaaaccgtcgccgccgtatgtggggtcatcggtattgaacacgggcacataccgcctgtggggcggcacgcccatccgatagttcgtataggtgttgggcgagaagttcaccgcgcacataaggtcgcggcccttcttgtccctgcgcagaaacaccaccacgttgttgtggttgtcgtccggcaccagccattcaaagcccgcccagtcgaagtcgacctcccacaaagccgccgtctttttataaaaggcgttgatctcccggaagaacttccggagcttctgattctctggtcggtccagcaggtaccagtctagctgcccgtcggagtcccactcgtgccactggccgatctccgcccccataaacagcagcttcttccccgggtgggccaggagataggcgtagaagcctctcaggcaccgcagctggttgtcgtagtccccgggcatcttccccacgatggaccccttcatgtggaccacctcatcgtgggagatgggcagcacaaagttctcagaaaaggcatacatcatggagaaggtgatgtccttgtggttgtactggcggaaatagggatccagcttcaaatagtggcacatgtcgttcatccagcccatgttccacttcagattgaagcccaatccccccacgtccggcgggcgggtcaccaggggccaggcggtggactcctcggcgatcatcagcacgcttgggtccgtctggaaggccatggtgttcagctcccgcagaaactcgatggcctccaggttctcgtgtccaccgtactgattgggggtccaggctccgccctggcggtcgtagtccaggtacagcatggaggccaccgcgtccacccgcaggccgtcgatgtggtactcttccagccagaagcgggcggaggagaagagaaagctcttcacctcgggccggccgtagtcgaagacccgggtgccccaggcggcgtgctcccgcttgttgggatcgctgtactcatagcagtaggtgccgtcgaattcgtagaggccctgagcgtccttgcagaagtgggagggcacccagtccagcagcaccaggatgccgtttttatgcatgtggttcacgaaccacatgaagtccttgggcgtgccgaaccgggaggttggggcgaagtacccggtgcactggtagccccaggagtcgtccagggggtgctccgtcaccggcagcagttcgatggcggtgtagcccatatccttcacataggcggccagatccttcgccaggtccttgtagtcgatgaagtccccgtttccccgctttttccaggagcccagatggacctcatagatattcagcggtgatgtatagaccgggtgcttggccttcttctcccggaaagcgccgtccgtccacttgaatccgctgatgtcatacagcttgctggctgtcgccggccgggtctctgtgtggaagccgtaggggtccgccttctggcggacctggccgtccgccccccgcaccgcatatttataggaagtatagaccggcaggtccggcagaaagccctcccagatctcgcccttacgggcgaggggggccgctccctcctcccagtcgttgaagtcgcccacgacggacaccgcctccgcatggggggcccagacccggaacgtccagccatctctgccccgctttttggcagggtgggcgccgaaccagcgccagccgtccgtcatcgtcccctggtggaaacggtccgcctgtccttgttttgccatggcagcagctcctctccccgccgcggagtatccccggcaggctcgtcattcttagagtaaagcgtttgcgcggaatctggatatgcatataattgtttatattatacttcctgggaaaaataccgtcaaggatggtcctgtcgaaaaagggcggcacaagttggtgggatttcccagttttttcccgtattttcacaagaatgtttggtgctttttgtgggattggtcaggatttttcccggaactttccgctttttaatctcgtctgaacagaggaaaaattttccgcccgtgttgggcggaacggaaaggaagaatcccatgaaatcccgctctctgttctgtgcggcactggccgtgctgctgctcctgctctccgcctgcggtcatccggcaccagaggccagcggagccgcagcggaagggctctccgccacggacaccatcacgccggaggaaggcgtcgccattctggaaaagcaactgggcgcagtggacgaggccaccggcaatgtgatgtcctacggctacgaagggccgcttactctggacggagtggactattacaactaccgggtctcctggctggtggacggcgatcacctgtcctatctcaccaactatctggtatccaccgacgggctggtggtccaggagtacctgccggagacggattgattgccaaatgaaaccacccgccgggcctgcatagccaaacaaatcctgcggatactagcttttgccaagcagaatcatcctgaaaaatctgaaagacaaaaggagttttcgatatgaaggcaactggaatcgtgcggcggatcgacgacctgggccgggtggtaatccccaaggagatccggcgcaccatgcggatccgggagggcgatccattggaaatctacaccagccgcgagggtgaggtcatcttcaagaaatactcgctgctgggcggtgtggaggacttcgccgcggagctctgcgagaccatgagccggtccaccggcagcgtctgcgccgtcacggaccgggacacggtcatcgccgtggcgggcggcagcaagcgggagcttatgggcaagcggatcaccccggagctggagcagatcatggagagtcggaaaatctaccagtacaccggcgagggccagcccctccaggtgacggagggcatcgacagcctgctgaccaccgtggcggcccccatcctggcggagggcgacctgctgggcctggtgctgttcatctccagcgatcccgctgccgtcaccggcgacaccgagtacaagctggcccagaccatcgccgcctttctgggccggcacatggagagctgaatcctctctcccgcgcggacgcctgtacaggcgtccgcgtttttgatggcatgaaatgccggaaagacgctatgctggaagtatcccccaattcggaaggagctgcttccatgacagtttcagagtggatcgcgtatgtggaccagcgggtctggggcccgggaatgctggtgctgctgatgggcaccggcgtcttcctcaccctgcgcacccgctttctcccctggcggaacctgggctgggcgctgaaaagtgttctcggccgtgactcccgcgccaaggcaggcggggccggcgatgtgtcccccttctccgccctgatgaccacgctggccgccaccatcggtaccggaaacatcgtgggcgtggccacggccttggtggcgggcggccccggcgccttggtgtggatggagatctccgccctcttcggcctttcctccaagtgcgcggagtgcctgctggccgtcaagtaccgccagcgggacgccggcggcgaaatgcgcggcggccccatgtataccatgtgcgccgccctgcggtggaagcggctgggaggtgccctggcctttctcttcgccctcttcacagttctggcctccctgggcatgggggacatggcccaggccaattccatcgccggggcgctggccgacagcttctccgttccggcccggaccaccggggtggcagtggctctgctggctctcgtggtcattctgggcggtatccggcggattgccggagtctgctccgtggtggtgcccctcatggcggtcctttacctgctggcgggcaccgcagtgctgctggggcatctgtccgctctgcccggagccgtggcagagatgttccgcctggccttctctcccgccgccgctgcgggtggcgcggcggggactatgaccgcctccgccctgaacgccgctcgctggggcattgccagaggctgcttttcccacgaggcgggcatgggctccgccgccatccctgctgcctccgccgccacagacagccccgcccgccaggggtatgtgaacatgaccggcgtattcttcgacaccacagtgatctgcacagtcacgggcctgtgcatctgcgcctccggcgtgctggggactgccgacgcttccggcgggcaggtaaacggcgtggccctcaccgccctggcctttaagaccgtgctgggccccctgggggggctgctggtctccctggggatcgtgctgttcgccttctccaccatcctgggatgggagttctgcggggaaacggcctttgcatttctcttcggccgccgggccatccctctctatcgaattctcttcgccctggcggcctttctgggcgccactcagagcctggaggtggtatggaatctctccgacatcttcaacgccctgatggcagtgcccaacctgatctccctgctcctcctctccggcaccgccgcccgggagctggaggccttccagccggagatccgccgcgggcggagactccggcagaggcgggccgtccggcgggcactctgagtccgctttcttcaggtgccaccgacgggggccgcctgcccctgccggcatgtccgggaccgtgtgcaggtccgtctccccattcggatgggaaatggcggaattcgtgaatttttttctggaggagttgcttttttccagtttgatggtaagataaagtacggtaaaaattttaaacaaaggacttgataccatgaccaaaattgatattgtctccggcttccttggcgccggcaagaccactcttatcaaaaagttgctggcggaggcctttcccggcgaaaagctggtgctgatcgagaacgagttcggcgagatcagcattgacggcggctttctgaaggagtccggcgtgcagatcagcgagatgtccgccgggtgcatctgctgctccctggtgggggacttccacaaggcgttgaaggacgtgcaggctcagttccacccggaccgcatcctcatcgagccctccggcgtgggcaagctgtccgacgtgatcgtggcggtgcagaacaccgccgatgagaccgacgacatgaagctgaacagcttcgtcaccgtggcggacgccaccaaggtgaaggtctacatgaagaacttcggcgagttctacaacaaccagatcgaggccgccggcaccatcatcctctcccggacccagaagatgagccaggagaagctggaggccgccgtggccatgctgcgggagaagaacgccgacgccgccatcctcaccaccccctgggaccagctggacggcaagaccatcctggcggccattgaaaaggtgtccctggcggacgagctgctggggaagatgcgcgccgagcacgccgccgatgaggcggagcacgagcatgcgcatcaccaccatgaccacgagcatgcgcatgaggagcacgaacaccatcacgatcatgaccatcacgaccacgaggagcatgaccaccatcacgatcacgatgaacacgcgcatcaccatgaccacgaccacgagtgcgacgatcccaactgctcctgccaccaccatcaccaccacgccgacgaggtgttcacctcctggggcaaagagacccccaaggtgtttgcccaggcggacattgagcggatcctcacggccctggactccggcgactacggcaagatcctgcgggccaagggcatcgtgaacggcgagggcggcaagtggatcgagttcgacttcgtccccgaggagcatgaggtccgggcaggccatcccgactacaccggccggctgtgtgtcatcggcgccgagctgcaggaggacaagctctcccagctcttcggtctgtgaactcttttcttgaaagactgtaaccacacttgatattgctgcacaaaatcaagtggagtccgtccccgaagtagggaaaagagccaaaagagcttcagcgcgccgcggtggccggtgtgagggactgtcagagtcgaaagtcagatttcctgctgtccgggcgcccgttccgcgtattttacccgaaaggaaatgcacattataatggcagacattcctgtttatctggtggccggctttctggatgccggcaagaccaatttcatcaacggcatcctggaggacggcttcgcccgccaggatcccaccctgctgctctgctgcgaagagggcgaggaggagtacgagaaaaacgctttggacaacgtgacggtcatcaccattgaggacgaggaggacctgaagtgctcctacctgaaggagctggagaaagagtaccaccccaaacaggtgctgatcgagtacaacggcatgtggcagatggagcggctgtaccgggaggttctgcccgccaactgggtgctgtaccagatcatgaccttcgtctacgcccccacctttgagatgtacgccaagaatatgggccagctgatgatggagaaaatcaccaacgcggacatgctggtgttcaaccgctgtacgccggagctgcgggacgccctgcggaagcggaaccttcggatggtgaaccgtcgggctgacatttacctggagatggaggacggcaccagcgaggactacctcaccggcgacgagtgccccttcgacctgagccaggacctgatcgacgtgccggacgacgacttcggtgtgtggtatgtggacgtgatggatcacccggaccgctgggcgggcaagatggtccacatgaagcttatcatgtgccactccaagaagtacccgggcatccactgccccggccgctttgtcatgacctgctgtgagaacgacatccagttcatgggtctcatcgccaagggcatgaacctgaaccagtaccagaaccgggactgggtggaggtcaccggccggatggcggtggagaagcacgccgcttacaagggcaaggggccggtgatgcatgtgatctccatcgggccctgtgagaagccccagcaagaagtcgtgacgttctaagaggggagcgggctcccctcctaaccaccctaccaccagtctgcggactggtgtgtgcccaaggcgcacggatcaacgtattttcggcaggcgcatgtcctgccgaaaatggatccgaatttcttcgaaattcgatacggggtgtataaccttgctgcaaaaatcccctccgttgttgaacggaggggatttttgtcttatgcgagaccaagcgcccaaggattctcatcgggcaggccccggcccgtctcccagcggctcacggccttgtccgtcacgtggagccgttccgtcagttccccctggctccagttcttctcttttcggcgccgggcgatcagcccgccggtggcttttgcgtccatgccatccgctccttttccagccatatcataccacaaaactgtctcaaaggcactctacacttcgcaggagccttgcttttttccggaaaatccttataatggaggtattctgtgtgtgtggaaatccaaccagaaaggaccgtctgctcttgaagctccatgaccattttcccaaagtccgactgcccctgtgggccacgcttctggccgctgtgctgctggcgggcgccatcactctgctggcgctctggtgccagcccaatgccctgcggagcgtcctggccgtcttccgggcgcagccgctgctgattatcctgaactgcctgccggtggggatgctgctgctggtgttcacctgcctgctccggaacgtgttcttcgccggggcgctggcgaacttcgccgtctgcgccctgtctatcgccaaccgcatcaagatcgaggtacgggacgagccggtgtttccccgggactttgccctgctgaaagaagcgggcagcgctgtggggacttacgacatccagttcccggtgccgtccatcgccgccgtcgtggtgttctcgctggtgctggtggccctggggcttttcgtaggcagccgccccttccccatcgcccggctccgcggctgggtgggaagcctgctgggggctgccgccagctttgccgtgctggcaggactgatcctgacagtctatgcctccaatgatctgtacaactccttccgggtatccaacgcctactatattccctccgtgttcaacgagctggggttcccctactgcttctgccaccagttcaccacctacccggtggacaagcctgagggcttcagtcggtcggaggcggccggctgggaccagggcggcgacaccggtctggggaaggatgtgaacgtcattatggtgatggatgaggccttctccgatatcacggacagcgacgctttcgctttcacagcggagaacgaccccctgcccaacctccacgccctgcgggaggatccccacgccgtcgccggccatatcgtggtgcccggcttcgccggcggcactgccaacacggaattcgacgtgctgacaggcatgcagaccaacgcgctcgctgccggaacgacctcctccttccgggtggtaaaccggaacctggacagcctcttccgggtgtttggcggcgatggctaccacacctccttcttccacccgggggacgactggttttacaaccgggagaacgtctaccgctggttcggggcggaggagaccgtatttgctgaccagatggaggcgcttgcatacaagggccgctgggtcacggatgactacatggcgggcctgattgaacaggaattcgcggacactgtggccgctggcgagacgctgttccactacacaaccaccattcagaaccacatgtcctacaccctggacaagtacggcgagagctatgcctatccggaggtgccgctgaacacggcggtgtccgacgaggtggagacgctgctgagagtctacaccgaaggggctcgggacgcggacgccatgctgggccgcctggtggacaccttctccgccgtggaggagccggtggtgctggtgttcttcggagaccatctgccctatctgggcgacaaccagctggcctacgcggaactgggcttcacggcccggccggagtgggacgcactgacctcctacgagacgccctatgtgatctgggccaatgacgccgccgcgcaggccctggactgggaggccgccgtagcgtccctggacctgccggaggatgggcggctctccgccagcttcctgggggccgcggtgctggagctcaccgggcggaccggggagagcccctggttcgactttctgaaccagctgcgccgggagctgcctgtggtgcagaagcaggcgtatcagctggcagacggcacagtgacggaccagctgacggaggaacaggcggcgaagatcgccaaatggcgtcagtggagctactacaagctgatgtataaggagatcgactgaaaacggcccccggtggacagtgtccgccgggggccgttcttttcttgacaggtctgactgcccttgatacaatggagaaaagccccatcttttgaaaggatgtgcgccccatgaagtcctggtctcaacgggaactggcgctggctgtgctggtggtctttgccgcaccggctatcccctatgtcacctcccgcttgctgggggatttgtcgtctcttttccttgggacagttcctctcatagggacgctcttgtctctgttcctctacgcttgtatctctgccctggtgacggggggccgttttttctctgggcccggagaggccgccggatctggccctgggtcttggctctggcggtctgcctgggtctattccgtcttttgtgtatagacataaatgccactaacaatctgctggcacttgttactggctatcacaacaatgagtccaccgctttccacctgctctacctacgggtatgctacagcggaatgctgtttggggtggccttggcggccattgtcgcctggttccttcgcaaaatcaactcctgacaagaaagccgcccggagccgttggctccgggcggttcggtgtggagctcccgcccctgatggatcgggacattggccggcccatggaaagctaggccgtgtggaattccggcccggaatcccgtgctcctttgcctacatcccctccagcggttgcagctccgttccttccgggaaggccccggcataggagacgcctaccgcatccagcagctccagccgcatccggcagaaactcccgccgccggtgatgcagaacacgttttccccctgccgcagcgtcaccggccagttgctccagatggcgccgtatgcctcctccgatgccccctgcagttcccaggactccccaccggccagacacaccgtcaccggctggtcctgggaggcataggtgcagttcaccgtggtcgtgcaatcctcctccacggcgacatagagaaacgccgccggttcctgccgggtggtcagggagaattctgccgtgatcggatcatcggcaaccgtcagggtttcaaactgcggccctgccggggtctcggcggtctctttccgttctgtctctggaaacgccgacagatcctccggaatatcttccaggcggccgcaagccgccatgagaaagcagcagatcaggatcaaaacacagtgttccttcttcatgaaaataccagtcctttcctcacgctctgtttatcaaacgaaatggctgcatccttttcctcatctcccgcaaaaaagccagcggctgtgccgctggctttcagacgttctcgtttttcgggtgaaaatgttcccacaccgcctgggcggcggcccggggcaccacggcggcaagggtctccacatccgcctcccggatggccttgatggtgccgaagtgtttccgcagctccgcccgccgcttctcgcccacaccggggataccgtccagggcggagcgggtggcgcttttgctgtggctctcgtggtggtaggtgatggcaaagcggtgggtctcctcctggatctggccgatgagggagaacaccgcctgctgggtgacgatgccgatctcccggccctccggcgtcaccagggcccgggttcggtggcggtcatccttcaccatgccgaagatgggcacatccacaccgaattcccaggccaccgtctgcgctgcccgggcgtgggtctcgccgccgtcgatcagaaacacgtccggcaggggcagaaacttctcgtccccatccgctgcccgctggagccgtcggcgcagcacctcctgcacggaggcgtagtcatccggatgtccctccaaagactggatgcggaaacggcggtaggcggacttcagcggccgggtgccgctgtataccaccatggaggccacgatgtcgctctttcccgtgttggagatgtcgaaggactccatccgcttcggaggctccggcagattcagcatcttccccagcagctccagggtgtaggcagtccgctcctccacggtggtggctcgctctgtctcctcctgggcgttccgctgggccatggcccgcagctccgccttctctccccgctggggcacgtggacccataccttgtggcccgcccgcttcgtcaggacctccgacagctcttcgcagtcctccgtctccatgggcagcaggatctcgtggggcaggatggcccggggaaggtagtactgggccgtcagggcggagagcatctcggcctccgactcctcgttgggggcggagaacagctccgtctcccggccggccagatttccctcctccatgtggagaatggcgtaacagctcttgccggatccccggtacagtccccagatgtccgtatcggcacagaggcccgcgatcaccgtctgctttttgctgagggcaccgatggcgttaatccggtcccggagcagcgccgcctgctcgaagtggagggcctccgcctccgcctccatctcggcggtcatgtcccggagcagctgcttgctcctcccctccagcagctgcaccgcctgctcgatccggcggttatacgcttctgctgtcatctccggccggcagaatccgtcgcaccggcccatgtggaagttcagacaggggcgctctgccccgatatcccgtgggaatttccggctgcaggtaggcaaccgcagggccacacacaccgcgtccagggcctggcgggtctcgaaccgaccgccgaagggcccaaagtaccgggcggagtcattggccatcttgttcaccagggagaagcgggggtatgcctctttggacaggcggacgaaggggtaccccttgtcgtccttcagcaggatgttgtagcggggcatgtgccgcttgataagggagttctccagcaccagggcctcgaactcgctggtgacgaagatggtgtcgaagcggtccacctgagacaccatgttccgcgtcttggcggtgtgggaggcgctgtcctggaaatactggctcacccggtttttcagcttcttggccttgcccacgtagatgaccctgcctgttttatccatcatcaaatagacgcccggcaccagtggcaggtcgttggccttctcccgcagctcttcctttgtcacgcccgccgcctcctcgcataaaagatacacggccttgcgcgccgcagggccgtgtcgtacttcctgtatcgaatgtgttattcgccgaagttgtccttgaccagttccaccaacgcctcgacagcctctttctcatcggcgccgtcggcgatcaacgtaatggtggtgcccttcacgatgcccagggacagaacgcccagcaggctcttggcattgacgcggcgatcctccttttcaacccagatgccgctcttgaactcatttgctttctggataaagaacgtggccggtcttgcgtgcagacctacctcattatttacggtgatctcctgtgtatacatgatccagctctccttttctataccaagtcaaccaagtctgttccaacagctccacatgataaccgatgatttttctgataacatcatacccggttttacacagacagtcaacggcgtttttcacaaacattttaaaatttccaggaaaccgtacacagtcttttcgtcttttagcctatctttcacaattttccggcagttaccccctcttttttatctatttctacaagggcggctggagacgcagacaggggacctcccaaaaggaggtcccctgtggacagtgggatcaatagttctcggccttcacctggaagtaggcctgggggtgcttgcacaccgggcacaccgccggcgcgctctcggcgatctccacatggccgcagttgcggcagaaccacatgaccttctcgcccttcttgaagacctcgcccttcttcaggttgtccagcagctttaagtacctctcctcgtgggtcttctcgatcttggccacgccctcgaactgggcggccagcgccaggaagccctcctcctcggcggtcttcgccatctcggcgtacatcttggtccattcctcgttctcgcctgcagcggcagccaccaggttctcctcagtgctgccgatgccgtccagggccttgaaccacagcttggcgtgctccttctcattcagagcggtttcctggaagatggccgcgatctgctcgtagccctctttcttggccttgctggcaaaatagtcgtacttgttccgggcctgggactccccggcgaacgcgatccacagattggcttccgtcttgctgcccttcagttccatgtgtctgactcctttcaaattttacaattgtctcttttttcctctggtctatactcatgccggccgtcctgtcccgcacagcgcgggcagtgtccggtgaatatcagggtgtggcccgtgaccacgcagccccgggccgcagccagacggtccagcctctcgtcatagggcacagtctccagatccagcacagccccgcaggcgcggcagcggaaatgggtatggggccgagtcaccgcgtcaaagcgggtcacagggccgtccagctctgtcaaccgcccctcccgggccatctgctggagattgcggtacacggtccccaggctcagccggggcatctccggcttcagctgctgatagaccatctccgccgtgggatgggcgcggctctccagcacagtctggtagatccgctcccgctgctgggaaaaacgctgcggcataggctttcttccttaaatagtaataattactattatttatatatcatatcctgctggaaaatgcaagcactttttcaaaattcggacaacattcgactgtccggcgctggcggaaacttccgctgctaaatccagacgccacggagacaataacacctgggtatcgcgaaacaaacgcccgcgcaaagggaggtcaacccatgaaaagacagtttacgctcttgctggcctctgtcctggtggtgtttgccctgaccgcctgcggcggcaacgacaaagacaccaaccaagataacaacggccaaaacacggtcggagaggatatccagaacgctggcgaagacatcatggatgccggcgaggacatcctggaccccgacaacaacaatagcaacaaggacaacgggaccggcgatcacaagaacgaccagaacaccaccgacagaggtgacagtgccctcaccggcggcgacaccaccgtggaggatgccgtcaccaagcagaacagccgtcccggcgtatcctacggacaaatgctgcgcaatgcccgggtccacgattccgacgggcttctgacggaccacgaaaatgccgccagcggccgcacagcataaaaacggacagagaagcgttttgcctgcttgaacaggaagacggcgcgcagaaaacacacagggccgcggcaacagctgcggccctgtctttttccgaaagggcttgggaaggtccttgccttttccagggaacatggtacaataaggcaaagcatacattttgtggaaaaggagccgctatgagcactgtgaaagaacccctccaccccctgaggacagcccggtacctgtggctgggcatccttctctgcgccctggtgggcggcgcctgctttctgggcgggcggtggtccgccggccggtctgagacagcgaaaatagacacggtcgtcctgcagaatcagctgtcggagatccgggagctggccacggtcacctacgcctacaccaacatggcccagttcgagagcagcaacgacttctacggggtgaaaatccccttcaccaccaagtccttcatccttacctacgacggcaccgtcaaggccggggtggacctggacggggcggaggtgtccgtcagcggcaccacggtcaccatcacactgccggaggcggagatcctctcccacgagatcgatgaggacagcatggaggtgttcgacgagaagacctccatcttcaatcccttcacagtggaggatttcacctccttccagtcggatcagaaggcagccatggaggaaaaggccctgtcccgcgggcttctggcggaggctcgcgccaaagccgtctccagcgtagagcagctgtttgccgccgcactgccggacacatacaccgtcacggtccaataaaaaacagaggcggagccgcggctccgcctcttctcatgccaggatatagtcccccagggcctccggcgtgtccgccagatggtccgccccggcgtcctccagctcctgccggctccgaaatccccaggtgacgccgcaggccgtcaggccgccgttgtgggccgtttgcatatccacgccgctgtctcccacaaacaacgtctcctccgggcgcactgccaggtcggccagcagagcgtggatgcccgccgggtccggcttcaccggcactcccttgacttggccccgcaccagatggaagacaccgggaaagtagtgttccacgatctcccggcaaaagccgtccgccttgttggagtaaaccgccagggtcactccccgtctccccagccgctccagcagtgccgggatgccgtcatagggccgtgtctcgtccatgttgtgggcgccgtaataggcggaaaactgggcgagagtattggccagcagcaggggactgcggctcttctccggagaaaaccgccgcaccagattggggattccatggcccaccatggtcttgaactcctctgcggagtactccggccagccgttccggcggcagacccagtttccggcattggtcaggtcctgaatcgtgtccagcagggtgccgtccaggtcaaagatcactgtatgatacatggcccgtctcctttgttcttcggtaagattgtttttattttatcaatttctccgcaccgctacaactggcattcaaaccgaaaggcgcggttttcaccgcgccttttttatgaaagtttcccgtcatttcacagggggcagggcttccaacccctcccggtcagcagaacacattcccggaaacccgccgctcttgccagctccgccgcctggccgtagccgtacacgaccgtttccgggctgtgggcgtcggcggtgaggatgatctgtcctcccatgccccgccactcccgcagaaggaacaccgccggatagggcgtgtcccggtatccccgggagatggcgccggtgttgacctccagcagcgtggcatccgggtccgtgtggtgcagggcctccagcgccgccgtgcggcagcggggatcgtcctcgtcaaacagggcatttccccgattcagcttggtcaccaggtcaatgtggcccagaatggcgggtcttcggtccgccatggcggctacatcccggtagtagccctctgtcagggccagcatatcgccgccgaacatctggtcccggcaggcgatcagccgctcccggtcccagtctatgccatggtacttcccggtcttcgggtcatagaggttgtggacggagccgatccagtagtccgcccagtccggaaccggctgtgcggaccggctgtcctgctcgatacccagcaggacctccatctgtccggcgtattcctcccggaggcgtagcacctgctcccggtattccgccggatcggttggcaggacgttgcccgcgtcgtgggggatctccgtgtggctgtggccggaggcgccgaagaagcggacccctgccgcatacgcggccgcagccatctccgccagggttcccttcccgtcgcagagaacggagtgggtgtggacggagcagcattccggtgtcagattcattgcatccgctcctgcttcaccttgtggtcgatgacatggcgcttctccaactccgccgtcacgtcctccagggtgatgcccatctggaccatcagcaccatcacatggtaggtcaggtcggcgatctcatagatggtctcctccctgtcctccttgcggccgccgatgatgacctcggtgcactcctcacccaccttcttcaggatcttgtccaggcccttttcaaaaagataagtggtgtagctgccctccttgggatcggtcttccgcccttggatcaagcggtacaggccctcatagctgaaagccttcaactcctcggagaggtagaccggccggaagaagcagctctccgccccggtgtggcaggcggggccgtccttcaccacctccaccaccagggcgtccttgtcacagtccgcggtgatggacaccacatgctggacgttgccggaggtctcccccttgcgccagagctgctggcggctgcgggagaagaagcaggtccggccctcgtcaatggtgatggccaggctctctgcgttcatgtaggccagggtcaggacctccttggtgtagtggtcctggacgatggcggggatcaggccgtttgcgtcaaatttcaaatccatggtgctgtctccttttcttgggtatgccgcccgtgggcggctgggactccgcttcccgtccgggaccgggcgttctgtcagatccgcatctccacgccttgcgcccgcagatagtgcttcagctccttgatatccacctgccgggtgtggaagatggacgccgccagccccgcatcgatgccggggtgggtgaagagctgggcaaagtcctccattttcccggcgccgccgctggcgatgatgggcacgctcacccgtgatgccagggcgtccagcatctccaggtcaaagccctgcttgacgccgtcggtgtcgatggagttcaacacgatctccccggcgccgtcggccacgccccgggcggcccactccatagcgtcgatgccggtgtcctcccggccgcccttggcgaagaggcggaactgcccgtccacccgcttcacgtccatactgagcaccacgcactggtcgccgtactttttggctgccgcgccgatgatggcggggtccgcgatggcgccggagttgacgctcaccttgtcggcgccgcatttcaagacccggtcaaagtcctccagcgtccggatgccgccccctaccgtcaggggaatgaaaatctcgcccgcaacccgccgcaggatgtccgtaaacaggttccggccctccgcagaggcggtgatgtcatagaataccagctcgtccgccccggattcgttgtagaaccgggccatctccaccgggtctgccatatcccgcagaccctcaaagttggtccccttcaccacccggccgtccttcacgtccaggcaggggatgatccgcctagctaacatgcgcccacctcccggatgaccgtttttaaatccagacggcccgtgtacagggccttgcccagaatggcggctttggtcccgatcttccggagctcccgcagctcctccagactgctgacgccgccggaggcggtgatgtccaggccctcaatttttgccagctcccggtagagcgccagattggtgccctgttccgccccatcccggctgatgtccgtatagatgacggtctggacgcccgcgtcccggaggcggcggcaaaagtccacgcccttttccgcagacagctccttccagccgctgacggccacgtagccgtcccgggcgtccacccccacggcgatccggtcgccgtatgtttgggccatccgctccgtgaagtcgaaatccttcaccgcgatggtgcccaggatgcaccggcccacacccagatccaggtaccggcggatgcggtcctcgtcccggattccgccgcccacctcgatgtagaggccaccctgtccggcaatggcggcgatggtgtcaaagttggccagggtgccgtccttggcgccgtccaggtccaccacatggaggtatccggcaccggcggcgatgaagtcccgggccacggcgcaggggtcctgggcgtagaccgtctctttgtcatagtctccctgatacaggcggaccacctgtccgccccgcaggtcaatggcgggaaaaatctgcatagaccacgtctcctctgtcaatctttgttcttgttgtccagaagcaccagcaccagaccgatgatcccacagagcagacccaccggggcccaataggcccgcatccaactaagaatcgtgagcgcagggggctcaaatccgaccaataccagcagaatgccgaacaggatccaggcaaaacccagccagatccgcctcatgccgtctcctcccaatctaattataggtgctccttgcaggagagctcctccgcatccagccgcaggacgcacacggcgtccaccgccgcgtccggaaaggtccagtccccgcagcaggtagcctggcgcatgatagccgccagaccccgccgcttctcttccgccgtctccaccacgcggatggggccctcgccgatgacgctttgaaacgcggcggtgtagccgcaggccgcctccgccccctgaagccggtagccggtgtccagctcgaacccggcccagccgtttcggcggaccaggtccaccttgcgcccctccgcggcgccgtggaagtaaaagacatggcggccgccctccaccgtgtggccgaagttcaccggcaccacgtagacgcctctgccgtcctgaaggcccaggcggcagacttcacatgcgtcgatgaccgcccggattttctccggagccgtgacggccctgtcctgtcgtctcataggtctcatggcatcctccctcacagttctgcaaaggcccgcagcagccgcagtcccgtgtccccggatttctccgggtggaactgggtgccgtagacgtttccccggcgcaccacaccggtgacatccacattgccgtaccgggacgcggccagagtgccggcggcgcagtcccgggcatagaagctgtggacgtaatacacatactctccgtcccggacgtggcggaacagggggtcatctttcaaaatctgcaagctgttccagcccatgtgggggaccttcagcgtcttgtccgtcaggtcccggcggaggtccactacttggccgggcaccagccccaggccggggtgctccccgtactcaaagctcttgtcaaacagcagctgcatccccaggcagatgcccaggagaggcttcttctccgcctcctcctgaatcaccggcaccaagccggtggcatccagcttggcgcgggcgtccccaaaggcgcccacgccgggcaggatgatccggtctgccgcccggaggcggccggcgtcgccggtgacctccgcctccaggtccagggccctcaggctggagagcagggagaacaagttccccacgccgtagtctacaattgcaatcatttacagcacacccttcgtgctgggaatttcatcccggtgtttttcgtccggggccacagccatcttcaaggcccggcccgcgcccttgaacacggcctccagaatgtggtgggtgttctccccggccatctgccggatgtggagggacatggggcacgcccggacgaaggccaggaagaactccttgcccagctccgtatcgaagtcccccaccctttgggcgggcagatccacggaccagcccaaatagtcccggccggaaaggtcacaggccaccagcaccagcgtctcgtccatgggcaggaggaactggccgtaacgggtgatgccccgcttgtcccccagggcctccgcaaaggcccggcccaggcagatgccgatgtcctccacgctgtggtggccgtccacctgggtatccccctggcagcggacgatcaggtcaaaatccccatgccgggcgaacagctccagcatgtggtccaggaaccccacgccggtggcgatgtccgccttcccagtgccgtccaggtttaaagagagctggatccgggtctcccgggtgtcccgcctgatatcagcagtgcgcatctctccgcctccttacagctcttccaggatggccgtcagctcctccaccagggtctccatctgctccatggatccgatggtaatgcggatatagtcccggatccggtccgcgtcgaaccagcggaccaggacgccgttctccttcagcttccggtacagggtctcaccgggaagctggcagtggcgggcaaagacgaagttggcctgggagggcaggacagtgaagcccaaattctccagctctcccacggtccaggcccgggtctgccggatggcagcggtgcaggcggcgaagtacgcctcgtccgccacagcggcggcccctgccgcgatggacagccggtttacattgtagggatggaagctgtatttcacccggttcaggtccgcgatcaactccgggctgcccaatgcgtagcccacccgaccgccggccagggaccggctcttggacatggtctgggtcaccagcaggttgtcataacggtagatcatgggcacgcagctctcggcgccgaagtccacatacgcctcgtccacgatcaccacccggtctgggttcgcctccagcagccgctggatgtcgttccggggcacggcaataccggtgggggcattggggttggcgatgacgatggtgccggggaaatccatatagtcgtccacatgtaaggtgaagtcctcccgcagggggattatcttcacatccagatcgaacagggcagcctgggacttatagaacccataggtaacatccgcaaaggccacgggttgccccgctccgcagaaggcccggaaggcaaaggccagcacctcgtcagaaccgttgcccgccagcacgttcttggctttcagctcatagcgcctggcgatggcctccgtcagcgcggcacaggtggggtcggagtacaggttcagtttcaggatctccgcccggttgatggccttgagaaccttgggcgacggggggaaggggctctcattggtgttcagctttacatactgctgatcctggggctgctcgccgggggtgtagggggcaaggcgctccgcctcctgggaaatccagcgactcatgggatcactctcctttctcttccgtgcgggacagggcagaccgggcgtggccgtggaggccctcccgctctgcaaagtccgcgatccggggggcggcgtctgccagcgcctcccgggtgtagtagatgaactgggtcttcttcacaaagtcgtctacgctgaggggactggaaaaccgggccgtaccgctggtgggcagggtgtggttgggacccgcgaaatagtcccccagcgcctccggcgtgtggcggcccagaaaaacgctgccggcgtttttgaccaggggcagcagggcaaagggatcgtccacgcacaactccagatgctccggagcgatgcggttggcggcctccactgccgcggccaggtcctttgtcaccaggatcttaccgttggcctctaaggacttttgagcgatatctcgccggggcaggtccgtcagctggcgctccacctcgttttggacggcctccgccagggggcggctgtccgtcaccagcacggcggcggcgtgggcgtcgtgctccgcctggctcaacaggtccgccgccacccaggcggggtcgctcttcccgtccgccaccaccaggatctcactggggccagcgatcatgtcgatgtccacctgtccgaacaccttccgcttggcggcagccacaaagacgccgccgggacccacgatcttgtccacctgggggactgtctccgtgccgtaggccagggccgccaccgcctgggcgccgccgatcttgaacacccggtccgccccggcgatttttgccgctgccagagcttctgcagagatggcgccgttttggttcggcggcgtcaccaccgcgatctcttttaccccggcgatcctggcagggatgacgttcatcaaaatggtggagggaaaagccaccgggctgccgggtacgcagatgcccacccgctcgacaggcgtgtatcgctggcccagcaccacgccgggccggtccgtcaggcagaagtcccggtggacctgtgcctcatggaagtgccggatattgtccgccgcctgccgcagcgtctcccggaaattcccgtccacacagtcccaggcggcgcgcagctcctccgccgtcacctcaaaccgctccagatctgcgccgtcgaaccggcgggtgtattcccgcagggcctcatccccccgggtgcggacgtccgccagaatggcggccaccgccgcatccacatcctcctccgcctggggggggcggtcaaagaggggcaggtcctccaggcggtccgcctcatagatgggaatcatgcctccgtcacctccttcagcctgcccagaagcgcctcgatctcctggtgcttgaactggtagctggcccggttggcgatgaagcgggccgagatgggcatgaactccgtcagcaccttcagatcgttctcccgcagggtggtgcccgtctccacgatgtccacaatcacatcagagaggcccaggatgggggccagctcaatggagccgttcagctggatgatgtcgatgtctcggccctgggcggcgtagtaccgcttggcgatattcccgaatttggtggccacccgcagggcccggctctggtcctcggtaaagtctttcggcccggccacgcacatgcggcacctgcccaagcccgtgtccagcagctcatacacatccgcgccggactcggccaggatgtccttgcctacgatgccgatgtccgccgcgccgtgctccacgtagatggccacgtcgctgggcttcaccaagaagtagcggatgcccgcctttcggttctccaccaccagcttccgggtgtcggcgtagttttccgggcagccgtagcccacgcccgccagcaggtcgtaaaccttgtctcccaggcggcccttgggcagggccacgttcagcatcaccaggccagccggctccgccgccgcgtcggacagccggtccagctcgtctaagtacagcgcaaagccgatggcccgggcgccggggcggaactgctccgccagggggtcatactgcccgccccggagcactgcccggggcgctcccgccagatatccctggagcaccaagccgttgtaatactccatatcgttcaccagggagaagtccagcttccagtggtccgtctgcccctggtcctccagcgcccgacacaggccccgcagctcttccagcgccgcccccatggcggcgttcagggccagcacctccgcggcagcaagaacctcctgccagggccctgccagagtccccaggcggcagagtgcgtccgtcccctggcgggagaggcccgcggcctcagcggctttgcgcagctcatggacgtttttgtcccggatgcaggtgaggagcctgggccgcacagcctcctgggcgcccaccgcgtcaaagaggccggtgacgaagcccatgtggctgatctccagcacgaagtcccgcccggtcagggccaggctccgcagggccagggacaccacctgggccgcagcggcatcatccacggcaccgatgcactccaggcccatctgactgatctcccggaaggtatggctctcctggctggggcggtagacgttttcctgatagtagtaccggccgcagccgccgggccccacctgggcattcttggcgatggagagggtcacgtccggcttcagcgccagcagccgcccgtccaggtccgtaaaggtgatgacctgctcgctggaaagaaaacggcggttctcctgatagagaccgtattcctcgaaccgacccatgtggtatttgcggaagccctcctgttcatacagcagccgcagctgcagcgatgcccgctcctggggccgcaggacgttcagatccagttccatggggactctcctcccggcggactatcagcccgcgttgatttcagcatttattttactttattttattagcaaagtaaagcggtaattcggtagtaagaaaaattctatgcttttaacaaattcaacttcgcacaaaacagaagttaacgtgattttacacccaggatggtgtttttgcaatctccctttcccctgttcccgccctgacatttccagccctaaaaatgaaattttcttcatagatagaggatttccgacaaatgctccttttatcatttaaagaaaacccatgattctatggagtatggcaatgaaaagaagtacccctctgacccgcaacatcggcgcgaaagtgaaatactaccggaagctccgcggcctttcccagaagcagctggccgcccagctgcagaccaacggctgcgatatcacggagaccatgctgggccacatcgagacgggctaccgctccacttccatttttgagatcgacaagctggccgaggcgttgaaagtggactacaacgccctgtttgcccaggattaacggcacggtacggagagatctccgcgccgtgccgttttgcttccggtcatccgttgtccagggccacggtgtaggtgaaggagaggcggttgccctcctccaccggctgccagcccatgccttggaagtaacaaaagcctgtctgctccacctctgccgtgatgattacccccggctgatgaagggtgaagccccgctcccagtccgcctcctcctgctcccgcagctgggcctgccgggagagagaccagaaaggcgcctccctgcgcccccagaccagggccgtcacgatttggggcacatagctgtcaggtgtttccacccacatagctgtggtattttggaaggttccggacatggtgaccgctgtgacatggccgtcctccaccgtgtagtggaacgccttggcatcgtcccaggggttcacatccatcaggtcttccagggagatgatctggctgccatcctccggcttttcctgccactggccgtcttcatccagataggccctgccgccaaagtccagatattccgcctggcggttgtagttctccgcgaactccgccacagtcagatcccctctgttgggcggcagctgggaccagctgttgacagcctctcccactatcagcaccaggagtaccgtcaggatcagcgatgcggcgtatcggagccggaagggctttgcggtgtaggccaccccgtcgtcccagggctggggctcctctttccagcaccgccaagcagatcggaggatcatcacaagagacagtatggggatataaaagcccaatcccatccatagcatcatgagatagcgggtcacgccctcgctgtatgggaggttttttccatccattccagccagccgcatccccaacagggcctgcccggcgtggtgccccagagatgcagggacagaggttccaaaacacccagcaggaccacccccgcgaaactgatagccagtgcggcccgagtcgggttataccccagcaggcatagtcccgccaccagcagcatccgcaccagcatctcatcgaacattcgggcgaacagccgccgggaggcgctgcacaccgtaggcagccggtccgtctccggcagggccgaagcagatgccttctcccaccaggggccgccctcccccggcagggccggggcgtccaggtccgccaggtacctccccgggtccaggccggtgaatgtggcgccggtccgccgcaggtcgccgcagacccgctccacccggcccagggcggcctgttcgccgcccacctccgccagccgccggtccagcacggcagaaagttccgccctgccgtcccgcaaggcccgaagcgcctcgatggttactcccagccgccgcagcagcttgatcttctccagggtccgcaggtcctcctcgctgtaatcccggtagccgttaccggaccgggcgggggccagcagcccctccgcctcgtagtagcggatattggcccggggcacgccggaccgggcctccatctccttgctggtcaatgataccgcctcctttggcctcaggataaagtatcaagggacttgacagtcaagcctttttcgcaaaaaagccgcccgccgccggagatttcccggctggacattcccctttgcctctgctatgatggtatcatcttcgccggggctctgcaagaccaccggcagatcaataaaaaggagagactgccatgttcaccccatccgacaagtgcccccgtcgggatgcctgcgtccagaacggcaagggcctcatccacatgaaggacctgacggacaaggagggcctctataaccacggccgcctgttcgcccacgtcaccgtggacccaggctgctccatcggcgaccacccccacgaccatgagaccgagttttactacatcatcaagggcgagggcgtgttcaacgacaatggcaaggagatcgtggtccgccccggcgacatctgcgccaccggctacggcgaggtccacggcctggagaaccggggcacggaacccgtggagctgattgctttaatcgtgggagaataaaaccggatccaagcggccccaggggccgctttttcctgccctgaaaaaaactttcccctccctgaaagttttttccccgccggatcgtatcctgggtgagagcgctccaaaggagttgagatacatggacgatatggaacaggcggagcggctggccaacacatacgccgacgcgatcctccgcctcagttacacctatctgaaaaacacccacgatgcccaggatatctgccagacggtcttcgtgaagctgctgatggagccccgggagtttaagagcccggagcacgagcgggcctacatcctgcggatggcggccaacgcctgcaaggacctgctgaaaagcccctggcggcagcggtcgcaatccctggatgtcggactggaggtccccgccccccaggcgggcgacgggtctgtgctggaggcggtaaatcagctgccgccccactaccgggccgtcatttacctgttctattacgagggttaccaggctgccgagatcggtcaaatcctgggcatccccaccgcaaccgtccacacccggctggcccggggacggacgaagctgaaagaacttttgggaggatatggctatgaacagctcgtttgaatatcaggagtccctgaacagcctgcactttacagaggaggaaaaggccgccatcgcccgccgggccgctgaggcggcgcggaagcagacccggcccgctcgccgccccgtccgccggatagccctgatcgccgctgcggcggtgctggtgctggcagtgggcaccgccggcgccaccggcatcctgcggtccgctgcggaggtcttctctcccctctttggcggggcacccgctcagacggagatcatcgacaagatcggctatcccgtgggcgccagcgacacggacaacggcgtcaccgtcaccgccgacgccgtcatgggcgatgcgtataatgccgttatcgtctacaccatcagtcgggacgacggtacccgcctgctgccggaggacatcacaggcgaaatgctgctggtccacggcaacggcacggacctgagcattctgggcggaagccacggcagcagctattttgtggtggaggatcccgcagccagctccatccagatggtggagacggtcagcgccgacaagcccatcaacgactgcaccgccaccggtgtgttcgagaacctctacaagtgggacgaggaggccggcgaggccgtacccatcatcgagggtaagtggaggctcaagtttgagatgacctacgaggacagctccgtcaccctgagcggcggcgagaccttcacccaggacggcatgaccttcaccatcgactccatcaccctctctcccgtggcctacaaggtggactacaccgtggacagcgaggtggtgtggagcaactccggcagcggccggcaaagcgaagaggaccgcctcaccacacagcggtacttcgaaaacgtggaaatcctgctgaccctcaccgacggcacggtgatcgacctgtctaacgccggcggcagcatcggcccggaggatggcgtcactgtctgctccaagggcgaggtgttctctgaggtcctccccatggaggacatggcctccatctctgtgggcggcgtggtgtacgatctgacagtggagtgagctgaggcattcccaggcaggccgaaccgttccggaagcagcgcagagaactgtgcggccgcctctatcggatggctctcagacgaaggggcccgcactgctctaaattaaaactttgcctgtcctgtcaaaacgttttttgcagaagaaggacccgccggggcacacgccccagcgggtccttatcttttgcagttccggttactggggcgccacgtgctccggctttaccagatccgccagcagctccttcgcccgctccacgtcctccggcttcacggagatgtagtaggtcagccggtcgatcttcccgttggggccgaagtcccggtggtccagcttggcgccgcagccgcacgccggcgcctccgtctcatagaaaccggtctccatgaccttgatgccagcatccttcagccgctgccgggcttccttccaccggggtttgtcgccccagacctcataggccttctcacgctttccgaacagcgccatacgtcagccctccagggacttccaggcagtctccagggcgatctccatcatctcgtggaaggagtcctgccgctcctgggcggagagggactccccggtgaagatgtggtcggagatggtcagcagggacagcgcccgcttccccagccgctgggccgtccagtagaggccagccgtctccatctccagcgccaggatgccgaacttccggtacatggccccggcgtcggggttgtcgttgtagaactggtccgccgtgaacacctgacctacatctgctcggacgcccatggcctccgccgtctccaccgcgtcccggaggagccggaagtcggcggtggcgcacagctggccggggaaccggtactggtcggcgaagtgggagttggtagaggcccccagggcgatgaccacatcccggaccttcacatcatccccgatgccgccggcggagccgatgcggatgatggtatccacaccgaagaattggtacagctcatagctgtaaatacccatagagggcacgcccataccgtggcccatgacggagatgcgcttgcccttgtaggtgccggtgtagcccagcatgttccggacggtgttaaagcacaccacctcctccagatagtggtccgccacgtacttggcccgcagggggtcgccgggcatcagcacagcttttgcaatctggctctcttccgccgcgatagaggcggatggggattccttgatggccatttttgattcctccttgtaatgtagatgtcagatattccatttcgttgtcacttcttgtcgtcaaacagcgccttcaggctcttggtataaggcgggcggcagatgcccttctctgtgacgatgccggcgatcagctcatggtccgtcacatcgaaggcggggttgtagcacttcacctcgggcagagccatgggcttttcgtaccacatggtcttgatctcctcgccgtcccgctcctcgatggggatgtggtccccgtcggggcaggccatatcaatcgtggaggtggggcccagcacgtagacgggaatgccgtagtgcttagccagaatcgccacgccggaggtaccgatcttgttggcggtgtcgccgttggcggccacccggtcgcagcccacgaagcaggcctggacccagccgttcttcatgacaatggaggccatgttgtcgcagatcagcgtcacgtccaccccggcccgctggagctcatagctggtgagccgggcgccctggagcagggggcgggtctcgtcggcgaatacccggatgtgcatccctcgctccgccgccagcaggaaggggccctgggccgtgccgtatcgggaggtggcaaggggcccggcattacagtgtgtcaggacgccgtcgccctccttcagcagactcagaccgtattcggagatggccctgcatttggcgatgtcgtcctcatggatgactactgcccgctcgtacaaagcgtccagcatttggccccgggtatcgtggacatgctccaaggcggtgcgcatcatctcccggatggcccagcccagattcaccgccgtgggacgggccgcgtccagctgctggccatagtcgctgaggcgcttcaaaaacgtgggacggtcctcggtccggatggacttggccagcacatacatgcagtaggcggcgcagatgccgatggccggggccccccgcacccgcagggcccggatggcctccaccatctcgtcaatggtctggaggcggatctccttctcctcccccggcagcagggtctggtcgatgatgtaaagggcctccgccttccggtcgtagcggatgttctgggcatgggttaccgcggtgatatctggcatggtggttcttcctttccaaacggcggccgcccctccggtctcccggggcagcgccttcgtgttctcccgtccagtgtatcgcaatttccccgccgacgcaaggggggggaggtcagcagttcccttttcaagctccgttgtgatggcctgaactccgtctttcaccaaccgaccttgtgaaaaatgggtttgtatgataaaataggggtgtttccagtgagcctgtgtatcaggagggattgtatgcgccagccccaaacgatctggtccttatgcgcttttatatttgggttgatgggaatcatttttgttttcctcgggatgctcttttatatcacagacatccctgtgaatggcggctgcaattggtcttttatcccaattggggcgatccttttattgggcagtattgtttgtttggcgaggtgcggtctgcaggagcagcgcagaaagcacctaaaaacaaacggcatttcagtggtcggaaaaattcaatccgttcgacatctagtttggatcaactggaacacaaagacatttgtaaactggcccgggcaatgctctccgtgggtcgttcaatgctcctactgttatggcggacggacttatacagtcaaaagcctcttgtcatggataaagccggctactgattttcagcagcccgttatttatcttgatccacgcaatccagtacatgcctatgtggatatggatacaatcaagtgggaactttcatctttttgagcgcaatcacaagccgatcatatctacaggcctctctgttgatttcaccaaatgaagcgattgcatacgattcgccaagggctaccgcagcaaaacagcagggcggcgggaatgctcccgccgccctgtgtatctgtcacacgcggaggatccagccgtccttccggggcttgggggcgggcaggtccccctccacataccccaggatgcagttgcccacaccacggtaggtctccggcagcccccacttcttcagcagttccttgccctccggccggtcaaaaagctccatggcccggttgatccagcaggagcccagtcccaaagccgcggcagcggtcatcaggtttcccatcaccagggagccgtcctgcagccagttcagcttctctccgtcccccagaaccaccaccacggtgggggcaccgtagaagggatccgtgccgggattgccctggatctccgcgttcagcttggacatccaggcaatggtctccgggtcctggaccaccaccatgacagaggtctggagtcccttggcggaaggcgcccaggtgcccgcctccagaatggcgttcagctcctcgtccctgatctgctccgccttgtacttgcggacgctccggcgctccttcaaaaccttcaatgtctcgttcatgttcgcagcttcctttctatcgttatgttgctttgaaaatcaaatggctccgggttccagcacctgccccataatctcccggcacttttggtacatcaggatggtgtcgcgcaggccaggacgcacaggtccgccgcttccccggcccggaccatctccacagttttctccgggccgtaataggtgtgctccagatccacggtcaagaaccggaacccggcgtagcccgcggcctccacaaactccggtgcagcggactggatgaaggtccccagaaaaggccgcccctccgccagcagagcggaaaatgcaacgtgcatggccgtgcccctttctcatctattatagcacatccccccggaattcccaacgttttttcacatcaggtatcgcccctttgcggattccggaggtgacagctgtcccgtgacgtgctatactgataaaaatattgcgctttggcaggactttttcccaactgttccaaattaaggagtgattttgaccatgccccagcctctttctgaacgcaccgccagtttcaccgattccgtgatccggcggatgacccgcgtctccctgaagtacggcgcggtgaacctgtcccagggcttccccgacttcgagccgccccaggcgatcctggaacggctggcccaggtggcccgggagggcccccatcagtactccgtcacctggggggcccagaacttccgagaggccctggcccgcaagcagtcccgctatatgggccgcaccatcgacccggacaaggaaatcgtggccacctgcggctccaccgaggctatgatgtgcgccatgatgaccgcggccaaccccggggacaaggtcatcgtcttctcccccttctatgagaactatggggcagacaccatcctctccggggcggagcccatctatgtgccactgcacccgcccgccttcaccttcgacgtggacgagctggaggctgccttccgccaacgtcccaaggccctggtgctgtgcaacccctccaacccctgcggccgggtcttcacccgggaggagctgctgaccattgcggagatggccaccagatacgacacctacgtcatcaccgatgaggtgtatgagcacatcgtctacgccccccaccggcacacctacttcgccaccctgccggggatgtggaaccggacgctgtcctgctcctccctgtccaagacctactccatcaccggctggcggctgggatacatcatcgcgccggaggagatcatcgaccgggccaagaaggtccacgactttctgacggtgggctgcgccgcgccgctgcaggaggcggtaatccccggcctggagttcggccaggactactatgacgacctgctggccaagtacacccacaagaaggacctgtttctcaaggggctggatgacctgcacatctcccacaatgacccggagggcgcctactacgtgctgctggacatcagagagtacggctatgagagcgatctgcagttctgcaagaacctggcccgggaggtgggcgtgggggccgtgcccggctccagcttcttccgggagccggtgaaccacctgatccgcctccacttcgccaagaatgacgacaccctcaacgaggccctgaaccggctggagaagatccagaagctgaaaaaataatccccctcgggcccgtccggaaaacccggacgggccctttttcgtctaaagacagaagaggttctcttccctccgccccagtccgcgcatatccctttttctccccgcataggatggagcaacaagaggcggggagtgttgtgttttgaagggtaacatggaggagcgggccgaacggctggctcagtacatcatcgaaaaccggaccacggtccgcgccgccgcacagaaattcggcatcagcaaatccacagtgcacaaggacatctccgaacggctgccccagttcaatcgggtgctgtaccagcaggtgaaggaagtcctggaggtgaacaaggcccagcgacacatccgcggcggcatcgccacccggaaaaagtaccgcggggaataaaatgcgcatagactagtcttagaaagctcgcaacggaggaatcgatatggcaaagcaatcccgctgccgccgcgtggcccggtccacaccggagcccccggtcgccgcagtgccggccaccccggagcctcccgtccgccgctggcctcacccggtggagggcgtggagcccatccaggacctggatccggcactccattacatacgatgcgccctctcctatcagaaccaattgctggctgacatcaagactctcttgcagcagctggttccggaggagacccgggaagatgcggagaattcctgaaaaatggcgtgccgcgctccggcacgccattttcctcttgtgtttttccgcttcccgttttataatgttgcaacgagtattatgtaaatcttctcacccagtttttccaaagaaacccccgcggcaccgccgcggctgtaaggagcgttttgaatatggcaaagagaacccgccggagacggcgcagctggagcagactgctgcttctcgtggtctttgtggccgccgcactgtatgccggctacttctgtctcttccgtccccctgaggtccccgccgaaaccacccggcccgacgaagcggaggaggtctccgccgaagacaccgcccaggacgcagaagtcctggcccaggcggcccatctggagcgcaagccctatttctacaccattctggtgtccggcgtggatgaccacaatggcggcagcgacaccaatatcctggtggccgtggatgcagagaacgactacatctatggtgtcagcatcccccgggacaccaaggccgtcatcaatggaaagaaccacaagatcaacttcgcctataactccggcgggaccgctctgctggccgagaccatctcccagcagctgggcatcccagtggattttacggtaaccgtagatctggacggcttcgccgcgctggtgaatgccatcggcggcgtggactttgaagtccccatcagcatgaattacgacgatccttaccaggacctgcacatccacttctccgccgggatgcagcatctctccggtgcggaggcgctgaaggtggtccgcttccgccacaacaacgacggctccggctacggcagcgaggacatcggccggatgcagacccagcagaacttcctaaaagccgtggctcaacagacgctgacgctctccaacgtggacaaggtgggggagttcgccaagatcttccagcagtatgtggacacggacctgtcccttgggaacctggcctggctggggaaggaggccatcagcatgggcgtggataagatctccttctccactctgcccaacgagtggcgctccccctacatctatctggacccggacgccactctggagctggtcaaccagtacctgaatccctatgtggaggaccggaccatggaggatttggacatcccctcctgaaaaggcccctgtccgcgttttgttccatcaggcagaaatcctgaattcgatcttccattttgtataaggaggtgccgtcatgaagaaacgggtccccgcgctggtgctggcactggcgcttgctcttactgtccccgcctgggccgcccaggacaccccggacaattttgtccgcagcaaaacctacgccggccagttctccgacctgacgccggagtccacgttctacgacaatgtggcggcgctgtatgcgtatggtctctccgtaggcaaggccgacggcactttcggcctgcgagaccagctgaccgttgggcaggtggtgattttcgccggccgcatccgcagtctgtaccgcaccggagacgcggaggcaggtccaggcgcctatgccgccgagaatgaggcagcggccctccggtacctgcgctatctccagtcggagggtgtcatcggcacggagctggacgagtccctctccacccccgccacccgggcccaggtggcccatgtgctggcgaacacgcttccggaggaggccctgccgcccgttcacgcggacctggtaactcaggcttacgccagccggcagttcatcaccgacgtgaccgagtacaccccctattaccaggacatcctgaccctctaccgcaccggcgtgtccgtaggcagcgacgccgctggctccttcctgccggaccagcccatcacccggggcgcggccgccgccatgctgacccgcatggtggatccaagcctgcgggcaacgccggactgggacctgggaaaggagtcctggagcgccctgggcgctgccatgggagatctggtgcccttggggacgtatatcgccgctcccgccactgcggcggagatagatgaaagcgtccgctacatgctggcatccaaccagaacacgctggtcctgcagtaccccagtctctccgtaacctccgcccgacgggtgatggaggcggccctggcagctgtgaaaacctattgtgagcaatgctacaacacggtcaactgcacctattctgcggacgggtccatcaccctcaccttctccgccgccagcgcgggagatcagatcctgacttaccgcgacgcggccatggaggcggccattgccgtccatgatgccctgtgggagagcggagagatcaccacctccatgtccgactatgagaaggcccgggtctacttcacctggatctgcgataactgcgtctatgattacaccgccggggacagctccctgagccatattgcatacagcctgtttgaaaacggcaccgccgtgtgcgacgggtacaccggcgcctacaacctgctgctgaagctggagggcatcgactgcacagccctctccaacaactcccacatctggaccgtggccaccttggacggcacagactaccacatcgacaccacctggggcgacagcggccccgcccccaattacgactacttcgccatgactgccgaagagtcctggcagcaccacagctggtaagctgttgaaaagcgcccccggcttttgccgggggcgcttttttctcttcaggggctgccgactttcaaagatgatggtcccgcagcagccgcttggcctgctcccacagctcgtcgctgacagtctggaccaccacgaccttctgcaccagctccggcagggcagccgtcagctcatgctcgatcagcgtctcgttggtcaggtccgcggaggggcacccggcacactggcccagcagcttgatatacagcacgccgtcctccaggtggtcgatctccagctcacccccgtgggcccggagagacgggcgcaccttctcgtccagcacggcttcgatctgcttccactcttccctcatgtgttttcctcctgttctgccgccttggcggcggcaatctcctcccggatgcggtggcgggtgctgtcaaacagcagctcccggttgtggcggaaataggcgtcacagccaaactgctccacgaaccaggaggtgttgtacccgacggtgatctccgtgacgaagatcaccagctcctggctgttgccgaaggtggtctctaggaaacggaaggcgttgtcgaacatgtccttcgtctccatggccacggccttccgccgctccacctcttcaccgaaccagccccggacggcgtccatagccccttccggggccacggcctcccggtccagccgctggcggtagtcctccagggcgttgatctcccgctgcttgaggtcccgggactccttgtccaactggccggcctctttggcctgcttcatggcagtacgccgcttccacagcagctggtccagcaccgtcagcggcggcgcgtccgcgatcttctcccgaaactctgtcagggaggtgtggagggcgtcggtcagggcgtcctggcagcgggtgttccgggcttcctcgctgagccgggacagcaccagccccatgacggagagcttctcatcaaagggcgcctcccgcagctccagcacggtgatgttctcccaggtgccgctgaggatcccctccacgtggtaggtcttttgatacttgtagaacatctccaggtaattggcgaagtccttggcaatgcggggcatctggatgtactgccccaccacctcccggtccgcccggatgcccagggtctcataagcgtacagcagttcgctgagatcctcccagccccgggcggtggcaaactggaggccgtctgccgtgttctcgatgcggtagaagttgtccttcttgatgtccaggtaggagaggatggccccgtggaggttcttccggcgggcgtactccttccacacgccgtagtcctcctccacgtcgatgcgcttcacccggtccagggtcaccacgtcgaagtcccggacggacttgttgtactccggcgggttgcccgccgccacgatcagccacccctcgggaagggcctggttgccgaaagtcttgcactggaggaactggagcatcatgggggccagggtctcgctgacgcagttgatctcgtccaggaagaggatgccctcctgcagtccggtccgctccatcagccggtaaacggaggagaggatctcgctcatggtgtactcggtgacggagacctcctccccgccataagtccgcttttcgatgaagggcaggccgatggcgctctgtcgggtgtggtgggtgatggtgtaggccaccaggcccacgccggtctcggcggcgatctgctccatgatctgggtcttgcccacgcccggcgggcccatcagcagcaccggccgctggcgcactgtggggatcaggtagttccccagctggtccttggccagatacgccttcaaggtattggtgatctcctgctttgcctgtttgatgttcatatcgttagctccttacagttggggaagttcgtccaaatcgatcaggtccagcccggcggctttggcctcctccgctgcctcccgggcggcctgttccagggccggggtgggcaccaccagccggatggcccaggggggcatctttacggacaggggcggctcctccaacagcacgaaggccgtgtcatagggcggccgcttccggggatagacgcccatgccgtcggtgaagtataccagcccccgaaggaaggtgaaggccccctctacctggagctccgccacgtgttcaaacaccggccggaagtccgtggcgctgccgcccatcagagagaagttctccatataggctttcaattcctccaggtcgcggatgggggtgtcggaccggacctggtcgtcgcactggagaatgcgaatgttcaccttccgagtgaaggtctccgtgctgcggaggatggcgtaagtgcaggccagaaactgccgcaccagctcaccggaggtagacatggaggtgtccacggcgatgacgaagtcctcgatccgcttctcctccttcgtctccggcggctccaccaggggcatgttgccgtagagctggaggccgtaggtgtagaagatatagtcaaaggcgtcgccgtccaccgccatcacctcccggggcacggcgaaccgccggaggaaggtccggtagtccacgtcgtcccggttggccacctggatctgctccagcaccgcctcgccgccggtggccttgccggccagcacggtctccagtcccgtctgggtcttttcggagacgccctgccacttctgctcccgctgcttctgctgctcctggtcctgctggtccgggtcccacaggccatggtcgtccaccagaaaggtccgctggagccgggccacctcgtactccggcaggtccagccgcaggagatggcggtagatgccctccgccgtcagcaccggcatctctgcccggcactcgccgtagaacttctgcttggcggggacgaagcccccggccaggcaggggtagtccagctcgtccaggatgctctccaccgcgacatcgcaggccagatcccacagctccgccaccctgccccgcttcttccacaggtgccgcagcatacagtggagcagcacgtggagataggcccggtccaccgccgtccgggaccggagataccgctccgagaggaagctgccgtcgtagtacagcgtctccccgtcggtggccagggacagcgtcaccccgccgccgggctggaagtccaggctgcacagcgccacatccagatagggcagattcagatacagttcattccgggccgtctgcaaaatctccagtccgatggccgtcaggtccttggccgccatggtgcgcctccttccctgctataagtcaaaagtcttgtccagcccccggggggccacatcccgctgctgttccagcagcagggccagggcctcggagaccccgctctccctcgccagggcgcaggcggcggacagggcctcccggtccggctccgccgtcctcagcagaaacgccagccccggcatgtcccgctctcccaccagccagactgccgcctctccggcgtgggcccggaggtaggacaggtactgcccctccgcccggggcgtcagctccaccgggtagcgcagccgccagaaggccagccgcaccgcgcagtcctcatcgtgctccatgcccagaaaaccgctccacagctcgtcatacgtccgcaggtccagccgcttccggcggaaggagtggtgatagggatatccggcgccgaagatgttgtaatcaaagtgatgggccgggcagttctcctcataaacctcccggtactccggaaagagcaaacggaacacggtgccgtccgtctcctccacggtgacgtccagctcccagggcagttcgtcggcaaaccaggccagggtgtccccctgctcccccacccgggtcagatggaaggctgccagccgtcggcagttcatcagcaccccgccgccccactgaccgatgccgtcgtgaagccgcagggtccgcaggccgccgcagttcatcagggcgtaatcccccacccgctccagggaccggggcagggtcaggtcctccaggtcccggttgctccaggtccccgggtccgtcccggtgccgcaggtcaccagcaggtcctccccctccgcggaagcggcggtgggcgagagggcgtggtcccccagggccgtcaccggcaggccgtataacgtctccggcaggcgggcccgggcgtcgcaggtggccgcccgcaggatggtaatccccgccgcctcccggcgaatggttagcttccagtttccgctgccggggatggtctccacggcgctcacctccttttctccggacaagccgtcagtctcagctttagtagtgtatcacattttctgttgagagcctagccccaaggaccacaaaaatttttgcgggatccagcatttccctcttgacaatccgtgcatactgtatatactgtaaatgtacagtacgaacaggagtgacttccatggaactcatcatccgcaataccaccaaccaacccatctacgatcagatctactcccagatcaaagcccagatcattgccgggaagctctcccccggagaggcgctgccctccatccgggccctggccaaggacctgcggatctccgtcatcaccaccaagcgggcctacgacgagctggaggccgacggcttcctctacaccgtggccggcaagggctgctttgtggcggaaaagaatctggacctgatccgggagcagaagctgaaggagctggaggaccacctggacgccgccgtggagctggccgcccagtgcggcgtctcggcactggagctgatggaaatgctccgcatcctgctgaaagaggaggaacctcacgtatgaacgccattgaattgagccatgtgacgaaacactttcccggctttaccttacaggacctgtccctcaccgtgcccagcggcaccatctgcggtctggtgggagagaatggcgccggcaagtccaccaccatccgcctgctgatgggggccctgcggccggacagcggcacctgcaccgtcctgggggcggattccgccgcgccggagtttctctccctgaaagaggacatcggcgtggtgctggacgaggcctatttcccagagagcctgaacgcccttcaggtgggaggcgtcatggccaagacctaccgccgttgggacggaaaacagtaccagaattacctcacccgcttcggcctgccggagaaaaagcccttcaaggacttctcccgtggcatgaagatgaagctggccatcgccgtggccctgagccacagccccaggctgctggtgctggacgaggccactgccggcctggaccccatcgtccgggacgaggtgctggagatcttcaacgagttcacccgggaggaggaccactccatcctgatctcctcccacattttgagcgacctggagaagctgtgcgactatatcgccttcctccaccaggggcggctgctgttctgcgacgagaaggatcggctgctggaggagtatggcatcttcgtgggcacggcagatcaagtgaacagccttcaggacggggccgtggtagcccgggagaacagcagcttcggcggcgtccggtgcctggtgaagcgggcgctggtgcctgcgggctgggcgctggagcggcccacagtggaggatatcgtcctgtttttggtgaaaggagcgaaggagcaatgagtgccctgcttttgaaagactactacgtgatcttccggcagatgaagatcttcctgctgttaattctggtgttctcctgcatccccggcacgttttacagcacctttgccgtggtgtatgcctctatgctgccctacaccgccctggcctatgacgagcggagccgctgggaccagatggctgccatgatgccgtattccgcccgggacgtggtgctgagcaagtatctcttcggctggatcgccgtggccgtctcggcggcggccacctttgtccttcagaccatcctgtcggtcatctggctcagcgatgtggagggtccctccatccccgtcatcctgctgtccgtgtgcgtggccgtgtgcatcctggacatcaccctgcccatgatgttccggttcggcgtagaaaaggggcggctggcgatgttcctcatcatctttctggtgtgtgccagcgccggaggcatcgccaccattgagcagtcctccctggacggcggcttctatctgtccctctccctggttcccgccgccatcgccgccgtggtgctgaccgtggtgtccatccctctcgccatccggttttacggccgccggagccggtgagcggtatggaggatacaccgaaaacgctctgcccggcgccggccccggcggacctggccgcgttgctggccctgtgcggggcggccctcctgaatcgaaaggagccgaaatgaagaattcgcacacctgtcccaagtgcggcagcagagacatcgtccgaatccccgaccaccccagccgctacgctagcggcagcaacatttacaccacccggtacaccctgctgggcaaggtcccggtgatccgctacgtcagctgcggctgcgggtatgtggagaattgggtggagtcccccatggagctggtccagatccaccagacctacggggctccatgactcttccaaaggccgggcgcggagtttccgcgcccggcctttgccgaaatccacagaaaaccagttggaatcgccctgcggattctgccggttttgccatctgacggccgttgacattttcccaagccggtgctacactgaaacagtattttttggaaacgctttgggcagcggtttgcggcggatgccgcaacgcgacaaccgaacagacacaccgcggaccgcggccgaacgtcccgaaagagactgggactttcagccgcaaaatcggtccggcggtgttttttgttatgcttttgcataacaaaaaacgaaaatgcgccatttccccgcccctttggggcaaccggaaatgatgcgcaaaacttcatgcgcagcggcatttgcctgtattcgtggtgcactgtaccgcgcatgaagtttgttttttgtttgtcggcccggggcgtacaattcggtttcctgctaaaactgtttgcgtggaaaggcaaggtgagcggcatgtcaacgaaattcgtattcgttaccggcggcgtggtctccggcttgggcaaggggatctgcgcggcctccctggggcggcttctgaagcagcggggcgtccgggtgcggaaccagaagttcgacccctatatcaatgtggacccggggactatgagtccctatcagcacggcgaggtgttcgtcaccgaggacggagccgagacggacctggacctgggccactacgagcggttcgtggacgaggacctcaccggcaacagctccgtgtcctccggcaagatctactggtccgtgctgaaccgggagcgccggggcgactacctgggcgccacggtgcagatcatcccccacatcaccgacgagatcaagcgccgcatctacgccatggcggaagaggacgtggacgtggtcatcacggagatcggcggcaccgtgggcgacattgagtcccagcccttcctggaggctatccggcaggtggcggcggagcggccccagggggatgtggtgttcatccacgtgcccctcatcgtccagatccccggcagcggcgagctgaagagcaagcccacccagcactccgtgaaggagcttttgtccctgggcatccagccggatattctggtatgccggtgcgacgtgcccatcacagaggacatccgccggaagattgccctgttctgcaatgtccagccggactgcgtcatccagaacgccacggcggagacgctgtatgaggtgcccctgctgatggccaaggagggtctggacgaggtggtgtgccggaagctgggcctcatcactcaccagccggatctgcgggagtggagcgccatggtgaagcgggagaagaacgcccgcaagcgggtgtccatcgccctggtgggcaagtacacccagctccacgacgcctacctctccgtggtggagtccctgaaccatgcgggcaccgccaacgacgcggtagtagacatccggtgggtggactctgagaccctgacggaggccagtgcggcggagcggctggcgggctgcagcggcatcctggtgcccggcggcttcggcgaccggggcatcgagggcatgatcgcggccgtgcggtacgcccgggaacactgcattccctacttcggcatctgcctggggatgcagatggcggtgatcgagttcgcccgccacgtgctgggctgggcagacgccagctcctccgaattttcctccaccgcccacccggtcatcgacctgatgccggaccaggtgaatgtcaccgccaagggcggcaccatgcggctgggccgctacccctgcgtgctggcagagggctcccgcagccgggagctgtatggcgcggcagagatctccgagcgccaccgccaccgctacgagttcaacaacgatttccgggcggagatgcaggtgggcggtatgcggctggcgggcctgtccccggacggccgcctggtagaaatcatcgagctgccggaccacccctggttcgtgggtgcccagtttcacccggagttcaagagccgtcccgaccggccgcatccgctgttctatgggtttatcaaagcctctgtggagaaaatggaagctgacactcaataagtcccgggcgggacggctatctgccatgtgggcggttgccccgcaaggggcgagcccgccagcatctctcgcggactgccgctgcggccgtccgtcccgaccggccgcatccgctgttctacggatttgtaaaggcctctgtgaagaaaatagaggctcaggaggtaacacgatgaatcattttgctaaaatcgccgcccagctggaatcccgtgacctggacggtatgctgctgacccatgaggccaaccgtttttacgcctccggcttccactccgccggaaccgacggcatggccctggtcacccgagagaagttctattacttcaccgactcccggtacacagaggccgcccggcggcatgtgcaggatgcggaggtccaggaggcaggccacggccggggctattccgccctgctgatggaggccgtccagcgccacagcatccagcgcctggggtttgaggacgcctatatgaccgtccgggagcacgacgcctatgcccgggctctgccctgtgagctggtgcccgcggcggacctgctggcagaactgcgggcggtaaaggacccggaggagctggagatcatgattgccgcccagcggattgcggagaaggccctgacggatatcctgaacgagatccggcccggcgtcacggagaaggagatcgccgcccggctccagtatctcatgctccactacggggcggaggacaagtccttcgatcccatcgtggtgtccggccccaacggaagcctgccccacggggtaccctcggaaaaggtcatccaggccggggagttcgtcaccatggacttcggctgcatctatcacggctactgctccgacatgacccgtaccgtggcggtgggatccgtgacggatgagatgcgccaggtctacgacacggtgctgcaggcccaactggcgggtatcgcagccgcccgggccggggccactggaaaggccgtggacggcgccgcccgggacatcatccggcaggcgggctacggtccctgtttcggccacagcttcggccacagcgtgggagtggagatccacgaggggcccaacgccactccctccaacgacaagcccctgcccgccggggcggtgatctctgccgagccgggcatctacctgcccgggaagctgggtgtgcggattgaggacgtgctgtacctcacaccggagggctgtcaaaacctcactctggcccccaaggagctggtcattctctgaccccgattcaatcccacgcaaggaggaaaaatcccatggcaagctatatcggcgcgtccgccgagcaggaggacgccgaccccattctcatggcctttgccgctgaggcgaccaagggcgaccccgccagtccggaggcccgggagctggtgctccgctggcaggcccatctggtgaagttcagccgcagctgcgacgaggagaagctccgccgcctggcggacctgtacagctgggacaaccgctttgcagaggttctggacagctacggccccggcacagcccacttcatgggcgaggccatcgaggcctatttggaaaccctgtgaacgccgtcgcgcaccggcgcaaaaccgcctccgcccccgctggcggaggcagtttttgcccttccggcccccggttttccggcctgcgggctgttgacaaacctgcgccggagacgcataataaagctatcaacacgccaaaaattggatgccccgcatccacttgagagggagtattcatggacaccatctatatcaccggacaccggaacccggacacggactccatcgtctccgccatggcctacgcggcgctgaagaacgcccttggccagcggcagtacgaggccgcccgcctgggccagatcagtgacgagacccagaccgtgctggatcgcttcggcttccagccccccaagctgctgaacaacgtgcgtacccaggtccgggacctggattacgacacgcccgccaccctgtccgccgctgccaccatcagccgggcctggcggaccatgcagaaggacaagatctccgccatccccgtggccaatgaggacgggaccctgttcggaatgctctccgccggggatgtggccaactatgacatgtcctccgtccgcaaccctaaggtgggcgagatcccggtgtacaacctgctgtccgtgctggagggcaaaattctcaaccagggcggcgagatgcgggacgtgatctccggtgaggtcaccatcgccctgcccgccagccgggagaacctggtgttctccgacccgggcagcatcgtggtctgcggcgaccagccagacatgatccgccgtgcgctggagatcggcgtcagctgcatcatcgtctgtcaggcggaggtggacccggagctgctggccatgcagacggacacctgcatcatctccaccgcctatgacgcctaccgggcagtgcggctcatctaccatgccatgcccatcagcagcatctgcaagaacaaggatctggtgtgcttccacctggacgactatatcgacgacgtgcagaacaccgtgctggaaagccgcttccgggcctatcccattctggatgaggaggagcgggtggtgggcaccctgtcccgctaccatctgctgcggccccgccgcaagcaggtgatcctgatggaccacaacgagaaggcccagtccgtaccgggcctggaccaggcggagattctggagatcatcgaccaccaccggctggcggacatccagaccaagaatcccatcactgtccggaacgagcccgtgggcagcaccaccaccatcgtggcggggatgtatcaggacaagggcctgatgcccaccgccaagatggcgggattgatggccgcggccatcgtctctgatacggtcatgttcaagtctcccacctgcacccagcgggacatcgacgtggccaaccgcatggcccggatcgccaacatctccctccaggcgctgggacaggtgatcttctccgcctccggcggcggtgcgaagtctgcagaggagatcttccgcacagactacaaggagttccacatcgcaggccacaacctggcggtgagccaggtcacctgcatggactccgaccagctgctccagcgcaagggagagtttttgcagctcatgagctccctgcagaagaagcagggcttcgacatggtaatcctgatgattaccgatgtactgctggagggcacccagctgctgttcgtgggcgacagggacagcatccgccaggccttcaatgtggaggatgcggaggacgtggtgttcctgcccaaggtcatgtcccggaaaaagcaggtcattcccatgctctccgccctgtggggctgaggagcgcgtggccccgccgcccggcgctttctgctgaggaagctgccgggcggctctgttttttgggaaatctcctgcctctgaaacattttccagagattttgtataaattcaccattgactttgcctgtttaaagcagtatggtgtaaaagtacaaaggccggtcggcagaagggagctcttccatggttttgtttgcagcagcgttccgcactgtggcggggttctctcgattttatggctgccaggtccgctatgcgggccgatattgtcataggcagagcagccagtgaaggtccggcggccggtggatctcaccccgtatggaaggcggctctgctcttcggacagagccgctttttgtaatttccccgcgatcaatcttgaaaaggagatctctgcgatgaaaaagaagtttcttgcccttgcgctgaccgccgtcatggctctgagcctggctgcctgcggcggcgacacccagtccacagataccgatgccgataccagcggcgacgagtccgcctccggcagccagacctacaccgtgggtattatccagcaggtccagcacgaggccctggacgccgccacccagggctttcaggacgccctgacggaactgctgggcgacagtgtcaccatcgacccccagaacgcctccggcgataccgccaactgcaccaccattgccaacaactttgtctcccagggcgtggacctgatcatggccaacggcaccaccgctctccaggccgctgccaccggcaccagcaccattcccattctgggcacctccatcaccgagtacggcgtggctctgggcattgacggctttaccggcaccactggctacaacgtctccggcacctccgatctggcgcccctggaccagcaggctgagatgctgcacacctggttccccgacgcccagactgtgggcctgctgtactgctccgccgagcccaacagccagtatcaggtggacaccgtccaaggctacctggaggatctgggctatacctgcacccaatactccttctccgactccaacgacctgtccgctgtggcctcctcagcctgcacggccagcgatgtcctgtacgttcccaccgacaacaccgctgccaacaacgccgaactgatcggcaacatctccctggacaccggcactcccatcatcgccggtgaggagggcatctgcaagggctgcggcgtggccacgctgaccatcagctactatgacatcggctacaaaaccggtgagatggcctatgatatcctggtgaacggcgccgatcccgccaccatgcccatcgagtacgccccccagttcacccccaagtacaaccccaccatgtgcgaggctctgggcctgaccccgcccgacggctatgaggccatcgccgaataaggacgaatggacggagaaccgataaagagccggcggatgttttcaaattcttgtctgcaaaacttccgccttcaccggcggggagccctctccggggctctccgccgcccggtctccgtcctatgggcggcgtctgcggtatgccacccttccgccccgtcatccaaatcttatcaacacactttcagcggaaaaggggcttcccctttccgctgaactttgctagaatagagcagcaaattgcctccggaaacagccgggggattttggagggatttcacttgaacatcatgcatctggtcaacgccctgccgggtgtggccgcccagggactgatctggggcatcatggccatcggcgtctacatcacgttccggatcctggacgtggccgacctgacggtggacggcaccatggctaccggcggcgccgccttcatcatgctgaccatggcgggggcgccggtgccgctggcgatgctgggggcgtttctggcgggtgtgctggcgggactggtcaccggcctgttccacaccgcctgcggcattccggcaatcctcgccggtatcctcacccagctggccctgtactccgtcaacctgcggatcatgggacaggccaaccggcccgtcagctcccgacagtatgacctgctggtggaccagcagagcgtccgctccctgagcctggacaaccccatcctggtggtagccatttttgtggcggcggtcattgccctgctgtactggttcttcggcacggagctgggtgcctccctgcgggctactggttccaaccccaatatgtcccgggcccagggcatcaacaccaacttcaccaaggtgctgggcctgatgctgtccaacggactggtggccctgtcctccgccctgctggcccagtaccagggtttcgcggacgtgaacatgggccggggcgccatcgtcatcggccttgccgccgtcatcatcggcgaggtgatcttcggcaaagtgttccgcaactttgcgctgaagatgctggctgtggccatcggcgccattttgtactacctggtgtaccaggtggtcatctggctgggcctgaacaccgatgacatgaagctcatcaccgccctgatcgtggcggcctttctggccatcccctactggaaggggaaatacgcccacgtcaaggtgcccgccgggagcgccaatgccggagcaaaaacaggaggggatcaggatgcttgagatcaaggagatctggaagacgttcaacgccgggacggtcaatgaaaagcaggccctccggggcgtcagcctgacgctgaaggacggtgacttctgcacggtcatcggcggcaatggcgccggcaagtccaccatgctcaatgcggtggccggcaccttttctgtggacagcggcgccatcgtcatcgacggggtggacgtgacccgcctgccggagcacaagcgggccaaattcatcggtcgggtgtttcaggaccctatgatgggcaccgcccccaccatgcagatcgaggaaaatctggcgctggcggcccgccggggccagccccgcggcctgggctggggcatcaccaagacggagcgggcggactaccgggagctgctgcgggacctggggctgggtctggaggaccgtctgaccagcaaggtggggctcctctccggcggccagcgccaggcgctgacgcttctgatggcctctttgaagcggcccaagcttttgctgctggacgagcacactgccgccctggaccccaagaccgccgccaaggttctggctctctccgaccggatcgtggaggaaaacggcctcaccaccatgatggtcactcacaacatgaaggacgccatcgtccacggcaaccggctcatcatgatgtacgacggccgtattgtcatcgacgtgtccggcgaggagaagaagaagctcaccgttcccgacctgctggccctgttcagcaaagtcagcggctctgacgaagccgacgacaagctgctgctttcctgagccgcggaaaacccgattcaaactgcatggtactctccggcagggccatcctgccggggtagttcttgccccggattttatctctttaaagcaacaaaaaagatttgtgcaaaatcacggttgacatttccgccgccgcttcgtataatgcaaagcaatcaagcaaaaccgatgagcaagaggagtacctggtcaggtcacctttcagagagccgtggatggtggaatcacggcagagaactttccagcgaatggacttgcgagggcagcgcaaacggcaaaatgctcagtagcgtctgacgggacccgcacccgttatccgggcggcgcgtatgaatgtacgtggaacgagcgggcgctttgcgtcaacttgggtggtaccgcaggatggtttcaagtcttgtcccaaatatggggcagggctttttttgattcccctgatcggtccgggaaaggagtatggagatatgaaacacaataccagacgatggcgcggcctgtgctgcaatatcaattccctgaacggacccctttcaaatattctgtatcaaagattggagaatctattatgatgaatctgctgaagaagctggccgcctgcggcctgtccctgaccatgatcctgtccctggccgcctgcggcggcaccgatgacgcctcctccggcgaaagcggcggtgagcccgtcaagtatctgatcggcatcagccagtacggccagcatggctccctggacaactgccgggagggtttcctccagggcctggagcaggccggtctggtggagggcacggactttgaggtggactaccagaacgccaacttcgacgacaaccaggccacccaaatcggccagatgttttccgccgaggacgcggacctgatggtaggcatcgccaccaactccgccatcgcctgcttcaatgccgcggaggacaaggacatccccgtgatcttcaccgccatcaccgacccggtgggcgcccacctggacgcgggcaacatcaccggcacttccgatgccctgccggtggagggccagctccagctgatccgggccctgcagccggatgccgacaccatcggcatcgtctacaccaccagcgaggccaactccgtctactccatcagcgtctataaggagctggcaacggactacggcttcaccatcgacgcggtgggcgtcacctcccaggcagaggtcacccaggcggtggataccttgctgtcccatggggtggactgcctgtccaacctgacggacaacaatgtggtgggcgtgctgggcgccattctggagaagacggacgaggcgggtatccctgtctacggttctgaggtggagcaggtaaagctgggctgtgtgggcggcgcgggcctggactacatccagctgggcatccagaccggcctgatggccgccaaagtcctcaccggcgaggccgcctgtgaagacctgccctacgagaccatcgaaaactatggcctgtatatcaactccgacgcggcggccgagctgggcatcaccattcccgacgacatcgcccaggaggcccaggagtgcgcggaataacatctgtaacatccattaccaaggagaactcttcatgaagcttgtcacctatcgtctcagcggcgccgagcatgtgggcgccctcaccgccgatggaaagggcgtgctgcccctccccgccgccgatatgaacaccttgatcgaaaccatgacccctgccgacctccgctctgccgcagcggcggcagagcggggcggtgcggtcccgctgtcagatgtggagctgctggctcccatcccccgcccccggcaggatgtggtctgcctgggcatgaactaccgggaccacgcggaggaatccgcccggtacagcgccgatgccttcaccaagaacagtacagcggcggtctacttctccaagcgggtcagcgaggccgggaagcccgacggcgtcatcccccgtcacgcgggccttacggaccggctggactatgaggcggagctggcggtggtgctgggcaaagccgcccgggacgtgaaagccgtcgatgcggcagactgcatcttcggctacaccgtcctcaacgacgtatccgcccgggacctgcagacgggccataagcagtggtatttcggcaagagtctggacggcttcacgcccatgggccccgtactggtcaccgccgacgagatcgcctatcccccggcgctggagatcaccagccgggtcaacggcgagctgcggcagaagtccaataccgctctgctgattacctccatcgggcagatcctggaggagctgaccgggggaatgacgctgctgccgggcaccatcatcgccaccggcaccccggcgggagtgggcatgggcttcgatccgcccagattcctccagtccggcgacacggtggaatgcgccatcgagggcatcggcaccctctgcagcaccgtgatctgatcttttcacaaggaggcttctcatctcatggatgtgatggaactgctgaccagcactctgatccaggggctgatctacgccctgatctcctacggcgtgtatatcacctattccattctggactttccggatctgggggtggatggcacgtttcccctgggggccgctgtcacggcggtgctgatgaccaagggcgtcgatccctggctgaccctgcccgcctccctgatagtgggcggtctggcgggacttttcaccggtctggtccacgtgaagctgaaggtgcggaacctgctggcgggcatcatcaccatgaccgccctgttctctgtgaacctgcagatcgccgggtccaacctgaccatcgaccggggtacggacaccattttcacctctgccccggtgatggccctgtttggggatctctccctctccgggcggaagctgattgtgtccctggcgctggtcatcgtcatcaagctgctgctggacgcctatttccacacgaagtccggcctgctgctgcgggctgtgggcgacaacgccaccctggtgaccaccttggccaaggaccgaggcacagtaaagatcctggggctggtgatctccaacgccctggtggccttcggcggctgcatcgtctgccacgaaacccgcagcttctccgccaccatgggtaccggccagctggtgtacggcctggcggcggtgattatcggtgtgtccatcatacacttctacaccggcacccggctggcccggggactgcggaagtccgggcccctccgcttcctgggttccccccagggcaccacggcggtagtgctgggcagtgtgctctacaagctgtgcatccaggtagccatgagcctgggactgcccaccaatatgatgaagctgattacggctgcactgttcctgctggtgctggtgctgtccggccggaagggggaggcgatcatccatgcttgaagtacgggacatcacgaagatctacaaccccggcaccctgacggagcagcggctgttcgagcacttctccctgacagtggaggagggccagttcgtggccatcgtgggcagcaatggcagcggcaagacctccctgctgaacatcatctgcggctctatccccatcgagggcggtgacgtgttggtgggcagccggagcatctccaagctgaaggactaccagcggtacgccaccatgggccgggtctaccaggaccccgccgccggcacctgccccaacctcaccatgctggaaaatctgtccctggcggataacaagggcgggtcctacggcctgggccggggcgtcaataaaaagcgtatcgacttctatcgccagcagctggcctccctgggcctgggactggaggataagctggatgtgcggatgggggctctctccggcggtcagcggcaggcggtggcgctgctgatggccaccatgacgcccctgaaattcctgattctggacgagcacacggcggccctggaccccaagaccgctgaggtcatcatggccctgacggacagagtcatccgtgaaaagcatttgacggccatgatggtcacccataacctccgctacgcggtggagtatggagaccggatcctgatgatgaaccggggccgggtggtgctggaccgggccggagcggaaaagcgggccacctctatggacgatatcctgaccatgttcaatcagatctctctggagaccgggaattgagggaaaagaaagcgggcatcctttggatgcccgcctttttactccttttccagctcatagcccatggccgtcagctcccgtcggatctgctccacatgggcggcgtcccgggtctccagcaccatggagaccatgcaggctcccacgtcggaatgctgatcctcccgggcatggttgatgctgaggatgttggcgccgctgtccgccaccaccttcaaaagctgcagcaggctgccgggcttatccgccaccttcgtgctgatctctgcgatccgcccggccttggacaggcccttggtgatgatccgggacagcgtggtcacgtccacattgccgccggagaccacgcacacggttttcttctccgacgtgtccaccttgccaaacatcaccgccgccaccggcacggcgccggcgccctccgccacggtcttctgcccctccatcagcgccaggatggcggaggcgatctcgtcctcgctgacagtgaccacctcatccacatactgctggcacagggcaaaggtcagatcacctggcttcttcaccgcgatgccgtccgcaatggtggacacgctccgcagctccgtggggcccccggcgtggcgggacaggtacatggacgccgcgcccgccgcctggacgcccacgatccggcagtccggcttcagctgcttcaccgcaaaggcgatgccgccgatgaggccgccgcccccgatgggcaccacgatctgctccacgtccggcagctgctccaggatctccaggccgatggtgccctggccggcgatcaccagcgggtcgttgaaagggtgggcgaaggtgtagccctgctccttcgtcagccgctccgcctccgccgccgcgtcgtcatagacgccgggcaccagcaccacctctgcgccgtagccacgggtggcctccaccttgctgatgggcgccccggcgggcatgcagatcaccgccttgatccccagccgggatgcggacagggcaatgccctgggcgtggttccccgcagagcaggcgatgacgccccgggccgcctcctccggcgtcaggctgcggatcttgttgtaggcgccccggagcttgaaggccccggtcagctgcaggttttccgccttgatgtacacgttctccccaaatttcggggccctgtccagcggtgtccgccgggcgatgccccgcagggcctcctgggcctcccggaccatatccaaagtcagcatggactcccctcccacgtctttcttatgcttcattatatcggcgtgcccggcagaatacaatgcacaactcctccaatgtttttcattcaatgacatcgtttttacagtttgtctttatacaaaggatatccatattctctccgcgggcagcaaggcgttcctccgcctgctgcggcacggaaagttttcaattcatctctatacaaatcttccgaaaattgctataatgaatcaaattttgtcgaaggaggagtgtccgtgaaaccgcaccggaaagcggcccccgcggaggccgcggccgctggccgccaggagatgccccgctgtgcccccaaggcggacagcggcctctcctccgcccaggctcaggccctggcggaggccggctgggacaaccgcccggtggagtctcccaccaaaagcgataagcagatcatccgggagaatatcttcacctacttcaacctgattttcgtggttctggcggtgtgcctgctgctggtaggggactggaaggacatgaccttcctcctcatcgtggcagccaatgccgtcatcggcatcgtccagcagctgcgctccaaacgcaccattgagaagctgtccctcctctccgccgcgaaggtgcggatcattcgggacggaaaggtccgggagctgccggtggaccagctggtgcgggaggacgtagtagagctcaccgccggctgccagatccctgcggacggaccggtcctcaccgggcaggtgcaggtgaacgaggccctcatcaccggcgaggcggacgccgtcaccaaggagcctggggaccagctgctgtccggcagcttcgtcatctccggcaagtgccgggcccggatggaccaggtgggagcagactcctacgcctccaagctgacgctggcggccaagaaagatgacggccccggcaaaagcgagatgatgcgctccctggacagcctgatccgcttcatcggcatcgtgttgattcccatcggcgcagcgttgttctacaaccagttcatcaatcaggatctgggcctgcagcagtccgtggtcagcacggtggcggccctgatcggcatgatcccggaggggctgttcctgctgacttccgtggccctggcggtcagcgtggtgcggctggcccagaatcggacgctgatccacgagatgaacgccatcgagaccctggcccgggtggacgtgctgtgcgtggacaagaccggcaccgtcaccagtcctcaaatgcaggtgcgggaggtggtgcccctggacccggagtcctgttccgagacggacatcaccgacattctgggtgccttttaccgggtgctggatccggataacgacacggcgaaggccatcgcggacaagtttccccgggggcccggctggccggaccggggagccgtgcccttcacctccgccaccaagtggagcgccgtgaatttcctggaccggggggcttatgtggtgggcgcaccggagtatatcctggggcaggacttcgccgccctggaaaagcgtactgccccctacgccgcccagggctgccgggtactgctgctggcccagtgcgacggggcggagatcgggcgcctccacggcgtggtgatccccctggccctgctggtgctggagaatcccatccgccccaacgctcccaaagtcttcgattacttccacacccagggcgtggatgtgaaggtcatctccggcgacaacccggtgaccgtctccgctgtggcggcccaggcaggcatccggaacgcagagcagtgggtggacgcccgggagctccagacggatcaagacatcgccgcggccgtgcgggagtacactgtgtttggccgagtggtccccaaccagaagcggaagatcgtccgggccctccagagccagggccacacggtggccatgaccggcgacggtgtgaatgacgtgctggcattgaaggacgccgactgcggcgtggccatggcctccggcgcggatgccgcctgccaggtggcccagctggtgctgctggacagtgactttgccgccatgcccaaggtggtggcggagggccgccgggtcatcaacaatatccagcgggcctcggcattgtacctggtgaagaacattctgtccttctttctggccctcatcaccctgttcgccgccttcccctatccctttgttcccatccagctgacgctgatctccgccctgaccatcggcgtgccctccttcttcctggcgctggagcccaaccacgacctggtgaagggcaagttcctccacaatgtgctgcggcgggcttttcccggcggtctcacagccatcttcgtcatcctctttgcggagctgttcgtctacaccttcgacctgacgctggcagagctctccaccatctgcgtgatcctgatggcggtaaacggtctcatggtgatctactacgctgcccgacccctggatgccaagcggctggtgctgctggtggccatgagtgcggccatgttcgtggcggtggtgttctatggggcgttcttctctctctcctccctgtcctttgcagcctggctggtgctgatcgtgctggtgctgctggtggtgcccatccagatgggcctggagtggtgctttgaccgctgcaccacggccctggaccgccgccgggagcggctggcaaagcgccgccgcgctccccgcagaccccggccggcgcaccgctcccggcgccgtcggtgatctttcccacgccaaatagagcggaccgtggaaaaccacggtccgctttcttcattgggtcagcaggcggagcatctcctccgccgggtccaccagcggcagccctgtccgggccgccagggcctccttaaaataggggaagtgcgtgcagcccagcaccagcgcctccatcccgccgtcggcaaaccacgctgccagcgccgccagacggtggcgttccaccagctcctccggcggcatccccgcctccacggccagcaccaccggcagcgcacaggcccccagcagatccagggcgggattggcctccagcaatactttctcgatgccggagagtccctgggcgttggcggcgatgacccccagcgcccggtagcggagcgccagccgccggtacacgtccagcggcgtcacgatccgcatccccgtctcctccgcaagccccgggaaatccactgccgcagacagggagttgcagtagacgaaagcccgccgacagccctgggccatggcgcccctcagcaccgccagggcctggcggcgcttgtccgctgccggggcgtgctgaaaggcagtctgctccctgggtccccgggagaggggaaacggcacgcccggcagcccccgttcctccagatatgccacgcccatccgggtgtccaccggtgtgccggccaatacagcaataggtccgttcatggcgatcctcctctcctcatcccagcttccgcggaaagttgccgaatacccggacgccctcctgcacagtcaaaaacgcgtgggggtccacagagtgcaccatgtggagcagctcctcgatctcatatttggagaggcacacgcacaacacacggacatcgtccttggtgtaggcgcccacgccgtcccagtaggtcacgctccgccctagctgtttgataatgaagtccgccaggacgctctcgtcctcccgcgtgaaaatcagggcttgaacggtgacattctgctggtgcatcctgtccaggatcatggagtttgcgaagttgtaaatcacggagtaaatggcgacctccgggtcaaacaggatcaggatggccgtataaagcagggcattgaagcccagcgcaaatttacccaccgtaaaagcactgtcccgcttgctcatgatgagtcccagcacgtccagtccgccgccgctgccgccgcaggtgaggacgattccgctgccgatcccggtgaggatgccgcccagcaggcaggccgtcagataatcgtccacaatgggctgcgtgggaatgggaatgatgctgtaaaaaacagagtaggataccgtacagatgatggtccgcaccgccagtcccctgcccaggttccgatacccgatcatgagcagcgggatgttcagcagaaaatagaggacgcctgcgatgtcgtaggccccgaagctcacgcccaggaagtcctgcagcagcgttcgcaccagttggcagaagcccagcaggccgccggtgtacaggctcagggggacaatgaagagattcagcgccgcggccgcgatcagctcgcccagcacggcgagcaccagccgcaggattcggttgtgcagggtagtgtacagcatgggtaaaacctcccttgggagtgcagctcccttctgcggatatccatggtccctctttgataccgattatacggtgtatcccgcaaaacctcaagagggaaaattacagggcgtaccgcaggcagcggtacagccgctgtttagcccgcttcaccgtgcgggagacggtggagcggttcacccccagcttttgagcaatctgggacattttcagtccccggtcgtaatagaggaacaccatctcccgctgccggggcgtcagctcctgctcccgggcccggcgcaggccgcgccgcagccgctccagctgctcactgttatcctccgcatggtcccgcagccagacggtcatgtccccgatccactcgctgctgcgggcgtcaaagcgtgtatctctcatgtctgtgatagctcctgtcgtaataatgggccgtcagcgccgccagctcccgggtctcctgcagcagcggcgtcagctctgtgatccgccgccgcagaaggcggcggtcctcctcgtccttcagctcccgcgccgcctgccgcagctcgccgatccgccgccgcagggcggccgcgctctccgcgtagagggcggacatctccagcagcgtcatggcgccgcctcccttccccgcacctggcggaagggagccagctccgcccgggcgaacaccgggaggcaggccccacatacgctgctgccgttgcagtaccagtagtcctctccctctgtgatctccagcccgcagagcgagcagcgcagcgtccgccgtcggcgggtatgttcctttgtttccaaatgcgatgctcctttcctgtatacagatcccggcaagtctcatgtgccccgccggcaaaatgaaaaaaacgggtggaaaagcaaaaattttctgttgacaaacaggcgcttatctggtaagataaattctgctgttggaactgctggtgtagctcagctggtagagcagctgatttgtaatcagcaggtcgggggttcgaatccgtccaccagctccagttttaatatgggggaattccagagcggtcaaatggggcagactgtaaatctgttgccttcggcttcggtggttcgaatccaccttcccccaccaaaaaggtgcctgcaatcgcgggcgcttttttcattttgataaacaagatacttgtaaatttttatttattttacaagtatcttgtttacagctatacagtagcacaagtttttttgaaagtcaagtataattttacaagtttcttgtaaaattggattgacagcttccttgaaatccgataggatactgtcaagaacatcggaaaggatgggatccatggcatttggagaccggatcaaagcccgtcgggaggagctggctctctcccgcccccagctggcggatcggctgggcgtcacaccgtccactgtcagcaactacgagaccggtgtcagcttccctaaggaggagatgatgctccggctgttcgactgtctggagacggaccccaacaccttgtttcaggacagctttcgccgcggcgcggacgtcctgactgagcgggagcggcagctgctggagcagtatcgctccctctctcccctggggcgggagagcgtccagacgatggtggaggcgctgcgggcctgtcagcaggaatccgcagccccggagcaggagccccgggtcattcccctgtaccggacccctgcggcggccggttatgcggcgccagtgttcggcgaggatttcgactacctccaggtcacagacggcgtgcctcaggccgcagagtttgctgtgcgtatccagggggactccatggtcccctacatcccggacggctccgtggtctatgtgaatcgcgatcccctgaaggccggggacgtggggatcttctgcgtggacggggatatcttctgcaagcagtattacaaggatcccgccggaacggtgtatcttttctccctaaaccgggcgcgggccgatgcggacgtggtactcaccgccggcagcggccggacgctcgcctgcttcggccgggtgatcctccacgcgctgccgctgccggggcggacgtaacggagagccgggcgccgcctatgcggcgcccggctctcttgttcggcagtcttcaaacgatgaacccgccgtcggcggcgaggatttgccccgtgaggaaggatgccttgtcggaggccagaaaggcaacggcgtgggccacgtcctccggcgtccccagccgtcccagaggcgtctgctccgccagatcccgcagggtctcctgtcccagaacctgaaccatgtcggtgttgatgacgccgggagccacgcagttgacccggatgtgggagggcgccagctccagcgccagggaccgggtcagccccacgagagcggctttggtgcaggcatacgccacctcgcaggaggctccccgcagtccccagatggatgagatgttgacgatgcagcccgccttctcatggagcatgtggggcagtactgcctggatggtgttccgggcgccgcccaggttcacgcccagatagcgattccactgggcatctgtgatatcctgaaattggatctgccccgcaatgccggcgttgttcaccagcaggctcacgggtcccagctccgcttccgcagtgcgaaccatcgtctccacagccgcccggtccgccacatccgcctgaactgcaatggcatttccaccatggttccggattttttctgccagcgtctccgcctcctgccggtgcgtcaggtaattgatacagacagcatgtcccgcctccgccagctctgccgcaatcgctctcccgatcccccgggaagccccagtgaccaatgccacacgattcatagtgatcctcctgtcatagtgctgtcagcagtataacaaaaaaaacaggatcgcgcaagaaaagtgttgacaaaaggtgcgttttcgtgtatcctatatacgttccgttttggacgattagctcagctggctagagcacctgcttgacgtgcagggggtcacaggttcgagtcctgtatcgtccaccatcgaaagttccgctttctgttgaaagcggaacttttttataattttttcgcaattttcatgcgtgttatgtaaccttattttatccctgaccactcaaccagccacagtcaggaaaaatacgggcctccgagagcagttcgccctgggaggcccgtttgttcaacctgccagttctgcctgcttccgccgctttttctcggcggcgatctccgcgatcagccgggccaacttctccttgcacgccgcctctgtatggacggagacgttggtgccattcgtttcccgttcactttcggggagtagagaggctgggacgctccagttcccagaaaaaccgctggtgcagggccttcatgtagtcgttcatacgtgtcgcctcccttgttcagcaacacaacataccacagaaacagagaatagccagggctccggcgcaccgggccgcggactccgctttcttccaggagactaatagcggaacccgtaatcgtcttatttctcagacacctgcactcggctctccgctcccccactcacctccagaaatgcgcagagggactgcttgcttatcgtgtaatacttgggcgggtccaagaacagaaacagaatccggatggcagtctcctcgccggtgtcggcatccatggccgcaggaatcccatcgatagttttccatcgcaccgccggtagtacccggtatagtcccgcccgcccagcataccctccccccattccatgttctgctttcagtatagtggggtaaggagcatctgcaaagcattcacatctcatcatctgattttatgggtaagtgtgagcagaggggcgaccgtttggctgcccctctgtttcacgtttacattactgcacttctgatgaatatttatagtgccccacagagcaacttgcagtcctgagaaagaaaacttatggtgccaggaaactggctcccgtgtatagccagttgacgcatacagacgtacgggcaccgcctcgggaagaaaagattcggatctcacacatggaccaaagaccggtagagggctcttgttgccggattcgtgtccagtgcatctcctgagactggctgtagatcagatcatccactacgaacacacctgagattgtcaggttgtcattggtctggctgtcaatagaagctccatcgtaaatacttgcgcggcgaatatcggccacaatagacgttcctgttaccgcaggctggagggaaaagcggagtgaagtggccgaagtgttctgcaaggtcatgttcagcgcctccagaggaaccgtcaagacacttccagcagaggacagatttgcgttgtaaacctccggaacagcttttagattgggagtcaggaaatctgtctccgcagttttaaaccgaaccttgtagacagtaggtatattttgctccactgtaatttcaggagtctgcccagggatgccctgcggtccttcgggtccaacttcaccaggttcacctttcggcccctcggggccaacgggaaccacaaagtccagggagatcccggtgtctgtcggattggcggtgacggctgcggcagtaccagaggagacagttcccacagtgacggtaggtgtcgtgcccgcgggtccctgagggccaagttcaccctgaggcccggtttcgccccgctcgccctgaggcccttccgggccctggggacctgtcgggccggattctccctgagggcctgcaggaccgacgggaaccacgaagtccagggagatcccggtgtccgtcggattggcggtgacggctgcggtagtaccggaggagacagttcctacagtgacggtaggcgttgtgcccgcgggtccctgagggccaagttcaccctgagggccggtttcaccccgctcaccctggggtcctgccggaccttggggacctgtcaggccggattctccctgagggcctgcagggccgacgggaaccacgaagtccagggagatcccggtgtccgtcggattggcggtgacggttgcggcagtaccggaggagacagttcccacagtgacggtaggtgtcgtgcccgcgggtccctgagggccaggttcaccctgagggccggtttcaccccgctcaccctggggtcctgccggaccttgagggccgctttcgccacgctcgccttggggccctgccggaccgatggggccctgttctccctgtggtccgggacagccgcgatctccttggagtccttgagggccggtctcaccaggaagcccttgctcaccctgaggtccctgttctccttgagggccgcggtcgcccggaatgcctctttcccccctggggccgactgggccagccggtcccggatcacccttaggccctacggggccgcggtcgcctttggggcccatggggccgggatccccgcggacaccctgcggtccgatatctcctgtgtctccttttggccccatatcgccccgaataccctgaggccccgggagtccctgagggcccaccattccttttgggcccatgggaccgggacagccctgctcaccctttggcccctggggaccacgctctccgcgggggccgcgttcaccctggggcccgcgttcgccctgcggcccacgttcaccttgggggccgcgttcaccggagagaatggggcaaaaacactgacaggaggagtctctgtcaggtgcagagccgcaatgacgttctttatttaaattgttgttgggaaaataattcatctcattgacctctcatccaaagtaagggaactgtggttatagctaaagttgcttcttgtctgtgtccttctcgatcttttcattcaggcgctgactctgtgtgccgaaatagaatgcgatgacaactgaaaaaattgttaaaaaatcttggttggaaattcgatccaaaacagcgagataggcaaatactaccgtcaagacaagcgttacaatgcttttaacacacagaaggttgctgaatttcttcaagagagcagacattacaatcgttcctttctcataaggcctatgctcatggtatgctatgcacatggtggggctgaagtgtgtggttttgcttcagggaaattcgtctgcatatagtcgtccatcactctaaacggcatttccatggcaatctaactgctggaaaattcggcatttcggggcaaagagagacatctgcctgtccagggctgaaaaacgagcccgcttttcagcaggctcgcttaatggaaccattctcccttcaatgttctgtgagtatccggtgcactctccggcagaagtttctccgcctcttctttgtcctccagttcggctggtattcatacagcacgacagggtgttccacatccctgcggtccggtacagccgcatatagcatttgctccggatagtccggccctccagcttcaaaacttgcggagctgccagggattcgggcagtcttcttttcagctttcaagatgggcatttccgtttctgccgtgtgcaattttgacaagcgtatgtatgcccgaatcctcacctgtgtggggattatgactcatgtccgccggacttttctgccaatcccctccatgggcgatccggagcatacacacccagattcaaaaagccggtgctccatcatctcaatagtgacattttcgggcggaagctcctccacttgtagggaccgctcctgccggatatggggctctgccgcggttccccttatagcagctctgatagacaaccatgcctccgtctcatcaagtatcgggctcagttgacccgccaattcctctttcatctgttcagagaatgcccacaggctttcttttggcaagacgcacctgttccatcagccattccagcttccggtttcgttccgtataccccgcgctctttcgaagcagttcatcctattccgcacgggagagcgttaccatctccgtgctgttcatctgtgtattggtcttgtttttgcaaatttggtggctaaaaattacccggaaagttgtcattttcaatgcttttgacaattaaggatactgctggtaacttaacctccgagcctctgcgctgttccgaggccactggaagcttccagcctccaaccgcttcgtgaccagcgcaaatccatcctcttcccaataaagcctcttgatccagtcctgcctataaccacagggcaaaaacagcgtaccgctgaacggagctaaacggaacttctgctgtaccaatgtcgcaaagccgcatacccacaggcaatataaatctgccctgctcccgcaaggtcattcagcatccctcagcccccagcacaacgctgcctcggccgcgctgtctgctcggatgtaaatccccacttcaactgctccggttttaatcccggcaatcaccctgcctcggctcccacgcaattccgaggcggtaatttccgcgaataccggcgctgcttccggcatccgcccctctttctgcctgttttggttttcgctgtttatgccgtacagctcccgctctcaccgctggtatatctttgggccgacaccgtgttccaagcaccattcacttactcgtctccccctgtttcggcaaccttctatctgcttcttccacgtttcaagccgcgcctcatgtcaggctgctctcattgccatttgattcacctacttctgtttatccgtccttctttattatattgcgcctgggcaatccgcttttctatttggcacttgtttttatggcgcttagaagccgtagcgatatccacttttctatcgtaatacagaaagcccgggcggaaaaaatctgcccgggctttctgtcaaattgatttttgagttccttactcgtaccggctccagtcgggagcacggttcaggtcggtccagctctcatagacccggtccttggtgacaaagtcgtgggagttggtggcctcctggatggctaggtagaaccagtcgctctcgtggcagtcggtccaggtgttcatgccggagagcagatcgtccgtgtcctccggcaggcggcacagcacccggttgatcatggtcaccgcctgggcgcgggagatgtactggtcgggccggaaggagtcatcgctgtatccctggatccagcccagcgccgcggcgcggctgatctcgtcctccgcccagtggtcggcggtgtccgtaaaggtggtgacgccggcgacgccgctgtcgtcgaaccgggcgcagatggccgcgaattcggcgcgggtgatgttagcgtcggggtcgaacaggccggagttgcggccgttgatgacgcccagccgggccatggtggagatggccgtgttggcccagtagtcctcgttcacatccgggaaggcgttggacgtggtgagattgtcgtcccgcacattctcgtccagcaggcggaagaagatggtggccacctgggcccgggtgatattggcgttgggccgcacagagccgtcagaatagccctggatgtaggcgtagtggtcgtcgccgttcagcatgccgggcacggaggtctccgtccagccggcgaacagcgtcacggaggaggtcacccgcagagtctcatcctcgtccacccgtatggtcaggcggctgtccttgtaccaaccggtaaagcggtagccgggccgggtggggatgtgggcgccgtactcctcatcatcgtacacattgagggagaagctccttccgtcttcatcgatggggtcgaagcgggtgccgccattggagtcgaacctcagatagggatcgctgtcatggccgccaccgtctccggagctatcgcgggcaaaggttgcagaaatggtgtggtttgcattaacatccgtaaatgtatagctatcgactgctcctacgctcttttcatccactttcacattggcgatggtatagccgccgttcggcgtgatggtgaaaatcttgtccgcaccctcggccacagcaacgctgccgcgggggctgatggagccgccgtcaccggcggaggcggtgatagtgaaggtctgcgcgttctcctgccagacaacagcgaaaggagagaatccggaacggtccacatcaaattcgataccattggcgtcaaattcagcggttataacctccggctcacaggcttcaatggcatccgtcacctcggcctgaccggcaatgccatattcccggtgcaggcccggaaagtggatgacctgtacatccaggtcatttgcgttatccattgtcacaccgtcgggatatggcaaatagattgtggtgccatagctggcagaaacccaggcgttgccgttgtaggcgtccaccagatccaggtagtgaaagtcgtagcggtaggttttgccatcggacaactcattcagaagatcagaatcctctgccttttgttccagcagagcctggcggtccgtgccgtcatcatcaatcagcagcgagtcatccaggagttggataccggcgatatcctcgatctcaaagtcttcgttatcgttggtgtagaaagacggctgatacacggttccccatgagctggtttgtgtctttgcaatcgcctcggcgtggatcacagccttggtgggctctgcggtcaacaacacatatgtattggcgccgtcctgcgcttcctcaatatcctgcgtatggcggacgattagtgtacccgcaccgtcaaggtttacattgttgccattcacccgaacgtcctcattggtaagtccgttcttccatttgagggtaactgtgtacacgcccggcttggaatcatctgtggcgacagtgccgtcctcataggtatagaccgcctcaatgttttcaaggagctgatcgagcatggtcttgtcgtccgttgccgggatagtcacacccttgatttccaaacttgtaatgtcgccggtgtattttacgtcaacactgccattgatggtgagcttggggaaaccgccgtcgtcatagttctcctcgccctgaccgccgccggtgtagatggtgatgtcatcgggggccagggtatactccttgttgttgaagagcatcaccgcatacggagcacctgccgtcagatccttcaaagcgatgggcaccttctccgcattctccacctcttcgaccgccacttcagccccatcaatgggtgaaccgtccggattgacctgtacataggccacatagaggtcggtcttcttaggggaggaagtaggatcgagctcgaagctgtactcagtcgcagacggctgaacccacagggcgctgctgcccacgggggtccagtcggcgtgctcgttagcaacgccagctttcagcgtgttgactgcctcattcgtggcgcggcccaggttcacatccgcatagccctcaggaagttccaccttcccggcgctgacgtatatggtacggggttcccccatcacatcagcgcttacatgggtgtactcatatccggcgccttcctccgtttcagcaacagcataaccgccggaggaggagatttgtctgccactcgatcccttattgccggaaatggtgccgccattgatctcgacgagggacttccctgcaacggtatggtagataccatagctgccgttgtcgcagattttgccgccgttcataatgaacctgacacccgtccagtcggtcttgccgctgatctggataccgtagctcgagttgcgggcaatctcaccgccgttcatggtgagattggagctgttgttcacacgaacggcaagacccttgttgtccacaatatgggcagtctcctcaatcgtggcgatgacaccgccgccaccctggttggcaagataaatcatgcctttagaggcggtattgtcgcggatggtgcccgcaaatgtgtagtgggagccgttattggaatagatcaggccgcccgcactgctggaactacagttttcaatcacgctgttcgggccaaatgtgatctggccgtaccaggaccgcaaaagactcgccgaacccgaagcgcattctgagatcgtaccgttgaggtacacctcatggctgtagttgttgttgtcgaggtcgtcaaaatagagcagctggaaaccgtccacatgagaaatcttagatcccgctttagtggtaaagttgcaaaattgggtccagatggcgcagttattgcctgcgttggtgccggtcacattggtgatctctccagtgctggcaagggtagcttcaccgtgagaccgcagatggacagcaacaccgttctgcccctgccaggccgcatcggtaccatgaatattttgaatggtgccgccgatgttagcggtgccgccgtctgcatagagtgcacgcccattcatcatgacacctttatcgccgcctatcgtgccgccgttcatggtcaagatgccgccctggagccagaccgcaccagcggggccaaagctgccggacgcacctttctcacgttcgttttcggttgtatccaaaatggcgctgccttcttccatgatcagctcgccaccggacaggcgcacggcactcataccgccgtagttgcgaagttccgcaccatcccccaaagtaatcgtacccataccgttgtaagttgcgattatggcgtcttgcacaatgcttgtatttgggacctcactcctgctaacggtggtctccccatcgccttcggaatcggcctgcacaaagtattcaccttcgtatttgcccatatcatccaaaatgatgtgggtcaaaataagagacgaaacggtcccttgttccgtttccccgcctacttcgatcatcgcggggttgtagtgctgtctggcgggatctgcgttggtatgaaaattttctccgcgggagagcgtcacaggatcaacaccatagctggtgatggtcagctctttctcccagacccatgccatttggttcatttccacatctgacatgacataaatcgtcgcaccatccggggctgcttccgccgcctttgccaaggtggcatatggagcgtctgctgtgccagtgccgtccgcatcatcgcctgctgccgacacatacaccgcgttctcagccacaggctcttctaccactgtccccggatcctcagcaggctctatgggatccagctctcccgcaggctccgtgggggccgtgggatccggaccctgagggggatctcccggaacctctgtcggctcattttcctctggatcccctgaagtccccggctcatttggcgcactggggccatccggttcatcggcggtcccactttccacggcctcctgtttcccgccttcctctgcggggtctttccgcaagtccgatccatcctgattgatcgcaggatccgactcgccagtcccctcctctgccgccagtgtcgaaaccggcagcagtgtcagcagcaggcacagcaccatcaaagctgataagatccgtttcttcatctcttctcctcctttacacctctcggcgagaaaatatctatcgcaaacatccttttggatggaattgctctcattctccgtccatccggcagccaactgctccgtatccagaatctgctcataggcttgctccgccgggagccgcacgttccgctcgatctccgaccgggtggccagatacaacttccgcaggcaccaggggttgcacttggcctcctccacccgcttgtcagacggcaggtagtgatagaaggcccgcagcttggcaccgtacatctgcaccgtgttccggctcctcccccggcgggagagtgtctccagataggaccggatcatctctgatgtgatgacagcgccagtctgctccccagtctctggcagcctggctgcctccgcgcactgcatattcacaccccctgtcaacggaattcgcattccatcccgcgcccgaccaagctggcgcaagaagctccgcagaacaagtgcgaaaaaagcccgtgcggctggcacgggcgtaaaaaatggcgcagggaccaaggccggacaaaatttgacatttttccggcttttttctgctgcccaaagcggcaaaatcccttgcggttagctgtcctttgtgctaaaatttgtctattgatatgtaggacgaactattttttcacgatcatttgtgtcggaatgcgaattccgtgattaggagatcagtcccagccggtccagcgtccgctggtgttctgcgccagaggtcaccaggtagatgcgggtggtctcgatgctgctgtggcccagcaggtccgccagcttgacgatgtcccggctggtccggtagaacaccatagcaaacaggtgccgcagattgtgggggaacaccttgcgcgggtccaccccggcgcgcccgcacagccgcttcatctccgcccagatctgccggcggcccagctcttttccgcttttggtgcgaaagattgcaccggaggcggttttttgtttttgggcgtattggagcagcttccggcagagcttttccggcaataggatggtgcggatcttgcccttgagggagatctcggccttgccctgccgggcggcctccaccgtgagataccgcacctcgctgacccggatgcccgtggcccccatggcttccaccagcaggcccagccgctcctgtcccagccggtgcgccgtgtccagcaggcgctggtactccgccttcgtcagttcccggccggcgtcccggaacagtcgccgctggaccctcaggaatttcacccggcagccgccgaggcccaggaactccagcaggctgttcagtgcggagagcttggcgttgatgctggcgggggcgtagccccgctccaccagatgagccttccacgccgcgctcaaccctttgctgatctcccgcccgtccagccagcgtgcgaaggcccggatgtcccggagatacttctccatagtggcttcgctcttctcctccagccggaggtggcgggcaaatgcctggatttgcaggggagtcagtctgtcttcggtcataagatgcctccttttgtgatttcacaacgatattttaccggatgtgcaaatataacaaggcccacagcggcagctgccgctgtgggccttgttattttagtgccgtaatcgtaagattttctccagttccaaaaagctatacgcggatctgccagtttttctatgaagggacgcgcctcctcccgttttacggcgaacatgataccagaggccgtaccggaagtcggtatgtagaaaaacgtatatgcaagttcttgattccgcaaaggttctatctttcaataccatctcaaacggctcagatagtgcatgtctgtattccttccggaacagcggcatggaattccataccgctgtcgttctaaaaatacttctctttttctgtcagggtctcatttccgatgatattctctaaactgtcccatttttagctgatagcttcgattcccgcccctggtcacgatggccccctgaaatcagatcattcagataatctcttgtacagggcggcttcaggccaatagactctgcagtttccgatgctttgcttcggaatgatcggccaggtatgtcatgatggtctcttccacccttactcttatcgctgtttttcttaaggaagagctccagcagagtccactccggctcaaaccgctctgtgattacaggcgccatacgtaaaagatattgcgatgccactgccggcatgttcgccgacatcaatgaggctgcatattttcagtatcgtcccattgcgggaatcgaagacgccatctctctttgcctcgttgatttccatgcgaacactactggggttcgccatggtgatggcgtcccattctttgatgaccactccgagtcccggcagctcgcttcgggagcccttgattcccctgagaaacatactgtcaaggcccggcggatgttgcgccgcaaaggcaatggcaatatcataccgcagaaatttgaatcgtttttcccggttctattgcagaaaatcgccgcaccggacagcgacaaagccggaaaagcccccgaaaacgcggaatgctttttccttttgagtggagcgattgtttcttgacggtttcttttgtgaaaagctttcaattttcacagcttctttccaagaatttggatatcttttccactttttatagaattcgttgaaaatactttacaggatacacgcttttttgatatgataaaaaagtaacaaatcagaagtactatgctcatttctgggagctcatctctacgccgcatcaatcccaggatcggaggaaaatcggatgaaaaaatttttaacagcgattttagtcgcagcagctcttttcacaactgtcggctgcagcggccggcccgccacgacagcggatgttctccagagttccgcggatgcggaggaaggttcgtcccatgacagccagggcagcctccgcaccggcctctatgcggtgggctccctatcctccagcgccagtgcgggagaggaggacggtctgatccaaacggatgtgacgatcgtcgccgtcaccgtggatgagacgggcgtcatcactgactgcgtgatcgacgccgtacaggcaaaggcaaattttgacagccagggccagctcctcacggatctcaccgtcccggtgcccagcaaaaatgaactgggcgctgattacggcatgggcagcatcagcggcatcggaaaagagtggaacgagcaggcccaggctctggcggactatgtagtgggcaagacggccgatgaggtgctgggcattgccgtggatgaggccaccaagcccgcagaggcggacctggcctccagcgtcaccatctccatcggcggcttccagaacgccatcgcggaggcggtggaccgcgcccagccgctgggcgctcaggccggagatgagctgcggctggtgaccagcaattccatggccgccggcaatgcaccagagggcgccgccggcatggtggagaccaatgtgaacatcgccgccgtgaccatgaacggagatgccatcacctcctgcgtgatcgacgccgtgcaggcccaggtcagctttgacggccagggacagctcctcacggatctctccgccccggtgcccagcaagaatgaccggggagcggactacggcatgggcgccgtcagcagcatcggcaaggagtggaatgaacaggcggcggcctttgccgcctatgtcaccggcaagaccctggacgaggtggcgggcatcgcggtggatgaggccaccaagcccgcagaggcggacctggcctccagcgtcaccatctccatcggcggcttccaggccctgctggaaaaactccggtgaggctccggctgctgtccctgctgctcccctgcctccttctgaccgcctgcgccgctccggaggaggtggagacgaggcccaagcaatatcaggcgacctttctggacgtgttcgatacagtgaccacggtcatgggctatgcggagagccaggaggtctttacagagacggcggagatggctcacgatctgctgctggaataccaccagctctacgacatttacaacgactatgaggggatccacaacctcaagaccgtcaatgaccaggcggggatcgccccggtgacggtggatgcgcggatcctggatctgctgctcctgtgccgggacctgtatgcggacagcggcggcaaggtgaatgccgccatggggagcgtccttctgctgtggcacgaggcccgtgaggcgtccgtcaacgacccggagcatgcctatctcccagaggaggatgctatccaggccgcgttggagcatacctcctttgacaatgtcgtgctggatgaagcggcctccacggtgtatctgacggacccggcacagcgcctggacgtgggggctgtcgccaaggggtacgccgccggtgccgtggccgccgcactgccgacgggcatggtactgagtttgggcggcaacgtctgcgttacgggccccaaacccgacggcagcccctgggtgatcggcgtccagaaccctgatggggacgacacggagtatgtccagcgcctggatatcaccagcggcgcggtggtcaccagcggggactatcaacggtattacacggtggacggcgtcgcctaccaccatatcatagacccggataccggctggcccgcccggcattaccggtccgtgacggtcatctgcgcggactcggggctggcagacgccctctccacggcggcattcatcatggatgaggagagcggccggatcctgctggagacgtatggcgcagaggcgttgtgggtctacgcagacggctccgcctcctggacggggggctgtgacgcctattttcattcataaacggaacatgaggagaggtgagatcatatgctgcgaaagcaaaccttctggggtggcgtccaccccgcggggcgcaaggagctgtccagcggagcaccgctggaggactgcccgccgccgcgggaggtggtcattccgctgctccagcatatcggaaagccctgcacgcccctggtaaaggccggggaccatgtggacatggggcagaagatcggtgacggcgagggactgtgcgtccctgttcacgcctcggtgtcaggcaccgtgaaggccgtggagccccggagccaccccagcggccagccccatctggctgtggtgatcgagaacgactttcagaacacctaccacagcgcggtcccgccctgcgccgacacggatgccctggacgccgacgccttgatccgccgcattcgggaggccgggctggtgggcatgggcggcgccacgttccccaccgatatcaaggcgaacatcgggaaggtggagaccctgatcgccaacgcctgtgagtgtgagccctatatcacggcggatgacgccctactctgcacggatgcggaccaggcgattcgcggactgcggctgctgcggcagctgctgaagccccggcggacagtgatcgccattgaggacaacaaggagcgggccgtttcgatcctgacggacaagctgaagcagcaggacgaggtggaactggtcgtgctgcccacccgctacccccagggggcggagaagcagctcatccaggcagtcaccggccgccaggtcccctccggcggatttcccaaggatgtggggtgtgcggtcttcaacatcgccacctgcgccagcgtatgccgggccgtggcggacggggagcccatcctccgccggatcgtcacgatcaccggccacgggatcaaggagccgaaaaacctgatcgtccccatcgggacgcctttcgcccacgccatcgaggcggcgggcggcctgcagggggatgtgtggaaggtcatcgccggaggccccatgatgggccgttcccaggcggatctctccacgccggtaatcaagggcaccaacgccattgtggcgctgaccagcgccgatgacctggagtctccccacccctcctgcatccgctgcggcaggtgcgtgtccgtctgcccgatggggctccagccgctgtacctctatcgcttctcccgctgccgggatgtgggaatgcttcggcaatacagcattctggactgcgtggagtgcggctgctgcgcctacacttgcccggggaagctgcccatcgtggcggcgatccgggagggaaaacagcgggtaagggaggaaccatcatgaggtttgccatgtcttcatccccgcatatccgctgcagcgacaacacccggcggatcatgctggacgttttgatcgcgctgctgcccaccctcctggcgggaacgatcttcttcgggctccgctgcctgctgcttgcggcggtatccattgcggccgcaggattggccgaggcgctctggaacaagcttacccgccggtaccagaccgtggaagatctctcggccgccgtcacggggctgctgctggtgctgacgctcccggccaccgtgccctattggatggcggcggtgggcgcggtgtttgccgtcattgtagtgaaggctgccttcggtggcctgggccagaacattttcaatcccgcgctggcggcccgcgccctgctgctgttgctgtttcccgcgtccatgacccgctttgtggcgccaggaacatccatccctctcgacctgcgttccgcagacgtggtcacagccgccacgcccctccacagcatggtgatgcccgcgctgccggacgtcccgctttcggagatgttcctgggcagcatcggtgggtgtatcggtgaggtctccgcgctggcgctgctgatcgggggcggatatctggtggtccgcggggtcatcaagctgcggatccccgtcagctatctcggaacgatggcggtcctgagcttcgccttcgcaccgatggaaccgcttcggtggatgctgtacagtcttctgggcggcggggtcctgctgggggccctcttcatggcatcggactacgccacctcccccgccacgcccggcgggcaggtgctctatgggatcggctgcggcgtgctgaccgtgctcttccgctccgtcggtctctacccggagggcgtcacctacgcgattttactgatgaatgccgcgtcctggctgctggagcgcttcacgcccacccgcctgttcggcgcgccgcaacggaaaggaggccttcgatgaaggcaaaagagctgcttgtcagtgccggttccctgctgcttgccggcctgatcctggtagtggctgggaatgccgtggctcccgccgcggccgcaaacgccgcagcggagcaacaggagatgatggagaccctgcttcccggaagcacggtcttcaccccggaagaggacacggggaccgatgccaatattacggccgtctggaaaggggaaggcggctggatcatagagaccactgtggacggctatgccggccccatccgccagtggaccggtgtggacagcaatggccatgtaacaggtctggtggtccgggacatggaggagaccttcggcctgggccggaacgcattgacggacattgattttctggtacagttcgtcggcacctccggagaggcggaggtgggcggtggtgtggacgcgatcaccggcgccaccgtcacctcgcgggcggttgcccgtggcgtcagttccgcctgcgcgtatgtcaccggtgcagatgtcagcacgtctgcgacagagtggggaggttgatgctgtttgaaaaagatcattgtatcgccgctgtgcacggcgtccatctgcctttccgtgaccttgctggcagcgggtcttgccgcccagattgcagcggcgctggtccccaacatcatcctgcccgcgctggacattcccacgctggcggccctctctctcctcgcgctggtcctggaggtgatcctctttgggaagaaccaccggttctgggcaacctcgctgatcgtgggcactgtggcgttcggcgtgctctctctgtgcgccggcagtgtgccgacggtgctggacgcgctgcgggtcgggatcctgggcggcgctgtgttcctgatctgtgaggtgctgctccactccatcctggaccggatctcctccggcgccgcgggcaagtaccccaggagcatggctgtggtgtccgcgctgctgctgtggcttgctgcacagattctgatgagtattgggatttaaaactgcggtcggggttcccatacggcagggcagcgagctgcgtggatcggttcgccggtacagtccagctgttctgcaagcccggactatccgttccggtaccggttgtatgcggagcaccggaaggccgaagccgcctggaaaaccctccatcgctaaaaaacaagggcctccggcaagatgccggaggcctttttcatatccctgagaactgccgtgagctgtgaaaacatcggaccgcagcgaaggattgggcggcaacgtgatcccgcaagctctgtgttcttgtcaataccgttgcaaacgcggctttgacgcaagccgtttcagctgccggcaggcatttggggatggtagtccattttcccgtggagaccccaccgagtcttccgcacctctgtcccatttacacagggatcaccggcaagcagggatttcaatgcgcctccccgggtgggggaaggtctcagtgctccagcagggtgagtcgtttcagaatatgtccgatgtccgcagggatgcagacagaccgcccccgaatctccgggggaatataggactccttctgattgatacaggcataggcagcgctccggttctccagggtcatcttccagaagggatacttgatgatgcccggggtgttgccgcccacccccagctccaggaacagcagccgccgtcccctgtgccgccgtaggaagtcctcgtaccgccgggcggcggcataccagcccgcatcctggacgaaggtatcgtcgcaccgcaggttcatggccatgggacggccgcacctggggcagcgtggcaccagctccgtggggatccgcatgtccctctgttctgcaaacattttgcggacggtctcctcgttgtcataggtctcctgatggcagggcttggagcactgccacaggccatagtccccctgggtgtagaacagccgctgcttgtcgaagcccgccagctggaactggtggtccacattggtggtcaggacaaagtagtccttgtcctttatcagcttcagcagatcgccatatacaggcttcggcgccttttcatagcggtttaccaggatctgccggctccaccaggcccagtactcctccaggctttcaaaaggatagaatccgccggagtacatgtcctggatgtcgtacctggactgaaagtcgctgaaataccgccggaaccgttcgccggagtaggtcatccccgcagaggcggacagacccgcccccgccccgaccaccactgcgtccgcagaggccagggcccccttcagctgctcaatcgggtccgaggagacggcggtagatggctgcgtccaggtctttgaaaacattgaagatcaccctttctacggaagttgtctgctgctccagaaattcccggaccgttctcacggcgatctcggcggcctcctggtttggaaagtggaactccccggtggagatgcagcagaaggccacactgcggagaccatgctccgcggccagcgccaggcaggagcggtagcaggcggccagctcccgccggtccttccaggtcacccatctgcccacgatgggccccacagtgtggagcacataccgggccggcaggttataggcacgtgtcagcttggcccggccggcgggctcaggatgcccctgggcccgcatgatttctgcgcacgcgtcccggagctggagccccgccgccgagtggatggcgttgtcgatgcagccgtggcagggggcgaagcagcccagcagagcggaattatctgcatccacaatggcgtccgcccgcagccgggtgatgtccccctgccagagcaccaggcggggatctcctgcagtgggaggcagggcatccccgttcaccacgcccttttcctcccgctcggcggagagcagggcatcctggacttccagaaatttgggggccaggggcatgggcggccggacattcatcagggagcggagcagccgccgctgtgagaatgcatccaccggaaatgcttccgcctgctcccggtactgaggcatttccgccagaagggtttgattcaaatattgtacctgttccctgcgatccatgggtctcctccaaaggaaagattcattgtacggtctgataccggaaatgccagagcggagatcggcacagagcccgcttcccggcacttgcagagggcgtccccttctgcgggaaagcgcaggctgcttcacccctcgctttctattgtacggcgggattcaccactcgtaaagtacgcacaatgctgtgacataggcaccgggaggtaaccaaggggctgcggggctttccacggggcgaaatttttcatcgccgccccatgggagcttgacaatcgctctgcaggtaccataaaatatggatgatatcagaggatttgaagtgatcggtatacaggagggacctgcagatggcagccgcggcaaaagaacttccggcctgtccggtggaaaccacgctgacgctgatcagtgacaagtggaaggtgctcattctccgggatctgatgccggggacaaagcgttttggagaattgaagaagtccatcggctcggtcagccagaaagtgctgacggcccagctccgggagatggagcggagcggcctgctgacccgtacggtctatccggaggtcccgccccgcgtggaatacacgctgaccgacctggggtacagcctgaaacccattctggacgccatgaggaactggggcgaggcgtataaggcccaaaaacaggggtagccctccctcagcgtcaagccgcctgctttggcagcctttgcggggcggtcccgaaagagccccgacccagcaaaaaacagactgctcgtgcagtctgttttttggatcccgccgtcccgcagcggcagggcccgcaagggtgcaggcttcctcaaaggggaaacgactccattaccagagtcaggagcgggatcgtcaggatcgaacacagggtggaggcaaacgcgatctgcgaggcaaagacggcgtcgcagtcatacttgtccgccagaatagagcccgtgctgccggcgggcatccccgtcatcaggatacagacattggtcagcgtcgtgtccaggtggagcggtttgagcagtacgcacagcagaagcgggtacaggaccagccgcaggcaggtgtaccacagaacaggctttgagaacatggagcggatgggggcgtccgccaggattgtcccgatgacgaacatggagaccgggacggtgcagctgctgaccgaggcgacggcgctgtccaggaagcccggcagggacaccggagcggccatcaggagcagccccgcgaaaacggcgatgatgcaggggtggcggaccagcttgcggaaggcgtccttcctgctgacgctggtgaagagggacagccccgccgtccacatggtgaagcggagcgggatctggaacatggacgtgtagatcacgcccagatccccaaacagcaggcgggccaccggcaaccccacaaagctggagttggaacagatgatgccgtaggagagaacgctcctctgctcccgagggtactttcggaagagcagcttgctgccgtatatggacatcagctggatgactgcggaaagtccaaccgccagcaggcagttccgggcgaagccgtctgggaacaccatcccgcctaaaaaggactcgacgatattgcagggcaggatcacatcgatcagcaggtcggagagcatcttccgccccgccgcgtcgatgatcttcagctttttgatgagtacgcccgtcaggatcagaaggaacatcgtctcctgcagggacagcatctcccagaaaaactccatccgcacgcctcctgtccggtcccccgcaggccccggtctgcattgttattcattatataccacccagacgggattgcaagcgccggacacttctgtgcttttgtcacagaaatcccggtcggcgtgtggtatactctttttaaaagagccgccggacggcccggctcccggtgccgggagccccgccgcagcagcggcgcggacagaaaggatgcgtatgatgggattctttggatttctgcagcggccggacctgggacaggggctggagcggtttgccgccacgccgaacgccctgctgctggacgtgcgcacacaggaggaatatgcggacggtcatattccggagagccggaatctgccgctgcagacgttggggcggacagagcttctgccccccgcccgggagacgcccctcttcgtctactgtctcagcggcgtcaggagccgtcaggcggccggcctgctgcggcgcatggggtatactgatgtgacggatctgggcggcatctgcaactatcgtggaaaggtggtcaagtgagatgaaagtcatcattgtaggcggcgtggccggaggcgccaccgccgcggcccggctccgccggctggacgagaccgcggaaatcgtggtatttgagcggtccggatatgtatcctacgccaactgtggtctgccctattacatcggcggcgtcatcaccgacaaagaggagctgacgcttcagacgccggagagcttctggcagcgtttccgggtggacatgcgggtgcgccacgaagtcacagccatccacccggcagagaagaccgtggacgtgcggaatctcgctaccggcgagacctttaccgaatcctatgacaaactggtcctctcccccggtgcccggcccacccagccggcgctgcccggcgtagggatcgaccgcctgttcaccctccgcacggtagaggacaccctgaagatccgggaattcatcgaacagcaccatccccggtccgcggtgctggccggcggcggcttcatcggcgtggagctgatggaaaacctgcgggagctgggcatcgacgtcaccgtggtccagcggccccgccagctgctgaatcccctggacgcggacatggccgccttcctccacgccaagctgcggcaaaaaggggtgcggctgcatctgggctgcactgtggagggctttgccgccaacggtgaccgggtcaatgtgctgctgaaggacgaggcgcccctcaccgccgacatggtggtgctggccatcggcgtcacgccggacaccggcctcgccaaggcggccgggctggagctggggatcaagggcagcatcctggtgaacgaccggatggagacctccgcgccggacatctacgctgtgggggatgcggtgcaggtgaagcacttcgtcaccgggcaggacaccctcctctccctggcgggccccgccaacaagcaggggcgcatcgcggcggacaacatctgcggcggagacagccggtatcccggctcccagggcagctccgtcatcaaggtattcgatatgaccatcgccaccaccggcgtcaatgagaagacggcaaaacaggcgggcatcgactgcgacaaggtctacctctcccccatgagtcacgccggatactatcccggcggcaaagtcatgaccttgaaggtggtgttcgagaagggcacataccgcctgctgggtgcgcagatcgtgggttacgagggtgtggacaagcggatcgacgtgctggccacggccatccatgcgggactctccgccctccagctgaaggatctggatctggcctacgcgccgccctactcctccgccaaggatccggtgaacatggcaggctttatgatcgagaacctgtcccatgggctggtggagcagttcttcccggaggatgtggacgccctgccccgggacggcagtgtgacgctgctggacgtgcggacccccggcgagtacgccgacggccacgcggagggctttgttaacctcccggtggatgacctgcgggagcggctgcgggaagtcccggtaggcaagccggtgtacgttatctgccagagcggcctgcggagctatatcgcgtgccgtattctggcccagcaggggttcaaatgctataacctctccggcggctggcggctgtatgagacggtggtgcgggaccggaccgccgcacaggaggcctggccctgcgggatggagaagtaaacaggaaaacgcaagccacccgctgcctttgcagcgggtggcttcatccgttatttgtctcagcagtcggacgcgtgttgatctgcggccttctgcgggtctgcggggtgcgccgccctctcctgccgcagggccgccagaatgcccaggaacaccgtcccgcacatatagaggtactgaaacccctcatcgccgccgctggagttgaacaggtgaatggaagaggggatcgtcattcggaaacaccaagacgccgcagtaccgcagcagtccataggccatccccacagccaaaagggccagtccgatcaaaaggcatactctgacaccccgccggaaacgcagagtcttccgctgcaggccccagcgggctgcggcaaagcagaggatgccgtaaggtacagacagcggcagaaacatcagggccatcaccagaaacagtttcagcatacgacctccctcatcggttatgctatcctctccggagcgggaagtcaacggcacgccttcagcggggtatcgcgtttgccgtctatcatcccggcccaacagaccggcggcgccactacgccgttcaagtattttgccgaagacaaaaccttggcgggacaagttcgcctcctacacaaaaaaacaggacacccaaagctgggtgtcctgtttcactctggagcgggcaacgaggctcga

SEQ ID NO: 4937 - DNA, 522 bp, Unknown
  gut microbiota DNA sequence
ttgggcggtaggaagatgggcaaattcgggtacacttctttgtactctcgccattccagctttttgggcttgtttgccgtccgcaggaagccccagaagtcgatgggataacgaaataccggcccaaccctatcccgccgggtgacgatgaccaccgtgccatcggtgagtattccaatgtgctgcatgttctccccgccgaacattcccggacggatacgcagcacttcacgggtgttcctattgatgagctgggcaaagtcatcggagaggatctcgccgtttccctgcaccagcagccagtccccggtaaaccagcgaagtttcagccactcgcccattccaggcaggggggcaattcggcaccgcccggtgtccatgtccagttccagcaggcattcttccatccgccccttgccactgactgcatggatcatggtaatgcggcctgtgccgggaacgggaacggcctcggagagatggtcgtatccatccagagagaaggtgtgttttgttaccttg

SEQ ID NO: 4938 - DNA, 704 bp, Unknown
  gut microbiota DNA sequence
gaggaattggtgatcggagatggtgcagatgacgatcagcacaatcagtgcgaccacagaccatgtgaggtttgacgacagcagcttcttgacgaaggaatcgccgtcctgctttgttttcttgtcgctcatcatgcctcctttcctgtattgacgttcgtgttcgcgatggtttggacgatggtttcctgggaaaccgtgttgtcattgacgagttcggcgatcttgtggcgatccttcagcacttcgatgtcgtcagaaagcctgaccacctcttccatttcggacgagatgaacaccacacccatgccctgagcggcaagatcaagcaccacctgctggatttccgccttggcgccgatatcgatgcctcgcgtcggctcgtccagaatgagcaggtcgggatgcgtggccagccaacgtgcgatcagcaccttctgctggttgccgccggacaggttcttgatgagcttgttcggatcgttcggacgaacgttcagctccttcatgtacttgtcgacgatctcgtcggcttccttcttcggaatcggcttgaacatgcctctcgtcgcctgcaaggcgatcagaatgttctcgcggaccgtcagatcgccaataatgccttcgtctcgacggttctccgtggagtatgcgatcttgttgcgcaatgccgtgtacggatcggagatactggtcttcttgcc

SEQ ID NO: 4939 - DNA, 30465 bp, Unknown
  gut microbiota DNA sequence
gattacctgcgttccgtgtacagaaaatggacatttctcaccgggaattccacaaataactgcgtgatctgctctgatcgctaccataagcaaatgcaaccccaggcaatctcccggatagcgcgcagggttcttgacgaggtagggcaaacgaacgtgcgtctggtcgatctgcgccatgactatataattcgacaactggaacaacacgactggtcctatgtggctcgtatcaccggtatggagatccggtctttacaattgcattttgcccagtatctgccgaacggaagagctggccccaagcatagtgagaagtccggggacatcgatgagttcaagctgtggaagattttgcaggcggaaaaagacactcctgccggcttggtactctggcttacttggagcatggggctgaccgctaaaaacattgtgtccttgacttgggatcaggtggatctggagaagaatctgattcacctgccggaaggagaggtaccgctgacagcggcagccaaaagaatattggcaaagcggctccagaagcggacggaggatctccatgtcctgctctccgccgagtcaaaaaaacccatggacgtttcgcgggtgtctaggatcacaagaaccgccctgatccgcggcggcatggagaactggacgttgcgagatctctggaccagatacgaaaagagcaattgggaacaaaagatcacagaggcgattcgccgcagtggccctatcacacgcagccagatcatggaattatatggccagaccaaatccgctgcgtatcagcggctgcgtgccatgctggataagggtctcctggtccgcgtgggctataaatactacttaccggattccgtagttccgccggaacgacagcaggaagccctctacgaatatctgaagaaggagggctttgcctgtcggaaggacatcaccaccgccctgcagattgaaaccgagcaatgctccgcgctgctcaagcatgaagtagattctggaaacctgattaaagtcggccagaaatactatctgaaagaatcgtagcctgttgggcaatgcatcccacatagcagaagaaagatgccgtggcagcagagaatctgttttcacggcatctttctttttgcccctatgaggagacctgccggaatcgcccctttgtttgggaactttttcatcggttacacttgcttttcatggcaagcgcaagaaatccagtaattatttcacttttttaacaaaacccggcaaatcgtagacagcagcattctcctggggtaaagtgaacgcgcagaaaggaacttctgtggtccgctctgggccggagcaacgggaagagacacccctgcgcatatgaagccggtccggagattggacctcaaaagctctctgcaaatcttttaaaggaggagaaatccgaatgaagaaatttctttcactggtgcttgctctggtgatgaccatgtctctggtcactgtcagcgcgggcgccaaggacttcacggacggcagcgagatcacctacaaagaagctgtggatgtgatctctgccctgggtgttgtcgacggttattccgacggcgacttccgtcccgatgatgtcctgacccgtggcgcggccgccaagatcatctgcaacctgatcctgggccccaccactgcatctgctctggcggccagcaccgcccccttcaaggatgttcccgtgaccaacaccttcgcgggctacatcacctactgctctcagcagggtatcatcagcggctatgctgacggcaccttccgtcccaccggtaccctgagcggcaacgcgttcatgaagatgctgctgggcgccctgggctatgacagttccatcgagggctacaccggccccaactggcaggtcagcgtcatcaagcaggccagcggcatcggtctggacgacggcaacgacgagttcgtgggctcccaggctgtgacccgtcaggaggccgccctgtacgccttcaatatgctgcaggccaccatggtcgagtatgacaagaaggataccatcgttgtgggcggcgtggagatcacctccacctctactcgtaaagaagtagagaaccccatcgagaaggacaacactattgagaaagacgagaagatgcagttcgccgagcggtactttgacgatctgcagaaggcacccggcgaagcggatgacttcggccgtccttccaacatctggactctgaagtccgacgagatcggcacttacgccaatatggaccagctggtgggcacctacaccgccaaggtctccaagtctgatgtgtatgaagctgtgggccgcacagtctacaacgatctgacggatggcaagtccgacctgaccgtgtggttcgacggtgtggaaacgcccgttaagaccgctgacgtggaggactatgttgagcgcaacaacaccggcgcggtcaacaacactgccaacggcgacctgaccgagatctatgtggacgacgacaccaatgatgtcaccatcgtcaccgtccgcacctatgtcttccaggccgcttccgactatgacacccgcaaggagacggtcagcctgaccactgactccagcaagtatgacaccgacatcaccttggacagccggaccctggatgtggacgatttcgccaatatcaccgacctgaaggccgacgactatgtcctggtgaccgccgtcaacaacaacagccgttacgaggtcaagagcattgacaaggctgaggttgtcaacggcactgttgagggctataaggacggcagcaatgtgaccatgggcggcaccaagtacgagtactccgccaccgccgacaacatcaagaaaaccagctacaatgtgggccgcgaggcttccctggtgctggattcctatggctatgtcatcgcagtggatgagtctgttgtcctgagcgattatgtgtacatcgctgaattcggcagcagcagcggcatgacctctacctcccgcgctctggccaacgccatcttccccgatggtaccaccgacgagatcgtcgtggacaaggcctatgataagaaggccggtgagcaggtgagcagcaagtccaccattgctcgttggggaaccgacgccgatcagatcggctggttcacctacagcaagaactctgctgacgaatacactctgtatgctgttgagtccaagtatgacgaggagattgccagctacagcggtaaggggactgtttccgaaaacagcaaggtcgctcccttcgagaacgattccaacagcactaccaaggcggatctttctctggccaacgacgagaccatcgtcattgtcagcgacaagaacgatgatctgtatgtctacaccggcgtgaagaacttccccgccattgagctgacggattcctccagtgaggctgctgtctctgctctggtgcgtgacaatggctatgctgctctgatctatattgatattgacggcgatgccaccatctccggtgagcaggagaccactctggtctatgttctgtcctatgatggccgctatgtcaccaccgacaacgaggtctatcatcagtacactgttctgaacggtgatgaggaagaggacattgttgctgacaacaagatcacttccgacaatgactactatggcgttgcccactatctgacccgtaattccgacggtcagctgaccgacttccaggcggccaccgcaggcggcagcgtgattgctgacactgacaagaccagcgcgatcagccagagcgccggcaccctgaccattaatggcagccgctatctggtgaccgaggacaccgctatcaccttggtgaccgttggtgacctgggcgatgacagagacgccagcatcatgaacaaggatgaggatgccgactatgaggtggccgccaatatctccgccaaggagctggtggatgcgctgaagggctatgcctacacctatgactatgccggcaagacctctgataacggcaaggttctggaagagctgtatgtgaccgtgacccaggctactgaagccgctgagctcagcaatgatgccagtattgctagcattactgtgaagggcgagactgttgccaagctcggtgatggtgagaccaacaccatcaatctgcctgctacgcagaacgatcagcccaagttcgttatcaagccgaacgatgctggtgcaaaggttgtggtgactaagaacggctctaccgatgtggatgcggatacccaggcccagaccaccgctctgggtgagggcacctataccatcaaggtcacttcttccgatggttccaagaccacgacagtgactgttgaggttgaggttgcagctgcaagctctggcacgctgaaggttaaggatagtatttcttcttccgttatgagcattagctccaagataatcactatcgaatcttccgctaacgctacggttgctgacttgtacgctgctctcgaggtcgatggtggaaatgctgccgactacttcgaggttgtgagccccttcggcgcgatttatggcgagaaggatactaccgctgtcaccgatagcatgacggttgttctgcacctggatggcgcagcggacgcaacttacacgattaccctcaattgagtctctttgctgcgttgaaaacagcttaatgacaagccccgggccaaaaggcccggggcttgtctcgtttctcagcggattcctttgactgtgattttactccccttcttgatggtgtacccgctgtcgctggtgaccgccatgtacttggtgaagtccctgaaagagatgccggtccacttctcggccggctccactccggacacctacgcccacatcaccaaggcggcccagaagggggcggcgaaagctatggggaaagtcccagcaaatgccctccgaaaagtcggcacggcccggatgcggagacgccgcgtccgggcatcgtttttgccccgtataggacagggtattggatgtgtctagacgctacttgtcgatctttcctgtagaaatagcgaatgcaaaatgaatgctgccatctcgtttgaacaaggcctaacaataagcccagtagtattaagacaaggggatgatgcgaaaaaattgaggaaaagtaaatcaaaacgctgtttttggattcagaacacggattttccgttgaactccccccaggcattgcactcaatcactttcgtgaccagggcaaatcagccggatgccatagcgatcaattgcctccagatacggctcagagggcaagcagtctgtaacgatggcatacagttgctcaaatgggcagaagctgatcacagcggaatgtccaaatttactttggtccgccatcaggacaacccgattgcctcgctgtaccacgctgcgcttgatctcggcttccagataagtactgttggtaaggccgttttcaattgaaacgccggtagcagagataaagattgtctgaatgctcaggcgagagagggcatccagtgtggaaataccggtaaaggacgacgtggcgggggcgtaaataccgcccagcgcaataatgttcaggttggacaaagacgaggccgcatacagcgcagtcaagctgtgggtaatcacggtaacgccgtttttctcgccgatatgctgaaggatatagggcgttgtggaaccggagtccagaaaaattgacgccccatcgctgaccagttgggaggccagccgtccgataatctgcttggcccggctgtttttctgggcccggacagaaaagcccaccggccggttgatcagggtggaagagacgcctccatagacttttcggatatttccacggctcaaaagttccatgacatcccgccggatcgtgttcatagatacagaaaattgcgtagacaattcctccagggaaacggtttccttccccaaaatatattgttccatcgcattaaggcgctcggcccgcataaggattcctcctataatattagcaaattattcggtataatttgggtaaattatatcatatttttgccattatgcaatcatttttcccaaaataatcaagaaatgatgaaaataagaatttttttgcacaggtatttgctgtaaataaaactcttattattcaaaatggccaaagtttcgtcaagaatttatcacatttagatattgaaaaccccacaatatttgctataattatctaaaagatactcataaatttaccataaaatacctacaaaatttggcaactcagaattagtgagtaagtatttggggaaaaggagcgaggatttcatggagatacggaatcgggccgcctacatggtcacacctgggaagatggaaattcgggagcttccaatgccgcaagcgcagccgggcgaagttgtactgaaaatcgagtatgtgggcgtctgtggatctgacgcgcatttctttgaatccggcatgcggaagggaaaggcttttgacctgccctttattctaggccacgagtgcgccggcacggtcacacaggtgggtgcgggtgttcaaaatgtcgccgttggagaccgggtctgctttgagccccagattacttgcggggtttgcccggagtgcaggtccggacgctataatctctgcaaagatgtccgcttcccctcagttccgccctatgatggaatgctgcgggactacgctgccataccggcgcatctggccttcaaactgccggataatgtctcctccctggagggggccttgatcgagccgctggccgtagggctgtcggctgccagccggggtgatgtgacattggggcaggatgtggtcattctgggtgccgggtgcatcggccttctcaccatgatggcctgcaaagcccggggggccggcagagtaatcgtttccgacctcttctccaaacgattagataaagccctggaacttggagccgatgcagttatcgatgccagcacagaggataccatggcacgggtcacggaattgacagagggccgcggcgcagatgtggtatttgaaaccgccggcaactcccacacagcggcggaaacctcagatctggttcggcggggcggcgtcatcgtctttgtcggcaatatcaatggcgaaactccttaccgctttatggatttgatgtataaggagggtgaaattcggaccatttaccgctatcacaacaattttcccacagctatccgggcggtatccaccggtcgaattgacgtaaaagccatcgcttcgcatcaatttgattttcaaaatgtgcaggaggcctttgacgccgcgctttatcagcgtcaggatgtggtcaaggccgtcatcaagttgtgattccccgcccattgatccggcaggggatacataaatacggaacaaaggagaattaacatgaaaaaaggaatcgctttgcttctcgcgacattgatgtgcctcagtctcaccgcctgcggcggcaccggcgaacagtcttcgggccaggactcctccggagaggacaccgccgcaccggattatcccaccaccaatatttcctgcatcatcccctatggtgccggcggtacgatggaccaactctcccgcgccctgtttcaaagcctttccgaggacgcgctgcccagcaatgtgaactttgtggtggagaacgtggcgggaggcggcggtctggtgggcaccgagcaggggctgacccgggctgcggacggctacaccatcgtgggggtcaacggtgacctgattatcaaccgtgccatcggtgccacggacattgtcctccaggaggattttactcccattgtttgcctgcaagatgagccctactgcctgatcggccccgccgatggggattgcagcacactggagggcttcattaacaaactctccagcggcgacaacgccgttaccgtggcgatcaccggtctgggatctcccggcggtctggcaaccattgcactgtccaacgccttcggctgtcagattcggactgtaacttatgactcttccaacgactgcgctctggctgtggtaaccggcgagtgcgatgcgaccttcatcaacgtcagcggcgtggccgggcagattgaagccggcaccctgaagcttctggccgttacttctgccgaggagtccgactctctacctggaaccccctctctcgcccagacctatcccgaggagtgcggcgatatggatctgcggtctgtgtgcttcctgggaatccggtccgatgccgatcccgccatcattgagtggctgcataacacgctgaatgagggcgtggcctccgaaacctatgcggaactgacggaatcccagatgatgacgcccaaggtatgggacattgagggtatgacccagtactgcgaagaggcgtacaactattacgtcggcctgctggctgagtgaagaagaatcatttccatatcgcgtagtcacgtaatcagggcgcacggaacaggtcctgttccgtgcgcctgcaacattcttgcgggagggataccgttgaaaaaagcaaacgtagtcacagggatcatctttctggccctgtcgatcttcgcctatgtggaatccctgggaatgaccagcatgctgatgacagattcactgggtcccagcttctggccgaagtgcctgtcggtcgttatgggatctctgtccatcgtgctaattctccaggggcttttcagcaaaaaagaaacccgcagttctccatttgcatttaagactgtgggattcaaacggatggtgctggtatcgctgacactgatagccactggtgcaattatttatttcctgggaatttatatcggcatcctatttatgttgccagtatgtatgtttatccatggtgagcgtaatgtcaaactcctggcgggactgaccgtcgtgatctgtgtattcgtgtggctgagctttgatgtggccctgcgggtcccgctgcctatgggcacgttgttctcttgataaggagggagcgattctatggatgcttttctgcaagctgcagcgttggtatttacgcctaccagcctaatttacatgtttttgggcgtgtttttcggtatcctgtgcggggcgatgcccggcctatctgccgttatggcggtctccattctactcccgtttactttttcccttgatcaagcaggcattatgatgctgctgggcactttctgcggcgccatctatggaggctccatcaccgccatcctcatcaatacgcctggtactgccaactcggccgccacctgcctggatggttatcccatggccaccaaactggggcagcccggccgtgccctcagtatttccactatggcctccaccttcggcggcctgttctctgcctgcgcactgctcttcaccgctccgctgctgtccaagatcgcgctgaacttcggcgtaccggagatgtttgctctgggtgtgtttgggttgagcatcgtcaccgccgtgtcctctcactccatcattaagggtctgatcggcgctatactgggcctgctgcttggcacggtgggcattgatgcaacctctgccactatgcggttcacatttggaaccacctacctaatcggaggtgtccagttcgtggcgctgctgatcggcctgttcgccttctcccagtgccttgttacagcggaggaatctatgaaggagtacaaacgggaaaagcgcaagaagctggaccagattttgccctctaaatcagatattaagcggacaagtcctacgatcctgatgtgctccattatcggcaccattatcggcgccattcccggaaccggcggcgatatcgcctcctggatcggctataacgagtccaaacgctggtccaagcatccggaggagttcggccatggtgctcccgaaggcatcgccgctcccgaggccgccaacaatgctgtctccggcggcgccatgatcccattgctgaccctgggcatccctggtgactccgtcacagccatcatgctgggtgccctgatgatgcagggcattacacctggaccgctgcttttcagcacccagacggtggatgtctactccatcattatctctctgtttatggccaacgtcttcatgtgcttgttgggctatggtgctatccgcatcttctccaaaatcagcctggtacctatgaagtggctgaaccccattgtgtttgtcttctgtgtggtcggcacttatgccatcaataacaatatctacgatgtgtttctgatgatcggtgcgggcattgtgggctacttccttatcaagttggacttctgcatgccgcccattattctgggcctgattctgggcggcacggtggaggagaacctgcgccgcactctggtgctctcggacgggagcttctccattttcctctctcatcccatcgccctagtactgctggctattgcagccatctccctgctctctcccattttcctgaatctctggaaaaaacgttctaccaacaagcagtctggcaattaaacgtggaggtcatatgaaaaaatcaatctgtatcgagaagctctttgtagatctgcccttctacgaccggttccccatggtccgaaaaaccggtttcgactatgtggaattcggttcctgggcacagcatgatatcaagaagatcaaatccctactggaagaaaaccggcttcagctggggtgtttctctggagacaaggactacaacctgattgatcccgcccattgcaaggaatttttagaatacttcaagcgatctgtagaagcggcccattttttggactgtaaaaatctggtgatccattccaacgccttgggcgaggaaggcagaatgtgtaccgacggcaacgatttgaacgaccgcaccaaaattgcctgtgccaccaagaacttgctggagatctccaaaatcgcagaagcggagggtctctatcttcaagtagagcctgtgagcacctatgccaagcccggttactacatgactacttcagactctgctgcggatatcattcgggtcgtagggtctcccaatgtaaagctgctgtatgacatctatcatatgcagctgatggagggcgatttggtcaacaccctccggcggaacgcggacatcatcggctatatccacattggagatgtccccggccgccatgaacccggcaccggcgagatcaactacccttacctcaagcatgtgctggtggacgaacttggtttcgacggtattttcgcctttgaactcagccctctgaccactatggatgcctgccttgaggctatgcacgccttttaaggaggcgccttccatgagagtcatctgcgccggtgaaatgctggtagacatttttgtccgtccagtccaacagatcccctttgaaaacgatacccagatagtgccagacatccgcattaccagcggcggtgacgccaacaataacgcaattaattttgccaagttgggccaccaagtcgcctacttagggcggcttggatgtgacgagatgggagactatgtggcttctctggcccaagctgccggaatcgacatatcccataccgtccgttcctccacggctcggcaaacaaaatctgtcatcctggtcaatcccaaaggtgaccgtacattcctgcaggatccgggcaccagcgcagagttctgctttgacgactgtgatctgtctctgctggactgggcagaaatgcttcagattgggggcgcttttcatctgccgaagtttgacggcgagggctccgcccaattgctgaaagccgcaaaggagcgcggcgtaataacatctatggacgtcaccagtgaccgcagcggccggtggaaaggaattctagacccctgctggccctatctggactattttctgccaagcatcgagcaggcttcccagattgccgggaccgaggatcctcgggctattgcagatttcttcctggaccgcggcgtcaaaaacgtggctgtaaaactaggcagccgaggttcctatttcaaaaatcgtcaaaccgccttttttgcgggcatctaccagggcctttccatagtggaaaccacaggggcgggagacgccttctgcgccggctttttgaccggcgtaggagagaacctgcccccagaggactgtataactcttggaagcgcctgttccgctttggcaatccaggcggttggtgcaacggcaggcatgggcagtcgggcgacagtgaatgattttattcattcccaccagccgctggattttcgctcagatatctcatgacacccaagaaaggaagcgagccatatgccattggcaacattaaaagaggttctcggcattgccacccagtctaaaaccgccatccctgggttcaatattgacaatattgaaataccggaagccattatcactgcagcagaagagtatcactgccccgtgattctgaccatcggtcagggggccatccaggctggacagatgcaccatctggcggatgtagtccgccggctggccgacgagtccacggtcccggttgtcatgcatctggaccatggagccagctacgagcaaacaatccaatgcctgcgggcaggctttacctctgttatgtttgacgggtcccatctgccctttgaagagaatgtgcgtattacccaggaagtggtaaaggcagcccacgcagtgggcgtctctgtggaggctgaattgggcgcaatttacggcgtggaggatggcatcagccattcccgcgacaatttggtagatgtggacgaggttgcccgctttatccagcaggtggatgtagatgcgctggctattggcatcggcaatgcccacggaatgtaccagggacttccacggttggactttgatcgccttcagcagtgtcaggcgttaaatccccctccgctggtcctgcacggcggttccggtatcccggacgatatgattcgtcggtccattgcactgggcattcggaaaatcaacgtggcaactgaaatccgaaatgcctttatgtgcggactggagtctgcagtggggcaacgcaatatctatgccatgtaccgcgccgccgctcagtgtgtacacgacgtggcagcagccaagattcgtctgtttcaaggagtggaagcacccattcaaatcgcttaaaggaggaaagtctatggaaaccatgagagcgctggtctacgaccgcccgtccgtgtgcagtgtccgggatgtaccgatgcctgtgtgcggcgaggatgaggttgtcatcaaggtcatggcagccagcatctgcaaaggcgcagaccgccgtcatcatacaaccggtcacaagttgggacgctatcccatcaccaccggtcatgagttcgccggctatatctaccaggtgggctccgctgtgacaggctggaacgtgggcgaccgtgtaacagccgataatgctgtcccctgtggaaagtgctacttctgccagcaggagatgtacgcccactgcctgaacttccagtctgtggggcacagtatccccggcggatttgcccagtacttaaaagtaaaggacaagaccgtgttccggattccggaccacctctccttcaacgaggcttgtatgacagaacctgttgcctgctgcattcacgccatggatcgccttgacgtcaaatacggggaggatgtgctggttttcggagccggtccgaacggcatcattctggcacagctgctcaaacactccaacgcaaaccatgtgatctgcctggctcccactcagtccaaattggatgttctgaacgcttatggcgttgacaccattctgatggaccgcagcgatcccgcagtccacaccaaagcagtgtttgaccggttcccctacggcgtggatgccatcgtggatgccacaggaagcgcctctgtcctgccggattgtttccagcttttgaaaaagggcggtcggctgcttcaattcagttccacaaaggatgatgaggacatctccatcaaccccgcatatttttatcgcaatgaattgcagtactacacgtcctactgccaggttcatcaattcggccgtgccgtggatgctatggataccggaaaggtgaaaacggaccgactgataacccggctctatccactggaagaattcccgcaggccatcgaagatgtgttggaccataatgtgctcaagttggtgatccggcctaatgggatggaggactaagacggcaaccgcgcatgggagattagacagcaggcagtcacccgacaactatcttcgagaacaacaacactgccccaaaactgccaagatatgaaaattacctcttattggtgtatagatactgcatagcttgtgtttagcggcaatttctttggaactttgactggcggagtcctaatgggactgcatggtagaagagatgatcttaggagccttccccccatgcttgtcgtattatggtgagccagtaagcgataaaagcagggatcgagggagcggagtgccctccggcctagtacatccccctcatgcatgccagacatcgcatccaatggcgaagaagaaaagccagctatagaaacagcgaaaaagggtatccccgggtcaaaaattgatacgctacacaaagaaaaagggctgccgctggcagcccttttttaaccttaagccaacagtgaccgtagtccctgaatatttctgttttccgtagtatgttgtgttgctgcgaaaacagtgaacaccatggtaaagcgcagagccacattaagcccaacattggaaagattccactggaaaagctcacttttctggagttgcaggagttctgcaggaaactgctgatcagcaggaggagaattcatagggtcgagagcaaaagcaggctaaggacctaagccccaagacagtgcggagcatccaccagttcatcgccaccgatcacacttccggcagaacaactgatggccttcctgagagaggcaaacggcatcggcgtgtctgcgatgtactatggagagttgcccaccggccttcgacaggatcgctccttgacctcaaaggggagaatattgactcggaaaaaggcaaactccggctaaaacagcaggtcgcccgaatcgatgacaaggtcgcggaggccccatctccccggacagcgtcctgcacatgctctgcccggtgctgaagcgggcgggactgccagagttaggttccatgagctccgggttatgagctgctttccgttccgcagcgattttcagcaattggggtcaggttctaaatcacgagaaagcagggaacctgaaaacggaaaccatctttcattagactgtcaataaaagatctgtaggaacaatccttatgaaagctgccccaaatcacgtacaagattcaatttgattcgctccgtatccacatagatgtttccacagaggaccgggttatttttgtcatcgtaattcgtaatctctaaaagaataaagggccggatctttcccacagggacctcaaaataaaccgccagctctggaacctcaccgctggtagcagcccggaggcgcatcatatcccattttacatgaatattgcccgcctccttgagaaactcatagatggactgtgtcgcaagctccggagtccgccactgatcttccgtgatccgcccgtctcggatacaatcaatgcagtacatgcatggaaactcatccgcgtaatacaggctgcggatctcctgcagctgatgtgtcgggccacagttgaacaaaagggactgccttcccgctggaatctgacggacagacagcacctcactcctggcggaatagccgtttctagcaacaatttcccgcaagtcgatccgaggatacagcgttgtattcacctggatggcctgtgaattgacataggtaccgctcccctgccggcggatgaccttgccttccacttccaagtcactgaggactgtacggatggtgctgcggctcacctgaaatttcgctgccagctgtccttcagagagcaatctggtgttgacggtcagatccatttcggaaatgagctccagaagctgggcccggacacgttcccgcagcgggacttcgtgtgtattcatagagacaatccccttcttttcagatgtatgggatccgctcctttattgtatacaacttatgaaaagaaagcaagaaaggtcctcaaattggtcggacaactccttggaatcttcccgaatttccacgcttacaagggtggtatgaaaaatgtcgtctgacttgttgacagacagttgaaatctgttttttcctattctaagatggcactaacacctgtgcgcacagggacgccatcaaatcaggcggcatgacaggaagggggaaatcatgaattctacgattgggaacagatcaatttttgagagagtttttcatttgtctgaacggggaacaaccctgcggacagaattgattgcgggagctaccacttttctctcctgtgtcagcattatggtattgaatccaacgattctcgcagcagcaggcatggaccaaaaggcggtgttctgggcaacggcgctttcatcatgcatcggttgcctctggatcggcctgtggggaaacttcccgtttgctctggggccagccatgggcctaaatagttatatggcctacaccgtggtacagggcatgggcctttcctggcagaacggcttggcgtgcgtatttacatccggctgtgtctttatgcttttgagtgcatttaagacgcagcagcatattgtagacgcagttccagactgcgtgaaaaaggccattggcgcgggcgtcggtatgtttattgcgttttgcggcttccagtccgctggcctgattcaaaagtctgatagcaccctggtgacggtgggcgacttgagcaatcccggcacagtgctggcgctggccggcatcgctattacggcggtattggtcatccgacaggtcaagggtgggattctgattggcattcttctggtgacggttctgggtctgtttgtgaaagaccccgtcactggtgcggcctataccactctgccgacctctgttttctcctttgacaatccagcagaggctctggcccctactctgggccagttgagttacagggggatgttttccggaccgctccccttcgttcttggaaccatttttgcgattgtcagctttttatttgtagatctatttgacagtttgggtgtgttcttggggatcgcccccaaggccggactggtggatgaggatggcaagactccgggagcaggaaaagctctgttcgtctcggcaggagccgctgcagtcggcgcggttctgggaaccagtacggtcacgatttacggcgcagaaagtgccgcagggatcgccgctggcgggcggaccggcctgactgcctgtagtacaggcctgctctttctgctgacgttgttcttctcccccgtttttctgatgattcccagcattgcagcagcgcctgcgctcatcatggtcgggattttcatgatggagccactctccactttggatctttcggatttttccgtggctatgccggccttctttgccgtcgcagccatgccctttacgtacaatatcgcctatggtgtacttttttccatgctcagctacactctctgcatggcagtgaccggcagaagaaagcagctctctcccacgatgctgatcctaacggcagtctttttgatgtacttgattctggacgctattttttgacggaatggagggttgttctatgttaacttctcggcaaaagcagatgttgcaggaaatcccgaaggcagaaaaccatattcacattgaaggctccatcccctgggctctcgcgctggagctggcggagaaaaatcatgtgaagctgccagtccactccacggaagaaattgcggtctggtctcaggatctaatctccagaaagggactggatgggtttatgatctgtgaccggacattgaactccgtttgtctccatgaggaagactatgaagcagttgtcctggcattggcaaaagaggatcagcgtcaaaatattatctaccaagagctgcatttggattatccactgaacgaagagcggggaattcccctaaaagtggtcatggaggggtatcgcagcgcacaaaaaaaagcgaaaaagctttatggcgtggagattgtctacatcgccggactggaccggaccctttccagcgagcggtgcctgtcttttgtcaaggcgctccgtccctatctggatatggtcgcggggctgggaatggactgtgaggaaaacggtcatccctgtatcaagcatttggagagctatcgggaggcaaaggaaatggggctgttccttaccgctcatgccggagaggacggcggtgcggacaacatctgggatgccctgctgaagctcgatgttcagcgaatcgatcacggctgtcgggcggcggaacatccggaactcatggaatatctgcaggaacatcagattctctgtgccatgtgtccttccggaaatgtttactctggagctgccgccagttttgaggcacacccactcctcaccctgctgcactccggcgtgccggtctccatcagttctgatgacccgccttatacctgctctatgacagaggaattgattctggatgcagagaagatgggattgacggaagcagagctgatccagatcatccgcaacggatttgcctactccatcagcggacagcatctcctgccacagtttgatgcctgggtagaacgcttccagcaggaaggtgctcaatgaccggtatggcgacgttggaacaaatccagcgaatgccgaagctggagctgcacatccacctagagggcacattcgatcctgaaaccgtctgcctgctggccgaaatgcaggggatttccctgccacgtccccgtcagcacctgttcgatttctcaggtctctcggacttccttgacctgctggactggatctgcagtttggtgcagaatcgggagactgctcagcagattgcataccgccatgcaaagtacgcccaggagcagggtatcctctatacggaaatcatcgtcaatcccagccattggaaaaacattcggaccggagagctgttgacaggcgttctggaaggttttgaccaggccggagcagatggactgccggattgccggcttcttgtgtccctgcgcagagaacaggatacagcgtctgcccgcaggaccatagagtggatcttgtcccacagacatccgcggttggtcggggtttccgtcgacggaaacgaggcctgctcgcaggactccaaccagagatttgcgccattactggcgagagcggcggaggccgggctgggcattgccgtccatgccggcgagtcctctgggccggaaggagttcaggaagctcttgaactgttgggagctaaaagaatcgatcatggcgtgcgggcagtggaggacttgaaactgctggaacggctcctgagagagcggattcctttgaatatctgctatacgtcgaatgtggcaggcggcctctatacgcctggcaatcatccgttgggtgaattgtatagtagagggatatcggtaacagtcaacacggatgatccgcagcttctgcgtgtttccctaagtcaagagctccaacgcgtggcagaacagtatcactggaaaattgaggagctattaaagctgcagtattatgcagtagacgccgccttctgcacagaagaaaggcgaagtgaactgttgtctaggttgcatcagtttgaagctacatgccagaatttgaccgcattttaacaactaaaacgttgtttcactgaactaaatgatgaagggggcggccagatagagccgtccccttccgcaatttcagaatcttttaaaaaaccacgagataaaatggaaagtgaaattgtgcccaccagagtggggcaagaatcgcacccggctatacgccggccgcagttccgggcagaagcccagccccacttggggcaacctgttggccgaaggggagaaatcagaaaagcgcttttactcaatgccgggattacaacaccgttgacaaagagagcgccgtcacccggcagacagaagaaagccccgacgccttttcgacaccagggcggtcacaactgcccacactgcgggcagttgcgggttttgaaagggcgttgttctgggtatgaaatagcggcattgacgtttttctcttctctgcggcatgttgtgttattgcaaagaaaatgaatgccatggcgaagaaatgggccgacggagagcgcaacatcagaaaaagaaaaggtggctgctgggagggtcgctacacagccgggcacgatctggagaccggaaagccgatctacaagaacgtcctgggccggacccagggagaggcaaacccgaaagcggccattgaagaaatcaagggcctggacgtgaccatgacgggaaagtacatagtaggtgcttggatggatgagtggttcaaaaactacgcaaagatcaaagtgaggccatcctcccatcatgcctaccaagggtatatcgacaaccacatcaagccggatatcggcgaagttccgctagaaaaactcacttctctggaattacagaagatctgcaaaaaattactcaacagtggaagaatcgacagagtcgagagcaagcggcagcccaggggtctgagccccaagacggtgcggaacatctgccagatcatcgcctcagccatgaagccggccaaggagtagaaaatcattgccaccgatcccaccgagggctacgccctaccgaagctggaacatcgggagatgaaaacattgcccgtcgagcagttgacctcctttctgcaggaatccaaggagagcggcgtcctcgagatgtactatgcggagctggcagcaagattgagaagaggcgaattgcttggcctcaaatgggaggacattgatttggaccggggcggcctttgggtgaaacggcatggcgctcgcatcaacggagaggtggtggcatcgctcaagacgaaaaacgccgaccaaacgctgccgtcggcggaggataccatccaggttctgaaacagcagaggaaaaaacgtcagcagcccctgggtgttcccctctcccactgacggtctatctcaccggatagcgtcctgcatatactccaccgggtgctgaggcgggcgggtctgcctcgggtcaggttccacgatttacggcacacattcgcaacgctggccctccagaacggggtagacatcaagacgatatccgggatgctggggcacttcagcgcggggttcaccctgcatacctatgcccccgtcaccacagcggcccagaaggaggcggctaggaccatggagaaggtcctgacggcggcaatctgaaagtggaaaaatggttccaaacagcaggaaagccttggcacggcagagttgcgccaaggcacgttttttgccctgtatgggtcatggtttggggcaactgcaaattttgtaaaatcgcgttatttctccggaaacctttggatgcaaaggcagaaaaaccgtctgatttcatagaaatcagacggttttgtgattgcggggcatgacttgaacctacgacctccgggttataaactgctatcgttttctctatccgctgcaccgcaacgttttccggacttttgtgggacctggaatcgtccaaaacccggaattcatttcttcctactccatgacggttttcagcaatctgtggcaagtcatggggcggggaaagatgccgaaataaggagcacaagaaatgcatctaacggtttatgcttacatattgggggagatgtgttaacaccacattgcatgaatcaaacggaacgggccctgggtctttgcagctccgatgttcttccagatcaatatcccatcgcagcgttcgggaagatgacaatcagttccgggaagagcatcataaagaagcaagcaaccaggaaaataataacatacggcatgaccgccttgtacataaccttggtgtccactcccggaggtgccacaccctgcaagtagaacatattgatgccaaaaggcggagtaatcatgcccaggcaaagagtgacacacagaatcaggatggtggcgttggtgtccagggaagaagcctggattaccggcagcagaatgggaatggcaatcatgatgataggcgtagtgtccaggaacatccccatcacaaagaacagcgcaaagatcagcagcatcaggggcaggccgtccagattggagcttgcaaaagcagcggctaccacgtcagacaggcgggtgatattcaccagggagttgtaagcggcgcctcccatgagaatccacataagcatggcggagacctccatggtctggatgagagaggcccgcagattcttcacattcagtttccgggtaatcagggcatacaccatggaggcgaaagcgcccacaccggcggcctcagtaggtgttgcgattccggcatagatgcagcccagcaccagaacgatgatggcaatgggggcgatgacctttttaaacacccgcatcttctcgccccaggagggacgctcggccttggggatgccggggcccagcttgggattgatggcacagcggatgccgatatagatgatgaacagcagggccaagcctacgccgggcaacgcaccgccggcaaacagccagcctgcggacacgccggtataggaagacatgatgatcatgatggtagagggcgggataatggggcccaggcagccacctgccagcacggggccagtggccaacgctttatcataaccacggtccaacatagctggcagtgcaatcagccccatcatgatggtagcggtggccgccacaccgctcatagcggcgatgactgccgtggtggccactgtggccatagccagaccgccattgataccgccaagccacttgtggaagaattcgtagatgtctccgccgatgccggaggtctggaggaacgccgccatcagagcgaacatggggatggccagcagggactccgactgcatctgatagacaaatgctgcgttcaacacattcagcaggccagagccgtagaacaccagcaggatgactgaagccacgctcatcatggcaaagcagatggggatgcccagcgccatcagggctaccagccccagcagcaaaatgataatatcaggactcactgtatgtcctcctttccggtttcgtcaggcagatgctcagcggacttcacgatttcaattgcctccgcgacttcgtcggagttgttggtgagttcaatcttgcctgccatagcggctacattcttgataagctcactgatggcttgaatgaacatcagtgcagcgcccagaggcacccaaaaccggatggtccacatgggagacccccacacggaagagatccgttcattgaggcggaaggacagtaggaagatgtttattccgtagataaataccagccccatacagattaggaccagaatggcggtggcgatattgataccgcagcggactttgacagggaatttattataaagcagatccactcgcaccaggccgcccttccagtagcagtatccgccgcaggccatcagcatcaggccccagatctggataatcagctcccatgcccagacggttggagacttgaggacataacgtgagaatacctcaaaggcggtgaggcagatcatgggcagaagaatccaggcgaagattctgccaatggtccgattaatggcgtcaatgccgcctgataatttcaatagtgcgttcatgtctcactttcccttctcttgaattctatttttctgtgaggaacgcgcggactcagtaatccacttggcggccatagtcacggttttgctgcttgatgatctcgataccgcgggccatacgctcgctcttggcggccagctcttcccaggtctgggtgacagcaatttcacgcatctcggccaggacgtcatcaggcagcggagacagctcagtgtagccgccctggatagcgtctcgaacacttttctccgtaccaaccacatgggcctggccgatgacgccgatgttggccagccggatggtctcgtccacgatgctccgcaggtcctcagggagcttgttcaggctgtcctgattcaccacggtggccatttggcagaagcacatggaggggctgagggcgtactgcgccacctcgcggatgttgttggagtcactcagagaggaccatccatacagagcgccgtcaatggtgcccagctgcagggcctgatagacctctgtgccggcgatgttggtgggagaggcccccaacgcagccaggaagtcgccccacacgcccagagcgcggatctttttgccgtggaagtcctccaggctctctacctggaagtttgccaggacgttgtagttgggctcatgggcattccagtagtatttgagattcagttctccgtaggcctcctggatcacatccagcaacccatagttctccattacgtcatagatttcggcggagctctcccatgcaaaggggatgccgcaggccagatccgcctccggaatcaggccggagaaggtggagccgaagatgacggcacagtcaaaggcattttgcgagagataggtcagtatatcggaggtctggcacaaagcgcccggctcatacagctccacctgaaggcggccattggtagcggtctccagagcctccttcaggttggtggccatatcgccctgcagggaattcagggagtagctgctctgcaggcgccaggtgatcgtctcgccaccggaggagctctctcccacgcctgaatcgctgccagcggtatcgccgccgcaagcagtcagcaacgtcagcgacatacacagtgccagaatcagcgcaaacagtttttttgcattctttctcatgatccttcctcctaaagtcttgtatgggggatgtgttttactggccggtatactgcggctcccgcttttccaggaaggcggaaacaccctccttgaaatccgcatgacgagccatgtagcgggtgtaagtcacctccagctcatccttccggtggatctggaaatcctcctgctcattcatgcaggctttcaggtaccgcagcaccaggggaccacggcggcacaactcccgcgccttgtccatggccgcgggcatcagttcctccagcgtgtctaccaccatggtgacaccgccgtacttgtcgtggagctcttctgcggtgatgaaggtgccgcagtagctcatatcccgctggatctgggggggcagaatgcgggctagatgggcgctgccgcccaccacgctgagctttgcctccggtgcgccgaagagggtccccttcacggcgatagagatatccgcaccggcggggtagcacacgccgccgcccaggcagtggccgtgaactgcacagatcaggggaacccgcagttcatagagggcctgagcaccatcgtaatagacctcctgggtattggtgacatccttatccaggatgctctgatagaatcgcttgatgtccacgcccacgcagaaggttttgatgtcggagtgcataatgcacacccagatgtcatcctcatggttgatatagtcgcacaggagcaggatctcctcctgcaccacgccgtctgccgcattcaccgggggattgtggagggtcataacggcgatgtgatcctccacggacaggaataccttttgtaaggtatgtccattgacggcctcaatttttttctcggacatattactgatcctccttgccatagcgttcgtagtaagcttcccagagctgatcccggaacttggggtgggcgatgttgatgaggagccgggcccgctcccgcaggctcttggcccgcaggttggcgacgccgtattccgtcacgatgtagtggacgtccgtacgggtggtggtgacagtggtgccgggctcaaacaccgggacgatccgggacacttccccgtgcttggccgtggagggcatggccagaatggctttgccgtcgggacacatggccgcgccgcggacatagtccagctgaccgccgatgccggagaattgcttggtgcccatggactcggagttcacctgaccgttgaagtccacctgtaggcaggagttgatggacaccactttgggattctggcagatcacggcggggttgttcacgtagtccacagtccgcatcatcacgtccggattgtcatccacaaagtcgtaaagctttttggagcccatcaggaaggcagccaccatcttgcccttgtccagccgcttgttggcaccggtgatgacccccttctggtacagatccaccacgccgtcggagaacatctcggagtggatgcccaaatccttcttgtcccccaggaacttcagcaccgcatcagggatggtgccgatgcccagctgcaatgtagagccgtcctccaccagggaggccacattccggccgatggcttcctccacttcgccgatggtgcctccgcccagctccggcagaggcgtggatgcctccacacagcaggtcagctgggagacgtgaaggaaggactcccccatggtgcggggcatctggtcgttgacctgggcaatgaccattttggcgttcaggcaggcgggcttggtgccgcccacggagacgcccagggacacatagccgtgcttgtccggcggagtgacggaaaccatcgccacgtcaatggggaaggtgccgtcagagaagaatcgggtggactggtggaagaaaaagggtgtgtagtccgcccgtccttcctgcacagccttgcgggttgggccgcccacaaacatggcattgtggcgaaggtgccccttcatcttgggatcgcagtactccccttttcccatgggaacccagtggacgatctccacatccttatattgctcatagtttcgcaccagcgcatccaccaggacggggggttcattggccgcatggccgaaaaagacccgggaaccatcggggatctgccggacggcctcatctgccgtcattaatttggaagcatagagtaccttccagtcttccatctcttgtacctccttaaaatctcacatatttcatcgatggtatgtctggcgggggatttccgccaccaacacattccgttggaattcgacaaatcattatagcaaaaatcttgccaatttaaaaaaacattccagcgaaaagccagaaacccctatgactgtatggaattgcggttcctcctgaaattcaaaaaagatcgaattattttccatgacggaaacggggcctcgattatgtgaaaaaaattgcaattttgtgttccaaaattggaacgaattttgagcagagtgctccgaaattggaacttgtgaaaacataagatttatgatatagtcatttttgttaaaaacaaagcaaagatgatatgagttttgacgataaaaagtgtgatttcaaatttgaaattgcacaaaagagcaaaaggcgaagggaggtgttccatttttggagcaaaagcaggtgcgctcgcagttttcccatgagaccatggaggaactgcgcaagcgagttttggatttggaagaacagaaccgtgtcctggatgcttttatcgagaactctacggatgccatccagatctcagaccggaatctggtgacgctgcggatcaaccgggcttatgaggtcctcaccgggattcggagagaggagttagtgggggtgccggtggagcagttggtgaaaaaccatctgatttccgaatcctgcggtgctatcgtagcaaagaccaaaaagccacacaccattgtgcagaccttctatcgcacagggcgcagtgcacatgtgtcctgcacgccggtatttgatagctgcggtgagattgaattctatatctgtaatgaccgggatttggacgaaatcagctctttgcagcaggagcttgataagatccggggactgaatgaccaatatctccaggaactggagagcatcaaggcccggatgggtggccaaagcaaactgattgtggccgataaggagatgctgaaggtgctggccctggccgcccggatagccaaggtggactctaccgcccttctgctgggagaaaccggtgtaggtaaggatgagattgccagatttatccaccagaacagcgggcggtccaaccggcggtttgttcccatcaactgcgctgccatcacagagtctctctttgagagcgaactctttggacatgaaggccatgccttcaccggcgctggcagtaaagtgaagccaggccttctagaggcagcagatcacggaacgctgtttctggatgaggtcggcgagctgtctctgaatatgcaggccaaactgctccatgtgctgcagaaccgctctttcatccgcgtgggcggcaacgaacccgtacaggtggacatccgagtgatcgccgctactaactgcgacttggaagagatggtgcagcagaaacgctttcgggaggacctgtattaccggctgaatgtcatgccgatccatattccgccgctccggaagcgaaaaaatgacatcattcctctggctcagcattttctagattactacaatcaaaaatacgactttcatcggaaactgtccccagcaacctgctttgcgttgctgaactatcggtgggaagggaacgtccgccagctgaaaaacagcattgagcaggcaaccatcatcacggatacagacttgattcagccggagagcttgccgatgaacgtggcgggtccggagcctgttcaggatgctccggcagaggcgggactgaatgagatgctggagcgtatggagctgcggtatctccagacattctacgagcggtacggaagtatccgtaaggctgcggaacgcctgaaactcccgcccactacgttcctacgccattgggaacagctacggcagaaatatggaacctcttcagcagaaggcaaagaatgaggatctgacaaaataaacatccgctaatgcaatgtggatactatgtattcaaattccaaaatgcaatatgaaatgagttgggccacgggatgcttggaatgcgggcaactctatgtaaatggcacagacctttggacccatgtggggagctgggtaaaatcagcggggcggctcgtgcggctctgctgattctttgtacaagaccatccgggcttttttgtgggcaagcatctcgtccagctatacggcggctgcagttctgggcagaagcccggccccacttttgtggccagaggacgaaagatagggagagggaacgcgcttttgctaaatacgcgaattacgacgccgtcgacaaagaagccttttttctctgtcattgagcccccaacaattccgccctcgtttgcccctgtgggccgctgtgtcgggcggacgaggccggggcggcatccgttgcccacaaacaactgccttcggcccttgtcgggccagcgtggcgaaaagacgagatacctcacgcctgcattggcctttctcatcaaatggcaagatgacatgaggtttgcccacaacgattggccccacttccgttggaggattcccatgtttctggaagtgaaccgggggacgaaaaaaagcaggagaaagaaccggcgcttttgttgcgccgattcgctcacaacttcccgcagtgcgggcagttgcgggattttgaaagagcgttgttccacacatgaaatagcagcaatgacgcttttctccgcaaaattcggctgtctccttagatccgcagagtgccgctggggcgttccggggctattgaggcacgaaagccccttcaaagaatgcgtcgctgaaaacaagacaaggattccaatcaggcagacaaattgttacttttctgatagtaggcgccgtgtcccctggctattgagccagcatcgtgacatgcttttccgctgacaaggaggcggtacgatgtacgactacttgaaggccttgcacgcaaggtcctgccaggagccagaacttcaaaaagtccgggcggaactggaccaagcctacagagaaatcaacgcaaggttaggccaacaagatcaggagaccttgctccagttggcggatctggagaatgaactgcgggaggaaacctcctgacattcttcatcaccgggcttcagttaggtatagggatcgccggggagatggaacggtattgccttgaggacgaggaagaaacgcgggccacagagagggcgaaaatgaaggatccccaggtcaaaattgatgtgctatacaaagaaaagagccgctgtcggccgctctttcttaactttttgataacagtcacctttccatctggctatttcttttttctgtggcattttgtttcgctgatgagagctcgctggctccataaatgtgagcaaccgagc

SEQ ID NO: 4940 - DNA, 81360 bp, Unknown
  gut microbiota DNA sequence
tttctttttgtagctgatagcctcatcaacatacttggtgtcaagctcgctcatggcttcggaaaacttcttcgcgttcatacgaacacctctctttctatcaagtattgtttcatcttctcgcggatacgggtcagccggacggagatgtttttctccgaaatccctacaagctcggctatgtccttgtagctgtcggcaaaccaatagcggcgcatgaaaatgacgcggttttcgacggtcagcgtgtccaaaaattcctcgatgatacgggctaactctctggcctcgatttcatcttccacggttttctggtcagcgatatagccctcgatttcctctaaggcaattttgtagtgtccgcttcgtttggctgcttcctttctccaatagattttgagtgaaatgttccgaacgattttcacgatataggacaacagtggattcggccttgtcgggggaatggcgttccacgcgcctaagtaagcgtcgttgacacattcctccgcatcctgtttgttgttcaaaatgttatacgagagcttatgacaaactttcccgtattttatgtccagctcttggatggctttttctgaacgattaaaaaacaggtctataatcttttcgtcttcaatcatcacatcgcctcctttccggcttcacctatatactacggttttattcgcaaatactacatcaaatcagaaagtttttcaaaaaaattatagcacacttttttgaacatggtgtgacagatgctacgacagtcagcgggaataccaccgtattggcggcgttgccgtaagagccgaggtagctggcgttggcgataaaaatctggtcaacgatgttgtaaagtgcgcccaccagcaacgagataatgcaggggatggcgtactgccgcatgagcttgctcacacgctccgtccccaaatactgatttccggtttccaaaaaatcacctttctttcaaaaaaataagaaatgcgtaagtcccagaacatccggacttacgcatttctgccacacgatttgcctatgaagttttcgctcatcttgccatttctcacccgattccgcaaaaaaaggcgcgtggctgctctgcaactggatttacgcagaaacgccacacgctgtacgcctattatagcagaggcaaatcagaatttcaaatgcttttcttcacagattttggttccggcacccgtctgcacgtttgcgaatgtcgccttcgccatttgcacgttatttcgccatttagtcctcctgttccgccggatggcagatgcgttcttcttcctcccgctcgaaggagtagagcccatctgcctccagctctttcgccatgccccacgccagcttgaagcccgccgtgaagctcatcagctttgattcagccagcaatgtgttttgtgcgtccaacaggcggagcagctttctgcgccccgcggcgtccatgtcccgccgcagttcttcctgggcgcttttggtctgggtgtccagttctggatgcgactgacggtcgaaacgcttttgcagggctttcatgtagtcatacattgcggcacctccttttttgcaaccacaacacataccacaactgctggcggaaagctattactttttcgagaaaggtcttattgattccggcgacgcaaaatgtgacatgtgaacaggaacggaaatctccagttgacccacgccgtgacccacgaacagaaaaaatggggcggaaacaacggagaaaagcgtatctacgggtgatggaattcttcggcaaatccgtttaacaccgctgaaacagtgcggaagacgtccctatcgaatcttcacacgcaggaggtcactggttcgagtccagtagtctccaccaaaaagttcctgatttcgcaagaaatcaggaacttttcttttgcctcaggctctaaaagttttctccaaattttctactttttctccgaccaatacactgaccaattcggggatagtttcagaagggacacagctccgggcgaaatgattttgcctagtggtgtcgtattttgttgttttatgttctaaaatcggactttctgcgcaaaagtttcttgtagataacaagtcgaaatgttatactaaaaataatttcaaaaacagagaggagtatccatcatggctgcgccgcgtgtttttattagttcaacatattatgatttgaagcatgtccggaatgatatcggagattttattagatcacttgggtatacgccagttatgcatgataggggcggtgtagcttatacgcaaacagacactattgaaaatagttgttatagtgaattgaccacttgcgatattgtaatctgtattattggaaatcattttgggactcaggcttccacaggcgatttttcaatcaccatggaggaacttcgcacagctatcaagaataaaaagaaaatttatattttcatcgctaaagatgtatatatagaaaaccggacatacatgcaaaacaaggattcgggcacctttaggcccgcatatgcggataacattaaaattcatcagtttattgaggaactgcgtctcgcaattaaaaataacccgattgaatctttcgaaactacaaccgatattgttaattccctaaaaagccaatttgctggattatttcagaactttttggctagggatgcttctttgacagaagctaaaacagcttatgatttacaggaaaccactgaacaatttaaagacctcctatcttcttttcataaagaaaccgaaagaatgtttcagtttttggacggaaccttttttacaaccaacaataccatttactatattcgatctctgttgggtatgaaaagttccacctttattgttttagaccaatctgggttggaagaatttctgcaagtagttggattttccgatgatattgcagctccggatgagtcatattggagatacaccagagtacatgatggtatgaaagaaacaattacgcttgatttggatctatttgatgataattataaattattacgattgccaatgtctcgggttaaaaccctgattcagtgggaaacagaagatgcctcttctgttcaagatgatgaattgccgttttaatttctaaaaatgcacctttgtgagtgtatgtgctcacaaaggtgtattttcatattgccttccctatcacatcgcccatggtatccgctgcttctcgcatcatatccggcgtggcgtgggtgtaggtgctgagggtgaagcccgcgctgtaatgccccagggtgctggacagggtcttcacatccaccccattcttgagagacagcgttgcgaaggtgtgccggagatcgtgaaaccgaatatgctcggtgccgatggctttcaggatcttctcgtgggtatgccggaaggaatccggatcgaacattcctcccgtcttgggcgacgggaacatgtagggatttcccgggtgcttcttgtgctcctccaccagcagctccaccgcctgctgcgagaccggcaggacacggatggaattgtgggtcttgggctggctcaccaccaattctcccttggtgcgagtcacctgcttcgtgatggagatggttcgcttctccacgtccaggtccgtccagaggagggccagcagttctccccgccgcagtcctgtggtcagctccaggtagaagggtgccagcagtccccgcttgtccgcttccatcagataggggcggatcttctcttccggcagtaccttcatctcccgcttctccatctttggcagcttgcggcctctcgcggggttcaccaggatcagccgctccgccacagcttgctccaagcagttgttcagcaaggtatggatgccatggaccacccggacgctcagtcccttgttcttcagctggatgtgctggtaccgctgcacccgcccgttcttctggagatcgttgtagaacttctggatctggatcgtggtgagcttgtccagcttgatgtcccccagttgggggatgatgtggttattgatgtaattcagatagtagtccttggtgttctcccgaagccggggctcggcatagacctcgtaccacatcgtcacccagcttttcaccgtgtgggtgccgctacggttcatatccagtcgctgactgtccgcgatggcctttttcagtttctccttgatctccgcctgagtctttcccaggacattcttaattttctgcttcccgggcgccgggtcataggaggccgtgtagaatccctcccatctactatctttccgtttgcggatactgccctcgctgttggcgcgtttcttccccattcatcatctctcctttctcgccagctcacacgcccgttgttcgtcctcgttttcaaagttgtacggcgactgggtctgccagcagctcctgttggataccctgggccagacggtaaccggagatgaagctgttgagacacgcttcctcccgcagagcgtcttccagatccgccatcttcaggagcagtttccgctccggctcatccagcagacgggtgagctgcctgtaggtccgttcgactttcctgtccagatactccgccctccgggatgtcgtctcgaacctgcagcagagggccttcatatagtcacgcatcatgaatcgcctcctatcagcgacacacaatactatgacctgacctcaatagctactccaaccgggcagagttatcaaattgttagcaaattcaggaccgcttccgaaaattcggaagcggtcctgaactttacactcacatatgaagtctcggtgatagatgctgctgttgctccataatccgccgatgcacagggaccatgattctttccattcgggcagacagataagtctggtaaaactgccgctgcagttcatccagaaaaggaacttctctgatgaaagccagcatcttatccagatggaatcgcggcatcatgcgcatgaccgccgcattgcagtccttgtttccagttgccatcaagaaatcatagtagttgattttccggtcattctgtttgatggcagaagtcgggaagcggtaaatccgggcattcagctcatcctgatttgacaagaccgcccgcatcacctgggcatctgcctgcggcagcagacagctgccgcaatcatagattggggccagcgttgcggtctgggtgtcatcgtgatacaggaatccccagtttccgttgtgtcggtcaaaattccccagaagcgcatccaccacaaagacattccaaaagtgttgtagcacttccacaggattcacgtactgctgtttttcaatggtatccagaatgtcctccagctccgttccggtgccgccatattcagaatcgatgacggtattcttgatggagcagaagtcaaacagcttacttccgtctgcggtaaaatctttgcaggcgcagacgatcttcgtctttccccccacatcatacgttcccaggatggtttcctgcgcggggatcccaaccatgttgaagatggtgctggcgatgtgttcgctgatacagctattcgtgtaggacagctccgttctctttccctgaccggaaggaggaaatttcagcatatattgctcgccctgatgttcgattgcgatcttctttccgttggcaccgttataagcacgtccgggcacacgcttgcagtttgtaaaatcaggcacttcattcaccccacagaaacttctgacgcagataattggcatgttcatgtgtgatcgcgccatcgttgatctccgcgatgttgatgcttccgtacagctctccccacagacagtccagcagagaggacccctccgcaaggccttctttgtatgcgtccagatcatgctggaggtaaggtgggagcccatattcccatgagcgttcccgcatggcttccgccggctccccgcctgtccctattgagcagacctgcttttgtgccgacatatccttcataggaacacccctttctttgatttgtatgttgtattttaccacattgcctcgccgcaaatcaacgattgccctcatatcatatcttttcggtctgtttgtctacccattcctgaagtttgtccttgggtatcacaatgcgggtgccgatcctcagtgcgggaaaaccctcggaccgtgccaactcataagccccggcacgggagattcccagcgccgctcccatctcaggaaccgagagcatcagcggcagatcttcgtaagatttgaatgttccttttttcactggatatcatttctcctctccagccgtaggagaggtttttatttgttatacttcgtcttgttgatttatttccccaccatctggtgaagggagtgctctataatcaatggactccgtaaagattgcggacaatcaccatcctttcatggtcatgccgcccatgctgacacgatccatctccggatcttcgtggtcatcaggccggtggcccagggggtattgcgcgtccggaagattctgttttgccgcctgttccagccaatgcctgactttctcagcgtccgggatgagcagcccgccgtcccgatacagcagtcccaggaagtatttggcatggatatcgccgtactctgccagctactccagatctcccaccgcctcgtcccgctgatcgagcggcagcttgcggtcttcgatcttggcccgtagccgcaggcactcgtaggagacctcccaattttccacccactcgtctcgatcttccaccttttcatcttcgaatgtcatcacacccaggcggatattctccgcctcttggatgatagcgttcttgatctgccgaaactttttctcctgggccagcttttttcgttctctgggcttatcgtggcagtagttctccacctcattttggaggatgcaccactggtcataacactcacggaccaccagcagttcctccagcttgtccaccgcctcgtccacagttttcttcacggactcgggaaggtatccgtaggactttttgcccttgaccgtttccaactgtccgaccagctgctccatcttctgctcaatctcaggagccgcgcagagactttgcgccatctcctgcgtaagctgccggatcatgcggcgggctccccgcaccagctcgtcccgggactgcgacttttgttcgtaggtgtggagcatctcctgtttgaagatctgattggtgagcgcggatttgatattgcgggtaaccatcccacgtcaggtccgcttctcctggctgtgttgaccacgctatcatgtgcatatggggatgctttccctcgtcgcggaaggcggcataccagcggaagtggttcagctgaatgttcatggcggcggcgatgccattgcgattgacgcggagcaggttccgccatgctttggcattgtcgcagccaaggcgtgtggtgtcctcccggtgcggagagaggatgtacgtccagacgttgccggtgtagtgctccagttccgatatggcggtgtccaggtccacacgatccgcgtcaccgaacaggccatggtcacccagtcgttctgcacgaggacgtgttgcgatgtatttcatgtaaccatccgtctgctgcacctgcttccagtgttcctccagcgccagggtgatgagcgacgaggcattggcttttgtaggcttctgtacatagtcatcatactccagcagctctttcacatccgggaagtcttttgtcagctttgtgatgagctgctcctgcttgcgggttggcggacggtcatccgggatgatctccacccgctcccgtgtcgcgatgtagcgcatgtaaccgtctgcgccctggttacctccgcacttgatatacggacttttgacgatcagtcttgccattcatccccatcctcccaagtctcccgcacccgctgctccagcgagatgcagccattggtcttccgcacattttggacgctctccgtccgccgtcggcgcagctcctcgccgctgaactgatatgcgtcggcgaggataccagccaccagatcctgctccaccgcttgcttgtacagcagagaggacatccggccttcgagctggtccaacaggccgtccagataggacttgatggaggtagggagaaacaatccagcgttgttggcgctgaggtagtccagataaaagtccaccgcccgctcaatgaagtcggtgatgctccggctcctgtcctcctgataccggcgctccagaatggtcttttctccggtgacaggtagaggggaaacttctctttttttcccataatggtcttctttctgggtgtgacccctgttttttctttgtgggagtatgcgttgggggataacgaccgcagagatgatatcacggcccggatattgactccatttttgaagccacagaaactcccgtaattgcccgcgctacgggcagaaatgaccgaacagagcggcgcttgtgacgcctgttctttatccagcattttctttcgtcctccgcagagcctcgaaaccggcccaaattcgtccaaaatccccgggaggggctgggaccctgctgagtcccaagccactccacacagggcctcacagggggctcacagggagtcttctgcctgctgctctgccagcatcttctgcacccgctgccgctctgtctgggcctcaagcgtactccgctgccgggcgtagtagtcccgcaatacctcctggatagacggcagggtgtatttgagatttccgtttcggcgccgtccgcttttcagccgcacgtctgtgggctcggtgacgatcaggccgcgctcttccagggccagtacgtactttcgcaccgtgttttcactcatgcccaccgcgctgccgatggtccggtagctgggccagcactggtgtgtcctgcgatcctcgcagcggcgcaggtaactgtataccgccagctccccagcgctgagtcccagctggaacacttcgttgggcatcgtgaagtagttgttctgtgttctcatccgccacctcctgtgtgtgactccacccaccggatgaacgcgtcttttggcaccaccatacggttgcctacccgcagcaccgggaagccgtcctcatgcaggagttcgtatccggatgacggagacacgcccagcaccttcgccaccatctccgcgttgaggaacagcggcaggtcgtcatagcttttgtactccgacagcttcatgcttgtgcacctcctttactcgttttgtgttctgcctgaacgaaggagctgcaggaactcatccacagagtggaccatccccgcttccttcatgttctggtagcgcaccatgtcgcaaatcatgtggaagtttacctccgcgtcttccagcagcttgtccatggcaaggacctgctggcccactgtgagggttgtttttttgccggggtctttcagatacgcccgcacggcatcttcctccggcatcttctctcccagcacagctctcatctcatggatcacacagtccagcgtttctttctcacattgcatcttcagaagcattttcaaaaacctgcggttgaatttggttccatccataatcctgtacctcttccttcaattgtcattcatggctgcggccttcagccatatctccgatgtgtggaagcgtcgtttggggcacgatggttttctcagatccatcagagacatgagcgcaggagaaaaaatcccctcataaggggtagggataaaatcacggttttttacaacctatttttgcgagattttcaatttgtttacaatgtgtgtctcacgtcaactcgctgcgttctcacaacgcggaaaccattgcccctcacttactaggacactcaaagggcatttgtaaaccggaaaacaaaaaaagttgaagggctctgtcagatgacagagcccttcagcttttggtggagctttctcagccgctttgataccgccattttggacacgccgtagaactttccgatctcctccatggtcagacccctgtcatagcggaaatcgatgaactcgcggctctggtgatccagaacctccatggctttttgcagactttcaaggcggagggtccagagtacaggatcctccacgggacgcctgacgcattccgagccgggcagcaccgtttcaaactcacttttactcagatgcctttcgtcctgcttttcctgcgcctgttcccgtttccgatcctgctccaggaagtctgcgacctcctttggcactgatacttgctgcccactataaggaatcacgacaaagtcgttcatttgtgtcctttccgctttcgacggaaagtcacacacccgcgctgccggcacagcgccaaaaactgaagaccttcatggaagtttccttcgtacagggatggtgatggtgccctacgaggcccatgaacgtctgaggtcccaccggggtgtggacctcaccggaaagctacgagtttaggcttgcgcctggtttgattatatcatgctggaattttttgtcggtcgaaccgtgtcgaatgggagaggtttttgtgatcttcagaaagagaaaagcccggagctggtgatatgggccagttccggacttctgtactgtttactgcggcgcaagctttgaaatgtcaaagtacttatttcagccaaaactaatttcatcttcccacttcagcaaacgcactactatgtaatgcaaactgtaaatgctgaatcaggttcattatatccgtggggtccaggaaacaaacagtggcctttgaatggtacgcctctccgtgccgcgtggtggaggcagcagtcaatcctactgcaccataattgcaactttcattacatccgtatttggttcatgaagatagtcaaaagcttgctgaaggcctgacagaggaaagcgggccccaataaagccctccagatgcagctttccccgttgcatgaggtcaaatacttgtaggtagtgccgtcggacatattgcatgacgctgataatatcgatttctcctcgttgcaggtgtgtcatattcatcagaatatcccgcccatatgtgcctaccaaaacaatgcgagaagcattttgtgcgcaacacaccatgttttgcagcatttctgggattccgcagcagtcaatcaatacatctgctcctgcagaaccaaatgccccatcgatggcttgcgcaagagaaacccgattggtgttgcagcagttttttatgccgcagtcctgtgcgtattgaagccgtccgtctttaatgtctgtaattaaaacgttagcgcctctagccacagctatttgtgctgtgcagttgccgatggtacctgcgcccacgattacaatatttttcccctgttcagctccggcccgttccgctgcattagctcctacggcaaagggttctaccagcatacccatgtcatgggttactccctgcggcagcttcacgatgttaaattggttacatttataatattccgtgaaaaaaccgtcttcgttaatacccataaatttcttgtgggtgcagacgttgattctgccgtgccggcacggatagcaggtaccgcagatcaactgaggctgtactgtaacgagatcgccggggagaaatttcttttccgcctcgtagccaactgcgacaacttcacctacacactcgtgccccaggactcggggatattgcacggttttatgccctccacggaatgccaacatatcagagccgcagataccagtttgcaaaatcttaaataaaacgtcctgtggcccctgaatttgaggcattccccgcttctcaacggtaatctcatacggtgctgttagaacagctgctttcatgtcaaatatgctcctttcaaattgaatgtcagatgaaaggaaggaccggcccgccggaaagacgggccggcctgttgccttattcctgcgcggaggtattgcctgctaacgcaacagcttttttctacgggactttcggaagaaggcctgtcccgctaagacaataacagccgcaacaatgagacccagcgcaatggggtgctgtgtgaaagccaacaagtttccctggtcggcgatcatggctgtccgcaagtaggtttccagaagtggccccaacaggtatcccagcagaattgcaatcagatccagtttgaaatagttcaacagaaaataggcaacgattccagaaactaccattaccaacacttcaaaaatgcggttgttgatggcgtagacgcccaaaacacagcagaccaaaatagcaggaaaaagaagggacttgggaatccggatcatttgaacaaaaatgttcatcaggccggtttccatcagatacattacaatatttgccagaaaatacaccagcataatgcatccaatcacctccggggcgtccactgccagcatgggtccaggctgcagaccgtggatcataagaccgccaatcagagcagctgtcacgttgtcgcctgggatccccaggcagcacaaggggatcagggctccgccgttgacagcgttattggagctctcagatgctgcgataccggcagcatatccggttccgaatttttccgggtgcttggacatggttttggtttggttataggccagcactgtggcagtatcctgacccacggccggtaaaataccggtgaaggtacctaacagagagccgatggtgatgcctttccacatttcatcccgctcatcctttggggggataaaggggacacgccgcacccgggttgttatccgcagtccggacaattcaccggattggctgagaacctcactgatggcaaacagccccatcagaaaagcggtcaggccaatgccggaactgagctgccactggccaaacatcaaccggtttacgccggtgacctggtcaattcccacagagccgatagccatgccgaaaaacaatccgattccgcctttggctccgctagaactgaccatggagagcactacgcagatactgaaaaaaatcagtgcaaaatactcccaatgcccgaactttaatgtgaccttggatagctgcggcgctatggtcgccaggacaatagcagaaaatgtgccaccaatcaaggaggcaaacacaccaagagacagtgcagcctccggcttgccacgcttgaccatgggatagccgtcccaggtggtgacaagagatgctgaggtcccgggaattttcagcaggcacgcagagattaggccgccgctgatgccgccaacataaatgccgataagagtggaaaggccttccgcagcagacatggcgtaggtaaaaggaatcatcaacgtaacgcctaaaacagccgtcaagccagggatgcatccaaagatgatacccatcaggatgcctccagtcatatagacaaacgacattgggttcgccatgaggtaagcccagccctctgcaaatagctgcattcacgacacctcctatatttcaagcagcgagagcgatttgacgttgctttgcgcgggtgagaagcgagtcacttgaggtactcctcataaatcggagcaaagatgttgtaccactcttcaattttcgcccccatctcatcggccgggataaagccaggcaggaagccaaagccttccagagcctccagataatcggggtcatcttgaaggtctgccatcttatcgttcagatactgaatctgctcgggagtggtatccttggtggcgaagaaggcacgatactgggcgccggtggcttcaattcccagttcctctgtgcagggaatatcgggataaatttcacagcgcttttcgtccacaatcagcaggggtttcacattgccggattccacggcggagcccagatcgcccacctgcatgaaactgacatcaacatggttgcccatgatggcagtaatggcgtcagcaccgctgtcgtagggaacctgggtggcaccttccaggccgagcccctggagcagttggatggtgaccatctgctgacgggcaccgatgaatccccaagtcagttcagcgggatccattgcttttagatcctccacactgttgatcccgctgttgggattggtaaccacgatgccgggatcgattaccatgcagggaagcggctccatcttctcccagagtttttcctcactgacaccggtcagatagtagcaaatcaggtccaggggactctgagacataatgtgatagccgtcgccgggctgtgtggaaaattcttgtgaaccggtataaccgccggcaccggtcataacggagcaggcgatggacacaggtagatcaatgttggccgccacagcacgggcgatgttgtcggtgccgccgccagcggcgtaggggaccagacacgagatgtcttccgccgggtaagcggcttcttcaccgccaccgcagcccgacagaatgccgatcatcataagaaatacgcaggccagtgccaagatatttttctttttcatataattttcctcctaagcaaaataacgaaatgtaggaaagaacggactcagaagaacttgacatgcaggatctgtgtaaatacgaggaccagaacggttacgacaacaagagaatagacaaaccggataagatagaacttttttttgctggtacgttcatgctcctcccgctgcgattcttcacaaagaccatacacaacgctcagacagaaagtgagcaggaaagaagcaatgggaaaaccgattagttcataggcgggaacgaaaaggagcagcgcaatcagagtaatgatcgtttcctttttcaacctgaatttgccagagtcccgctcacccttcagactgattgatttgagaaacagagggatgctgaataccatcagcagaataccgatgccttgaataaaggtgcggggttccgccagaaagggaagtccgacaaacagcatgacaccactaacagttgattctgatgcgaacaggaacaatccaattgcaaaagagagaatgcttaaaatgaaatcgttgcgcttacgaatggccatttacccacctccttaacttgccaaatgacctccgtccaccgggagcgtcacaccactaatgtagtcggaagcagatgaggccagaaatacgacagtacccatcagatcctcgggatgcccccatcttcccatagggatccgcttagtgagctgtttgccctgttccatctgctgcagatccttgctcatttcggtgtccatgtagccgggagcaatggcgttgacattgatgccgcgaccgctccactcagaggagagcgccatggtcaattgtttgacgccgcccttgctggagacatacgccggcatgttccgcaggccgatgaaagaattggtggaggcgatgttgataatttttcccttgccctgtttcagcatcaccttgccagccagctggctcataaagaaaacgcccttgatgttgacccccataatgcgatcccaagcgtcctcggggaactcctcggaggggcagcgatactgaagtccggcaccgttgaccagaatatccagccgtccacccagagctgaaatcgcttgctgaaacccgttgctgagatcgttgaggtccaatagatttgctaccacggcgtggtatccagatttggcgccacccaattctgccaccgtgttttcaacctgtgaatttgcgtccagaatgacaatctctgcaccggcgtcatgaagtgcgacagccataccataacacaggccggtcttttttgcgccacctgtaacaatggcttttttccctgccagggaaaaagcattcatgtcaaagcccatatgcgccctcctttacatttcaaatgtgatcgtatttacaagatcctctgcagacaggccacagagttttgccagctgtgtataggttccggagtgcagatgccgtgcttttcgctctctggtgcgggtgctgagggtggtaatcttttccggcgaccaagcgattcctcgccggtacatttcgtccagataagaggcaaacaggaaaccgttattctgttcggcaaataggattcgtttgccttgttgggtcagctgcgcagccagatctgcatcaaaggaaggcatgtccaccacggcgatctcgcgtccctgttcccgtaacgccttctgggcgttgagtccctcataaatgcctcggccactagtgatgatgacggtgtccgcatgaggatctccgtggacatagccctttccgtattcaaattgcagggattcagggtaaatggtttcagaagcggctcgtgtgagccgaagtagcaccagccccttgctacccttggcaatccatttcatgaccgccaccatcattcggggacaggctacatcgattacccgcaagtgaggcagctgcataagcgcggtaacatcgtcgatgctcatatgggtggcgccgttaacaccggtgtcaatgttgctagcggtagagaacaatgtaatatccagctgatggccctcggacagccagccgtcacttttggaaattgattccattcgctcttgctgactgaccgtaatccggcgcaaaactcgccagtcaaaaaagacgccaaaagtggagtgccagacgttatagccttttgcggcaaaggcctcggcgatgccactcatgttggattcagcaatgcctacattgatgccgcggtttccagcatgtttcagcataccgggctgaagaccagagatcaggcccatatccgcgtccaaagtaatcattttcgggtctctggaaaaggctgctaccatatccgcggcaattttgctgcactgcagcttatctccgattttgggatcgggtaggtcgcgctcctggtaatgcagagtcttgtctcggggagcagcccgtttggtgcggcgttgagaatagcggcgtataacacccacagggccattttcatcctgctgtacatcaatccccatcttggaagcccagtgcaggagttgctcatattcctccggcgcacgcacctttgcagcctgtagaaaatgacacaagtttttaatgcgggtttccctgcggagcgtctgctgatggatttcccattccgccagatcctgccccacggtggtcttgtggctctcggtggctttggagaaaccaccttcacccttgcggcattcagagatgatggccatggggcggctgtcgatccgatgttggaagtgctccaacgcatggtaaatcggctcgtactcctgaccgttgacatccaaaacatcaaaaccaaagctctccaatttttctcgcaagctacccatggaaagcatgagacggtgagagtcatcgttttgtccatagttgtgatcgatgagaatgcacagattgttcagatttttggcagaggcaaacatgaatgcctcccatggaatgccctcctgcagttccccgtctcccatcaggcagaatgtccgcccaacaccctctattttctgcgccatggcaaagccgacagcggcactgatgccctgccctaaaggtcccgtcgcgatatgtactcctggcaggatagggccaggatgtccattcagatcgctgtcacttccgcgggaattctccaaaagcgctctgtcaaagaaaccaaaatccgaaaagaccgatgccataccggctataccgtgtcccttgctctgtacgtagatgtcactttcacgagcagtggggtcttccacatttacatgaatgaaacctccgtaaaaaagcgcgatcagtggaatcagttctgagaaggtgccaccgatgtggattccctggtctacagcgtggtttccctgatataccgtatccaaacgaaggtccgaatccttgacttccagcagcgcatatagcgccttttgggcgatcgggtgtttcattttcagataatcacagctcaagtccatcttggccctcctccatttttttaaatggtattgtattcgagtgagcaaaatgcacaaaaatgatgctgtgcagattgctttataccgtaattttacagagagaaatagcattcatcaaggtatgtgttgcaaaataatgctatattttgtagcaatattaactcaaataagattttacttgccacaaaacctgctatatgctacaatttgaatcgaataaaaatggagggaggaggcccatgaaacgattccgtatattaatcattgccccatatttgtccttccaagagactgccgcgcccgtcatccaagagtttcctacggtggattttgagatgcataccggagatgagtttacggcaatctctatttttaactcctatccacctaacgcctttgacgcaatcattactcgtggtgcaattgcggcgattcttcggcagtttacctctgtgccggtggtggaagtggatgtatccttattggatatcctgcgggctattaaccaaccgggattcagcgatcagcgtgtggcggtggtcggatattctagcattattaattccgtcaaaaaagtatttgaagtgcttcaactgaaaaacacggagatttacgaggtgcgctacgcagaagttaaggaacgggtggcggaactggctgaccggggattttctttgattattggggatgtgccttccgtaaatgctgctatggcaaacggacttcggggactcctaattctgtcatcagaggattgtatccgccagtccgttattgcagccatctattattcggagttgatggaaaaggggcaggagatcactcagatttttcagacagttattgataatttaaaattccggattatcctgatggaccagataggcaacgtaattgttgacaatcgcgcgtttgagattaccgatcatcaaacctttaaaaaagagttgttgctatttattccggtgcttttgcagcagtccaccgataggggctgtaaaaaaatcggaacacagggaatcgaaattatcggcaaaagggtttcttatcgcaatcaggactgcttcctgttcttcatttcactgatgcataagggatatgcctcccaggcagacattaccatcgaaaaaccgctttcagtgacactgtccccggaatttatcaatactcttcaaaagaataacccacgggtacaagcggtggcggagattgtcaccgcatccgtgtctccgccgcctgtgttgattttgggagaatatggtaccggaaaaagcagtctggcctattatttgcatggcctgcgcaaggagccaatggctccgttcatctttgtgcgctgcaacctactgaccaggaaacgctggaatgcatttttggataaaactgcatcacctttgaatgaaaacggatgcacattatatctggagaacattcacttacttccaatagaactgcagcaggagttgagcgcctacatagttgattctgctgcggatcagcggcactttattatcgcttcggcaacgaataggatccaccatcttctgtccaatgaccagttcttgtatccgttgtaccagaagatttcgtctctccatgtaatcctggcacctctacgggaatttcctgattccattacggacttctcacagatttttttaactgcggcaaatcaagaatatcaaaagagtatccggggatttgaagaaggggtcgtggctctgctggaacagcagcattggaataccaatttatcccagttaaaaacgtttattcagcaattagtgttgaccgcacagggagcacagattactctgaaagaggcacagaccctgcttttaaatgacaatactattcccccggaggagacggaatacttgaattacagtggaattgatatcacaaaaccgctggaggaaattgagcgggatattattcagcatgtactgatggaggaaaacatgaaccagtccgctgcggcaaggcggctgggaattagcagaaatacgatttggcgtaagctccatgcttaaatacgggcgtgcagctgccggcttaaagtcgctggcgacaccattactaaaggaaaattgcggcttggaatgacaaccagctctggataggctgcattgccaataattttaccggcagtaaagccgcgtcatttttgcaaagccggactacaggctttttgttggatggtactggaaacggaaaagtagcgctggaactgaccagcagctggtgtacggtgttgtatccgtcatagctggtcaatgggcgcactatggaaacggggcacagactgtagaaaattttgacatttaccgctgctgactggtggttccggactactggtatatcttagatgcctcatcagaaaaggtgcgaaaagcaagctgaatctgaaagatctggcggctaatgagactttacctcacctaattctctctggaagctattccgccatggtacaaaggtaagtgtaggcttacctggaaagcagagtaagtgccgttcgtattgatcccgaacaactgctgtctggtgaacagacggaaaccgtactgcaagaagctataaaatctgcaaacaggaggcattccgctgtaaatcctgttgaattaagtgactgccagcgatctggcgcggaacgtatatccaagggttaataagccgtatggaagtttatggtagacattgcagtagttggcggcaaaaatcaggcgtggcaagatatcgctcctggcgtgctggaactgtagcccatcgaacagctggaactaggccttgtattgaaatctgggaatttcagatatgaacagcttttcctgacagtcttgcgtaccgcgtgggttagatataggctttataacaatcccgagcaaagataaaagcccactccagttggtttactcacctcctatacactttactgcggtacaaattttgagtattggagcccagggagatgcgaacaagaagttggacctaaatggggagtttcaaggtgcgcctgtatgtggcagatctcatcgcccccaaggatagcttgattctgccatcgttataccatattcatgcagggatctacactgctaatgaactagaaaacagatgtgctttcctagaaactcccgtaaaacagctcgttcttcaaccgtccttcctacgcagactgcattgtcggggaagtgacctcctttgagacatggagcaagtgagttcagcctgctccaagctttgaatttagccctaccagcggtaacgcccttcccagtctaaactggcgatcggatactcgccgcttctcagccagcggggataaggaactcctaatgtcaataacccatttgacgatgagcaagcccgcatgaaaatcccgccaaagggtattttccacggctgagcagatctcacccatatagaaatgatacctccgctttttcttccggactaaactgtaccattgcttttcctttcttcgtaagaatacatctcttccgcctttttccagtccatctttttgtccgcttgcccctggggattgggatgttcttttttcactaataagtaatcggaactttagccgacataacagagtcagaccacagcttgtaccacaggagtttgtggaacaagcggattttgcacagtaaatcacgcccgggaaacaattgaaatggagcagaaatgattaaaaaccgccggaaacaatcaaaaaagtttcataaagctgttcacacgcaggaggttactggttcgagtccagtagtctccgtcgaaaagttcctgatttatgtaaaatcagggacttttcttttattcgtctcaaaaaacatgcttaaacttttagcttcttctccgaccaatacggcgatagtatctgatagagctggacagtgtcgggcaggaaatccctgcccggtgctgccgtaatggttacagtctttttgtatggccagaaaaaatccggccttccatctcacacgcgtctgcaagctctttggcgagctttttgatcggaaagtctggtgcggtttgtataatgagtaccaaatgtccccaatccacatgcaggtttagaagagcgctcttctccggagtcgaaccttcatcaaaatgaagaggaaactcttttttcagaatagaacaattcagatagacatccgcccggggaatctctggttggatacactgatagagcgatgtatacaatcctttgggcagccggcagccggtcaaagagaaatatatgcctttcccctttgcccacctcctcttctttgaaccaacggcactgttccaacgccatttggcgcagttctggaaagcgcgcctcccacagggcacaggtatgtccggtatagtccgacacggtcagcgccacaggtagcccggcactgacctcttccacagtggctgtacaatcgtatggaaggggcgcagtgcttcctcctgttcggccgaggccgccagcgccccatatcctccgggtagtccgtatgatcccatcataccggcagttgcttcctctgcccggaacgctccgggcatcagccaaaactcccctaggtgcagttcgttaagcaacctgtcagttctttcttttcgttttcggaaaaccatagttactctcccacatctgtgatatcaattacccattttctcaaagaggaacctgcaacaccaaggagcaatccgccggcaatcccgcccacagcagtgccaagtcccggcaaaattgccgtaccgattgcagcacctgccagagcgccgcctttggcgccgagtgcacctcctgcccaactgccgccaatacttgcagctgtactataagtctttttgccaattttctgatgggcgtcatgcagatctccgtcaatgacatcacatagccccaaagcatccagtgctgcacccgcgaccaacagcactctccctgcgatcctgactactttggaaatctcggtatgatccagtccggatggaagccttttctgccacgccgaagcatttgtgagaggatccacattgataaggtaatagcttgtattccctctatgggagtgcaaatcggcaccgaaaagcggcatattacttccaaagaatacaaaatatggaaaatcccgtccattccgtgcgatttttgttgcagccagaatcctcgtccaactgctttggagcgggtcaagccatgccagagttggaaaggtgcctcgcgctaattcagccagaaagctctcacgagcaccgtcagtcttttttccgcaaactccgtcctccagcagccgctcgcctaaattcaattcgtcgagttcttgctgcattgccacccacaaaccatgccagccgctcgatcatgctgtcagaaatgcctgtgctgatcccgcagtgttccagttcgctaacagcggcatgcaggttgcgggctgtatcgtctgtgatatagttgttctctcgttcgttttgcgataaatcccgctgtaattggcgcacgatatcttccaaggagccctttatgcctccatcgtagtcatcgctgcatatggcaggaagatcctgcaaagggactttccgttccgcatagttcagatattctctgctgccaatggaatacccacaacgcccccgcagatctgccgatttattgttgctgcggtatgtgttcagtacatcccgtaagaattctttatcctttccctgtgaaatatcctgcggaaatgcagtctttcttgcatccctcccgccgcaaaggaaatactccaatccacagccttttgaagtaaatcaagacactcactggtaaagaagtccgaaccgctcttaattttttgaattgctgtttggatagcccgatcatcacgaaaagaactgcctgggagataaaaagaggatagattcaggatttctatgcagtcactgctatggctgcaaaaactgcgggacatcctgcatacatcatattagtgattgtacctgcttggcaagtgcgctccttcgatcagaggatatattgcgaatgacgtttatgtgttcctgcaagtcgtcgtagatctcttccactgcggcgccggcacggttccccatctcccgtaatgtttcgtggtaattcgtttctgacggtctttgcatcagcgtgccaaaaaaagcggcgcggtttacgcggttccaatattcaccgctccccagaacagcgccgttttcaccagttgcctccttgctcataggtttccttcctgagagttttctcaaatacaggcttacgtatgaagaaaactgcatgtttattctaacctctttgagatcaaagagccctgcaaccaactgccgccccagatcgaatagggtctatatccaggtcgactggtataagagacaaaagatctctccgttttttggttagtcagccaaatcagagaaacaaaaggtaaaattattgacaaaagataaaatgaaatttattatttaactatcagctgtcagacagatgacgtcctatcgattagttattagggagaactttttaaggagggcaatatgaaaaaacttcgatggacttgggacaattttgaggaagttctgctgtgcatcatcattacggtcatcacgctagtatcaggattgcaggtagtttgccgttatttgttcaacaactccctgacctggagcgaagaagtgagcagatatttatttgtgtggacgggctttctcacactgagtctttccatcaagtgccgctccatcatctccattgacgctttcgtattgtggatgccgcggcgcgttcgggcgggattgaatatggtggtgtacctgttctgctccgtggtgtttgctatgctgtcggtcaacgcctggcacatggtgacgtcctccgccggacagaccagccctgctctgggattacccctggcgatcgtctatgcgggtcccctgttgggtctgactctctccattttccggtctttgggccggatcgtggcggaaaccaaaatcgtaatcggaaaggaggcgccctaaatgtctctggcgttgtttttcggagtattggtccttctgctggtactgacggtacccatctgtgtatctttcgcgtttgtgacgttgcttccctccattgtggacgccagtttcccctatacggcggacgctgcggtccgctccatggtgagtggtttaaacaacttccccctgcttgcgattcccctgtttatcatcgctggcgtgatcatggcgaaggggcagatttctgagcggctgttcaatgtgttctcgtattttgtcggcaacagaacagcgggtctcccctgcgcggtgaccattacatgcctgttctacggtgccatctccggttccggccccgctactaccgcggccgtgggttctatgtgcatccccctgctgaccagtgtgggctatgacctgacctttgccaccgcactggtggccgtgtccggcagtctgggcatcatcattccccccagtatcccctacatcatgtactgcaacgcctccggcgcctccatttccgagctgttcctggccggtttcctgcctggtgtgctgatcgccctgtgcctgatggtctattcttacatctactgtaagatccatggagaggataaggacaagctcaacgccaaatgcatggaactgcgggcaaaaggcctgggcacagtgctcaaagagggcttctgggcgctgatgtcccccgtcatcattctgggcggcatctacggcggcatctgctcccccacagaggcggctaccatctccatcttctactctctgatcgtcagcttgtttatctatcgcaccatcaagatccgggatcttccgaaaatcatgctggaaggcattcattcctatgcccctatcctcatcattctatccgcggccgtggcctttgcccgtgtaatcacgctgatgaatgtagccaccatcgtcagcgaggcggtgctcagtgccatctcctccaaggtggttatcctgctgctgatcaacgtactgttgctgtttgtgggcatgatcatggataccggtccggcaatcctggtgtttacccccgtgctgctgccggtggcggaggccatcggggtcgatcccatccacttcggcatcatcatgtgcgtgaacttggccatcggctttgtgaccccgcccatgggcgccaacctgtttgtggccagcaacctctcaaaagtatctgtgttcgatatcgccagaaaggcagttccctttatcctggcgttcctgatcgccttgctgctgatcactttcgtgccccagatcagcatgttcttgctgcagtaagagctccgggcagctgcccgttcatagttctaattatttttaaggaggatattcccatgaaaaagttattggctctgcttttatccctggcaatggcattgtctctggccgcctgcggcggcggagagactgcacagcaggagcctggcggggatgccgccggggaaacttacagcttctctgtaggcaccaacactgcggaggattccgtcaaccatttgctggcagccaagtttaaggagttgatcgaagatcgctctgatggtgctgtcaccgtgacactgtatgaaaacggcgccctgggcggcgacgcggagctgacggagtcctgcattgccggttccgtggacttcatcgtgggcatgaccggctctctggtgaactatatccctgaggccgccctgttcgacctgcccaacgtgttccccgacctggaaaccgcccgggaagtgctggacggccccattctggcggagctgcaggccgcctatgaagccggcggactgaagctgttcggctatgccgattccggtttccgcgtcatgaccagcagcaaggcggtccgccagatgtctgatttctccggcatcaagatccgtaccatggagaatcccaaccacatcgcctactggcaggctctgggcgccaaccccactcccgctgacttcagcgagttgtatatgtccctggagcaaggtactctggacgctcaggagaacccctatgacctgatcgtggccaacaagctgtatgagccccaggcctatgtcattgagaccaatcatctgctgcacactctgaacatggtgggcagcaaggccacctatgacgccctgcccgctgatatccagcagttggtcagtgagtgcgctgctgaggcccatcagtatgcccgtcaaatggccgacgagcgcatcgaaggacagaagtccaccattcaggatgccggcctggagatcatcactctggagcccgccatgattcaggagatggctgatgtctccgccaacgtctacgatctggtccgcgaacaaatcggcaccgatctggtggacagcctgctggcacaggtggaaactgcttccgttgcggaataagcaatatagagagggcagggggtgtgaaaagcccccctgcctctttcaaaatcattttggccccgaatgtttggctactgtcccacctgaccgatgagccggagccggtgatgagactggcggtgcggatcgcactgtttccggattggtcttctctggacagcagaaagagaatatgaggcagagtgttcagagagctgtgaatcgatttccttggtcctgtgcagaagactctggattttgggcgaaacccagccttgacaatgcttgtatttgttaggataattttgtaaaggattgtatgcattttccatacataccaaactttgacaaaaggtacggtggactttatggctctcaaacagattacgcgagtgaatattgcagagaaggtttttgaacagctgcgggaccagatcctccaggggacctggaaggaaggcgaaaagctgccctctgaacaggagttgactgaaacgttaggcgtcagtcggagctctgtccgccaggccatccgtacactggctgattatgggatggtagagacccgaaatggcaccggaacctatgtcaagcggcagatttccggcaattacatgctcaatatcgtgcctatcggcgatttgcagtttgaagatattgtggaagtgctggattttctatgcctcattgaggacagtgtggcagccatggctgtccagcgctgcacccaggaggagctggcggaactgcaagcgatccataagcgcctgattgccgccaaggatcaaaacgatctggaggcgctgaccaatgtggacgtggaatttcactcgaaaatcgcgatgatcacgcagaattccctggtggttcagacttacgcgcttttactggagtttctccagccggtcatgcatcgcacctatgtgaccctgggcgcggaggaaggtattccataccatgagcgactgatacaggccttttgtgcgcatgacgcggtatctgccaaaaatgtgatgggggcccacgcacaaaaccggagggataaatttttggcactccaagaaaggattgaaccatgaagattacaagcgtcgacattttcctcctgcgccatgtcggtgaggagttttcccccttcccttttcgtccggcggtgtgccgtgtcaatacggacgaggggatctgcgggtatggtgaagccggcatttccgtaggaaccggtgaaaacggcgtggcctatatgctcaaggacctctctcagctggtcttggggaaggaccccatgaacaacgaggtcatctgggaggacatccataatgtgctccggggacacctcagcggaggcggtgtgacggtctactccgccatgagtgccttggacaccgccatgatggatatcaagggcaaaaagctgggggtccccatctatgttctgctgggcggcaagcatcgtgacaaactcaagtgttatctctcccagtgccatttgggttatctggatgattaccgcctacaggccactatacagcagctggccgatacctgcgccaagatccagaaggacgggtatcctgccgtcaaattcaatgccgtggcttttgacgagcaggcaaagcccctgccccgggagatgaccaccggtcccttggagaaaacgattttggatcttgcagaatcccgcctggcagcagtgcgggagcggtgcggtgaccagctgggcatcatcctggaaaatctctgcgggaccgatgtgaccgcggccgtgcagctggagcggatcgcccgcaagtacggcgtgctgatgatcgaagaggccacctctaacttcaatcccgccctttacggagagatcgcccggagagtcgagacaccgttggccactggtgagcgtttccacacccgctggggctttgaacagctgctcaaacagggagctatttctgtgattcagccggatatcaccaactgcggaggcctatccgaggccaagaagatctgcgacctggcacacatttatgatgtccgcgtccagtgccatgtagccggaactcctatcgcggaggccgctgccattcagctggaagccgccatccccaatttttacatccacgaaacctaccatatggcagcgcatcctgactgtgtgtcctacggaaagtacgcttacgtaccggaaaacggttatttgactgtgccggatctgcctggcctagggcaggagctttctgacaaggccatggcggaatcgctgggacatatcgaggtccgataaggtaaccaattttttgagatacagaccgtgccgagcatggcagcttcaaatccgctgcgatgggaacttgccccaagcatcggcccctaacaggaaaaacgcagatagaggcagtggagtagatcggatgataattaccctcgttaacagctaaaaacaacaaatagagcgaaaaggacaggacaacccgttctttccgcacctagtttatcttcgcatctatatggacttccatcgtaggcccggttgtcctttccaatttctcgtccgattttcgggttcccccctcagaatcaaacatctaaaaaattcatcccatgcaacttcttcagcaaaaagcgaccaatatagccatacagttcaactgaaaaagcgtacgattcacacgcagaagctcgctggttcgagtccagtagtctttgccaaaaagaacctgatttcacgagaaatcaggttcttttctttgctttttgcgtatttgcagtgccccgatttttttggtgtttttgattgactacagaaataccacagacaggaaaactcccgcatccgcgggagtttcttttttcgctttcatggcggcaatcagaactctcagcttctcctcgcactcttccggggtatggccgcagacattccgggagctctgcttgccgtccggccctccgggtgaataccgcccttcccagaggtggtcgccgatctgattgccgctgccgggctttcgccgctttgccatggtatcagcccctttccgaagatctcggtcatgaaggtgtccatcacctgggccgcctgccgctgtatatcgtcggtgacgttggcgtaggtgtccaaggggaagctggccttggtgtggtccaggatgccggagcgggtcttggcatccacgccgatggccagagcaatcggctccgctttccaattaacaataaaaaatcggagtaccccgaaggatactccaatcgtccgcgtgtcatgaaacggcctgtgaaatccggtaataccggtggtttataagcagcagacaagacacttttatcttagatagtccggtcaagcacagtaacctgcgtgatcacatcgcgcaggcggtcagatcctaccatatagttcaggacatcgtcagctgttgcgaagtattgtgtagtatcaggctgcccccacaggtaggcaatgattcgtcccctggaatggctgatcccgtattctttcccatcccaaataaagtcgatttcaccgcctttgtccacacaccatttaaaatcactgattgaaacaaattgattctgttcgggtgtattagcgggaatcaaaggagtcatggaaacaatctcctttctttgtatgaatcgcttcaatggcatatccataggattaaagcttggacctgttggtgtccatataatttcatgggcgtggggatttacatgctcccccgggttaccatggtctgaatgatgaatctcataatcggctttaccatctgggccaatatgggtctcataaagctctccgtgtttattatatgtctgattgatatcgcccggattccctaagaacttccaatcgtttggttttttagggtttggtttccagtctgcgccataagcactgccgccgcctttgccaatcaggtacggctctattgtatcacgatcaccactcgatgtgctgccgattttaaaggcgtccaaatcttcaccacggaaactacgctcgtaatccacgtagatgatattgccctgcatttcaggaaacggtgtattgtaacagatgattttttccggctcaatgcgccgcagcatctcgtcatatcctgctatgaaccattctttctggtcacagcagttgtcatgctctgtggccatataagttgagacagcaacaacgcttcctttttcaatcccctcaaagcagaaatcaaacgtagattcgtctccccagttgacggcaggaatcacccggattcctttggatgcccaatatgcaccgcaccagcgattacgaaatacattgtaaatctgcatgacaggcgccatctccaggtacatactgaaatccggcgatagcaccgcacggtagcgggacagtttttcgacgtcattatctgggtgcttccaaacccgctcaaaacgatagtcatataggaagaagtgaaccatccggtcaagatgattctgatcctccaaatgggtcttgtcgaagcctatcaacaaaaggtcgtcaaagtctccgggcttttcttggaacatgggaatgatggggattttcaactttccgttgccgggaaactgattgcgaagcagcgcctgactggttcggtaattgtaattttcttcggtcataaataggcctcctgtgtgaagtaaggaataagtcctcctacatacaggctcccgattggaaaaagttatacagtttcgcgccgcaacatgagcaattttaaatcagcaataaaaagacggagtatcacgaaagaatctgtaattattcaaagcagaaacaattttcagaattcgcatctgagttttatgcagtgcagaaccttaccaccccttcatggtcatgccgccccgggaccgggtttgttcttcttcgtggttgtctggctgatggcccagagcgatccgcagcttctggagctcttgcatctgcttgcagtcgatgtgcagcctcggctgtgcagtcacggcagccgcattgtgctggaagatatagctcacgtgaaagtgcatagccgctgcgatgtcattgtggtgagcacggagcaaagcccgccatgcctgtgcgttgttatagccgagacgctccgcgcgaggctgcattgcgatgtacttcagatagccgtccgtttgctgcacctgtttccagtattcctccagtatcagggtgatgagtgacgacgcatgagcttttgttggcttctgcacatagtcctcatactccagcagctctttcacatccatgaagtctttcgtcggctttgtgataagctggtcctgcttgcgggtaggccgacggtcattcggaatgatctccgtcacaatatacctcttgtagctgatctgctttttgagcacctgcagctgaccgtcgatggctgactggatcgctggtgagagcagcacgctactatcgtctgatgtcaagtaggccgtgtagaagttcgccgccttttccacggacttgctcatgctgcagcagctggcatcgctctgccagcgctcgattttctcccgggttttcggctgcagacgaagctggagccgttccttctctgttacggaatttcccctcctttccaataagatgtcatgaaaaacgtctgttttctaagggatttgtgcctctctgatgacagattcatgacaaattccaattgactttcattgccttttggcagtgtgaggcggggaacaatctgattttcccgcgcaaaacatgcggcaaaccagtcccgtttcatgtgttcagcctagcccggggataatcatgaacccatttaggagcattttaaaagctgtctggatatccgggtccccggctccaaacagtcgggcagcttttggacggaaggccgaaacggtatcccgcaaaagatctatccctggtgcttttacaatcctctcactgtacacatggttttttgtgctgaggagcacctttctttgatcgatgcggcatagtttcagcctgacatgtgccgttccgctttcaggcggacacagaacagaaacgtcacaggcagaagtcacgaggcaggcggaataccgagccagtaccttcccgacacaacagcacacaacagagcgggaacgggtatgagcgcaggcccctttttcacgcacggggccgccggcctgcgtccgtcagtctccagcaatcctgcgctttctggatttcatagcgtgcaggagaaaagtgaagccagatggatgtatgagagactattggccttttatataaggttacccgaaaataaaaacaaaaaatttttattggagctttgccgtaccggtatcaaggatgcaatgcctcatataccagattccgttgtcagcgtgtcagccttttaaaaaagcacgcacattgtctacacccccatgccgcaggactttgagatatgtaccttttctcagcgcctgatataaaatagccacactaaaatagccacacccttaggtgtggctatttttatatgtcacagggacttccagacgttcagtgaaaatgtctgaccgtgcataagtgccgcctgctctgcagatgcagaaggtttttgtaaacatataacaaaaaagcacttacacatttacacaaaatgacgtttttgaaaaaaagccaaaaatcctcccctgtcatgtgaaaaacaggcgttccaaaaatgccgggtgttcgataaaataatcacaaagaggtatatgtgaggggggagaactgcatggagtatatcttggaaatgaaggatatcagcaaaaccttcccaggcgtcaaggcgctggaccatgtccagctgcaggtacggccgggagaggtccatgcgttgatgggagaaaacggagccggtaaatcgaccctgatgaaaatcctgatggggatttacaccagggatgccggtggtgagatcctgtttgatggcaagccctatatggtttccaaccccaaggaagccatggacatgggcgtggccatgatccaccaggagctcaatcccatcttggatatgaccgtatacgaaaacatcttcgtaggacgggaactgcgcaagaacggtctggtggacaaaaaggccgagattgaacaggctcagaagctgattgaggagtgcggactgcacgtctcgcccaaggagacgctgcggaacctgacagttgcccagtgccagctcatcgagatcatcaaggcgatctccgtcaacgccaaggttatcatcatggatgagcccactgccgccatcaccgaccgggaagtggagctgctgtttggacatatccgccgcctgaaggagaagggcgttgccatcatctacatctcccatcgtatggcggagatcttttccatctgcgaccgggtcagcgtctaccgggatggacagtacatcgggacaggcaccacaacggagctggacgaaggccagctcattaaaatgatggtgggacgggagatcacggatgtgtatccaaagctggaggcggacatcggcgaggtcgtctttgaggcaaaaaacatcgtccgggccgacaacaaggtcaagggcgtgagcctgtccgtccgccgcggtgaaattctgggaatcggcgggctggtgggcgctgggcgcagcgagctggtggaaggcatctttggcatgcacgccctttcacagggagagatttttgtccacggcaagcgggtgaagatctcctctccggaggacatcatcaaacagggtgttgcgcttatcaccgaggaccgaaaggtcacgggactgaatctcagcggcacggtcaacgacaacattgccatggtggccatcaaaaagctcctgacccacggactctacaacaagggaaaagcccgccgcgcgtctgaggagtatatcgaaaagctcaacatcaagactccttccgcagaccagatcgttggaaacctctccggcggcaatcagcagaaaatcgtcattgcaaagtggcttttgaacgatccggacatcatcattctggacgagcccacccgcggcatcgacgtgggtgccaagcgggatatctacctgctgctgggcaatctggtgcgccagggcaaggcggtcatcatgatctcttcggagatcccggaactgatgggtatttgtgatcggattatggtcatgtgcgagggcaactattccggagaggtcagccgggaggaattctcccaggagcggatcatgacgctggcctctgccatcaaggtgtaaagggaggaagaactatgaaagaaaagagtcgtgcaaaatcgctgatcagcgaatacttcatcttcgtgatttttattgcgctggtggtggtgctgacctgcctgaagcccagcttcatccagcctgccaacctggtcaatattctgaagcaggcctctatcaacggcattctggcattcggcatgatgttcgtcatcatcgcgggcggctttgatatgtcagtgggctcaacggtcgcgttcaccggcatcctggccgccatgctgggccagggacagtatccgatcttcgtgccgctgatcgtagccatgctgggcggcctggccgtgggcgttgtcaacggcgtgggcgttgccgtgggcaacctgcctccgttcatcatgacactgggaaccatgacggcggtccgtggtcttgccctcctgatctccgacggcaaacccatcatcggaatcagcgaatcgtacaaggctgtggcggcgtcttcgatcttcggcattcccatgctggcggtctttctggtgattaccattctgctctgctccttcgtgctgtcgaagacagtctacggccgccgggtatatgcctgcggcggaaatctgctggcagcgcaggtctccggcatcaacaccaccaagatccgcatctccacctttgccatcgcggggcttctggcaggcctgagcggctttttaatgacctcccgtgttaccattgcccagcccacagcggctgagagctatgagatggatgccatcacggcctgcgtggtgggcggcgtctctatgaccggcggcgtgggcaagccttggggcgtggtgattggctgtctgttgatcacggtcattgccaacggtctggacatcatgggcgtgtcttcccactggcagaagatcgtcaagggcgccatcatcgtactggctgtgctgatcgacgtgaagggcaagagcaagaaacgctgaacggtattgagagaggggcgttccccgtcctgctcttgatatatatcgaaatgaaccaaacatttcaaggaggaaagaacatgaaaaagaagaagtttctggctctgctgctgaccggcgccatggcgctggccgccctcaccggctgcagcagcggcaccgagaccaccgaggagagcactggtggggatgcgtccgccgagagcggagacggcgcctataagatcgccctcatccagcagcaccagaccaacgcgttccagatcggcgtcaccgagggcgcacaggcgaaggccgatgagctgggtgtggagttgaacattctgagcgccgatcaggacgctgccaagcagatcagccagatcgagcagtgcgtgtccgagggctatgacgccatcctgttcgagcccgtggatcccgatggcctgcgcgacgccgctaaggccgctgccgacgccggcgtcatcatgataaacatcgtatccgcctgcaccgactgggagtccgccggcatctctgccgtgtcctgcggcgacaacgtcaaggccggcgagaatgagatgcagcatgtagcggatctgctgggcggcaagggcaacatcgccatcctgaccggcccctcctccaccaccgacacgaccgcacgcctggagggctatcgcaatattctggccaactatccggacatgacggaagtgattgctcccgcggactgcgcatgggacaccgccaaggcccagtccaccgtggagagctggctgtctgcctatgatctggacgccatcgtctgccagaacgacggcatggccgtgggcgcgggcaacgccgccggtgccaacagcggcatcgtcatcaccggcctggacggcacccccgacggctatgaggccatcaaggacggccgcatcaccggcaccgtggcgcaggacggcggtctgatggcttccagcggcgtggaagctgctgtcaccctgctggacggcggcacgctggagaacaatctcatcatcgcggacagcgtgtggattgactcctccaacgtggcggattacgagtaagctgccaaaagcgacaaattgatccgctgattctccaaaaattcttggcaaataccgagaaatagcgtataatgacagggaaagggaaaacgggttcgttttccctttccttatcagaatctgcgtgggaggtgctgcggatgctgcgggtcgttttggccgatgacgaaaacaaggtgatcctgctgatgcagaagctgatcgactgggaggcgcttggctacgagatcgcaggcaccgccaacgatggactgcgggcattggagctggtgcgggaaaagcagccgcatctgctgatcacggacgtccggatgcccggctgcgacggcatcgaactgatccagagggccaaggccctccagcccaagctgcatttcatcgtcatcagcggataccggaaatttgaatatgcccagaacgcgctgaaatacggcgtggaggactatctgctcaagcccctcaagcaggaggagctcaccggcattttgctgcgcctcaaggagaagatggggcaggaagccgcgctggaattccagctgaaaaggagcggagaacaccagcaggagctgctgctggacgccctgctgggaacggcggagcgtggcacctcctttttgagcgccgggcaggccaacggggagtatggatttcactttgggagcggcacttacgccgccgcagtgatccgggtggatgtgcccgatgcggaatcctatcaggacggctaccggatcctgctgcgccatgcgctggaaatcgtgcggcgggagagcggcctgctgacggaggagttcgcggcctcgctgggccatgccgggatcgcagtgttgctgtacctgcgggcctatcatgcggtggaagtgacgcagtgcttcaccaaaatccgcaaggagatcgaaaatcagcgggacttgttctggaatgtccaggccaccgtctgcctgggcagccggagggactctctggagcaggtgggggaatccatgcgggaggcgctctggctgtgcagggatcggctgtgccggccgcagtcctggcgggatgccgcgctggagatgccggatctggcccggcggtatcagatggacgcgtcccggaaaaagagctttcaggtggcggccgagtgcctggatgaggtgcgctttgtgcaggagctggaggagagctgccggacggtggaggcgctgccggacctgaacgggcagatggtggaggactggttccgccaggttctggaggcatgcctctacggaatgcgccaaagcggtgaaacggaagcgcccctggaggaggagatggataagcggttctggcactgcacggacatggcggcagtataccggctgctgcggcagggcatccaggcagagatccagcggctgaaggaggcgaaagccctgcgggagatgcggccgatcacagaggcaaagcactatatccagcagcactatcaggaggccctgcggctggaggatgtcagcaccgccgtgggcttcaacgccacctatttttccacactgttcaaaaaagagaccgggcagaacttcatggactatctgacggagctgcgcatcagcaaagctaaggagctgctgtgcggtgaggagctgtctgtgcaggatgtggcagagcaggtggggtaccgggatctcaaatacttttccagattgttcaaaaagcttaccggtgtgagcccgtcagattataagaaactttataagtaggtgataccatgtggccgtggacggactggaaactgcggcgggcgctgcggcgctaccggcgggagcgggacctggaggccgttttgcagatggactggcaccgggatttggatctgagcgcatttttcacagatgtggaagagcggcttcacggagaggagatcaccagactgcggcagaaacaggcggaatatctggcgctgcaaaaccagatcaacccccacttcctctataacgccctggaggccatccgcacagacgccctgctggcgaactgtccggatattgccgagaccacggaggctctggcgacctttttccgatacaccatctccaatgtccaggagtatgtgaccttttcagatgagctggacaatgcggaaaactactttaccatccagcgctgccgattcggtgacaaaatctctctggaactggagctggagaacgagcggcttttggaagtgcggatgccgaagctcatcctgcagcctctggtggagaacgcagtatcacatgggctggagggcaaactgggccacggcacggtccgcatcattgtggaaaacagcgaccggacatttttcctgcgggtgcgggacgacggcgtagggatgccggacgaacaggtggagcggctcaacgcgcagttcggcggagttgggggcgcggatatgacccagccgtgcggaggaatcgccctgcggaatgtcaacagccgcatccggctcatgttcggagaggactacggcctgcatttgttcagcgccgcgggcgttggcacggagtgctgcgtgacgttgccgctgcgtttccgggaggcgtagaaccgtgagagaggaattgatccgggtggagaacggctgcttccgcagggaggacgaattctaccgttttgaaatctccatttcccggggggagtgcatcggggtctatgtggacgaccattttacctccggcaccgcatatctggacctgttcaagggcggcacacacctggagcggggacgggccttttcctgcggccgtcgggtgggcccgctggaactggaacgctggatcctgcaaaacgccaggatcgtgaactggcaccggttccattcgcaggagctgacggtgcgggacttcctgctggcgctggaccgtccggccggctggccgcagagatggggcgcggtccggcgcctgcacagtccggagagccaggagatccggcagcggatggaactgcgtgtgccgctggagagccggcttgccgacctctccctgctggattattaccgcctctgtgtatttcgggtgtggttctggcggggagagttgctggtcctggaccggatcacagaaatcctgcggcggcgggatgtggaaaaactgatggagtgcgtacagctgctgctgcgccaagggacggcggtattcctgctggatctggacgagacattcatgtaccgctactgtgaccggatcgacgtcatccgggaccgcaggacctgctatcggctttacccggaggagtacggggagcagctctatgcagttctgggctggaagccccgggaccgcggagcggagcatacagagtgccgctgggaagacaagcaggtgctgcggctggagggtctcacttttccgggaatggcgccgctgacctgccagattcacagcggagagatcgcctacttccgggacgagaactacacggctgctgccagactccgggagtgctttctgggcggcaggaactggctgagtgggatgctgtggctgaacgggcaggcacagacacatgaagagatgacaaagcagatcggcacggagatcgggattcagaccgaacggccggaccgtcccggcggtgtattgtttgacaacctcaccgcgctggacaacctgacgacctgcctgcttcccaaggccggataccgtctggttcgccggcgggtcgcggagaatattttggaggaggcctccagatggtttccccgagaggatctgctgcggcctctgcgcacttggtccttaccggcgcgcctccggttctcctatttcaaatggtatctgctgaatccgcagctgctggtctgcttttttcccttttccgggcaggagacggcgcatcatgaactgattatcgacctgctggttgcctgcgcagaacgcgggatggcggtttgggtcatctcctccaacattgacgcgatctgcgaaaagacggaaaaccaggaatttctccagcgcctgcgaaccatcaactgacttccatggaaaaccggcggcagacttgtggcacaaagacctcctttttcctccatccagcattttttgctgcaggacgaaaggcatccgcagaattttgcatggcgcggcagttgcccgccggtgtcggcacatgcccgttggcggtgccccggcccgccatgcagcgctattcatgggttttatccccatttcagatacccgccgaaaagcgtttagctgccttgcggcaagccggacgcttttctttttccccaagcgggtgagaaatcgttcccagaaccaccttcccaaagaccagcagggcggattgcagctgccgtaatactgctcccagcacactgcgtacacctgccacccggaagctgcaggcgccgctctcatagatgggcgcccgcaccatctcccagggcggagtgacagaggaaaaggtctggttctccctggtggtggtcagtgtgtccggtcccatgggagcagatccacatttttatccctccgccagtgagatccggatacaataccgccacatgggatgtgggggcctgaagcccgcgtactttggcgcagtgccctcgttcttctggcgccggttgttggaccagttcaccgccacagcgccgccctgacggagcgtgatggtccgaccgctctgtgggatcaccaggaagggagcctgtcccacagcaaagttaaaccggagggcggtgctctctgcgtcgggaaggcgcgccacggtaaggccattcgcgttttccacattctggccaccgttgagagccaccagggcaatgccggcacggccgggaggagcagccctggcatacatcccacgtccgcgttctgtgccggttcagtgtgatggtgattgatggatatggagagctttgcttttcgctccggtctgctccacctccacatcggcccgcgctccctgtagtcgatgccggaaggcccctcgtccgtcagggcgttcaccatcagcggctggatgccgccggtgaaggagatgtcaccattgtcccaggggtcggccggattataaaagctgtcccgctgtttctctgcgatgtcccgctctgtaaagtaggcagcctggacatgggccaagtatttttcgatgtccaggaccagtttcagctcctccggagtgtagttcccccatccacggtgatcttcttatctgtaatgagattgccccggctgtccaccagtccatggaactccagcatgcggttgcgcatcaatcagcctccaccgcggcgtaggccgggggcagcagcgccagcgggaggagatggggaacggctggcctggctggcccctcaagtttacacgggccattccgccatcaattccattccgcagagcacggccgctgccgcgcagcgtcaatgtccggggtacttgccgctggcgcagatccgcctccggggcctcggccagctcctcccgctgcactggtttaaagagatattgaatggggtggcctgatagcccgccttcaaatatgcgttgctgcggtggtgataaaaaagactcccgccctctcgtcccaggaccgcagctcccaggcaaactccatgccgctcttgccagccatacagatgtccagacagaacaggttgaaccacgcccccttccgcatcgtggcttccagattctccgtgctggaaaagggcctcccctcgtgctccacgttccgtccccgcaggatatcctcctgtatggcgcagattcctccctgcatgggtgccgaaagagtccgcagcatacagcaggtcgatgcagaggagaaattgtgcccgtcaaatgggtcaaaaacagcgtcaaatttaccgccacgccagactaccccaacgccatttacatctgcaacaccagcgggcagacctacagtctggtgacgattctggaagtggacgaataaaagggaagccccccggaaatccggggggctccgctttgcttgagaaacttttgaagctatactgcttagtcagcctggctgagatttacagtatactccacagaagcgccactgccagcgttctcaaccgtgacagtaatcacgatgggagtaggcgtcagatcgctcacattacccagcttcggagtcagctgagcagctgccgcagctgcattagtacccttatcaatccgctcggcagatccatccgggaaagtaatcaggatggagttatcctccagcagatcttctgccagaacaaacaagccagtgccgcttacatcggtccaatcagatacggtattgttgagaacaatgttcagagtgtcgccgctccgagtgatggtcgcaccagtgggagtaccaggattataggcatccacaatgtccgcgatatcttcctcagtcatgtagttggaaacactcctcaccatgatggcctcggtcgcctcgatctcataggtgtcgttggcagccgcgcggaccagctcaccgttcacggtgtagtcgccagcggtggtgaaggtcagctccacaacctcaccgtcggcaatgtagtcgccgtcggaaacggtcttgccgttgacctcggcggacacatcggaggtgatcgtgccgtcaatatccagctcgtaggcggtgacaaactcacggtccttgttggtgttgctcacagtcaccttgccggtgctgggaacggtcagcagacctctgttgctgcctccaatgaagccatcgggattctcattgatgtcgaagtagttgccagcgggaatgttggtcagattggcggcatcacccttgtcgggatagctgacaacctcgccgtcaatgctgatggccacgacctcgatctgagtgaagttcacgcggtacatgtcgccgttctccagggtgacatagcccatgaacttgttcaggcgatccacgggagcgcccagcaggtcctcgatggcggccttgatctcgctgtcgctcatggacttctcatagtagcgcagctcgatccccttcgtagtcggattccaggaagcgggcaggaactcaccctcgggaaccgtgggattgctcacatcagagccagccttggctttgtcgttgatcacgatgctggtggccacgccgttatccaggatcgcgctcacctcgaccacgccggtgccgaaggtgccctgggcattcatgtcgcgcagagccttctccaggccgttgtagccggtgtaggagtcatccacatcatcaaactcgttgcccttcttgtcggccagggacagaaccaccttcacctcgggagacacggagaagcccttggtggcgttccggtcggtgtacagggtgccgttcttgaaggtcagcttctcaacagtgttggtgtcggacagcaggacggtgtcgaagtcctccacggcgtcctccacgtcctcgacctcgtcgacgaacttgtcagcagccttggagaagtcgatggcctcgaccttacggacattgccgtcagcgtcatacttgacctcgaaccactcgccctgagccatctcaccctggttcttggaggcgttgccgatccactccagggagtcgccgacctcggagatctccacgagctcgccgttgacgaccacctcgcgggtccaggtccactcggtctcatcgtcgtaagcctcgcggttcacgttgctgctggtgacatagacgtagttggaggaggtgccctcgttctcgccgatggtgacagcggcgatcacatagccgtcatcattgtaaagggtgtagatctcggcggcaggagcgatgtagttgccatccttcttgaggtcctccatcaccaggttgacgttcttcacgccggtggtgacggactccacgtcgtccacgatctggcgctgatcgccgccagtggtatcctcgacctcaacgttcttcagttccacgttcaggtagacggagtcgtcgttgccgtagacgtagctgctgttgttggcggccttcagggacacgtgcttcttatcgatggtagcgccattgctgcccacatcctgggcatactgggccacatcggtgtcatcgtcgatgacgttcttggaggtggacacggccacttccttcagggtgtacacgttgtcgttgttgaccgtgtaggtgcaccaggtgttcagctgagacaggttcttgccagtggtgtcgatgtcgctcttggtcatgttcacggtgacggtatccatgttgccgtccatgaagatgacgttggcgtcagcgttccgcacagacaggttgctgttcttgccgtcgatgccggtcaggaacacgtactggtcgggatcctcgttctgctcaatgccgatcatgtagccgtaggcgtccaggatcacattgtaggtgacgtccttcatattggcgtcgtcatactgatccagcacttcctcatcatacatgacggtgtcagcgtagtcatactgggtaccaccggcggtaacatacttctccaggcggaagttggagatgctggtgtcggacaggacctcgggagcgtccatggtctggatcacgccctgggcgatggtcaccaggaacaggtcgttctcagccacttcctcgatggcgaagtcctcgccgtccacagagatggtctgcttctggggcttatcctcgtcagcggtcttcatgtagacgggcttgcggctggtgccgttgttgtccacatagtagacatccaggtccacgtcgtcgttcttctcgtcgtagtcctcggcggccttggccagataggtgttgatgatggccacggtgatctcgtcgtcctgggtgtccaggaacacctgggtcagcacgccgttgccggtccggccgatggtctcgtcgttcttcttcaccatgtcggccttgccgaaggcggcatcacccagattctcatcctcgccgtccacatagacgaacagggtgttgtcatcaatggcggtcttgcccagcaggttgtacaggtcctcgccggtgaccttggtggtgtactcggccaccatcttgtcgaagtccacataggtgccgatctcggccttcttccaggtccaggtgtgggccggacggccgaagtcgtcggcggtgtccttcagagccaggtcgggctgatacttctcagcgaactcaaccgtccagccgttcttcacgttgtcggtggcgtcgttgatagaagtggcagcgtcgtggatgttgctggtcacgtaggtgggcttggaagcgccgatagcaacagtggcgccgttgacggtgacgtcggtgcccttgttttcatactccaccagggtggctttcagagcgttgacggcatacaggcaggcctcctcacgggtggcggcacgggtgccaacaaagttctcattgcccttagtcagaccggcctcgatggcgcgggaggccacattgacggtccagttggtgccggtgaagccctcgatggcgctgtcataacccagagcggtcagcagcattttcaggaaggcaaagccggtcagctgcgcagagggccggaaggtgccatcggcgtagccgtcgatcaggccggactccacgcagtaggcgatgtagccggcaaaggtggaacccacgggcacgtccttaaagggcgcggcctgggtgcccagggcctcagccgtggtcttgccaagcatcatgcaggcgatgatcttggcggcagcgccacgggtcagggttccctggggctggaaagcaccgccggcatagccgtcgatgattcccatttcggacatcacgttgacagcttccgcataggcttcgccgctgaggtcttcgctgtctgtgaagtccttggcaccggcgctgacagtgaccagagacatggtcatcaccagagcaagcaccagagaaaggaacttcttcattgggatttctcctccttttgaaatttgcggtggtccgccgcggcctccgggcccattcgatgcctccgccggcgctagccctgccggcgcattcgccgaagagtcgcatccgccccggcgtccccgctgaggcaactctatccaaacttctctaaaaagtccacagtttcagcccgtttttaatccaaacgaaaacttatggacgcaatacgttttgaatttgttatattttgtaaccttggcgcggagaataaaagaggcggcgaagcccttcgccgcccctcattgaatctgcttctgcccaggctgcttcgccagataataccgcttttcaaactgcagcagctggccgtccctcaccatccgccgcaggatacctgccgtcttgcgctttccgacgtgcaggagctccgctacatcctggcagtaggcaaaccccgcctcctgcagataggctgagatcacctcccactgcttttcctccggcaccactgttccggggagatagtatttcttgcccacctgctccagctcccgccggccaaccagccggcgaaggcggagatatgccgcagtgtccgacagattcagcagcgccatcacatcccgccgggtgatgctgccatgggcccgggtccactccagcagggtctggtcgtcctcccgctgtccgcctgccgcccggatgtcccggagcgtgatattttccagacctccccggatcagcgccgtctgcaccaccttggacagccgggccaaatccataggccgccgggactggggggagagcagcacatggggatcctccccaggggagcggaccttctgcactttttccagcagccgccgcacggcattggtcagcagcatgtcccgctccggcagatgcagcagcccccgctctaaatccacctggtcccaggtgagattcaccagctccttgccctgcacgcccatttgccagctcatccacagagcaatgcccgcggcggagctgtcctccttttgaaggacctgccacagacggaattcatcgaattgctgccctgcctgtgttgaacgctttttgtgcggggtgtctccggcaaagcaggcttggaaggtggagaccgacagaccgctgacccggacggcatagggccagtcgtgctgctccagctggcggaaaaagtagtcccgccgcagatctttcaattggagctgaggcaggcctcccgcagtcagggcatttctggcaatgcgggagacggactccggccgcagaggttcccggaacttatcggagatcaccacataaggagacaccgcgccgccattttcgaagcgggcagcgaggcatccggcagtctcttcctccagcgggaccgtccggtcctccagaaacagactcctctcctggaaatccacttgggcccatttcagggcgacgatctcctcccggctgagcccctgaagccaggccaggcggaggatgagccccggcaggtcctccggatgctggtgcaggagctggcgcatattctgttcatccggctggcggaactcgtttcgcataatgcctctcttggcgggcggcggcaaaaggttatccttatgtaacaaatcagaagaatgatttggatttccggataacgcaaacgctgccctctcccagccaatggctggaaaagggcagctaccttttatcatccttcaccgcttccgcaaaaactaagtatattacacttagaattataagcataacatttcgtttaagtcaagcattattatgcgtaaactgatgatattatattgaggagtatatcatcatgcagggaaagaagccgctgaacatcgcaatcggaagacggatccagcagtcccgggagcaagctgggctgacgcaggaggaactggcagagcggattgaccgttccacgcagttcatctccacaatcgagcgggggttggccggcccctctctggaaactgtgattcatctttgtgaagttcttggaacctccacagagtggatcctgcggggcagggccctccttccggactccaatctgctggcagcctccgttatggaaaagctctccgggctctcccctgcccagctgcttctggttgaccgaatgaccagcgatctaatcaaattgctgcaaatgaaggagagcggtgacgaatgagctcctctccctccaatatggaggaattgatagacgcatcgccttccccgcagcaccgctgcatgaagttcacaggccggctgcaaagtctatggccgttggcctgtcaagataagaccgggagccattctccggtgttatgccccccggagatcatcagtccggaagtatatcccatcggccagccgctctttacaaacgcttccttacacagaatgctgaaacatagaattccttagaacaagaaacgctcagatgggtgcatagaagcagctcctccagcttacagcgtgatccgtacagcaaaagccagcaccggacaggaaatatcttgcccggtgctggcttttgtgcttctttactatctctgcttgaggtgggtctgtcagaaccatgttgtctgtccgcagcagctctgcccggctttttcagggcctttcgcccgggtcttcaccagagtgctcttatcggatgcccgttcccatttctggtacatatctgatggtatgccatctctcacatcagccatctgctcatgtccgccattattcacgctccgccttgctatgcggctgaagagccgtgggatgctttgcctcagaatacgccctgctccatcatggcctcagccacccgcttgaagccggcgatgttggcgcctgccaccagggtgcgccggagtgtaaaccggcgccttttgatcttgtgcccactctggctggagtctgcaaaagtattcctgctctgatggcggcaatgcagccccccctttcaggacggcagttcttttctgcccagaaataatgaaacaggccgtcggctgcagccggcggcctgttttcagtttctccggttattgatacagcttcgggatccgaaagctctgctcgccatttgcctcatccgtcacggttccggccgggaagtaaatcaccggatttccctcctcgtccacctcgaacttcgtggtcccgccgatggtcacatagtcgctcaacggcgtgttgtcctcaatcgggaagtagcggacctccgggtccttgtccatgcggttggccatctgcatcgtgatcgtctccgtcaggtaattcacatagtcctctcccaggagctcctccagcgtgacgtcctcctgctgggcagacggttcttccgtctccggcgcaaccgccgattcctgcggcggagtctccggatccgtcccctcactctccgcggcagacgcgccgcaggcagtgagaagcagcatacagagcagcagtgtgaggagcgtggaaatctgcatccgattctttttcatgatgaattcctccattccatattcatccgcagcacccgtccgggcgcctgttcccttttgataccgataccataagccctgtttccggcaaagcagccgcaaaaaggcatcattgttgcatcatttcccttctgcggcacgggaggccggttccttcccggagaggtcccacacaaatcccatcagctccacactgacgcgcccgctgcggccctccaccttccatctggggccgggccgtactgtcagatctccagcctgagacctctgcggaaggcctgtccaagcgcttccgccgtgcccagggaaccccttgccgagcggagtgtggagtcgatccacaccggcagccccgtgcccttgtccaccatcatccaatggtcatcccggtgctccgggccgccccgcaaatacagcataccggcggccagactgccgtcggcctggatatacaccacgccgcctccgcctaggccttgctatgctcctccgtctgttccagcagttgggtggcggaatagacgtccagctccggataccggatggtcctgcccagcagctccagcttttccggcagcgacgcctcccccgccgccagccgccttttgtcccctgcggaagagcaggtcagtaatttattcccacaatggccagtctgccatcgacaacactgaacaccacattgggcctgccgctggcggacagggcaaatcctgccttgctgggggccagccccccggggtccgccccggcgatctcagagaccagctcttctgagaagatccggtccgcttccagtgcgatcaggtcctcccgggactccacagattcccctccatcggaaaagccgatgtacagcggatacgacgccaggtccgccagcgcctccagattcttttccgccactgcggcctggatctgctctgcaaatgctgtaacagcctccgtatctatggaaaaattatctgtatactggggcgcttccgtatccgcaccgtcctcctcaggggtccggcccccatcttctccagcggtctcctccgcgggctgctccgcctgcggagagctgcccccctccggcgaggtactgccgctctggccgcagcctgcgagggacaggcacaggagccctgttaatgccaagaaaatgagcttcttctgcatcgtttatgatcctttcctcaagatgtttgccggcgtcatcctctgtgggactccggctgtcttataagacgccccaaagggcaaaaaagttttggcggccgcttttcctcttccacctccggaggatcacgcctccggaatgtcgccggcgcgaccgctggccacgaagagtcccgatgcgccatcggaggccgtcaaaaggccgtgggagaggcaaatgcctctcccacggcctttggggaatcaaattctgccagagtacgcgcttacttggtcacctcgccgccgggggcagagtgagccgtagaccaggcgtgctccagagccgcccagtcgcgctgttccagcttctccgtccacttctcgaccttgtcaccgctgacggtcacccaggtgtagtcgtggctgttggtcgcctcctgcatgtcggcatagaaccagtcctccggattgttgtcgggccaggtgatcatctcgtcctcgtccagcagccgatcctcatccgggctgcggcccagggcgcggttcacgatcacgcaggcctgtgcccgggtgatgttggtgttggggcggaaggtcccgtcattaaagccctcgatcaggcccacgcgggctgccgcctctacgtactcggtgtaccaggcgttaatatccacatcggtgaagtatccctggtagtcctcccgggtggtctcgaaaaagcccaccgcgatcttggcaaattgggcgcgggtgatcttggcatagggccggaaggtcccgtccgagaacccgtcgatgatgcccatgttggtcagggtggagatggcgttgttgcaccacaggtcggagctgcagtccgtgtagtcgttgacctggctccagtactcctcccgggtgtcgtccgtcagcaggcggaagaagatggtggccacttcgccccgggtgatggtgccgtagggctgcagcgtgccgtcggagtagccgatgatataggagtaatggtcctccgtgttcagggtgggccggctgccgcctccaccgccgcctccggtgctgccgccgcccccgctgctctccttctcgtacaccagcacgaagggagagaagctgccggcagtgaagaccagatggtcgccgtcgcgggtagcttggatcttttccacagtatgcgcggtaccagccaagtcgcctgtgtcgctggcgctctcacggtccatgccggtatagtgtaccaggtagaacgcgccgtcctcgtcggcgtcggcgggcatgggccagtagatggccagcgcctgctggttgcccagggttaccacggtgttgccgttctgggtgtccaccaggtccagataggccatctcgtactggggggcggatagcgtgttgtccgtggccgcgacttttgcaagggcgtcagcgcccatggcggcgtcgaacgcgtcgctgttggagacgctgtccactagcagctgcacgcggccgggatccacctggacctcactgtcattgacataataggtcacattgccgttgtcaacggcagtgatctggttcgcgtccacagtgtcggcgctggtcacgatctcgttggtggaagtgccctcgtctgtgacgctcttgaccaagagatggccggtaccgatatcaacgctgcagacgagcgtatcaccgccggcggagaacaccgcctgaatctcgctctggttcagaccgccgtcgtagatggtcatctcatagttggcagaaacaacgccctcttccattcggatgttgtcggtagtgatgatgttgccgtcatctgtgaactggagccggaccttgacgccttcattttcaccctcgatttggttcgggctcaggctatatacatagcggctcacgttgccggttgcatctctcgagtagacgccctggtccatcagatcccagcggcggatcgccgcaccagtctcctggtcataatagtagaagctcaggtagtccgccaggtttgcagcctgcgtcaggtccacgccatggctggtgagccacgcttccacagagtcgggcagatcgatgtgataacccggctccggcaggccctgttccgtgctgccgacaaaatcgcccgcatcgtccagcacaccgctgtatccggttccgccggtgtagatcacaatgtccgccggcgtgatggtgatggcatagggcttcacctccacggggtccgccgggacctccaccgggggatcctccggatgttccgtgtccgtgactaccacggtgttcacgatcttctggttcacatcgtccagtgaggtctgatagctggcgtacagcgttgcataggtccagccttcgacaataaccggattggtgaccgtattgccctcctcatctgtcagcgtcacaccttccaacttgtcagtcacatccagggtcaacgtctcatccgtcatgctggcaatggtgatggtccaagtgatgggatcgcccacggtgacagaggtctgatccggctctttgatcaccataaaacggccgtctccgggatcgggctcgggctcttcgggagtcgcctggaaatcccagcgcccgtacaaagtggtgtcggcatcgatggcagaaatcgttccgccgtaagggacaccgactttgtcataccagccgataaaataccaggtcccctgctcgtctgaaacctgcaattcactgggcggctgaatggtgtaattgctgccggcagccagtgtttccgtttcaggcagttccacgccctccgggtgatcgccggcccacgcataggtaaccgtgacctgggtcggcacgacccctgcggggtggaaggtcacaacaaagagatcccaatcctctaccgggtctccgatcttcggagcatcacagtcctcatagttgcaggtccagctgggatccccatagcctgtatcaggtgttgcctccaagatatcgccttcggccaggcgatacttgccatctgcattaacctccacgattgccgtgtaggtggtctgctcattgctgaacgtgccgttttccgcaaggaaaatcaccgagatggtattccccggctcctctccagctttctggaacttcgctgtgaaggtggtgtcctcgtcgtagggcaagcctgccagggacttcattcccgcgttcgtgtcagttctatgatagtagtcatcggtccactccacgaactcacagccctcttctgctgtcgccacagctcccgtcggagaggccatgccggtcgtctggtctctggtgacgacttctttctccaggcttacaaagcccatagcgtgatcggcactgacataggtgaagacaatctggtccttgtcgggggtcccgtcgggttcgtcgtcgggacccagctcgtcgatgtcatagtagacgtcgatggagttatggcctgcttggagagtctcaccgtctacaatctcgacatcgttcagttccgcccggtcaaagatgtatgtgctaccgttataagacgtacggtcagtgttatacagcccgctgaccggcgtgcctgccgtggacggcctatccttgggatcggtctctgtttcttcattcccatctcggtccacataatggtacacgacagtgtatgtgcactcgtcgggcgtcaccgtgccgtcggtggttgcggtgaagacaacgttgtgctcaggcatgtagaacaggccttcaataatgtcgctttcctgaaggtcatttgtagtccattcagtagcgtcttctgcctgcttcttgattacaacggtttccccgtaggtgtaggactctggttcagcgtagagagtcccgtccagataataggttacggtaaattcccgttctgtgcgcgtatactccgctctatacgtaatgtccccggttacagtatccgctatttcaggagaccatccggtaaactcatacgaataaagttcgctgggttctttagtcggatcctcaattctcggtgtcttatcgccgtaagccagcccgggaaatacggtctggggacttgttgttgtgccgccattcaagtcgtaagtcaccgtatagctgttgagctgagagaagctgccctcgatcacaacagcatgatcgggcattgtaaatgaacctccactcagcgcaacatcttcagaataccagccgctgaagcggtaatctgtgacatccggcatctttgccagttccacagtctcaccgtacttgcaggtctgttcacccggcacttccggcgcacccgcagggactgtaccttcatactcatacgtcactgtgtactcgttccggtcgtagtacagcttcagcaccagcgtgccgtcctcggcgatgataccggaggaattcgaacggctttcattataagtgaagccttcgtattccttgatttcagcagtggcagtatctccgacagtaccagagggtgtcaatgtatcagctgcaacgatcgagtagttatcatctttcaaattctgctgatagtactctacccgatagctggccgtggaggacttccactgggcgtacagggtcacatcggtgtttttgatagtgatggcactccccgccgcataaggcgttccggcgccgttcttctcggtgttccacccggtaaactcataccccggccgggtgaacatgttttggagcaccatggcctcgccgccggtgatgtagtacttggggtccgtgaccgtaccgtcggcatcatcggcgttggcaacatacaacacctgatacgtctccaccggcgcttcgggggactccgtcagctccagagactgattcggcttctcatccaccatgtagccgctcagaccggccttgtgttcgcccgtgtcatttgtcacataggtatcggcgtcgctccagctgccgctcacatcgggctggatagggaacgtcaggaccagcttgccgccggaccaggtgacagtaccgtcctgattggtggtcttcgtcaccgcgttggctgtgtagtcaaagcccttcacagtgatggtcttgctgtcggcatttaccacaggggtaacgcctgtaagcgtctctggctcataccacgtatagctgccgtccgcgtcctggcccttgacctccgcatactggaccatccccccgtcagaactgcctgtcagccccttcgggaaggtgaagaactccgacagcgtgtcggacagcaccgtgttcgcgccggccgccaccttggaggtgctcacgttatcggcgatggtgctgaaagcgttttccagctcctcggcatcgtccgccgcgaagtagtagttgccttccgtcacgcgggtgccaagattgcaaaaattccagcttgcttgtccgaaccgatttgttgccgtggcattgggatagttggaagacacaccgttcatgtacttgttgaagttgtcccgtatatcatcgggatccgcatcctcaaacataccgatggtgtacacggtcacgccgttgttcttcaaatcgtgggccagattgacagcggttgctgcgacatcgtcatcaaagtcattgccgtggttgggctcaccatcggtaaagaccaccacgacctgcttggcgtcctgccgggcgccggtcagcgtcggatcctcgacccaccactcgccgccgtcgtgtctccactgtccgtccaggacgtcctgcgcaagggtcaggccgtagtctacgctggtggcgccggcgggcttcagcgcttcgattgcgccggtcagctgctgaacgcccgccgcatcgacggtggtaaagtccttgacgatctgtgtatagttgtaggcataatagtcatcttggcggtcgtttccgacgctgtccgcgtaggagtcatccgcaaacttgacaatgctgattcggtgggtcacgtcattgtctgcacccgccgcgttttcggccacttgatcaatgaagccgtttacagcgctctgcatggcctccatcttggaagtcgttatctcttggcgcgtgtaaagagtacctgtccaaaggttggcattctggttcctgctggtagtaccgagctgattccagtcccggtaaaacccgctgccggtataatacccgatggaatattgccggttcccccaagaaccatcactttcagcttccacttcgtagtagttgccgtcatcatcgcggaaataatacgtcgtccaccgagacccgttgatgtcgctatacgaccatctctgttcatcagtgggggtatattcccacgtgctctctcccaggtcatcatccatcgacccggagacatccaacaccagcacaatatccagcggtgtggtcttgcttcccttggtcacctcgttggtgacataggcctccagggtcagggaataatttccgtcctcatcatagttgaccgtcttgtccaccacgacgccgtcgttgctctctgtgtggacccggtcgctcccgttgccgccgccagggtcttctgccgccagggcagcagtgggaaccattgtcagcatcatacagaggaccagaaatgctgacaagatccgtttcttcatcacttctcctccttctatatttcagtgatcttatatgtaaacatccttatggatggaatgaccggttccctccgcccacccggcggccagctgctccgtgtccagcatccgctcgtaggactgctccgccaacaggcgcacgccgcgctccacctccgcctgggtagccagatacagcttccgcaggcaccggggcgttcccttttcctcctctacccgggcgtcatgacacagggtctggatctcctccgtcacctgggtccggctcatgcctttcccgttccgggtgcagaacaccggccccgccgtcaggccctgccgccgggcgtagtccagcagctccccctgcagacaggcgggcaacgggacgtaccgccgctccccgccggtacggaccggcaggcgcccggcccgcacccgctcaacggtcacctgaggcagctcccccacccggatgcccgccagggcaaatattttcaccagcaggtaggtccgctccttttccagtatcctggcagcctgcagcagccgcagatactccacccggctcagttccggctggaggcccttgtccgcctccagctgccccaccaactgcaggtcccgccgccccatgtactccatcagcccgttggcggcagacaggtgggtattcacggtgctgggggaataccctgcctccagcaggaacgctcgccaagcagccagcgttccccgggagatctgcttgtccgggggcaggtagtcatagagggcccgcagcttggcactgtacatctgcaccgtgcccttgcggcgtcccctgccggacaggtccgccagataagcccggatggtctccatgctgagctcggcgccgggccagttcggtgtgcggtgtgtctcccgcggcttcagagcctctggactcctcatctccccgcctcctgtcaacagaatcgccatttcctcctgtaagggaccgaaacggggcctgcagaccaggggcaaatgtgcgcaaaaaagcccgcgcagcctgcgcgggctcaaaaatggcgcaaagacagcagccggacaaaattcgacgcttttccggccattttatgctgcccaaatcggtaaaagctcttgcggctggcggtgctttgtgctagaatttggttactgttaaaatcaattatgtatgtctggttatttttttgcagccatccgcatcggaatggcgattctgtcctatttctaacagaccagccccagccgtgccagagtcccggcgtgctcggtgcccgtggagatcaggtaaatccgggtcgtctcaatactggagtggcccaggacgtccgccagcttggccacgtcccggcagacgcggtagaacgtcctggcgaacaggtgccgcagattgtggggaaacaccttgctgggtgccacgcccgccttgtcgcacagcgctttcatctccgcccagatctgccggcgggagatgcctttttcgtttctggtgagaaaaatctcgccggaagcgattttttgtttcctggcgtatttgaggagcttgcggcagagcttgcccggcagcaggatggtccggatcttgcccttcaaggagatttcggcccttccccggtacacggcctccacggtgacatagcgcacctcggacacccggattcctgtgccgcaaatggtttccagcagcagcgccagccgttcccggccctgggtgcgggcggtctccagcaggcggatgtactccggcctcgtcagctcccggctgtcgtcccggaacagccgccgctggatgcgcaggggcttcacccgaaacgccggccagcccagaaatacaaggaaccggttgaccgccgccagcttgacgttgatggtggccggcgccagcttcgcctccagcaaggcggccttccaggcccccgccgccgccttggacgccgcccggccgtccagccaggcggtaaaagccgccgcatcccgcaggtatttctcaatggtggcggggctcttttcctcccacaccaggcgctgcctgaacgcctggagctgttctcctgtgatggtatagtcttgcactgcatatcgcctcccgtacaattatcctctatattttaccttccggccggctgtctatgtattcaatggattttgcgcggcagaacactgctctgacaccgacggataggccccggccctctgcttgcattgcgggccgatttgacgtattctttaataaaaaaggcaggtgccaaaaaaagggagggatcgccttggtgcggaccgcaaagcggacgcctctgattcacgccggacgggcctttgtactggccctggcggccggactggtgcttgttggctgcatggagtggagccgccggaaccaggagcgggaccgcatgggctatgtcgccagcgccatcggggcggagacgtatgagtttatgctctccgagatgagcaaaacccgcgttctggaggcctatctcatccagaccagcggggactattcggacttcggcagggtcgcccatgtcctgctgcgggaggactatgtgcgaaacgtcctcttcgcgccggacgggatcgtggacggtgtctttcccctggagggaaacgaggatgtcgtcgggctgaacatgtacggggacggggccggcaatctggaggctcaagctgccatcgaaaaagaggcgctgtatatcgccggccccttccagctgatccagggcggcctgggcatcgccgggcggctgccggtctttctgacggacgaacagggccagcggtatttctggggcattgtctccgtgacgctggactttccggccgccctgtccggaagctccgtggagcgggtaaatgcccagggcttcgcctgccaaatttggcgcatcaatccggacgacggacagaaacaggtgattctcgagacggcggacccgctgccggagggtgtgcggactgtggaccacgcgcaggagctgttcaactctgtctggaccgtctccctggcgcccctgcggccctggtatctccagatcagcctgtggctgggggtggcggtgagcctgctggtggcgttgctggctgcggcgggcgtctactacgcgggccggctgcggcagctgcagctggaaaaatcccagcgggccatccagcagctgcaggagcagctggagcgggaacagggcaatatgctgctgaaccagatccgctcccacttcttttaccacaccctcaacgctctgcaggccctgatcgtcctgaagccggaggcggcctacaaaatggccggagacttcgcccgctacctgcggttcacactggactccgtcactgccgacggcgggatcggctccttccgggaggagatccgggcggtccgggcctatgcggatatcaaccagcagcagctgggggaccggctgcacatggtctacgagattcccgacgtggactttcccatccccctgctgaccatccaacccattgtggagaatgccatcctccacggcatcaagcccaaggtgggcggcggaaccgtctctttgaagctggaagagctgccggaccactggcaggtcacggtgacggacgacggcgtgggcttcggcctggaagctgtccgagagaagggctccatcgggctggagaatgtgcggcggcgcatagcccgcttccccggcagcgagctgcggatcaccagcacagtgggcatgggcacacaggctgtcctgacttatggaaagcgggggaaaaacatggaaaatctttcaaaatcgacctgaaagcgtacggtttccgtacgctccatctggtacaatagaaacataagacaggggtgaccgcgattgaaaaccattctggtggacgacatgctgctggatctgcagctcttcgagctgaaatgtgcggacatgcctgattttgaaattgtggggaaattcaccgatcccaacgcggccattgagtacgccgccggccatgtggtggattttgccctgctggacatcgacatgccggggatggacggcatccatctggcccaggccctgcggcggctgcggagcgacatcatcatcgtcttcgccacagcccacccgaagtttgcggtggaggcgctgaagatgaaggcggactacatcatcttcaagccctttgaccgggaggacatcgccgatgtgatggagcgggccaagctgctgcgccgccgccagtgcaagcgcatccatttccacaccttcggggccttcgacatgctggtggacggcgagccggtgcacttccgctccggcaaggccaaggagctgatggccctgtgcgtgtatcgggacgggcggccggtgtccattcacgagatcgtggaaaacctatggggagagaacgccgacggcaccggctaccgccgcactatcaaggagctggcagacaccctgcgggactatggcgcggaggagatgttcctgcgcagccgggggagcctgcgggtgcggatggacctggcggactcggattttcaggcattcatgagcggcgatgaggacgccatctgccagtttcagggggtgttcatgcagcagtattcctgggcggagcccatggtctgcacgctgcaggagaaaaaggagctgatgcttgcccgcatggggaagcaccgcatgtaaggagggggctgaaactttggatgagttactgagaatggagcacgtcagcaaacgcttcggcgatttctacgccaacagggacatcaacctgtccgtccgcaagggcgaggtacataccctgttaggggagaacggcgcgggaaagagcacgctgatgaacgtcctcatcgggctgtaccagcccacagagggaaagatcttcctgaatgggaaggaggtccgcatcgactctcctgcccaggcggtgaagctgggcatcggtatggtgcatcagcacttcatgctggtggaggccatgacggtgttcgagaacatcatcctgggggaccggaacaccaagggcatcttcatcgacaaggaggcccggaagaaggaaatcctggagctggcggagcgctatggtctggacgtggagctggaccggcccatcacggagattgccgtgggcgcccagcagcgggtggaaatcctgaaaaccctgtatcggggcgcggagctgctgattctggacgagcccaccgccgccctgacagacatcgaggtagagggactgttccagatcatccataagctgacggaggagggcaaaagcgtcatcttcatcagccacaagatgcgggaggtgctgcagatctccgaccgtatcaccattctgcgcaccggcgaggtcatcaccaccctggatcgctccgagaccgacggccaggagctggccaacctgatgatcggccgggagctggccccctcccactacggcaaggtggaggagccgggcgatcccgtcatccagatgcggagcgtggactaccacaaagaatccaagcacgcagggctcagcggcgtctccctgaccgtgggccggggcgagatcgtgggcattgccggcgtggacggcaacggccagagccagctggcccaggtggtcaccggcgtgctgacgccggacggcggtgaggtggacatgaagggctccaaggtggctcagttcacccccaacggctttattctggaaaatgtatcccacatcccggaggaccggaacaagatgggcctcatcggcaatatgtccgtgaaggacaatatcgtgctcaaggccacagactctccggagttctccagtgccaagggctactttctgaagaaaaaggccatccgggactacgccctgaagatgcaggagaagtacgacatccgctgcacctctgtggagcaggagacgcggaacctctccggcggcaaccagcagaaggtgatcctggcccgggagctggagggcagcccggacctgctggtggccgtccaccccacccggggcctggatatcggcgccacccgcttcgtccacgacaccatgatcgaggcccgggacaagggctgcggcgtattgctgatctccgcggacttcgacgaaatcctggaggtttccgaccgcattgtggtgatgttcgaggggcagatcatgggcgtgttctccggcaaaaatcctcccattgaggagatcagcctggccatggccgggaaataaggagggggagaacgcatgaaaaacagcggaaaactcgtcagtttcctggtacccatcatctccatcctgctggccttcgtcatcgggtgcatcatcatggccgtgctgggtgccaatccctttgtggcgctggagtccctttggatcggtgccttcggcagcctgcggaacgtaggcaccaccctggcccgctccacgccgctgatcttcaccagcctgtgcgcctgctttgcataccgctgcggcgtgttcaacctgggtggtgagggccagttcctgatgggctccatcgtctgctgctacattgccacccagagcgggatcgaaggactgcccgccattctcctgtgtctggtgggcggcgccgtggctggcggcctctggtccctgatttccggcctgctgaaggtctaccgtggccagaatgaaatgattatcaccatcatgctgaactatgtggccacgctgttcatgggcgtggtatataccgactggctgcgggacggcagcgttccgcagacgcaggccgtgccggaggccactcagctcagccgcctcttcggcctgcgggtcacctccgccttcgtcatcgccctggcggtgggactgctggtgtactatttcctgttctacacctccaagggcttccagctgcgggccgtgggcctgaacatgacggcggcggagttcaacggcttcgcggtgaagaagtacatcctgatgagctttatcgtctccggcgccatcgccggcctgggcggcagcgccgagctgctggggacccagttccggctcatcaacggcttcggcaacggctacggattcgacggcgtggccatggccctgatcggtcagctgcatcctctggcgaccattgtggtggccatcttcttcgcagctctgcgggtgggctctaccaccatgcaggcggccaccggcgtgcccaccagcgtatccgacatcatccaggccctggtgatcgtgttcaccgtggcgggtctggccatggtgaagctgcccggattcaaggcgttcctgggaaggctgacggagagacggaaggaggcggcctgatatggaatttgtcatgaacatcatcctctccagcgtccgcatggccacgcccctgatctttctggcgctggcggagctgtactcccagcgggcgggcctggtccacatcggactggagggcctggcctctatcggctctctggtgggctttctggtgagcctcatcaccggcagccccatgctgggcgtgctggctggcgcggcggtgggcattctggtgaacatgatcttcgcctacgccaccgtcaccctctgcgcggagcagatcgtctacggtatggccatcaacatcttcgccccggccctggcggccttcatctaccgggtctacttcggcgccgggtccgagctggtgcaggtgggtctgatgaacacgctgtcctcctccctgggcatcacctccgacaacttcctggtccgcctcctgctggaccagacgcccatggtgtacctggcttacggcctggtgatcttcacggttatctacttcaaccgtaccaagtccggcctgaactacaaggccgtgggcgagtatcccaaggcggcggcaactctgggcatcaacgtcattggcgtgaagtacgccgcctgcgtcatctgcggcgccctggccggcatcggcggtgcctatctcaccacctgctacgccaacacctacgtggacggcaacgtggcgggccggggcttcatcgccctggcggcggtgatcttcggccggtggagcggtgccggcgtgctgctggcgtgcctgttcttcggcttctgcgacgcgctgcagatccggctgcaggtgggcagcttcggcgtgccctatcagttcttccagatgatcccctacatcgccaccgtggtggtattggccggcatcggcatgaagaaggccggccccaagagctccggcaagccctatctcaaggaggagcgctgaggataatcgccgcccacgcggctgttatcaatagaaggcatccacatttatgaagaattgggaggaaagaacatgaaaaaattattggctctgcttctcaccctggtcatgtgcctgtcactggcggcgtgcggcggctccggtaccgacacctccggcactgacacgtccagcggagaaaccggcgaagactccggcgacagcagctaccgggtggccatgatctgcgactccagcatctccgacggcgggtggggcatgtcctgctacaacgccatggtggatgccgccgcagagcgcggctgggccacggaggtctccgacagcatcgcccagtctgcctactatgacaccatcatctcctattgtgacctgggctatgacctgatctacgcccctggcaaccagtacaccgacgccgtccttcaggcggcggaggagttccccgatgtggccttcgccctgctgaacggcggcgaggacactcccgccaaagccgtcaacggcaatgtgacctccctgctgcccaatgcccagcaggtgggctggatcgccggtgccctggccggtcttatgaccaagagcggcacggtggccttcattggcgccatggaactggataccaccctgggcaagtataatggattcaaggaagccgccgcctatgtgggacagcaggagggcaagaccgtctccactctggatgtggtctactccggcgacttttccgccgccgacaagggcattgagtttgccaaggccatgatcgaccagggcgctgatgtgttctttggcgacgcctccgctgtggactccggcgcacggcaggccattgacgaagccaacgccgccagcggctccgtgagcatctatgacatcgcccagccctccgatctgttgggccagaacgagtgcatcatcggcagccaggtgacggacaatgcctcccttgtgggcctgtgcatggaggctgtggaggatggctccttcggcggcgaggtcatctacggcaccctgcagaacggtgccttgtccgcgggtgccctcagcgacctggtgcccgccgatgttcaggagaagtatcagggctacctggaccagatggtggacggcagctttatgcagtaagatttatacccgcaaaccactgcggctccatccagatgcctggatggagccgctttcccccctgcccgggaaacttctgcccaacggtagaacggggcctgcagtgccgggcattggatggcgggcagccgctcccctcctccctggcccgcagacgcaaaacggccgtgcgatttttgatcgcacggccgtttttccgatattctgccccacaggaacggcgcggtccgccctgttctccgggtcatcaggagcgggaagctctctcctcccggcagtcttccggttttttcgtgtggtttttataggtattccatgtgggttcatattccgctgtggcctgattgccccacatggcccagccctcccggtccccgcgggcaaacagctcaagaaacggccctggagagcatcgctcgatcagggggatgaattcgtccggttttctggagtgctcccgcttctgtgcccgcagcaggttcacctgggacctggccgggggcagcgtcctgttcccgccgcccctgacaccaaagagcagaatttccgtcacattccggaagtagaaccccacaccccggccgtccggttctccgtccttgcgaaccttctcccagatgatattgcccttgtactcgaatccccaggccttcatgaccgcaaggccgtcgggaagcagggcattggggacccacagatacagatggctcttctccgccgccacctgtgccaccggcagcgccatgatgtcttccagctccatggtctcgtagcgattcagccgcttgtgctcaggcgctaccttcccggtccgattctggaacctccagggagggtcggcatatatggtggcgtatttttgatcgccgcagaaacgcagcagattttcagatgtttcctggattgtgctcatcgatgtacccttcctcccaatctgtgatgcacggtttcttgatgcctactgccagaatggggcatccgccgttcctgcgggaatccaagcgataggtcaatttccccatccaggtggtgctggccccgtacttccgcagaatgggtttccactggcgggtctttccgtcatagtcgtaaatggttttgaagatgtcgttcagctcggcagagcgcgtaatgatgatccctgcactgacaaggtcgcagtcataatacgtccgcatggccagcaggtcccggtcgaacgtctgatctttgctgttccactccagatcgaaggcgatccggtttttcaggaagtcgatattatgtccgtcgatatacccgggtatgaccttttcctcaaacggctcctgggaaaagcgtccccgctgttcggcctgccgcggatagaacttgatgtggaggtcgccggaaatgcggatctcgcgccatccgcggggatacagcacatcatcaaactttttggggatcttggtctcgtttccgccggactcccgaagatcgtccgtagtgatgcgcagctgacgcaggcagtccacaatctcgctccactccgccggaaatgcctgtgtgataatctcaagcgcgtgattatagctgtaaaattcaaacttctctaaaaggtcgggcgcaatatactctctcaagtccaaggcggctgtcctcctgtgttttagatattataacatcttttcctcccgttttcaccaccattttttgaatgcgccataattttcagggggtgcctcttttttacgtttcaccaatccgggtcccgcagcccccgccgggcagcaaaaatttcggaaagaggacacatgttaacagagcgcagccagttgggtgctgtggcaggatggtacatttccccagagagttttcagaaggggtacgacccaggcattgacgactatatggtgaagcccggcgacttcagcgggctgctcatgcgggtgcgggcactgctgcgccgggccaatattgaggccagccggaagctgtccgtggacggacttcttctgtatgccgacgcgctgacggcctctcttgctggagcggagatccccgtgaccatccgggaattcaacatcctgtacgagctgctgtcctgccccaaccgcaccttcccgctacgggcacaggcggaagttctgtggcagcggcagacacactgaacccgccgtcccgtcacgtcccctgcgtcaattcgcaaaggccatagccggaagtcccgcctctccgctgccgcagcgcaagaggcacccggatggctccccggtgcagagtccgcacacttgattgaaaatggatgcgcgggcggcaaatattgtggtataatatccatactgagatcgctggtggccgccgggccgcggccgctcctttctccggccgcggcccccgccctgtcagggcttttacgggcaaacgtccagcttcccggcgcaccgcagtgtgcagggctggagatcacagcaggtacggcagcctccgccgccccccgtccggccctcccccgatatttttgaaaacggtgcaaacgatcaggaccgtgtcgactgccggagcctaccggagggcggccgcctgctcttgtccggcggcggcgcaacgcgccggagggagctccgccctggctgcctgcaccaccgccggaacggcgtgaagcacggatgtgccatccgggggcacggcgtctccgcagggggcggcatcgagggcgcactgtccaaggggcagtcatcagaaaagaggaatgcgtatgtggattctcttcgcggctggatccgcgcttttcgccggtgtgacggccattctggccaagtgcggcatccggaagaccgactccaccgtggccaccgccatccgcacccttgtggtgctggtttttgcgtggaccatggtgtttgtcgtgggctcccagggggagatccggaacatcggccccacaacgctcctctttctgttgctgtccggcctggctaccggagcctcctggctgtgctacttcaaggccctccagctgggtgacatcaacaaggtggtgcccatcgacaaatccagcaccgtgctcaccatcctgctggccttttttctgctgggggagcccatcggcctgcctcaggggatcggggtggtgctgatcggcacaggcaccttcctgatgctggagaaaaggtcccccgccgccggctgtgcaccccagtgcgggagctggatgctctacgccttcggctcggcggtgtttgccagtctcaccgcgatcctgggcaaagccggcattcagggcgtggagtccaacctgggcaccgccatccgcaccggtgtggtgttggtgatggcctggctcatggtgctggtgacaggcaaggccggtgcggtgcggcaggtgccccggcgggagttggcgttcatctgcctgtccggcgtggccaccggggcctcctggctgtgctattaccgggcgcttcagagcggccccgccagcgtggtggtgcccatcgacaagttgagcattttggtcacagtggccttttcccggctggtgtttcgggagaggctcacatctcgctccgccgcaggtcttgccctcattgtggccgggacgctggccatgctgttctgaccgccggagccatccccctccagcggggttctcttcgcgcccacccgatgccggacaggtgttcctttcggcgggccgccagctggcggccgggggaaaatttccactcttgtttttttctgtacagcgtgctatactggccgaggtttaaggaatgcggcgaaagggggagctccctggcgccacgctcacatagatgacaagaaccagattgcgagggagcctgtgttccaggctgagagggtcccagtaagggccgaccgcacccggcttcccaggcggaagcgggggcatcagcatctgcgtgaaggtctgaacgggtatgtgctgatgaggcgcgtgcccgttttgttttgcgcagaaaattaaactggagggattcccatgaaaaagaagatttccgcacttttgttgagcctggcgctgtgcgccggactcctggccggctgcggcaccggggagacggcggaggctccgtccgacaccgatgtacagcaggtggactctctgaaaatcgcattttctccctatgcggacgccgacctcatctccgagtccacggagccgctggaggagctgctgaaggcaaagctgctggaaaagggctacgacgtgggcgagatcgacatgaccgtgggcaccagctacaccgccgtgggcgaggccctcagcgcgggcagcgcggacctgggcttcatctccggcggcaactatgtgctcttctccgacgactgcgatgtgctgctgaccgccctgcgctatgccatcaacaaggactctgagaaccccgccgactggaacgacggcaccatcgaggagaacacagaggacatgagcacttactaccgctgtatcctgctggccggtcccagcgagaagggccaggagctgctctccaaggtcaacgccggggaggagctgacctgggacgacctgaacagcgccacctgggcggtgctgaatcccacctccgcctccgggtacatctatccctccctgtggctgcaggagcactacggtaaggggatcagcgatctggacaatgtggtggagtgcgactcccacaccacctccgtggcccggctggctgccggtcaggtggatgtgatggtgtcctacggccacatccgcatcaagaacgcccccatctgggaatccgatttcggcggcacagcccccatggtggagcagaccggcgtgatcggtgtgacggacggcatctacaacgacatgatcgcgtacagcaagacctctgacaccatggcggacgaagccttccggcaggcagtgggcgagtccttcatcgagctggcccagaccgaggagggccaggagatcttcggcgtattcagccaggtgggctacgactggggcagcgactccgactatgacggagagcgggcggcccaggcgcttttgaaatctatggaagcgtgaccatcttcaggagggatttcatgctgcaggcgatccatatccgcaaacaatttcagcgttccggcgaggtgctgcgggatgtcagcttcaccctgggcgacggcgagtttctctcggtcatcggcccgtccggcgccgggaaaaccaccctgttccgcatcctgaatggaacggagctgtgcagcggcggtgaagtcctctatggcgggacgcactttgaagccgcccgaggccgggaaaagcgggcgctccagcaggggatcggcaccatctatcaggatttctgcctggtggagaacctgtccgccatccagaacgtgctgaacgcctgcctgccggacatgtccctggccgcctccctgctgggggcgttcggacgggagcggtccgaacaggccgccgcgatcctgcgagaggtcgggctggcggacaagctggaggagccggtgaaaaacctctccggcgggcagaagcagcgggtggccatcgcccgcgccctgatgcggaacccctccatcctgctggcggacgagccggtggcgtccctggaccccgtcaccgggcggcaaatcctgtgcctgctccgggacattcagcgccaacgcggtgtcagcatcctgatgaacagccacaatctggacctgtccctggagttctccacccatatcgtcggcatgaaccggggacgcgttgtctttgacggcgcccccggggatgtgacggaggccgtcctgcgggatatttacggcgaggcggcggccgtatgaaacaaagacgtatccgctgcctcgctgcggccgcttttgtgctgctgttcctgggagccgcctggttcaccggatgcgacctgtccctgatgtggagccggcgcgaccacctgacggacatcgccgcaaagatgtttccgccggactggggattcctcgggaaggtcctgcccctgctgtgggccacgatccagatgtccattaccgggacgtttctgggcgcggtgctgtccatcccggccgccatggcctgcgccgccgccctgccgggacccggcccggtcaagaaggcggtccgcttctgcatccaggtgctccgctccttcccggccctgatcctggccctgctggccacattctttctgggcatcggctcctttgccggaacggccgccatcacggtctacacctttgccatcatgacccgcctgacctatgaggacatcgagagcgcgccccagggtccctatctggccctgcgggctatgggcgccgcctcagcccaggcgttcttccgctccaccttaccggagatcctgccggcctatctcaccaacgccctctatctgctggagggcaatgtgcggcacagcgccatcctgggctatgtgggcgcaggcggaatcggcctgctgctcaatgaaaaggtctcctggcgggagtacgacaaggtggggacgatcctgctgctcctcttcgccgtggtctatctcatggagcatctcagcacatggctcacccgtctggtgcagcaggagcggaccctgggccggcaggggcgccggctgctggcgggcgcggcggccgcgctggtattgttctgcacggtcacgcttccgccgcccgacctgtcccgcacaagcatgcagatggtgaagacgctcttcaccggcctcctgcatccgaactgggagctgtttttccgcctggacagcagcggacttgcctatctcctgctggagaccgtcgccatcgcgctggtggggacctgcgtcggcgccgtcttttccgttcctctggcgtttctcggcagcagccgctttttcccggcccccgccgcctggctgttccggacactggtgaccgccatccggtccgttcccttcctgatctatggactgatcttcatccgcgtctgcggccccggctcctttaccggagtgctgaccctggcagtgtgcagcgtgggacttctctgcaagcgcttcacagaggccatcgacaccttggattttcgggcgtatcacgctctggaggccatggggacgccgaagctgtcctgcgtccgccacgcggctctgccgcagctggtgcctcagttcttctccgcctggctctatcggtttgacgtcaatatccgcgaggcctccgcccttggcctggccggtgcgggcggaatcggcgcgccgctgatcctggccctgaaccaatacgcctggcatgatgtcagcactctggcgctgggcatgatcgccttgtcctggctggtggatctggtctccgctttctgccgccgcagggacgcctgaggccgatgcccgccagcagccggatccggtgcagccccccgttccgccccggcgggaaggattccggcggagctgctgcaaagcaagacacggacagtctttggactgtccgtgccttgcgattccccggccgggggccgctcagagtgcttcgtattccgcgtcgctcaccggctcgcaccactcgttggagcaggcctcaccgggcatctcgacggcgatgtggctgaaccagctgtcccgcttggcgccgtgccagtgcttgacctccgccgggatgacgatgactctgccgggctccaggctgaccgcctctttgccctcctcctggtaccaaccctcgccggcggtgcagatcagcagctgcccgccgccctcggaggcgtggtggatatgccagttgttccggcacccgggctcgaaggtgacgttggccagaaacagcccgtcctccgggcgggtcaggggattgagataggaccggccggcaaagtaccgggcaaaagcgtcgttgggcgcgcccaggccaaacacgttctgttcctcaaatgcagccttgtccatgatcttcatgcaacatacctcccaatgctttcttatgaatgcggggcagaccgccgccccggtgtggatgttctgccgccagcgtgtctcctgccgctcacgggtgtgaatatccgccagcgcggcggcccgtatctccaccagtagccgcagccgcatatagccccccgtctcctctccggtgaagccgatgtcccgaagcgtcaggatcaggttcagccgctccgggtcgcggcctgcccgacctcaggacctccatggagatctgatcgcactcgctggcctcctggatcgtcatcgcccgcacctcagggcagaaagtggagacgtccccgcagggacgcctccattctaaatctggaacttcgccttgtccaatgcctataccggatggtctgatattccgccgacgtatttctcggcaaatcgcagcagggcagcagcggtggcagaaaggacctcggtcttcttccaggccagaaccgtgcccgactccagcggcggagagaggggtacgaaccgcagcccgtcataggcgcaatccagccggatcaccagatagatccccagcccctcccgggccagctgggtctggttgtaaggcaggttgccgctggccgccacctggatccggtctgcgtaagggccgaaccagcggatcatttcccggcgcatcagctcccgggtggtcaggatcagggggctgtccgccaggtccccgggcgtcaccgcctcccgccgggccaggggcgaatcctccggcaccaggacgccccaggattcccggacgggcagccggaggatctggtagcggctggtgtccaccggctccagcagaagtcccatgtccaggagtccctgctcgatccgctccttgatcccgtcggagtctccgctgtaaatctcatactggacccggggatgctggcggtgaaaggcagccaggagctttgccagatacgtcatgctccgcaggtcgccgcttccgatggagatccggcctgtgacctcctccgccggtcggagctcccgggccgtcttctccgccagctctacgatctcctgagcccggcggcgcagcagcatcccggcctccgtcagaacgatgtggtgctggctgcggcggaacagcttgactcccagctcctcctccagctgcatcagctggcgggacagggtgggctgcgtcagatggagcagcgccgccgcccgggtgatgttctcctcccgggccacagtcaaaaaatacttcagcgtccgaaattccaccgggccgcacctcctcttctcccctaccatatcatggccgcagtggggccgcaagtgtgatatgtgtgaaatgtatgtctcagcatagaaaacatgtattcgctatttctcatttcaggcggtataatagggtcatgtgaggcgcggcgtccggactccggctgccgcagagctgcaacaggaaaggatggtttcgacctatggaataccgtgtcaaccgccgcaccggggaccggatcagcgtcctgggcgtgggcaccagcggcctccccgccgccggggcgaaagagggtgccgccacgctggagatggccctggagcaggggatcaactacttcgacctggccactgccgactccgcctgcttccccatcttcggcgccgcccttgcgggtgtgcgcaggcaggtgctctaccaggtccacttcggcgccaattacgccgccggtaaaccttacagctggaccacggatctggagaccgtcaagcggtcggtagcgtggcagctggagcagctgcggacggactacatcgactacggcttcatccactgtatggacgagtccggcgactggcgccggtatgtggacaacggcgttcttcagtttctggaggcgctgaaagcccagggcgtcgtccgccacatcggcctctccacccatacgccggccctggcccgggaggtgctggacaccggcctggcggacatgatgatgttcagcatcaaccccagctacgactatcagcacggcgagtatgccaacggcagcgccacggagcggatggccctttaccgccggtgcgaggcggagggcgtgggcatctccgtgatgaaggcctttgccggcggacagctgctggatgctcgtacctctcccttcggtcaggccctgacggaatatcaatgcatccagtacgccctggacaagcccggcgtcctgacggtgctgcccggtgtccgagaccgggcggatctggaacgggtcctgggctttctgcgggctggggaggcggagcgggactactccgtcatcagctccctcacccccagagacgcggagggcacctgcgtctactgcaaccactgccagccctgccccgccggcctggacgtgggcctcatcaacaagtattatgacttggcccgtgcgggggatgccttggcggcagagcactaccggagcctgtctctgggtgcggatgcctgcatcagctgcggccactgtgaccgccggtgccccttccatgtatcccagtcggcgcggatgcgggagatcgcatcctacttccggcaggcgtgagggccctggccgttccttgcacctttgccggctacatcaatgagtggctgactgctgacatccccaccgtcctccgctccgccaccgccctggtgcccctgaagatggagacgcccgtccccttcaccggcacctggacggatgcggaggcctgtctgaaggaattctactgagtgcccttcacgtatccatctcccaaaatcaccaagacggctgccaacccggcagccgtctttttttcgttgattcccgcctcccccggaggtgcgccggaatcagaactgtttcagttatctccgataggatagggcgggggtgcgcgctcccgttttcacgggtgtccccgcggccggagccgccggcggacggtcagtcgtcacgtgcctcgtccgccggcttctcccgcggggtctgctgttcctttttcagggattccagtcccagccggatcaattccacggtcgcctccgaacgggtctggaaccggcgctcaaagcggaaatcctcgatctgctgaaacagctcattgtccacggataccgtgtaacgcggtctgtctgttgccatccttatcacctctggccctattatacacgagtgaaccaccggtgtaaagagagccgcagcccccttgacttcggttcagtgaaccactataataactttaataggttcaccaattcacttaaccactatatggaaaggagctgcgtacatgaacagagatcaaaaacggtttaccatctccgtgacgccggagctggcggcggaactgaccgcggtaaagcagagcagctaccccggcgtcccccgggacgcgatgttccgggacctaatcatccggggccttgcggcgtgggagaagcagtccggcaagaatagccagcccgtgtgacgggtggggtgccgggccccatcgaagctccttcggctctcccggcaaacggcggcagacagaaacagacagaaacacggtgaaagtcagaggcggcaggtacgcccggtgcgggcacccgtgggcagctgcccgcacccgccatcccatggagacagcagaacaattctgggcgttcctgaccgggagcgtccaaagcggtgcagggttcagtccgtatgtcatacggtcgtaacccgccgttcatcgctccccctgaccgggaggagacggaacgtgagcaaagtaaccatgagacggccggatgcccgggccatggcccagcttctggcggagcagacgcagacggcggcggggctgatcctccgcctggcctggcggcaggggctgacccgggaggagatccagcgcctcacttggaacgatgtggacttttctgcccatcagctccggctgccggaccggaccatcccgctggagacggagaccgaggactgcctgcgccggcaggcggagcgccccgacccgcctactcccttcgtggtggtctcggaccgccgcaggcagcagatgccgccggagtccatttcccgcctggccagaaaaactctggaccgggcggggctgggcggcatcagcctgatggatctgcggcacgacttcatcatccgccatctggaatcccacgactggccctatgtggcccggatcagcggcatcgccgtccccactctgtatgccgttttctccgactatctgccggagggacggcagaaggactccctccctcggcaggaggtggacggttttttgatgtggaagctgctccaggcggagggcagctccccggtggggcttgccctttggatgggttggaagctggggatgcaggtccgggagatgacagccctgacctgggaccaggtggatctggaccggggtctggtgcggctgccggaccgggacctggccctgggcgtcaccctgcggcgcctgctgcgggcggcggcgggacgccggcggccgggtgaggacccgcacgtgctgctgacgcccaactcccggcggcccttggaccagccccggctgtccaagatggtgcggaccgccctgatccggggcgggatggagcacatcagcctgggagatctctgccgggaggagcgccgggagaacgaggacgcccggctgctggcctacgccgccgaaaaaggcaccatctcccggtcggaggccatgtcgctgctcggcctgtccaaggtggcggcctacgagcgtctccggcagctggctgagcggggaaagctggtgcgggtcggcggcaaatactaccccgccggccaggtggtgccgccggaggagcagtatgacgtcatccgtacatttctggagcagtccggtccggcctaccggcaggatctggcggcgctcctgcacgtcggcgacagacagtgtgccctgatcctcaagcacatggtggaggacgggcgcctggtgcaggccgggcagcggtacgcccttcccattcgtgaggaggttctgctgtgaacggcgcaaaaggagagcggccctcaggggccgctctcttttttggcccgcgccgcggccggagcagaaatcgcgtccgtgttatgatggcgtgacatggctgtccatgcgatttgtgcgccgtttttcaattggattaaaaggtttgcgaaacgctggacaccggcagttttttcccgtaaattggccttgcgaacggcggaagcgccccgcatccggctctgcggttggtgtaggccgacacaagttggttggctagcccccacacgaatcccagacccgcctggggtcttccggcggaccgcaaattttttgaaggaggagaaatcccaatgaagaagttcctttctctggtgcttgctctggtgatgaccatgtctctggtcaccgtcagcgccggcgccaaggacttcacggacgacagcgagatcacctacaaagaagctgtggatgtgatctctgccctgggtgttgtcgacggttattccgacggcgacttccgtcccgatgatgtcctgacccgtggcgcggccgccaagatcatctgcaacctgatcctgggccccaccaccgcctccgcgctcagcgcaggcaccgctccctttaaggatgttcccgtgaccaacaccttcgcgggctacatcacctactgctctcagcagggtatcatcagcggc

SEQ ID NO: 4941 - DNA, 9119 bp, Unknown
  gut microbiota DNA sequence
gggacgccgactactgggactggacgccggagacgctggcggagactctgggaagctatggggcgtatctggatgcataaatctgccaacgccggtataaactgggactgcggcctggccgcagtccttttgttttgtcatggaggcggatatggggaagcggttgttttactgggagctggcgggtgcgctgttcacggcggcgctggggacgctgctgcactttgtctacgactggagcggcggatggggcgcggcggctgccttctccgcggtgaatgagtccacctgggaacatatgaagctgctgtttttccccatgttcctgttttccatggtacaggtgtgctgcctgggacgaaactatccgaactttctggcggcccggggcgtcagcacggtgacaggggtcgcgctgatcccggtgctgttctatacgtacaccggcgtgctggggcggcatctgctctgggcggacatcgccgtgttctacctctccgtgctgggggcattcgccctggatttccggcttctgcggcgggggcggttcacctctctctggcagcagatcctgggcctgctggcgctgtgggggctggcgttcctcttcgtctactgcacattccatccgccggagctggggctgtggcaggacccggtgacgctgggctatggaatccccaaatgaaagcaggcgcccctcctccgggaggggcgccgctttacttccggggattttctgcccccgccgttgaccggatccctccggcggggtataataccatcaaaagcgacctggggaggctgaagcggatgaagaccacaagacggaagagtgcggcgcctttttacgccgcggcggcggtgtggctggcctacgcgctggtgctgccgctgtatgagccgctgcactatgccctggcggcgggggcctcccttctggcgttcgcggcggcggccgccctgtgccggggcggccccgtaggagaggaggctggcaaggcgccgccggaaaaggccgaggagcccgttgaaaagaaaccggcctctacaggaaatcctgagctggacaagatggtccgcgacggggagatggccatccgggagatgaaacggctggatgagaatatcgcggaccccggcatctccgccgacattgtgcggctggagcaggtgagcgcccgaatcttcgacgaggtgcgcacgcacccggagaagctgccccagatcaggcgctttctggactactacctgcccaccaccctgaagctgctgaatgcctatgaccgcatgagcggtaccggggtctccggagagaacatcgacaccaccctggccaaggtggaggggatgatgcggaccatcgtggcggcctttgaaaagcagctggacagcctgtacggcgccgaggccctggacatctccacggatatcacggtgctggagaacatgatggcccgggagggactggtggacagcccgctgaaggcggagccggacgagaagaaagagaccgatatccggctggagctgtgatcggaggaaacgccatgagaaagatcgccatcagaatggcgggcctggttttctatatggccgcaggatttgtccttctgttctggaaactggagcgtggcgggttgcataacgcggagctcctgctgccgctggcatggctggcgggggcggtggctttgggccttcggctggacaaggcctgtaaacaggcgggaaggtggggagaggctgcccatcactttttctcttccgtgatatggctgctgcttggtatcggttttatgaagcaggccccgggcatctgtaccctctgcggtgtgctgggggtggtgtacgcagtggtttatgctgtctgcggtgtgcgggcggcgggagaagcccgccggaatgaagaaaatggcagagagtgaatgatactatgatggaggatgacacaatggcagacgagaagagcatgatgcctgaactgaccctggatcccagccggacggatgcggtgccccaactgactctggacccggcagcgcccgccgcccccgcaccggaggccgccaagccggaggcgacgccggtgcggctggacgagaacctgctgaacgacgcggagaaacaggcggtggaggcgttttccaagaagatcgacctgacggactccaacctgatcctgcagtacggcgcggcggcccagaagaacgtggccagcttttctgagaacgccctgaactctgtgcgcaccaaggacctgggagaggtgggcaagtccctcagcgagctggtggtggagttgaagggcttcggcgaggaagaggagaagaaggggctcttcggcctcttcaaaaagacgggtagcaagctggaggccatgaaggcccagtacgccaaggtggagtccaacgtggacaagatcgcccgggagctggagcagcatcaggtcacgcttttgaaggatgtggccatgttcgaccagatgtatgagctgaacctgaaatactacaaggagctcaccatgtacattctggcgggcaagaagaagctggaggacatgcgggcgggcgaactgcctgctctgaaggccaaggcagaacagtccggcgctcaggaggacgcccaggcatacaacgacatggtccagatgtgtgagcggtttgagaagaagctccacgacctggagctgacccggatgatctctgtgcagatgggcccccagactcggctgctgcagaacaacgataccttgatggtggaaaagatccagtcctccctggtgaacaccatccccctgtggaagagtcagatggtgctggccctggggctggagcacggccgccaggccacggcggcccagagcgccgtgacggagatgaccaatgagctgctgaaaaagaacgcggatctgttgaagatgggcaccattgagaccgccaaggaggcagagcggagcgtggtggacattgagacgctgcagcacaccaaccagcagctgatctccacgctggacgaggtgctgaacatccagcgggagggcgcccagaagcgcagggccgccgaggcggagttgggccgcatcgagggcgagctgaagcaaaagctgttggagctgagaaattaaagggagagcaggatccccctttggaatccccaccagtctgcgcactggtgaacgcgcccggggcgcttggatcaaggtagtttcgccacgtacacgctgcggcgaaaatgattcaaatttcttctttcgccaatggcggaagaactggggaaaaccggaggctttcccttagccccctttcccgcttgcggggaagggacggagaggacatacgcttatgaagttttttcagaaacgggccgtggcggcggtggtgctgattttagccatcgtggccggggtggtgattgggcaggccaagaagccggacaccggaggccaggcgtccaccgccattgtggggtcctatacgtatgtatatgactacgccggggtgctgacggatgagaccatggagcatatcgacgccatgaacgcctccttgtttgcccagaccggggcccagatcctggtaagtgtggtgaactccactggcggcgcggacatcatggactatgcctcggatctggggaacagctatggcgtaggctccgcagagcggaacaacggcgtggtgatgctgctggcgctggacaacatctcccaaagcggcctgatgggcgactactgcgtggtggtggggaccgggctggagagccacgcggacgatttcatgagtctgcagtcctattacctggagaatgatttcgctgccggggagtacgacgccggtgtgaaggcgacttttgatgccttcatcgcctggtttgccgacttctacggcgtcacgatccgggaggggtatatccctgccgtccgggagacctattccagcggcagcgggtactactatacggagacccacggctatgtggcgccggcctttgggtccctggtgagcggcgttgtggtgctgctagtggtgctgctggtgctgtgggtgatcctggacggaatgcggtactcccgctaccgccggcggtatctgcggcccggtatgggacggcccacggtgctgtactaccccatcttctggggacggccccagcggcccaggccaccccgtcctccaagaccgccaaagccaccgcgccggccgccctccggcggaacattcggcggggtcggcttcggcggcagccggggaggcatgttcggcggaggctccttcgggagtgccggagggtcccggggcagtctcggcggagggaccttccggggcagcggcggccggcgcggcggctttggcggaggctccttccgcagcggcggggggagacgcggaggctctttccgcggcgggcgccggtaagagacagatataacggggcctgtatgccgtttgaaaagcaggaggatcccccggagttccgggacgatcctcctgcttttgcgttggaagaagtattacttttgcagtgcggctcagcggatggggagcattttgccggtctcaaaggattccttgcagcgataggccgcctcggatacggcggtgccgtcgtagaccgtcaggtccgcagggtgtgtgccggtacggatgtggtccgtaaacgcctgcatctcagccagaaaagcggtgtgccagcgggacatgaagtccggatagtactcctgccgcgcaccatgctcatccacgacctgcagcaggttccgggcgcccacgggggcgatgcgcagcgtgccgtgggttccgacgatttccgtctctacattgcagcctgctgcatgggtgcggttggcaaagagaaagcccatggcgccgttttcgcactggaccatggcggcggcattgtctgtgtcatgcagttcccgacagaggtcgaactcaaagacaccaccgatggcccagacgttacggatgttagagccggtgaaccagcggatcagatccagatcgtggacgcacatgtccaggaactggccgccagagtgggggagaaatttcagtgtggattcaatggtgctgcggggatcctgggtgcaggagcggaccagcaccaccttgccgatttcaccggcgtccacacggcgcttggcctcagcataggaggggtcaaaccggcgcatgaagcccagttggaacaccagttccggatgggcctcaacaaccttttcagcttccttgcactgagccacattggtgcccagaggcttttcacagaaaatgtgcttgccgtgctccatggcaattttgatctgctccacatgaagaaaagagggggagacgatgacgatgccgtccaactccggatcggcgcacatggcggcaaaatcggtgtaagtatgaggaacgcccaattcctctgccaccgcccggagacgggaggtatccacgttacagatggcgtggaggacgcagccgggaatggatgcggctaagttttttgcatgttcgtagcccagacggcccaggccgacagagccgattttaacagattccatatagcaccttctctctggggttttcaattttacagtatagtctaatccccccaaaaatacaagcgggacctgccttgaaagctggatactgccgaagaacttgaacagcggcacggctcttgagagccgtgccgctgttttgcgggaaagtggtccctggggatcagtccacctcccgcagccgttccacgatggtggccttggagacggagcggtacaccgccaggggaaccaggacgcccagcagggcgaacaccggggccacgatcaggaacggggtcagcgtcaggcggtaggtgaagaaccagaacatgctccccaccgccttgaaggccaccgggccgaaaatcagggtcagcaccagggagatcccagccgcccccagggcatagagcagcccttcatacaccagcatggtcttgagctgcttgccggtcatgccgatggactggagcacggcgaactcccgcttgcgggcgatgatgccggtgaggatggcgttgaagaagttcagcacgcccaccagccccacgatgaaactgagggccccgccgcacagctggaacatggagcgcatcccctcgaactccgatgcgtagagcgccttgctctcatagtcgaactggggattcacgttctccgtgtagtctgccaggaacttctccatggcgccgttggcctcgtcggtggtatcaaaggcgtagtacatcacgctgtctgtgccgctgtcctgcatgaaggtctggtcattcaggatgaactcgtccgcgccgtagtagcggtagctgagagagatgggcacggcaaccagggcggctacttcgtattccacatcccggtatttcaccggctgcgccacatagttggcactggcgggcacgtcctccgggctggcgtaggcgatgccggtgtccggatctacatactccgtctcctccacgtaccggacggtgacgatgtcccccagccgggcccagtgggagtccatctccggattgccgtaatcatcatcactgtacacagcggccacataccgcccgccgtcctcatagagcttggacaggtctccctccagtaccgtcaggtggtccaatgcgaaatcgctcatgccggagagctggatccggtcggccagcaggccctcttcgttccgcccggtcaggcggatcagattgtccatctgctcctgggtatagaagtgctccttgttctgccggaaccagtcctcggtaacgtactccagggcatcgaacgtcttgccgtagatcacgccgccgtcggtaatgccgccctgggcattgatctcgtcaatgacggactgggggatgcccatatccgtgttgaagatgtccccgccggtctggaactggccggcgtccgccacgatgaagtcgctggatgcgaaatgagacacgtacttgtccatgtcgaagccgttggtgaagttcaccgtcactgtcagcagtaccaccgccagagacagggacgtgacggtgacggcggtcttgccccggctgcggcccaggttggcccaggccatggacagcagggacacgcccctgcggccttttttcgtcttgcgcttgatgccgccgccttcggtgtagcgcactgcctcgatgggagagaccttgccggcgatgcggccgggcttccggcaggagagcagcaccgtcaccagagagaacagcgccgcgccgatgaagatcaccgggctcacggaggtcatgggcaccacgccgttcagctgtgacacaatggccggcgtcagctggccgccgatcaaccaacccagcaccagccccagggggatgcccgccagggacaacgtcagcgcctgctggcggatgatccgccgcagctgccggggcgtggtgccgatggtcttcagcaggccatagaaccggatatcgttggtgacggagatctggaacacgttgtagatgatgagatagccggtgaagatgatgagcagcagcatggcggccacagcaatcaccacagaggggtccagattgtcgctgagctgggcgccggtatagccccagttgacgccagtgtggatataatccggcgctccggcgctctgatcctgatagccgtgattttccagaatttgagcgatatcgttcgcaatgtggcgggaaccgcttttcagcatcacatccaggttccaggaaccggtcatgccatcctctccgggcgggacggttcccacctcgtccagaatggcgtccgcccggctcttcggaatcaggatgtggttggccacaattgcctcgtcatactcccaccagccgcagagggtaaaggtctgggtggtggtatggccgtccacgtcaaaggagatggtgaacctggcgccgatctccggctccacccccaacagctccagcacgtgggtgtcggtagcggcctcgtcggtgccctcctggggcagacggccctccaccgggtcgcagtacatccagtgggcttcattggcgtcggcgtagctgacctccacgtgggatttgttgaacggcacctccgtgggcattccgataaaccgccgcattccccactggtcgatgagggggtcatccttcagatcgttaaactgttcctccgtcaggtacttgaagccgccgtgggagaagccgcccacctgacggaagttggactgctggaacccgtcgttgatggacatggcgatggtgaagagggacgtgaacagcaccgtggtcagggcgatggcgagaacggcgatgaggttgcgggtcctggccgccttcatggaccgccagcccagacggcggatggtcttgccgttggataccttcatcatggcgctcacccccgcaccacgatccgcccgtcctcgatgcggatgatccggtccgccatctgggccagctcctcgttgtgggtgatcatgacgatggtctggctgaacttctgggcagtgaccttcaggagtcccatcacgtccaggctggtggcggagtccaggttgccggtgggctcatccgccaggatgatggcgggcttggccgccagagcccgggcgatggccacccgctgctgctggccgccggagaggttgttgggcaggttttggagctttgcctccagccccagcgtctcaatgatccgttccacataggctttgtccggcgcgttgccgtccagctggatgggcaggacgatgttctcatacacgttcagcaccggcaccaggttgtagttctggaacacaaagccgatcttccgccgccggaagatggtcagttcctcatcgcgcatggcagagagttctttgccgtccaccgtgacggtgccgccggtggggcggtccagcccgcccagcatgtggagcagggtggacttgccggagccggaggtgcccaccaccgccacgaattcgcccttttccacggtcagatcgaccccgtccagggcccggacctccgtatcgccggagccatataccttccgcagatcctttgtttccaagatcgtcattgttcattcctccaaggaaaagtctgtattgccagaaggcaatacagacttcggctatctccat

SEQ ID NO: 4942 - DNA, 4408 bp, Unknown
  gut microbiota DNA sequence
acggcagttaagctcgttcctgctgacaatacttggctggtgacggcccgggaagataggtagcgccaacactgagagacagtcaattgactgtctcttttttgttattgtttgtaacagttttgtgaggatttatgggaccgaacactttaaaatcgttttaggttctgatttcgtctttatttgcgaacggtctgggaaatagggaggaggtcccatggtagatcccaataatcgacagctctggccgcccattcaccgcagctggctgcgtttgcgtctgggaaaactctattacggcggacggcgccgtcttctgtggatgtcgccccggtttcactgggccaaacagcgtcagacggagcgcctgccgtatatgctgatttcacacgccacacccttgtaccgccatctgcgaggggaggatcaggaactccaggaaaacaaggtggctaatctccggcttgcagtggcccggctggatgggattgtcctgtatcccggcgagaccttcagctattggcggctgatcggaaagcccacccgccggaagggctatcgagacgggatggtgctgtttctaggccggatcggcagcgatgtgggaggcgggctgtgccagctctccaatctgattttctggatgactctccacacgccgctgacggtagtggagcggtaccgtcactctcacgatgtctttccggataccaaccggacccagcccttcggcagcggcgccacctgcgcctatccccaccgggatctgatgatccgcaacgacacggaacagcccttccagctctgtgtccaggtgggaaagcaggttctgaagggagagtggcgggccccggcacctccggtctgccgctatgagatcgtagagaggaaccaccggatggaccaggcatcctggggcggatatgtgcggcataacgagctgtaccgccgcatctatgacctggaggggggcctgctggaagaggaattcctctttgcaaatgacgccatcatgatgtacagcccgcttctgccggaggagtcctgacgcgggcttgtattctttccaaaaccgtggtacactatggacaaccccactgaaccaaagagaggtgtttttatggatgcaaaaacgacgggtattgtcgcttatattacctggatcggtctggtgattgcctttgtactgggcgaccgggagggcgcgaaattccatctgaatcaagcgctggtgatctggctggcggggctgctgagcttcattccatgtatcggctggctgtggggcattttttgcttcatctgcgcggtgatgggcttcatctccgctgtcaatggagaggagaaggcagttcctctgctgggacagatccggttgctgaagtaaaggagaaagggccgcgcgctgcgcggcctttttgctgtttacagggaggaaattttatgcagagaggttctatgacagaccgggaggcctatccgaccgcctggatcaccctggcggttctggtgttgctatatctgctatggcgctttgcgctgggggcacccactgtcagccgctgctgggtctgggagcactggcatgtctactgcccgggctgcggagggacacgggcgctgatggccctagcccagggacgggtgggcgcggctctctggtaccacacgccggtggtgatcacgctggccctggcagcgatctatctgttttctcaaaccgcgtggcggctgcggggaaagcggggctgggtcctgcgctatgaccgccgctggccgatggtcctagtggggctgttcctggccaactgcgtggtccggaacgtcctgtggctgggcctcggcgtcccgctgtgaagcgaatatgagccgcctcattgcgaggcggcttttttgcgagtacaccgtaacattttgccacgctgctgggtcatacaggcagaacaggagaaggggggggaaggacatgacgctgccggagcaagagcgggagcggttctgccaagtgctgcatcacagccggaccagcctgtaccgtctggctttcagtatcacccggaacagcagcgatgcccaggaggcggtggcagaggcagtctgccgggcctatgagcggtatcctcagctgcgggaaaaggagaagctgccccggtggctgctgaagatcaccgccaatgaggcccggcgtctctgccaacggcgaggccggacagtctctttggatgatctgcccacggaaccggcaataccgggccgggagacgggggacgataccctttggcaggcggtgcagaccttgccacgagaccagcgggaggcggtggtgctgttctactatgaggacctgcccacagaggagatcgcccggatcgtggggacgtccccgggggcggtgcgggtccggctgagccgggcacgtgagaagctgcggagcatcttgaaggagggagactatggatgagctggacgcccgcctgcgggcaatggcaaagcgggaggactgggccctgcccgcagcctatgagtcggctatggacgggctggaggaacagatccgccaggggggcaccctggaccggcccggaaaacggcggctggggaagcgggtgctgatcctagcggccatcgtagcggtgctgctggcagcgacggcggtgtccatggatttttggaatgtccgggtggaagatgttctggtgggacaggaaagttccagctatcgggtaaacggagagattcccgtgatccctttggagagcttttcggatgaggtcgcgtctgctatggaggatgtttcacagaaaatggaagagcaggatctctatttgaattccagtccaggatattggcttcgcacctttgaccgctgggcagactgtgaggagtttatcgggttccctctgaacaatcccttggagaagtccagcctgctggagacagccaactacttcgccatcgcgcaggatgcggagaccctgaatgaagagagccaacgccattgcgcggttgctttgcaaggaaatattaaaggcgagctgcagcacgtgacaatagataccggctatctcatggggccgatccgcattcaaatgacagtttcgctttatccggagggaagcggcatggagcccgggacagggggcagctggaacggggaagcggaatttgaaattacctccggtgtgactggtgagggtattccttatacattggtggtatccgagaccccggaaagcgattactacaatgacttttctagtgcagacgcctattttgttttgaagaacgggctttataccctcgatgccgtatctccgggcagggacagcggagcggacgcgaaagctgccctggaagagctcctggccctcttctgaggaaaggaaaaacccgcggaggcattcgctctcccctcacaggggtaacaagtgattcctgggataccccggcaggtcatcgtgtttacgatgcctgccggggcttctctgtgtcctgggtttgctggggttccggcgcttccggtgcttcttccacatcctgccgaccactgccgacatagccaatgccgttgtagtagatctccacggtctgcggtgcgtgcttagaccactttacctctttctcgtgaaccacgatcttctcaataaacagccgcagcagttccagcgtcagctccgcaatgtccgtgtaccgctttgccctatcgaggaaaccgtccgtcccgctcaccgtttctcgcaggcgttggatgtccatctctttctgcgggatacctgcggcgatttgattctgctcttccgtatagctgccggaaagcatctggaactgctctgtggtgatacggcccagcacgctatcctcatacagcttcttgaagatggtgtccagttcagctttccgcttccgcatggcggccagttctttctcctgcctgcggatctcccgctgaagttcggtggactgcctgctgccgatataggcggcaaacttttccggatgttcccgtgccatggccgttactctccgtaagtcctccagcaccacctcatccagaacgcactcccggatgtagtggcccgtacaggcttcgccatctttcttgtaggtgcggcaggtaaagtgattgtagctggcggacatggtatgtgcccggtgcagcaccatgttggagccgcagtcagcacagaacacaagaccggaatacttgttttgttcttccatctttgtcagacggcgcttgttcttacggactctctgtaccacgtcccagacctcccgcgtaatgatggcgggatgggtgttctcaaagaccaggcattcctctcttggatgttcgacccttcgcttgtccttgtaggatctgctgctgtgcttcatgttgatggtattgcccagatagatctcgttc

SEQ ID NO: 4943 - DNA, 29959 bp, Unknown
  gut microbiota DNA sequence
cggaatcgagcgattccggtgatttttggtggagactactggactcgaaccagtggcctcctgcgtgtgaagcaggcgctctaaccagctgagctaagcctccatacggatatgtaatttttttctgcccataagacgccgtgcacaacggcgtcctatgggatggtgacccgtacgggattcgaacccatgttacagccgtgaaagggccgtgtcttaaccacttgaccaacgggccatttggaagtccatgaagcgccggggcgcttcatggatctggtagcggcacctggatttgaaccggggacactgcgggtatgaaccgcatgctctagccaactgagctatgccgccaaatgtctaacccgaacgggcatcaattactataccagaaggcggcggcgtttgtcaagtgtttcttcgaaaaaaatgaaaaatttcaaaaaaccggaagcagaggagagactcgctgccgctggcagggtgccccgaggccggcagcccggatacggtgggaatgaggccgggcggctcctaccgcccggcaccgtcttttcaaaaatccactcatgtcatcgggcggaccggaacgcattgtagagccggaagagatcctccagggcggcgcacagatctgcccgggcggactggcgggctacctcccagggcacggcgcgacggttggtggacacgatagcggtgacgccctcttgataggcgtcctccgcgccgggggccacgtcgcccactacggccaccaccgggatccgtgtctgccgggcccggtgggcgatgccgatgaccaccttgccccgaaggctctgacagtcgatacggccctcgccggtcaggaccgcggtggcaccaggcagcagggcatcgaagcccacggtgtccaggactgtctcgatccccatctgcaggcgactgcccaggaaagccatcacaccggctcccatgccgccggcggcgccagcaccgggaaggtctgcgatctcccggcccaggtcctggcggatcacctccgacaggtggcgcagattccggtccagacgggtcaccatatcagggtcggcccccttctgggggccgaagacggcgctggcgccattgggaccgcagagggggttgtccacatcgcacatggtcacgatctccacaccgttcagcagggggaagcgatgggacatgtcgatccggcacaaccggtccagcgtgccgcctacagggacgtactccgccccggtgccgtccagaaagcggacgcccagagcggcggcacagccgcagccgccgtcgttggtggcactgccgcccaggcccagaatgatgcgcctggcgccgtcccggatcgccgccagaatcagctctcccacgccgtaggtggtggctccctcagcacagagacggccttccatcaggggcaggcctgcggcggcggccatctcgatcacggcggtgtagccatcggccagcagaccgtaaaaaccagagatcttacgaaaatccggaccggtgcagggcacctctacccggtggccgcccatggcggccagaaacgcctccacgctcccctcgccgccatccgccacgggaatggagaccacctctgcatccggcacgtggcgcagaagggcctcccgcatcagctggcagatctccagggaggacatggtccccttgaaggagtccggcatgagaatccactttgacatgagtttcctcctctctggatgcgcggggcgggcggaaggcccgccccggtccggtcacgggttgaccacgttgatgggggcgccctgaaggtaggcccgcacgttgtccacggtgcagtccatgatgcgctggcggctctccctgggggcccaggagatatggggggtgaggatgcagttcttggcggtcagcagggggttgtcgccccggatgggctctgtggacaccacatccagcccggcggccgccaccttgccggagttcagggcgtccgccaggtcctgctccaccaccatctggccccggctgttattgataatgatgaccccgtccttcatcttggcgatgttctcccggttgatgatgccggtgttgaaggggaacaggggcatttggaggcccagaacgtcggaccgggcgaacagttcgtccagggagacgtactccacccccagctgcagagcttcgtcccgctggcgcatgtcgtaggcgatgacatgcatccccagggccgatgcgatggcggcagtgtggatgccgatgttcccgcagccaagcaggccgtatgtctttcccgccagctcgatcagggggtagtcccagtagcaccagtccgggcactgttcccatttcccgctctttaccgtatcattatgataaccgatgtgatggcagatttcaagcagcagggcgatggcaaactggctgacggaatgggtgccgtagaccggcacgttggagacagggatgcccttctcttttgcgcaggctatgtcgaccacgttatagccggtggccagcatggcgatgaagcgcatggagggacaggcgtccatcactcggcgggagatgggggtcttgttggtgaggaccacctccgcaccgccgatccgggagatgatctcgtcctcatcggtgaggctggtgcggtcgtaaaccgtcaggtctcccagcttctccaattctccccagctgagatcgccggggttttccgtgtatccgtccaaaatgacgatgtgcatttcattcctcctgtctgtgtgtcccccggcccgcaggggccgggggacagccgattccactggaaagtcagcaggattgcagcagttccagcgggacgccgtacctgacggccagatccgcgaagtcctgctcaatggcggggctgatgtcgataccctcccgctccgcctgccgggtcagatggaactcgatctccccggggatcatgatctcccggaagcccggtgccgtgggggcggccttcaactcatcatacatggcgtcggtccgcacgaccacggcctcgccggaactctttcccaccacagccacggtctcaaatgcctcggaaccgtagtcggcaatgccggtggcctggttgatattcaggcaggtgtgataaaacaggcaggtataaccgtcgggagaggcgttcttgacttcctcggaacccagcgctccgccattgccggtgatattggtgacgactacggtctcacccaacacatcctccagatattttgcatatgtgcgggcattaaagtcagtgtcgcccccggcgcccatgggaacgatcatgttgatggatttggtgggccagtcagtgccgccatcctccgaagaggcgtcatcggccggggtatccgggctgttgccgcagtggccggactgcgacgccatgatcgctcggggtgccatctatctggacctgtgctgccgctccctctctatccgggtgatcgaactgattatcaacggaacggacattgtcaatatcctgctgtagctgcggcagaaatacggcccggttccagctgccatccaggttttgcagctctcccgccgggaacagtatctgggaaagccggcatcctccgtgttctccaccccggcgttgagccgcatcgtgtccgcgacggagaacacggacgagattatcgcttacaaaaacacccacctgtccgtcaaaacgaaaaacatgatgatgcacggcctccgggctggaactgtggtttccctgctgaacgccgcgcagatccagaccacggaggaccagctgcgcaaaaagctccactacaagggacacaaggccaagtacaccttcggggatatcatcacccgcagcccgcggatgatagcctgtatccaggaggccaaggcctttgcccagacggactccaatatcgtggtggtgggggagaccggtaccggaaaggagctgttgagccagagcatccacgcctggagccgtcggtcacagaacaacttcgtagccatcaactgcgccgccctgccggagaacctgctggagagcgagctgttcggctatgtggagggcgccttcaccggcgccaccaggggcggtaagccgggcctgtttgagatcgcccacaacggcaccatctttttggacgagatctcggagatccccctgggacttcaggggcggctgctgcgggtcctgcaggagcgggagatcatgcggctgggggacagtcaggtgactcccatcaatatccgggtgatcgcggccaccaacaagaacctggagtcgctggtccgggcaggtaaattccgcagcgatctctattaccgcctgtatgtcctgcagctgaatctgcccccgctgcgggagcggcaggaggacatcccgctgctgacgcagagcttccttcggaacttccaggctcgggagggcgacggctgtccgctggaactgagcgatggcgactgccgtctgctgcagagctgcccctggcggggaaacatccgggagctgcagaatttctgtgagcggctggcggtgctttaccggcctggcgtctctgtatctggcctgatcgcccatctgctggagagtgccgcctctcccgagacgccgcccccgtgcccgccgccgatgccgaaggccgcccataccaggatcgacctgtcctatgaggagttgctggccgttcttcaggaatgcggcgggaaccggacgcagacggcggcaaaactggggatcagccgggggacactgtggcggctgctgaagaagtatcaggtcggacagacatgagcagaggcatagcccatgacgcatgccgactgcggtttccagagtatgggcaggggagggcaacgctgatggaaccccagcgtacgagaaaaagccctgtggctgtaaagccaaagggcttaatggttgctggtactcagtatgtgcagcatctgtgccgctggtggaagcggggcgccgctgcaaagcctgtcacccccactttcctgccatcacaagcttcgtatcctgtattccggcgttatagccggaacgcaagcgattcccgactccggctcaccccgctcgaaggcgcagtggaggactcaatgcttgatgcttgtgctccgccgacaagccgagtctccacgagaaaagccccctggcgaaagccagggggcttgatgttttttgcacttagtacatgccgcccatctcgccgccggcgggggcagcgggagcggggggctcgggcttatcggccaccagagactcggtggtcagcaccatggcggagacgctggcggcgttctccagggcgctgcgggtcaccttggcgggatcgatgatgccggcggagaccatgtcgcagtactcctccttgtaggcatcaaagccgtagccggtcttgccggaggtgcggaccttctccaggatcacggagccatccagaccggcgttggcagcgatctgacggatgggagcctccagggccttggccacgatgcggacaccggtcttttcgtcgccctccacgctggaaagcagagcctccacggcggggatcacgttcacgaagatggtgccgccgccggccacaacgccttcctcaacagcggcgcgggtggcgttcagggcgtcctcgatgcggagcttcttctccttcatctcggtctcggtggcagcgccgaccttgatgacggccacgccgccagccagcttagccagccgctcctgcagcttctccttgtcatagtcgctggtggtggtggagatctgcgtgcggatctggcccacgcgatccttgatggcctggctgtcgccggcaccgtccacgatggtggtgttctccttggtgaccttcacctggcgggcgcggcccagcatatccatggtggcgctcttcagctccagaccgacctcctcggaaatcacggtgccgccggtcagaatggcgatatcctgcagcatctccttgcggcggtcgccaaagccgggagccttgacacacaccacgttcagggtgccgcgcagacggttcacgatcagggtggacagagcctcgccctccacgtcctccgcgatgatcagcagcttcttgccggactggacgatctgctccaggatgggcaggatgtcagcgatgacggagatcttcttgtcggtaatcaggatatagggatcgtccaggttggcctccatcttctccatgtcggtggccatgtagggggtgatatagccccggtcaaactgcatgccctccacgacctcggaataggtgtcggcggtcttggactcctcaatggtgatgacgccgtcggcagagaccttctccatggcgtcggcgatcagcttgccgatctcctcgtcgccggaggacacagcaccgacacgggcgatgtccttggagccgtccacggtcttggcctgcttcttgacctcggccaccgcggcttccacggccttggccatgcccttcttcaccacgatgggattggcgccggcggccagattcttcagaccctcatggatcatggcctgggccagcagggtggcggtggtggtaccgtcgccggccacgtcgttggtcttggtggagacctccttcaccagctgggcgcccatgttctcaaagggatcgtccagttcgatctccttggcgatggtcacgccgtcattggtgatgaggggagcgccgtacttcttgtccagaaccacgttccggcccttgggacccagggtgatcttgacagtatcggccagagagttgacgccggcttccagggccttccgggcctcgtcgccgcgcttgatgagcttagacatagtaatcaaacctcctgtaatagagcttcatgtttcataaattagggatggggagttaggaattgggaattttggcgtccggcagagccaaacgatttgaaattggccgttgcaggcggctccacaatttccgattcctgattgcaagcgggagcgggagatttattccacgatcgccagaatgtcgttctgacggacaaccacgtactccacgtcctccagggtgaccttggtgccggcgtactggctggtgatgaccttgtcgccgggcttcacggtcatgacaacgtccttgccatccacgttgccgccgggacccacggagatgacttccgccacggagggcttctccttggcgctgccggtgaggataatgccgcccttggtggtctcctcggtctccaccatcttcagaatgacacggtctgcgagcggagtgagtttcataatggggttcctccttatagaaataaaaatttgaaaaacaagttcagcgttagcactcatatcattcgagtgctaacgctgctatcatagcgcaatgttttccatttgtaaagggggtatctatgaagaatttgtgaattccgaaaaaatctccctctcagaaggggagcgcatgggagccgtcctgctggacaggagaattcaactgtcatgaccagctttctgcccaaacggctgcctcaggcggactgacggcttcacatctcactgtgccgcatgaaacagctctgcttggggttacgcattcttcacggatacgattttcaccggcgcaaatactgtacaattcacgggaaaaagtttccaaatataaagaaatttttgatttttatcaagtgttccgtataatacgaggtttctttatatgctgttgttgcgggttatcccatacctccctgaaaaatttttcaacacagcatccggcctcggtcaatggtcgagatgaacggcaagccgccatggacaggagcggaggctgacgcgcctttaatgcaatatttttatggctttttcactgttcaataggaagtaagcttcttaaaatttctcttgacattttcgctgccctaatttaatatgaagtcagcttcctaagaagttaacttcctatttgaggagtgaggagcgtgaaaacgattatcaaggatttgcgaactgccgcaggattgacgcagcagcagcttgcgaaccgggttcgtgtgacagtaagaacgatcaattccatagaaagaggcgaatacaatccatcgcttgttctggcctacaagatcgcacaggtatttcatacgaccgttgaagagttgtgctgcttgaaagaaaatgtagaatgtgaggaaaatcaggatgaagatcacaaataagaaaatgtttatccgggggattttattattactgcttgccgttggtattggaatatcaagattttgtatatttaccgaggctacgcatggtattccaaaggcggttatcggcataggtatctgcttacttgcagctctttatcacatggtaatggccctgcatattgacggcgaggacgagggagcggaggaaaaataactatgcaattatttggcggaaagggtaagatgctgggcctgctcttggtattggctgccttcggcagcttttatctgggtgatattaccgcgttcacaacctcgcaaaaagctatcgcaggggttgctctctttattattgttctgctggccggcatttcccttctgaaacctaaaaaaacggaagaggatatgattgcggaacaggatgagagaaatcagtatatcgaattgaaatgcgctgaaaaagcatttcgggtcgcactgtacgcttcatttatgaccattatagccggcatgattgcctttggcctgacaagggaatatgcctttatctggttggttatgggggggattgtgccttacggaacatcaagaattgcctatatcgtttctgcattccgatacgacaagccataaatggaagcaggaaagcactgaatgaaaaattaagaggccaggacacctccttcgggtgtgtcctggcctctatttatcaattattctagttgactattataccgtgccgaggcgcagcggttgaatgatcgtaggatgcctataatagcagaaaagctgtggaatatcgacgcttccttggctttcggtcaaatcctgccgtggcattgggactgcaccccttcggcccgaagaagttcacccgcttctccgcgagtaccagccgcacctcccggctccggaggctctccccgtccagacaggtgacgatgtccgcctccccggggctggcggtgatcaccacctgccgggacgtcaccattcgggcgatgtggggaaatttccaatactccccggcggagtaggccgggaacaaccgggcgaaggtgcgcttcggcacgtttttcaccaggatggtctccagcactccgtcgtccatccgggcctccggcaccggcatggagccgccgccgtagtaccggccgttgcacatggacaccagagcgaagtcatcctccaggacctccccgtccagctccacccgccaccggcggccgatgggcttgaagagaaaattcaccgccacggacagcaggtaactcccccggccggagaggcccggcacatttccgtaccggtggacggtgtcagcaatgcgggcgtcaatgccgctgcaggcgatggtgaggcacaggcggccgttgcagtcgatgagatccagggggaattccggcccgtcccacagatgttccgggtcggagaattttgcagcgtccgggccgaagttcttcagaaagtcgttgcctgtgccggcggggattaccgtcatggcggcgttgggaaacccggcgatgccgttggccgcctcgtggacggtgccgtccccgccgcaggcgtagatgcgcaccggctccccggtctctgccaaggcgcgggagaggacctccgctccgccggggcggtccgtcagcaggcaccggcagtccagattgtgggccgcggccagacggtccgccagggcgcggatgcgggcagtctggtcctgcttcccggcatgggggttgatcaaaaagacatggcgcatgacaggccccccttggcgaaatatgagataagagtgaagagatgaaagatgaggactgtcagcggcgatctctcctgtcttttaacctttgtctggctctgtctttgcgcctccgtggtagaagaaggcgtcgcatttgagcatgccgttgtagagcttgcgtttcttctccgcgctgcggccgaaggcgcgctcaaactctgtgtgggaggagagcaccagcacgcgccagcccgccggcaatgtccgggcagctttgccgaaggagcggtacagggcctccgcctctctcttttccagcagccgctcaccgtagggcggattggtcaccagctggccgtagtcgctgtcccggtggaactttccggcatccgccacctcgaagcgcacgcagtcgtccacccccgccagctccgcgttgtggcggctcaactccaccgcactggggtcgatgtccccgccccagatgtcgtactggccgtggaattcttgatccatggcctcttcggccgcgtccagccacagcttggcggggaggctctgccacttttgggcggcaaagcgccggtccaggcctggggcccggtttttggcgatcagcgccgcctcgatgggaatggtgccgctgccgcagaaggggtcgcagaacggatccctcccccggtagcgggagagcagcaccagggcggcggccagcgtctcccgcaggggggcgccgttgttgtgggcccggtagccccgcttgtagagtccgtcgccggaggtgtccaggtacacggctgcggtgtccttgatgagggcgaactggatctgatagcggtccccggtctccggcagggtctcgcagccgtaggcctggccaagccgcttggcagcggcctttttcacaatggcctggcaggcggggacggagtggagctgggaggagatggagtagcccttcaccgggaactccccgtcccgggggatgcaatcctcccaggggatggcggccacgccctgaaacagcgcctcgaaatccggggccgggaagctggccagctccaccagcacccgggcgccgcagcgcaggttgatgttcagccgggggatgtccgccgggccgccgtcgcagtggacccggccgttttcggcccggacgtttttcaggtccagccgccgcagctcgtcggccaccagggcctccagcccgaagaggcagggaatggtgtatttcatgggggttcctccttggcggggcatacagatgcccgtggattttcattggagccggtggaagagaggctctcagggggcggcgtggcccagcgttctgcgctccacgcgaatggtgtagacctccgacccgtcggcgctgccatggcatcccggtaccgtggaagtcgccacattccaacccatctggcggcgcatgtcgttggcgaactttttgatgttctgcttgctcagcgtacagccgcagcggaagacaacattcacattcgcatagcgggatgttccgtcatccatcgggctgagcgtccacgccagatcgtggacatgggggtccggccgctccacgccaaaagcgtctgcaaatgcattcagatcgtcaatctcgaagaggtcgctgctgtattccccgggccagacggcatagagccggatctctccggcagcggcccggcggtaggcctctgcggcagaggagaaatcgtggcccacctgcgtgagactgcccgcagcatccagagacaggtagcagaccaggctgcctctgtatggaaagggattggccttcgcacttcttggctgacgcatggaacatcctccttgctgcctccgcctcagcggggcgtttttcctattataatgcagactgcggaaaatgtcgagatgcccgccggctcttgccgcaactgccgccggcgggccgggaggttttgtaaccaaaatgaaatggtatttgcaaaatgggcatgatacaataacgataaacgccgccggagccgcacttcccggacggaaacctgaagttgcacgggattttgccggatgcaaagcagagttggtggaaacggcggggcggttctgctaaaatgacagacagagaggagaggcgtatggcatttggagagcggttgcaggagctccgccgggcccggggcatgacccaggaggactttgcggcccagctgaaggtctcccggcaggcggtgagcaagtgggagtcctgccggggatacccggagcttgagaagatcatctatatctgcaaccgctacggcgtcaccatgaatgacctgttctgcgaggaggtccccctgggcggccaagagacgccggcggcgccggagcggatggagtcccggacactgaaaacggcgctgggagattttgtgagcaacctgtccccggccaacaaatgggccggagtgggggggctggcggcagtgactgccctggtggccctgtgtatgctgtatttgaaaggaggcggagacagcgaaatgacggcattgtggattgcggccatcgtggtctttggcgtggtggaggcggtgaccgccgggctggtctccatctggttcgtgcccggcgccgtggcgggtctgatcgccgccatggcgggggcggggctcctgatccagctggtgctgttcctggcggtgtcggcggcggccctggcggccacccggcccctggtgaaaaagctctccgccgggcgggctgtgcctactaacgcggaccgggtgctgggccgcaccgccagagtcacggagaccatcgacaacgacagcgcctccggcgccgtctatgtggacggcaagacctggaccgcccgcagcgccgacggatcggtgctcccggcgggcagccgggtggagatccggcggatggagggtgtgaagctcattgtggaagcggcgcagaaagcgcctgataaaaaagaggaggttgtgtgaatatgatggatgtgctcaagtgggttccgctgttgatcctggtggtgctgatcctgatcctgctgatcgggaacatcgtcatcgtccagcagtccaaggcctatgtggtggagcggctgggagcgttccggaccgtgtggggcgtgggactgcacctgaaggtgccctttgtggagcgggtggccaagaaggtgtccctgaaggagcaggtggcggatttcgcgccccaacccgtcatcaccaaggacaatgtcaccatgcagatcgatacggtgatctacttccagatcacggacccgaagctgtatacctacggcgtggaacggcccatgaacgccattgagaacctgaccgccaccaccctgcggaacatcatcggcgagatggaactggaccagtccctgacaagccgggacaccatcaacgccaagatgcgcgccattctggacgaggccacggacccctggggcatcaaagtcaaccgggtggagctgaaaaacattatcccgcccaaggagatccagaacgccatggagaagcagatgaaggcggagcgggagcgccgggagtccatcctccaggcggaggggcagaagcagtcccagatcctggtggcggagggcgagaagcagtccctgattctcaaggcggatgccgccaagcaggccgccatcctgaaggccgagggcgagaaggaggcccgcatcatggccgccgaggcggaggctcaggccatcatgcaggtgcagaccgccctggcggactccctgaagctgctgaatgccgccgcccccaatgaccaggtggtgaagctgaaggctctggaagccatgcagaaggtggcggacggcaaggccaccaagatcatcattcccagtgagctccaggggctggcaggactcgctgccagcgccaagacggtgttcgacacagaggaccccaagggggagtgagggaaaagcagtacaggcgcacagcaaaagctgtgcgcctgtattttgcaaattggggcagagggcgcagcccttcatgtccattgccgggacgatgggagccagtgccggaagagcgtattcccatgatcccatacagacccgcgccgtaagggcttcggtcgggacctgctgcggccgggagggtcaggtgcagtctgcgtcccggtgaattgcccgcggcggtctggagttctgccctgtctacgcggggaggttcgcccaatgagaggcgcgccccggaagcccggtttggggcacagtgattacagcgatttttacccattaaccgccggttaaaagatcgtcagaaaaattgaacacctgtcgattgcagcgcaccgccggagatggtattctggggacagatcacaagagggggctttgccatgcagatccacgagattatccgcacccggcggacggcactggggctgacacaggagcagctggcggggaagctgggggtatcagccccggcggtgaacaaatgggaaaggggaaactcctacccggacatcaccctgctgccggtgctggcccggacgctgcgggtggacctgaacacactgttgtcctttcgggaggacttgacggagacggagatcgcggagtttttgaaccggctgtacgaggtgtcccggaccgaggggtgcggcgcggccttttccctggcagaggagaagctgcgccagttccccaacagcgacgcgctggcatacagcgctgcggggctgctggagggtcttctgaccctgttccccggcaccgatgagacagcccggcccggccgggaggactttgtcgcgggcctgtacgagcaggccgcccagagcgcggaccccaaaatccgggagtgggcgacctataccgtggcgagccgttgcatcgcccggggggatctggaccgggcggaggcgctgctggaccagatctccaacacccaccgggacaagcgggaactgctgtccgccctgcggcggaagcaggggcggaccgaggaggcctggaccctgctggagcgggagctgttcgaccgggcccacggcatccagaccacgctgctgtccctgatcgagatggcccaggcagagggggaccggcagcgagcccagggcttttgcgacgccgcccggcgggcgggagaggccctggacctgagcgattacgcagtgctgtccgcccccttccagctggcggcggcggagcaggacggcccggcggcgctggacctgctggaccggctgctgcatagcctgacagtgccttgggatctgagtgcctcgcccctgtaccggcatctggccaccaaagaggccgccggagaggcccagtcggtgttgctggagccccttctggaccaggtagaggcggacccggactgcgccttcctccgggagatgccggagtatgggacgatggtggagaagtaccggcgcgccgcagatgaggcatgagctggcgggacccaccggacggcggatgagactgtccggttctgccggtgccaggacgcggcgtgccgcagttctgcattccctgcggaccgtgcgggaaaaagaaaaagcggaaggacgaaagtccttccgctttcatgcgtctcagccgaacagggcatcgccgctcttgaagcccaggccggggtggaagtcgaacttcaccgcgcccacggccacgtcgggacccacggcccgctggatgcgggcgatgccctcgttgccgaagccggcgcacagctccatagcggtgacgcctccggcggccagctccttcgcggcagcctccgcctcagcgtaggtcttgcagcccaccacgttcaaatggatgctaggggtggataccacggtgcgggtggtctcatcggcatcgccgataagaaagagaaatgcggcttgcagtgccattgttatgtagacctccctgaaaatcaagaatcagagcgaacagataagagatgccgctttccctgcggctctcttatctgcacacccgttatctggtatgtcacagtctggtgaccacggggataaccatgggattgcgcttggtggttttgaacaggtagctgctgacggcggacttgacggaacccttcagttccccgtcatcccggccccgcttgcgggagacgttctccgccgcgtcccgggccacgctctgcagttccttcatcaagtccccggactccttcacgtagatgaagccccgggtgatgatctccggctcgctgaggaggttgccgtcatgggcggagatgggcaggaccaccaccaccatgccgtcttctgccaggcgcttgcggtcccgcatgaccacggcgcccacgtcgcccacgccggagccgtccacatatacctcaccggagggaacggtgccgcccaacttgatggtcttggccgtgatctcgatgacggagccgttgtcggcaatggcgatatggttgcggtccatgcccatgtcctgggccagctgggagtggatctggagcatccgctgctcgccgtggagggggatgaagaaccggggcttcgtcagggcgtggatgatcttcagctcctcctggcaggcgtggccggacacgtgaagcatgtcggcccgatcatagaccaccttgacgcccttgcggaacagctcgttgatgacccgggacaccgtcacctcgttgccggggatggcgctggcggagatgatgaccttgtccccggcgccgatctccacctgcttgtgctgagagaaggccatgcggtacaaggcgctcatctcctcgccctgggaaccggtggtgacgatgacctgcttgttcttgggcaggcccttgatccggttgatgtccaccagggtgttcttgggcaccttcatatagcccagctctgtggagaccttcatgatattttccatggaccggcccgtgacggccaccttccggccgaaggccgcggcggcatccagcacctgctggatccggtggacgttggaggcgaaggtggtgacgatgatccggtcctcgcatccctggaactggcgcttgaaggtggcgcccaccgtcttttcagagggggtaaagcccggacgctccacattggtggagtccgccagcagtgccaggacgccctccttccccagctcgccgaagcgggcaaggtcgatgacctccccgtcgatgggggtggagtcgatcttgaagtcgccggtgtggacgatggtgcccatgtgggtgtggatggcaaaggccacggagtcggcgatggagtggttcacatggatgaactccacagtgaacttgccggcccggacgctcttgcccggctccaccgtgatgagcttggtgcttttcaccagcccatgctcctccagcttcagcttgatgagccccgcggtgaaccgggtgcagtagatgggcatgttcaactgcttgagcacatagggaatggcacccacgtgatcctcgtgcccgtgggtgatgaacagaccccggatgcgggcccggttcttgatgaggtagctgacgtcgggaatgatgaggtcgatgccgtacatgtcgtccccggggaaggccatgccgcagtccaccacgatgatctcgccgccgtactcataggcggtcatgttcttgccgatctcattgagaccgcccagggggatgattttcaatttttctgccatagatcgatgatactcctttgaaaaaatatgtaaaatacccccataacagcggaaatggcgcaaaatgagcgcacgcaaacaagagacgcccgtagcctgcgcggccccgtttcgccggcaggggttcggtcacgtcattccgttgaaaccgtatggggttttatttgactgaggcggagcggcgctccgcaccagtgaaatactgtggaactgtgtaaaaaagggcggaaaagcagttgcttctcgacgcgcactttgttatactgaaacgaaggcgcggcccaggcagaggcacgccccgcggcgctccgacagccggcggcctgccgccggcggacacggaaggccgcaccattctgcccctagtatagcacaggtcaagcgttttgtatacatttttttcaagaaaaccaagatgaccggcggaagggccggagaaagggagtgaagggacatgcgggcaacgatcaagatgatcgcagaacgggcgggcgtctccatcggcacggtggaccgggtgctccacgaccggccgtatgtgaaggaggaggtccggcggcgggtgctggaggtgatggaggagctggattaccagccaaaccgggtggccagcgccctggccaccagcggcatggcccggcatttcgctatcatccagcccacgtgggagagctatgtgggcgaggccatggccgctggcgtggcgaagttccggcaggaccgtcaggactacaatgtgagcgtcaccatccacccgtaccgccaggggcggatggaggactgcctgcacctgctggacacgctggcggaggaggtccaggggatcgccctgtgcgccgcggactgcccccaggtgcgccagaagctggagctcctggcggagcggcggatgccggtggtgaccttcaactccgacattgcaggcgcccggcggctgtgctacgtgggggaggacgcccaccacgccggccgggtggccggggacatcgccgccaagttcctcaggcccggagaccggatcctgctggtgtacgccgaccacggctacgccggacacaagggccgggcagacggctttctggagcggcttgcggagcgggggctccggcaggaggactgccgggtggcagagacccacgacaactatgatgagacactggcagcggtgaccgccgctttggcggaagagccggacctgaagtatatctatatggccaaccgctccgtgcctgcgtgcatggaagccctgcgcggggccggccggatgggacaggtgcgggttctggcccacgacaacagcccggagacgcggaccttcctgcgggagggactgctggacttcatcattgaccagaacctgacctaccagagccgcaaggccctgtcgctgctgtttgatgcggtggtggagcaccggacgccggagcgggactgtttctatccggagagccccatcctcacggcggagaactgctgaaagactttctccggcgccggcttcccgcggaggccgactctgggggaagctgtttttgggaaaagctgtgtacgcaaacagaaggagaaccgtgtcatggaacagacgaaaaagccgctgcctggagcggtactgctgctggcggccctgggatttgtgctggggacctgcgaatttgtgattgtgggcattctgccggagatcgcggaggggctgaacacctctctggcggcagtgggaaagctggtatcggtgttcgccgcctgctacgcggtggggacgcctgtgatcactgcagctaccggcggaatctcccgccggaagctgctggcggtgctgatgggggtgttcctcctcaccagcgcggcaagctttgccgctcctaatgtggcggtgctgtatgccacccgggtagtggcggcgctggtgtccggtacgctgacggcggtggccatgctctatgccaaggaggtcgccgccccggagcagaccgcccgggccatctcgctggtatacggtggcttttccgtggcagcggtgctgggagtgcccctgggcactgccgtgtgccagatcctgggctggcggtggaccttcgccgtgatcctggctatgggcgcagcgctgctgccgctgctgctgcgctccctgcccgcggtgccggcacaggcggacagcgggcttctgaagtccttttccatcctatgggacccccgatgctccctgtgtgtggggatgatcctgtgcagcgcctccgccacctatatcgtgtacacctatctctcgccgatcctgacagagacactggggcttccagcgggggcggtgagcccgctgctgctggtgatgggagcgtgcagcgccgccagcaatctcatctccggccggctgggggagcggggcggcctccggaccctgcccatggccttcgccgcccaggcggtgctgtttgccctgctgccgctgctgctgggaaaccggtgggcgggccttgcgggggtctttgccatggggctgctcatgtacctgctgaacaccccggcccagatgcacgcgctgtctctggcagagcaggattaccccttcgcttccagcctgtgcgcctccgtacagccggtatcctacaacttcggcattgctatcggctccttcatcggcagcgccgtgcaggaggggtggggattccgccccctgggcctgccggcggcaatgttcgccctggcggcactggggctgaacctgctgcttctgcgcgccaacggccgccggacggccgcggcggcatcctgaggaccatcaaaacaggctcgggccggatcagcccgggcctgttttaacagttgcttcttgtgggaaaaactgctatactattctccaatatgggtatgtatgcgtccctttcaaaaggagacctgatcgagatgaacaacaagaagctctcccgcctgctggagcccaatctcaagctctacttcctctgcatgatcgtcttcgcggcggccaccgccacggtgagcctgcctctgggactggtggagatcgcctgcaccgtgggcctgtatgcctatttcaccaaccgtaaccagaagcggcggcagaacatcctccagtacattgataatgtcaccggcagcgtggataccgccagcaaatccaccctcatcaactctccgctgcccatcatggtgttccggccggacaccggcgaggtgatctggagcaatgagaacttcctgcagctggccggcgtgcgggagcacctgttcgagatgaaggtggaggatgcagtaccggatttccccgttcagtggatgctggagggaaagcaggagtgcccggaccgggtggtgatgaacagccggcggttccgggtgtacggcagcctggtgcgggccaagggccggggggccgagcagaacctggtggccactacctactgggtggataccacagaggccgacgacctgcgggagcggtacaccgccacccggccggtgctggccattttgatggtagacaactacgaggacctgatgaaggcatgcgccgatacccagcgcagcgccgtgctggcccagatcgacgagaagctgaacaactgggccgcctgcgccgacggcctgctgctgaagacggagcgggaccactacctcttcatctttgaggaatgccactacgaccactttgtggaggagaagttctccatcctggatgccattcgggagatcaaggtgggggatgtgtgccccaccctctccatcggcattggcaaggatgccgacgctatggcggagctgtaccgcaacgcccgtctcagcctggagatggccctcagccggggcggagaccaggcggtggtccggggaaaggtggacttccagttctacggcggccgcagcaagtccacggaaaagcgcaccaaggtgaagtcccgggtcatggccagcgccctgaacgagctgatggccgacgcgtccgagatctatatcatgggccacagctttgcggacatggacgccgtaggcgccgaggcggggctctactgcattgcccgcaagcacggcaagcgggcccagatggtcattgatctggagcacaacgccgccggagcggttttggccaagctccaggcgttgccggagtatgcgggggcgttcacctccggggcggaggcatttttgaaaatgaggccgggcgctctggtcattgtggtggacaccaaccgccccgacatggtggagagcccccagctgctggagtccagcaaccgggtggcggtgatcgaccaccaccgccgggcggccagctacatcgaaaacgctgccttcagcttccacgaaccctatgcctcctccgccagtgagctggtgacggagctcttgcagtatctggtggagcccgccgatctgctgcgggaggaggcggaggcgctgctggccggcatcgtgctggacacgaagcacttcaccctgcgcaccggcggccggacttttgaggcggcggccttcctccgccgggcgggggccgacaccaccgacgtccagcggttgttccagagcgatctgagcgagatggtgtcccgctacgacatcatccgccgggcggagctgtaccgggaggacatcgccgtggcggccatcgaccaggagggcgtggaccgggtgacggcggcccaggcggcggacgagctgctgagcctcaagggcgtgaaggcgtcctttgtggtattccccagtggggagaacgtgcagatgtccgcccgttctctgggagaggtgaacgtccaggtgatcctggaggccctgggcggcggcggcaactccaccactgccggcggccgtgtggagaacacagatgtggagacggtgaagagtcgtctgctggaggccatcgacgcgtattttgaaaagtgagggggagcgcggccatgaagcggtttctttccacatttggcatctgcttggcgctggtggaggcattcatctttttcggaggataccagctctttgatttcagccggcgctggtatttggcaggcgcgtccatcgccctagttctggcggtgctggtgtgcattctggttcatcagaatgaccggctggaggcgctggaaaaacggacccggcagctggaggaacaaattcagaaacagaacgactaaaaggagacgttatcatgaaagtgattttacagcaggatgtgaagggccagggaaaaaagggccagatggtggaggtgtccgagggctatgcccggaacttcctcctgccccggaagctggccatcgccgccacggcggacgccatcaacaccatgaacctgaaggagaaggcccgcaaggctgaggaggcccggcagaaggcggaggcggaggccaccgccgagaagctgaaggagtgcatggtgaagctcaccgccaaggccggcaacggcgggcggctgttcggcgccgtcaccaccaaggagatctccgacgggcttaggcagcagttcggcatcgacatccccaagcagaagctggtgctggacgagcccatcaaggcgttcggatcctatcaggtgaaggccaagctggggtttgaggtcaacgggacggtgtacgtctccgtgtttgaggaaaaataaagggagttcctctgtttgggggcacactctgggggagaggaatgggccgccattgcggcagtctcgggggctcctgcgcccgcaggggtgcgcccccgctctcttttttggctgtgccaaaaagagagtgcgccgcgcccggtggaagagaaaaggcgcttggcgcgctctggtacaatggcccttcgcgctttcctaacccaaacaggtggactcctattcacagcgaggtgacagtaagatggcaaacgaagaccttctcctgcggcagatgccccactctctggagggggagcaagccgtcctgggctccatgctcatcgacgcggactgcgtcaaggatgtgatggacaagctccggccgtcagatttttacctccggcagaaccgggagatttttgagaccatctactccatgttcacctatgccaagcccatcgacggcattaccgtctgtgaggagatgcagaaggcgggcacctacgacgagaacaccacccgttcctatctggcccagctgatggagatcacccccaccagcgccaacgtgatggagtacgcggccatcgtccgggacaaggcgttgctgcggggcgtggcccaggccgccgccgagatcaccgccatggtgcaggagggcgtgggcgaggcctccgaaattctggaggcggcggagcagaaggtttacgccgtccgccggggacagagcgcccaggacatggtgcccctgcggcaggtgctgccggaggtgctggaccggctgggagagatgagtgagagtgagaatcacctgccggggctctccacgggtatgtccgcggtggaccagaagatcacgggcctgaacaaatcggacctgatcctgctggccgcccggcccggcatgggcaagacctcctttgcgctgaacgtggccctgaacgtggccaaggccgtccacaagacagtggccgtcttctctctggagatgagccgggaacagctggccacccgcttgctggcctccgaggcattggtggagaacaaccgcctcaagaccggcgccctgcgggagaccgactgggagaagatcgccggggccgccaccatcctgaataaggtggatatccggatcgacgacaatcccatgctgtcggtggcggacatgaacgccaagtgccgccggctggatgatctgggcctggtggtgatcgactacctgcaattgatgacctctgccggcggcaagggctacgcgggggagaaccgccagcaggtggtgtccgacatctcccggatgctgaagatcatggccaaggagctgaacgtgccggtgatctgcctgagccagctgtcccgcgccagtgagaagcgggacgacaagcggcccatgctgtcggacctgcgggagtccggcgctatcgagcaggacgcagacatcgtgctgttcctgtaccgggatgactattataatgaggattcggagaagcacaacatcgctgagtgcattgtggcgaaaaaccgccacggtgagaccggcaaagtagagctgcggtggatgccggaatacacccagttctcgaccttggatacgaggtacgacgaggactgaggtctgttttgggagaggtgaggtacggacatggaggaactgctgtcccactgtccccggtgggtgctgcccggtcgggggcgtccggccctgtgtgccgtgtccggcgggctggactccatgtgcctgctggacctgctggaccggtggtgtcgggagcgggatggccgggtagtggctgcccacttcaaccaccggctgcggggcgcggaagccgaccgggatgagaccttcgtccgggactggtgtgccgcccatgacatcgcattcgtctccagctccggggacgtccggggccttatggagcgggagggcctctccctggaggaggcggcccggaagctccggtacgattttcttcgccaagaggcggagaagctggggcagcatatcaaaatctacacagcccaccacgccgatgacaacgcggagaccattcttttcaacctgatccggggcaccggcgtggcgggccttaccggcatggcctaccagcaaaacggcatttgccggccactgctggacgtgacaagggaagagctggcggcctacgccgccgcccgccacatcccccacgtggaggacaccaccaacgccgaccccggcgccgcggcccgaaacttcctccggctggaggtcatgccccgcttgaggcagatcaaccccagagctgtggagcacatcaacgacgccggacgccgcctgcgggtggcggaccaatcactggaggaagaggccgcccgccgtactgcccatgtggaggtgcaggaggggcgggtgaccttatcccggcaggcattggcagaggccacggacgccgtgcgaccccggatgctgctgcggctcttcgaccttttgggcgtggggcggagggatatcacagccgcccatctgcaggacatcctgcacctgacccgggataccctctggggccgggagagccgggtggacctgccccagggcgtcaccgcccggtactgccgggagtggctgatcctggagacccggccccagcttttgacggaggtccagctgttgcaggagtgccccgtcgcctggggcgattaccggatcaccctgctggatcaccgggagggggagggacttgcccttcggccctggcggcagggggagcggatgggcctgacggtgggccctgcggcgccgggagaccgtctggttctgccggagacccacgggggcggccgcagcatcaaacggctgtgcatggaccgccggatctccctctcggagcgggaccggctgccggccgtctacgcgggaggatgcctggcggcggtgtggcggctgggcgtggatatggcgtttgcagcaccggagggggagccctgccggttcattcagattaccgaagcggcaaaggagagagatttgatatgaaaagcgagatggaaagggatatcctgaaggtcctggtgacagaggaggagctgaaggcccgcatcaccgaaatgggcgcggagctgtatgagcagtttcatggcaagaacccgctgtttctgggcgtgttgaaggggtctttcgtattcatggcggacctggtccgggcttgccaggtgaagagcgacgtggagttcatcgccgtcagctcctaccagaacgccactgtgtcctccggccgggtgcagatcacccacgacctgcagcaggacatcaccggacggcacctgatcatcgtggaggacattctggactccggcaacaccttggcgtttttgaaggactacttcatgaccaagggagcggcttccattaccatcgtgacgctgctggacaagccctcccgccggactaaggccatcaccgccgacctggcggggttcgtggtgccggacgagtttgtggtggggtatgggctggactactgccagcagtaccggaacgtgccgtacatcggggttttgaagccggaggtatactccggggagtgaggcgatacgccctgttttgggcggactccgcccaatcgtaacatgaaaacagtctcccattgcgtcccaggcaatgggaaaggaggcttctgctcgtgacaaaacaaagacggctatccaatctgagcttcgtactgctggccctcgtgatcctgctgtgtgtcaactggctctggcagaacgacaaccatgtggaccagctggaatactcccaggtccgccagctgttcctgcaggaaaaagtgacggggctgaccattgacagcggcggcacactgaccctggagctgcgggagccggtgaacggcagcgagaccgtgcggtatgagctgtacagcttccagctgttttatgacgacttcaatgacctggttcaacagcagtatgcggagggtatcatccagcactatgattacccggagccggtgcgcaccaactggctgctggagctgctgcccttcctgctgacggcggtgatcctggggctgatgtggtacttcctggtgattcggccccagggaggtggcatgggaccggacaagatggccaaattcggctccgcccggacccggatgctgacggacaaggacaaaaaggtcactttcgacgacgtggccggcgccgatgaggagaaggaggagctccgggagatcgtggagttcctgaaggaccccaagaagtacctgtctctgggggcccggattcccaagggcgtgctgctggtgggccctcccggcaccggcaagaccctgctggccaaggccgtggcaggggaggccggcgtgggcttcctgtccatctccggctccgatttcgtggagctgtacgtgggcgtgggcgccagccgcgtccgggacctgttcgagcaggccaagaagaacgccccggctatcgtgtttattgacgagatcgacgctgtgggccgccagcggggcacgggcctgggcggcggccatgacgagcgggagcagaccctgaatcagctgctggtggagatggacggctttaccgctaacgaaggtgtggtggtcctggcggccaccaaccgggcggatgtgctggacccggcgttgctgcggcccggtcggttcgaccggcaggtgtacgtgggcctgcccgacatccggggccggaaggagatcctggaggtccacgccaagggcaagcccctggcggaggatgtggacctgggccagctggcccggggcactccgggtttcaccggcgcggacctggagaacctcatcaacgagggagccctgctggccgcccggaaaaatcagaagttcatcaccatgcaggatctgaaggacgcggagatcaaggtcatcgccggaccggagaagaaaagccgggtgatcccccagcacgagcgtgagctgaccgcctatcacgaggcgggccacgctgtggtgatgcacgctctgccagatcaggacccggtggcccagatcaccatcgtgccccggggccaggcgggcggcatgaccatctccctgccggaggaggaccggtcctatctctcccggcggtatatggaggatcagatcgtgggtctcttgggcggccgggtggcggagaagctgtgcctgggagacatctccaccggtgccagcaacgacatccagcgggccagccagatcgcccggaagatggtggccacctatggcatgagcgacaagatcggcaccgtagccttcgagtccggccacgacgaggtgttcatcggccgcaccatgacccagggccgcagctattccgaggcggtggccgcccagatcgaccaggaggtccagcgcctggtggcggatgcctatgaccgctgcgaacggatcctgaacgacaaccgcgacaagctggaggccgtggcgtcctatctgctggagcatgagaccatggagcgggaggcgtttctggccgtgttcggcgaacagccgttgtccctgaaaaaagaagaggtctgagaaaaggccgccgtccggagaaccggacggcggcctttttacaaaaagcggggaataaagccgccgcaaccctccaaaactgttggagtgacgggaaaatgcatcaacgcagtcactggagtttggcaaaattaccaattcgcctgtctctctatcgaggacaaatgaccgcatttttctctgcgatttttttgaaacgtccacaacagagggacaaatgaccggaatatgcggaaaaatcttgaacttttttgaaagagagcggaaaactttctgtggattattcatcttgcaaagcctggaaaaaacctgtaaaatgcctttcatacatgagggaacagcgatccttaaccattgataggaggaaaagaagcatgaagagagttcttgcactggctctggctatggtcatggctctgagtctggccgcctgcggcggcagcggcgacacatccaccggcgactccggcagcagcggggggaatgtggtccgcatcggtgtgttcgagcccgccaccggcgactccggtcccggcggcaagcaggagatgctgggtatgcagtatgccaataaggagacccccacggtggacatcggtggcaccacctacaacgtggagctggtctacgcggacaacggttccactaccgacaaggcgcccaccgccgcggcggagctggtgagcaaggatgtcagcctggtgctgggttcctacggttccagcgtggctatggccggcggtccggtgtttgacgaggcgggcctggccgccatcggcgtcacctgcaccaaccccaatatcaccgcaggcaacgactattacttccggatttgcttcctggacaacttccaggcccaggtgctggtgaatttcgcaaaagacaagttcagcgcacagaaggcctactgcctgggtgagttgggcaacgagtacgaccagggcctgatcgccttcttcgagcagaactttgacggtgaggtcatcaaggactccttccccaccaacacctccgacttcaccacctacctgaacaaggccgtggcagaggatgtggatgtgatcttctgccccgtctccatcgcctacgccacgcagatcgtgggtctggccgcctccatgggcctggatatccccctgctgggctccgacacactggacagcaacgtggtgctggaggccgcgcagggcagcaacgtacagctgtacgtgtccaccttctaccaggagggcggctctcccaagttcgatgacggcatcaaggcatggctgaacgaggactccaccgccatgaccaacaacggcggcaacgataccatcgccgctgtcactgccatg

SEQ ID NO: 4944 - DNA, 444 bp, Unknown
  gut microbiota DNA sequence
attttgtaaccaaggtagctctccagataggcttccgggtcggtggagagctccaggccctgctcccgcagtttgtcgggcagctgggacaggaggaaggacggctctgccttgggttcctccagcacatcaaagctgtctatgtatctcatgtgggggatctcgcccagcacttggtcggtgaaggtggtgagcatccaccaggcccggccttcctcatcccggagcataggcagcagcttttcacagtaggcggagatggcgaagctgttttcaccctgctcctccagccagatctgcacatcatccccggagatgtccaagccattctcagtacgcagaccgatgttctggaggggctgacggcccacaaggatgttccagtgctccagcacctccttgggggcgtgcttctggaagtaaatcagctcaaacagcttgacc

SEQ ID NO: 4945 - DNA, 146766 bp, Unknown
  gut microbiota DNA sequence
ttacagcttttcaaatgctataagaacactcgccatggtccgagtggcgggatttgaacccacggcctcttggtcccgaaccaagcgcgctaccaactgcgctacacccggatagctgcctctcttccagggcaccaaggccccgcaaagcaacgtagtttattatacggaattttttggccgttgtcaagtgtggaagttgtttcgatccctatctctcaggactgcggccccaaggccgggggcacggtatgcgtgcccccggtttgattgcctcgttggttcaatgcttttttcagtctctcttcctgcccttccggcccagaatcacgatggctgctgcgccagccagagaggccgccagcagtgccagatacagcgccagctgggcagtgtctcccgtgggaacagagtcatccggttcatcagggtgccccggttcgtccggcgtatccggcatatcaggatccgggctttcgtccgggtcaggggtcggatgcggatctggatccggcatgggatcgggacccgggtctggatccggcttggggtctggatctggatccgggtccggcggcggagtcgtgtcgtcataattgatgattagcacttccgccgtgtctccgaacgggaccatcccggggttgtgcccctcgacgcgggtcccatagccgtccacacgcgcctctgccactgtgtagccgacgccggagggcaggcccttggctgtcttgctctccccgtctttcagggtaaatgctgccacgccgtcctggaacgtcatatccccgcagatgccgttgatggacttgtcgtcaagcgtgacggtgaaggagaagtccctctgccggtcaccgctgtacacttgctttttgacggtcaggttcccctttccgttgatgacgttccatccgtccacccgggtgccgtagccatccaccggctcctcctgcacagtgtaggtgtacgcccggccactgtcgtcgtaggcgggccagctgccgaaatcataggtccagctgccgtcggcgttcggggtgacttcccgctcggcaactttggtgccgttctgcaggaggctcagcgtgatggagttcggacggtcgtccgctccatcacccacccaggtcttccgcccctggatggcaatttccgtctccttgccgcccagtgtgttggtcagagccagcgtaccgctccctgtcacagtgtacgactccaggtgttcttcctccacccagtaggtatagggattaccgctgccgtccgtatccggcagatgctcaaaggtgtatgtccagacatcggcgtttccgtcctgggcatttttcgcggacagcgtcacttcgcctgctacttcgccctgggctgccggatccgttctgcggtagagggtcagcttcagcgtctccgggcgaaggccctgcgcgtcactgtcatcccgccaggttttggagaccgggatgtccgtatagcccctgttggtgatggcagtggtgaacgccaccgtagtttccgtcggttctccatgatcgtagatcacttccatgtcctcgtccggggttccctgttcaatggcgtaataatagtatttctggttctggctgtttactttgtccagctctccgaaaatatggcgccagttattggccgcagacagctctgcggtcatgccggcgacctgctccactccatccacgccggtcttccccatcaggttcttgtccgtggtccgccagagttccattgtgatcggatgtttcttggtatccgcggtgtgccatttcttttccactgtcagggatgtcacagctttattggtgaattggaattcagggtaggtcccatccacatcggtcttgttttcctttttcgtatctcccacctggacgtagctgccgctgaccgcttcggtcacgcggtattctgtctcggagtcggagtccggcagatagctgcccggcattcgggctgggaggttctcccagacggctttccactctgcgtactcgtaatagggtttgtccagatcaggatccgtagttccatccagcgtgacggatacagccgtcagggtcttccacgtatacgccgggccctctgccggattctccagcggaaccgcatattgcaggtgcagggtgacctgggcgccctcctcgccggcaggcatccacgtcttgccggcaaagaccttggtggtctgcatgtcgttggccgctgtggtgaggaagccgtcgtcagactgcccgccataggtgtaggccgccgtgtacgcctcgttgtaggaatctccgagcaggacatagctgttcaaatcgactgctccgttcgtcatttgatatcctggctcaagctccacggcgcgataggtgtactccctttccgcattctgtttcggcaggccggaaatcgtcatccctaccggcgattcaaccgtgccctctgtatctgttccggtgagggtcactaccagatcctgcttttgaccgttttcgccggtcacctggacggcttcccatgctgccgcttcccagccgacagatagatccgtggtccgctgaatcaggaaactggtctcccaggtcttgccggcttcgtctgtatccggacgggtgccatagacgttgttccggtcgttcgtccaaatcttctgcacctgcagcgaggtcgtcgccagcttgttggtgatggtggtcgaatttccggattccgtgtaggtgtcttcaattcccgtgaaaaggccgccgctgtctgcaacagtgtatgcgaactctttaccgctggtatcgactgtaatcgtcacggctccgccttgataagcgatttccgtctccaccacgcgataggacagctccgaaatcccgctgtctttttttactacacgcggcaggttctcacaagctccactccaggaatcatagatatgccggttttccaatgtgatcgaaaaaccattgagtattccggcatccttcagtttctcgtacgcgtcttctcccaggttctcctgcgtgaaatagtccgctgccctctgccaacctccgctctttccctccttgacatacagctcaaaggtgacggacatctcgccaaggtccatgtaatcggcagtgatgggctcgccatcgctgcccacccaccgcttggtgaagggggctctggtctccagagagtttttcagctccttcatgtggatggtgtcgccgtctgcggagtcctcacccgctgtcccattgccggtgaagtaatattggtaccgctcatacaacgcttccttcagatcggagttcagctcttccttcacggtgtacacccaccgggcgccgttgggggcccacttttccagctccgtctggggctgcgcggcgggaggcgtctcttcggagggatcctgggaatcggggtctccgatctggtccggatcttccgcaggttctgtcggtgtgaccgggacgctgccggcgccgccatgttccccatccgccggatcgctgtgcaggctggcggcactgagggtctcctcctgcggggcggactggccgtccccgtctcccgcctgggagtccgggttctggtcttcttccccatctgccggaggttccggactctgtgtatccccttcgtccgtgggaggatcggcgggctggtttccctcctccgggggcatttctgtgggcggcgttgtctcctctccctggccggggcccggttcggcgggctcttccgcggagatgccgggctcttctgcatccggatcgtccgcaccccagatctgataagtccactttccggtttctgcatcctgggtccacttgacggtgtagtcctcgccctctgtcagcttctcctcgatgtgcgggtcgccctgcccctcctgggcagcggcgcggcgggtcacagtgagccggataacggggaccaatgtaccatctttcccctcttcatagggggcatccggacgcagaccgaaggcgtcgtaaaagtcctcccaggctttttggcccgtgagggtgacgaactctgtctgcacagccttccggctgttcaggaacgtggcgtcggcctcttcccgctcttcatggggcagcagaccgccgacagtatatccgtcccctgtgacgtcttgggcctccaggtcgcccgggccgcaccaggtatcgtagccgcccaggaagctcttgtcctcctccacatgatagaggtacagcgagccgttgggcgcatactgctccaggcctgtaaaggaaagaaccgtttcaacagttgtgctgtctcctcgctgctggtaagccgcctcgacctcctccgaggaccaagtggccgtccgcaccagctcctgcgcggagggctggccgttgttctggatgtagacccggtacagatggaagcgcacggcggggtaggcgatgggcaagtcatctccgcccaaaggcagttccaggatttttttcaccgacagactgccagtcgggctgtggaacacgttctccacctggaaggtgttggagatctcctgtatatcaaacagatccagcgattcctggggtccctcgccggtaccgtccaggggcagcccgttggcgccggtgatgccttcctcccggagaacatattcgtacagcttgccttcctccgtgtatttgggcagccctggctggtcttcagattccggccggacggttccggctccgtcatcgatgatatttttcccctcataaaggagccggaacgtatagttcttcaggccggaccagtcctgaacagtcagggtcgcgatgggggctccgccaaagtcaaacgcctccccgctgccctgcacccgccggtacagtgcgaaggcgacgttgggcaggtccaccgccggatagccagcgggcaggttggtccacagcttccgtccctcaatggcgaccggcttattcaggcggttgacgaaggtaccatttgcgttcagggcatatttggcgtaagaactgctggcatcctgagacactggtgggttgacgccgtccaggttcgtggtctgcgcttcgtaagccgcctccatccccgggtcagcttcgtcacgcgtgcccagacaagtttcacccgtccagtactccgcaatggcgtagtcaaagtcggaggcgtttacactggtgcgctccaccgcggagtaagtgatcttgtaaccccagtcgtcatacttgggcaagttctccagctcggcccgccagaaatactgccggtccgcagatccgttatccccggaggcggtgccgggctcctcacccgcgggatcgcctgctccctcggacggcgcctccgtctccggcgggagcaggccctcgtttgtccagcggtagctgggatagatcagttcggtttcgatcccgtcctcagcagcagaggtatgcacagtccggtaaatgtccagatagatgtccggacgactgccggagccatacatatagatgtcgtaccactgcttgtaccagacagcgtccgttacgccggtgcgtttgttggtgagggtgatcttctgctcgtcattcttgttttcaccgtcatttgccgtataggattcttcctttacagagcttgtgtatgtattccacagggcatagacctccggagaaatggtccgcagctgatccagcgtgatctcattgccgccgtccagccagacctcctccacggtatagcgcaccactgtgccgttggtgtcgtacttgggaaggttccagaagtcaagggagttggacttcgtatctgccgtgagaatcggctgaatagaggaaacccgtctttcgcttctgtcttgaatctgtacatccccgccgcccaggttcacatagccaaatccatctttctgatagattttaaattgtccttccgtatcatcgctggcggcgatcttcagcttcacggccagagtgaggccggaggtgttctccagggctgcctggagttcccccacgccgtctccgccgccgtcccgccagtccttggtgacggtcaggtccacattgcccagccggcggttggtgacggtgcagaccgtctcacccgcgatctcctcgcggtcgtatgtagcttcataggcatggtttctgccggggacagtgtcgcgggtgattccgggagcgttgatctctccctcggtcggggcgccttcggttccaaggaccgcagtcgctccgattttggtctcccggatgtagacctggtccggcgtaagttctccaatgccggcccatgcgtaccagatgggatctccgtcctcctgggattcgcccagcgtgacgaaggtaatcgcctgatctccttctttgctgtacaccgtcacttccactggctcccggtgggcggcgtcgctgtcgtccacccagttcttctggaccaggatccgatggcttcctcccgggccgttggtgacgatggtcgtatagtctccggtgctgctgtcgatggaggtttcataggtggggttcccgttctcctccaggatcaggtattcataccggcgcccctcttcgtcatactctgggaggttctggagcagggctttccaggcctcagaaaactgaatggaaatttcaccgtcgatcgcatctatgaatgcgttttccttcgtgaaatcaacattgacggtcccacctgcatccattgtaaaggtaagaaccttgcatgtttctgtcagagactgttcgccgatggtacggtacagggcgaaggtcaccggcccctcctgggcgccgcttttccacttcttttccaccgtataatctatctggttgctgacggcattggtgatctcggtggtgttgccgttctccacatcggtcacacggtactttgcatctccccggctgccgccgccggacagggtaaacgagttgttgtccagaagatttgttttattctcgccctggtaaaccgccgactccacccagcggtactccagctcccggccctggttatcgtatttgggcgcgctggcgctgacggacaggccgcccaggttctccgccgtaaattttcccgttttctccgttcccagcgtctcggtgatctccgtgtcttcccaggggtcctcactgcccaccggccgggcctggagcatcagctccacccggacatcctccagcgccgactggaaagccgctgctttccagatcttggtcgcattaaccgtcaccgtgccggagagcttgttggaaagggttcccccgttgtagaggtatgtattgttcgtctcccgtgcaaagtctgcatcctcgctggtcagttttttcagcgtaccggaatcctcgtccagcgcccagatgatgtccgtcacgccgccgtcttcccccaccgcgccgaatacctgggtgtagtcccccgcatgctcaccagtgagatactctcggaccacatagatatactcgtagccctccgagtcatacttgggcagctctgcaaactgaatgtcctgtttctcctgcccgttgagcgggaccgtcagaatgctgcccccatcatcccggacgggcgcggccgttgtgtagctctgcccggctcggtaacgccacagctggagttcacctgccgggcggtgatccggatccgccgcgtcctcccagactttggaggcctgataatcctttacgcccgtgagcgtcaggtacaggctgccgccgtcatagagcttccccacctctgtgcccacgttgggcgtgctggagttgtcgtaggagatctggaagtagtcgccctcgggcagggcacccgccgcgatgccgtcggcggcgtccagccggccgtcgccttttccgtctccctccctggtctcctctaccgagtagttgatccggctgccgtccaggttgtacttccacagaccgctgacggtgacggtgccgctggtggggttgtccgggtctccatcagggtcctcttctatcttcatctgatccttcatctctgccagcagccggcggagggagcttgctgtatagttggtgtccaccacgaagtcaaagctgttgtaaatggcttctgcgatgccttccgcgccgcccagattaccccagcggagctgaacgcggaagttgaattcgtcctccagcacatagtaccagccgtagttgtccccggcggagggatattccgacacattgccgttgttgacctctaccgggctgtagccgtcaaccccttcggacggtcccatgatccactctacacgggattctgttgaggtctccccgccgtagccatcggatgttgtggtttcgatcgcttccggcaacacgccggtcgggacggagaccgtataggtgttgttcccgttgtcggccaccgtcattttcggcatagcggacaggcccaccccggagagcgtcgagtcctccccgcctttcagctcaatccattccccgttgtcgatccggaaccacagcgacggctgatacgtattcgccccgggacgcactccgtcctcattgttgttatccacccagtagagcgtgttctcttcaaatgccccggcggcataccagcttgtcaccgtcaccaccgtatctgcgtaaatcacaggcaccagggtcagacacagtaccagtgccagcagcccgctgaccagccgccggcctcccttcttcggaaactttccctttgggagccgcccccgctcccggactctcttgcctcgatacagcataacccctcacctcattgaaaaattgttcacacacatatccagtgcgtccctatcgtccacgcccctgctgcgtcggctgggcaggactcagctgccctgctcccagcccacagtcagctgctcctcttccagcatccgctcgtgggcctgctcggccagtatctgtacactgtcccgaatgcgttcctgcgtgacctgatacagcctgcgcagacagcgggggttgctcttgtccccatccacccgggcatccctgcacagagtccggatctctccgctcacctgggtcctccgcatggggcggccgcttcgggtgacgaataccggccccgcagtgatccccacccgccggagatagactgtcaactccttccgcagacaggcaggaatcaggacgtactgcgctctgccgtcacaggcggtcagaacacgtccctcctccaccgcccggaccgtcacccggttcagctcacttacgcggatccctgtcagggcaaagaccttcaccatcagatacgtacgctcccggcccagattccgggctgtggccagcaggcgcagatactcagtccggctcaactccggctggatctccccttcggtgtccagctggccgatcagctgcagatcccgccgccccagataggccagcagcccattggcggcggacacatgggtgttggctgtaccgggcgagtagccttcccgcagcaaggcggcgcgccagagctccagtgtgtctgcagccacccgcttgtcctccggaagaaagtggtaaaacgcctccagcttggggcggtagacctggatcgtctcccgccggcggccccgggccgccaagctgtccagataccggcagacttcttcccaggtaactgtcagctccgccggcgccgcggtcctgtcctgtagtgccgtttccatcgcctcacgcattgggcattctctcctctccaaagccgctttcactgtctgaatgctttccaaatatctcctccgtatccatctctttccgatttacaacagaacaatgattctgttgtaaacctgtcatcagctggaaatacggtgccagagcacgaagagtcggttttggccgaaacggcacctttcccttttgggccgcaaaattggaatcctcaaaaaatccaaaccgcaaaaaaaggacgttgcttttgtagtttttttgttttatactaactatattccaatgtatgtagtggagagagctttgtcgatttacaacagaatcattgttttgttgttaaacgatcagccgcattttttccagaatctgttcatgggccctggcgctcactgccacataaatccgggttgtctcaatggaggaatggcccagaaggtccgccagatgcgccagatccttctcctgttcataaaagcacttggcgaacaggtgccgcagattgtgcgggaataccttttccggcatcacgccggcctcccggcagagggttttcatttcatgccagatgttgctgcggtccaggggccgcccggtgcgggtgcggaacaggggcccctcctggatatcctgcgccctggcataccgccgcaggcgttccgccagttcctgcggcagcaggacggtccggcactttcccttcagccggatctccgtccggccagcacgcagggcctccgccgtgatgaagcgcagttcgctcacccggataccggtggcgcagatcgtcagcatcacgtggtacagccgctggttcttgcgccccttggcaatagagagcagccggcggtactccgactccgtcaggtcccgctgctcctcccgaaacgcccgccgctgaaccttcagcaacttcacctcgcagtgctccgctccacagaaccgcagatacgcgttcacagcagagagcttgttgttgaccgtcagagccctgtactgctgctgcaggcgctcccggtatgccagaacacccgccttggtcaccggggcgccgcacagagccagtcgcagctgttccgcctcctgcacgtatttttccactgtggcacgggctttctcgttttccaccagaaattcccggaacgcggagatagactgtcctgtgagcgtgatttcttccatcttgactcctcccaaatccgcccgcacagacgcgggtattttttgtaagcatacccaaaatggcgtcggatatgttccgcctatggagatgctttccaaaaaagttccgaattgcgcaaaaaggcagcccgcggagaatccctccgcgggctgccttacagtatgctgttgttttttatcggcctccccagacccggtagagctcgcttccccgttcccgcaggcgctcgttcagccaggagcgcagggatgccatgccctcctctgtccaggggaaggtctccgtctcaatgtgctgggccttttcaaagcagatgttctcatagacccaggcctggacggtgccatcgttcacctttcccgtccgctggaagcggtagcggaaggtgccgagggagccgggaaaaatctccgacttcttcagaaagttcagggtcaaaaatgcgaatggatcttccatcgggcagtttctctcctccatcaggccgcctccgtctcccggcggcagaccttgatccccgcgatggtcagcgcgaacacgaaccagaaaatgcacatcacccggggatagttccacaggtaatccgccagaccgcacaccatggcgccgcacagagccgccgctccggcacaggtgatggtgcgggcggcagagggggcgcagtgccggaccgtgcgggccgcctttttgatgttccacagcatggagcccacaaagcccagaaaccccagcagtcccgcctcgatccatacctgcaggtagaagttgtgggcgtgaacgaagggcgcttctgcgtggtagaggttgaagtcgctgatgtagtcctgcacggcggcggtgcccagacccgcgccggagacgggagacgtccggatgacctccagtgccgcctgatacaaggggatgcggctggcagtggaggtatccgccggattgaagatcgtcaggacccggtgccagatggtgtccggcaggaaagggaccatcaccacgcacagcaccgcgaaggcggggatcagcttgggcttccacaaaaacaccagcaccaccatggcacaggccatgccaacccagctggcccgggagtaggtcatgcccagagccagcacacccacggcaaacacgccgcaggccgtcacgcgggagatgccccgcttggagcagaggatcagcgccagtaccaggggcagcaggaggatcagcacctctgcaaaggtgttggggttgtcgaaataggactccacccggccgggcataccggcgttgacctccaggtccacataggactcgttgacctccacgccctggatccgttgatacacaccgtacagcgaggacaccagcacacagaccccaccgccggcggccagccgcttcaaatcctctgtgccccggacagcactgaccgtcaccagcacgcacatcgctgcggagatatggtagagcaggaagcggaaggaggcggagggctcataggagaacagcaccgccaggaacatggctccgaacagcaccaccggatagaacccgatgtgcttcacgtccagccggaagtcccgccgggacatggccccggcatagaacagcaccagcagggcagcaaagcccagcatactatatgcgttgttccaatgagagaagggaatcacccacaatagcatgatgagccaggattgggcgacggcggtctcatgtcccatctcaaaggccagacgggagaaaacgctgtcatcaaacgtagcccgcaaggcaaggtacagcttgtggagcagccaggcaggcaggttgatgaggcccgtcagcagtcggcagaggatgctctcctcccaggcccgggccgcgacgccctcccgacacaggacccggagaacacggctctcgtcgatctggcggttacaccaggcgcccatgcgcaccaggcagcggtggacggcgctgtcatagtagacggtgcacagcaccgcccagaggtgatacagatagctttcgcggagaatgctcatgcagggaaacctcgtttcttcagatgcggtttttgatccggtacagctgggagagcagccagaagcggcccccccgcaccagctttgctgccagctgcttgttgcggctcatgccggcgggcgacagcgtccggatggcgtgggccatatccggccgcgcgcacaaggcctggatggtctcctgccgctgccggagggtcttgggattgcccggggcgtactcgttgccgatggcgatcaacagcccggcccagttggagttctcccgccactgggggcggccgggcgtcaggccgtaccgggcggccaagtcctccttccgctccatgaagcggccgaagacctgctggaagtccttcatatacttgtgggtggcggaggccggattctggagatagcggtacaggggcgtctccgtcaccgccaggcgccgggcgttgcagaaatactccatcaggaacagctcgtcttccagataggcgccctcatagcggagatggagtctgtcaaaaatctctgcggagaacagatagcgccagatgaatccattgaacaccggctgggccagccggtcccccagcaggggattgacgattttctcccggatagcgtcggcgtcgtagatcccggcgggcagcaccggctccggcgtctcgctgccatcaggccacaggttcaggtgcgcacaggcggcggtatccgccccggcccgctcccgcaggttccacagcgtctccaggcactggggctcgtactgatcgtcggagtccagaaaggcgatataggtcccccggacatggtcaaggcccacattccgggtctcgctgacgccgctgttgcgctccttgtggaacacccggatgcggtcatcctcccgggccagctcatcgcagagagccggggagccgtcggtgcagccgtcatccaccagcagcagctcccagtcggaaaaggtctgccgccgtacgctctccacgcagtctctgagaaatttctccgcctgatagacaggcacaatgacggaaatgctgggcatagacagcctccttgcgccctccggcgcctctcttcagtctgcggcgcggaaactccggcgccctccccccagaatctggggctcttacacggagctattgtacccgatttccccgggaaggtcaacgtcttttcccggaaaagccgggcatactaggagcgaggtgatccaatatgaacgatatcgagctgctccaatacgtccatgagacggcggagatgggcattgagggactgaacagcctggacgggcaggtccgggatgacagcctgcggcgggttctgagccagcagggcgccgagtaccgccagatcgcggatcaggcggagcgcctgctccggtctctgggagaggagcccagggacccaggccttctggccaaggtgtccgcagaggtcatgtccactttcaaaacgctggcagacccctctgcatccaacatcgcggagatggtcattcagggaaacaccatgggggccaccaaaagtacccggcatctgggggactacgccggtggaaaccgcgagatccgaaatctcgcggagcggctgctgcacaccgaggaagccaacgccgcccagatgaagcagttcctgtaacacacccggcgcaaagcagaggaggagcctcctacgggaggctcctcctctgttcaaaggaccggcagcagatcttccccattcagaaaacgctcctccgcctcctggatagggatctgccgctgattcagtctgcgcaccagctgctctacctctgcctgttcccttcccggcagcaggaccaccagatgtcgctccggttcccaggattcgccgctgaatccgaatcgccgggggtgccgggtctccagaacctgatagcgcacctgcggccgcaccgccttgcgccggcgccagaccgacaaggccagcacccggaccagatccttcggcgtgggcttttcccgcagcacgcgttgaaagagcttctgcagctccgcccggtctccgcagtcccagatgtcctcctccgcccgggagagggcctttgccagggtgtccttttccttttcactgtatctctgcgcctccggatacagcgtctccatggagaaggtgcccggcatacgggggatggcagccttgaccaggcagcacaggtcgtaatagcagtcccggctcagtttcccactgattttttccactgtccgcaggatatcttcatccatccgaaaccgtctcctctcctcttcaattcatacatagcatatcaaaaatcgcaggtttttgaaatagattcgacacattcggactcttttagacaaattacggcaccccggacttgacaatccggaggaaatgtgctcttctacccgtatcagagacagggaggcgcaggcatggatattcgcagaatcgagtcgggcaagcgggactttctccccctcctgctgctgggagacgaacaggaggacatgatcgaccgctatctggaccgcggaacgctgttggcgctgtacgatggcggacttcgcgccgtatgcgtggtgaccaaggaggcgccgggcgtgttcgagatcaaaaatctggccgtggagccggcctttcagcgccagggctacggccgggccatggttcggcatgtggccggcgcctgccggaccgccggagggacatgcctcctggtgggcaccggggacagtgccctcaccctccccttctaccgggcctgcgggttccgggaaagccaccgggtccccaatttcttccttcaattttacgaccaccccatatacgaaggggggcggcttttgtcggacatggtatatttgtccatggagctttgagcggaaaaggcggcgctgctgaaaatcagcggcgccgcctgtatcataccgtttgattcagttttggaaaaggcttcacgcctctgcggcggccttcagagcctccgtgcggtcagttttctcccaggtcacgcccaggtcctcccggcccatgtggccgtaggccgccagcttgcggtagatgggcttgcgcaggtccaggtcccggatgatggccgtgggccgcaggtcaaacaccttgcggacggcagtctccagcctgtcgtctcccaccgtaccggtgccgaaagtgtccaccagcacactcaccggctgggccacgccgatggcgtaggccaactgcacctggcagcggcgggcaaggcccgcggccacgatgttcttggccacgtaccgggcggcgtaggccgcggagcggtccaccttggtgggatccttgccggaaaagcagccgccgccgtggggggcgctgccgccgtaggtatccacgatgatcttccggccggtgaggccggaatccgccgccgggccgcccttgacgaaacggccggtggggttcacgtaatactttgtgttctcgtccagcatgtccgcggggatcacggccttggccacctgctcgatcatgtccttccggatctgctccagggagacatcggggtcgtgctgggtggagatgaccactgtatccacccggacagggcggttgtgctcgtcatactccacggtgacctgactcttgccgtcgggccgcatatagggcacctggccgctcttgcggacctccgccatgcgcttgcacagcttctgtgccagggacaggggcaggggcatcagttccggcgtctcgtcgcaggcgtagccgaacatcatgccctggtcaccggcgccgttgctcagctcgctgtcggtgccctccttgttctccaaggatttgtccacgcccatggcgatgtcggcggactgctcgtcgatagaggtaaccacggcacaggtgtcgcagtcaaagccgtacttgccccggtcatagccaatgtcccggaccacctcccgggcgatgtgggcgatgtccacatagcagctggtggtgatctcgcccatcacgtggatcaatccggtgcaggccgtggtctcgcaggccacgcggccgttggggtcctgctccagaatggcgtccaggacggcgtcggagatctggtcgcagaccttgtcggggtggccctccgttacggactcggaggtgaagagatagtgtcttgccatagtacaggttcctttctgagcactgacctcatcaaggggcgaaaaaaatgtgcgtttcgacggcgaaacgcacaaacggatttggttgcttgctcctcatctgtcgatcaccgccggatttggcaccttgtcataagcaggttgccgtgggttcatcgggccgttccctccgccactcttgataagggtaataaaattgtccctattatcttatcaggtttttcccgtttgtcaatacggtttttccggttttgcggagaaatccgtcgccccgtcggaaaactgcgcagatgttccgcctgttcaaaaattatacatgacttttttcctctgatcgggtataatagatatcgcttgtatatttgaaatgttctggagggcttcaccgtgagaaaactctgcgacagcgtggaccgcttttgcctgcagcatccccgcttcggcattccgaacctgatgaagtttctggtggggatcatggccgtggtatttgtgctggacctgttctccaatggctatgccagctatatgctgtacttcaacgcagagctcgttctgcagggagagctgtggcggctggtcacctggatgttcctgcccaccaacggctctctgttctggatcttcatcagcctgtccttctactacttcatcggcacctccattgaggagtactggggcaccgccaagttcaccctgttctatctggcctgcgccgtgctgatggtggtattcggcatgatcagcatactgtggtccccgcttcccgttgtcagcagcggcaatctcaaccagatcctgttcctggcctttgctaccctgtaccctgacgcgctgatccgcgtctatctgatcctgccagtcaaggccaagtggctggcggcgttgtatgtgctgctgaccctgtatgacctgctccgttccggtatgtgggcggcgctgttcacactgccccagctgctggccgtctggctggtgtatctggtgttcttctgggacaggatcggggaccttctgcgggagttcggctttgccgtccgccatcagaactcccaccagaccatccagttcaagtccgcagtgaagcagcagcggaagaaggcccagcagcagggctaccgccacaagtgcgaggtctgcggccgcacagatacggactttccggacctgcagttccgctattgctccaagtgcgcgggctaccactgcttctgtgaggaccacatcttcaaccacacacattttacgcagtgagcgtttccgcggtctccgcccatcggggcggggaccgcttttttgacacggcccctgagatttctcttccttccggcccacaaatgcggtatactgaaaaaaacgacaccagaggaaaagggagacgatacccatggaacgacaactgggaaagcccctgcatattcaggcggcggaggcctttgaatcgcccgcgtttcttcagaagctgggaatggcccgcgccgacgcggagcgtatcttcggcggcgccgactggcaccagctgctccgggatctagtgcccatccggggccggatctcctgcgccgacgccctggcggccttccgccccctgctggaccaggtggcgccggatcccgctgagggatggctgtcctacgcctaccaggtggcccgggcgctgctgtatccggcgtcggaccccggacatacctccgcccagtgggatggagcgctgtgctttctgcagctgctccaggtcctgtttgacgcggagcggacctgcctgccctttgacttctggctggactttgaattctgcacggaggaggaactctcccacagcggtgtggcggaggagtaccgccgcttctgctaccggttccgggaggaatacatctatgagatgctccgcctgagccgggaggtcacatccttccgcaccctggagcacatcgccggcgtccactatgtgtccatgcgggtggcccgggccttctgcgcctccggcggactcatcgacctggggctgatctccggagccgccctgggccacgacctgggcaaattcggctgcaagcccggggaacgggtgccctacctgcactattactacaccgaccagtggttcacccgccggggactaacggccctgggccacatcgcggccaaccactccgtctgggatttggagatcgagaacctgtcctcggagtccctgacgctggtgtacgcggacttccgggtgaagcagacctatggggaagaccgccgggagatcccctgcctctactccctgcaggaggcctttgacgtcatcctcagcaagctggacaatgtggacgatgccaagcgcctgcgctaccgctatgtctacgccaagctgcgggactttgaggactatctcatctcctttggggtggacaccaccctccgcaccgccggcggccccgcccgcccggccaaaaatgctgccctgctgaacacggacgaggtggtgaccgctctgcggcgtaccgccgtggaccacaatatccgcctgatgcaccggctgggccatgagcagctcttcggcaacactctggaggccgcccggggcgaaaagaaccccgcccggctccaggcatacgtctccatttttgaggagtatttcacctactggaacgcctctcagaagcagcagaccctggactttctgtatgagctgctgctgatcccggacggagacatccgccgccgggccgccgccctcatcggacgcatcctggccgccttccgcctgggctatcagaaggagcccccggccgacgccccgccggacccggaggaagacctgcccttccagctgtgggcggagtacctggaaaagctcatcgacccggaccggcggctgacgccccggcagatcagcatgatccgctatcaggccaagactgcggcggacgcgctgctgatgaactgctccgacgccgacgccccccgctttgccggggagctgttccgccactaccgccgcccggaactggtggacgccgatgcggcctttgccctgctggacacggtgctgagcctgccgctggaccgggtatccgccgaggatctgcacgtgctgaccggcttttccgtctggtggctggaacggggcggcctgccccagaaggccgccgccctgcggctgttccaccacctgctgacggccctggaccccaatggccgggacgccgcggccatcactgccgccgtggaggcagcggattgccagggaagcacgccgctgctgtttctccaggcccgcctgggagagcggctgggcctggatgtctccatccagcggtccctgttggaccggcaggacgttgtgagcaatgtgtttctggacaacctgaagactgcgacccactgggttctgaaggccgtgggcgtggagtacctgctgggtcaggtggaacagggagaccgcgccaacgtgctccacatcgccacccacttctccaacctgatgaaggtcagtgagaatatcgtggtccgccggctggcgggcgcttccctgctggccattgctccggccctgacgccggaccgccggaacgaggtggccgtggagctttccaaggtgctggagaccgggcagacggagatctcccagtacatcccccagtacctgggccagtttgccctgtggctgacgcccagggaactggacgagatcgtggatcagatgcagatcctcctctcctccgccaacaccgtggtggtggccgccgccctggccactgtgggcgccatgctggagcattatgccatatacgcccagcggttccacgagtcccgggaggtactggaacgccgctggcggcggctggcaggcctgctgttgaagggcctggcctcttatcgtcagagcgtgcggcaggaggcgctgcagatcctgggcgagcggctcttcgcctcacagaccctctcctacgaggggaaggctgccctcttcaccctgatggccaagaagatcctcttcctgctgggagagcagccggaacaggagctgagcttcttctacaccgccgccgccctctcccacatctaccgcttcatcgtctcctatcagattgaaagcggagacttcccattctacatgccgggaagggccgccttctttcccggcaccttcgaccccttctccctgagccataagggcatcgtccaggagatccgggacctggggatggaggtgtatctggccatcgacgagttctcctggtccaagaaggcgcagccctccctggtgcggaggcagatcgtcagcatgtccgtggcggacgagttcgacgtgtacctcttcccccacgacatcccagtgaacctggccacgccggaggacctggaccggctgcgggaggtcttttccggccgggagctgtacctggcggtgggctcggacgtggtagccaacgcctcctcctacaaggcggcaccggtgccggggtccgtccactccatgaaccacatcgtcttccgccgctccagcgacgcggagggacgggagatcgacgcagatctgggctgcatctccggccgcatcatccagctgcagctgcccacccatctggaagacatcagctccacccgcatccgggagaacatcgacctgggacgggacatctccaccctcattgacccggtggtacaggacttcatctaccgcaacagcctctatctccgggagccccagtacaagcggatcctccgggcgggggatctggagttctcccacatctcccagccggaccggcacctgtgggaggagttgacggaggtaccgcttcaggggcgggagcagccgccggagatcgaccccagggacggcctctgcatcctgcgggacgcgggatcccgcccccgggtgctgggttttctgaccctgcggaccgtgaactccggcgggctgtatgaggccctgggggacacggagctggcggactatgtccgcaagcacacggcggggcgggttcagctgctcaccggactttacaccgcccgcggctccagcggcagctatgatgtgggccagctgctgatgacagaggccctctcccgctccctgggagcggactgcagctatgccgtgtggcacgccactgcgtcggaggagacgctggacctgctggagaggcaaggctttgtcccggcggagctgcccagcgcaaagcccctgctgctggtggatatgcgctctccctccgtactgctgcagaacatccccaccacgctgaaggagcctttctcctccgaccgtaccgtgctggcggcggtccgcgccgcccactgccggatgcagcgggctctcaccggcctgtatccgggttctctgatcctgtccctgaacgcggaggtcatttaccaccgtctggtgcggaagatcgtggacctgaacggcgtcccggcggagcccacagtgccccgggtactgggtcccaagatgtgcgtacccttcggcaagatcctgcggggcaatgccatccccaacaccgtcaccaagaccatccacaccgacaaggtctttgccagggacctcacctccttcgacatcgagaatttccccggctacgcgccgctggagagccagatccgcaccatccactccttccgccggccggtgatcctggtggacgacctgctccactccggcaaccggatccgggcgctggatcccctcttccggcaggagggtgtggtcatcgaccgggtgctggtgggcctgctgtccggccgcggacgggatctgatggccgccaagggccgcagtgtggacagcgtctatttcattccgaatatgcgttcttggtttgtggagtccaccatgtaccccttcatcggcggcgacactgtggggcatgaggagccctccgtccccggcctgaccccagcggtgaacctgatcctgccctacgccttcccccgcttctaccgggagtgcggacgggaggcggtgttccgtttctcctgtgcctgcctggagaacgcccgggacatcctgctggccctggagaccaccttccgggagcggtacgcccgcaacctcaccctctcccgcctcagtgaggcggtgatcctgcccctctccccggacaagggcagctgtatgcactatgaccccagtcttcctgcctccgtatttctgcagaacgacctggagatgctgttgcggatgcggaacgtcctccaatcctgaccgcgggcctggcgcgccatccaggcgaaaggagcccttatgtattactaccgccacggggaggtcatcttcgcctctctgctgccggacctccccctggagccggcgaagcgtccctccgcagggacgcccagcctcttcctcatcgaccgggacccgattcgcagccggtcctccttctgcgtctcagacccccggcagctcactgcggagacggaggatgtgacctggctagacccctcccggatgggcgttccggtcccctccctgcccaaacgcctccagcacaccatcgacgcccggctgctgcgggcggttaacatccgccacccccgctgggctgactttaccaaggcgtccgccatgcatctgccaagccgcctgcgggtgaatctgctggcagtaggggatgtgggcagcacccttttgacggcgctgaagctcctggggggcgactgtattgagagcatcggtatctgcgacctgaatcagaagactgtggcccgctgggtcacggagatggagcaggtatcctggccctgggactacgacgcccttccggcagtggagccggtagcggccggggacttgttccgctgtgatgtgttcctcttcgccgccactcgcggcgttcctccagtgggaggcggtgtccgggacgtgcggatggcccagttcggcgccaaccggccgctggtggaggactacgcccagcaggcccggcaggcgggattccggggactctttattgtactgtccgacccggtggatcccctgtgcaaggcggcgtatctggcctccaaccaggggcccgacggccagtgggacgggcaggggcttcgggcggaacagatccagggcttcggactgggggtcatgaacgcccgggcggcctattttgccaaacaggatccccggttccgcagcttcctgctggatggccgcagctatggccctcacggtcaggggctggtgatcgccaactccctctcccattatgatgacggcctctcccgggagctgacggagctggtggccaccgccaatctgcggatccgggagctgggcttcaagccctatgtggctcctgccatttcctccggcgccatgcagctgctgctgacgctccgccggagctggcattgcagctcggtggctctgggggggatctggttcggcgtccgcaaccgtttaaccgccgccggtctggaaatcgagactgcctctttgcccacaccgctgttcgagcggctgcgggaaacccagacgcttctgcgggagatcatttagcgggtggctgccgccgcgtttcatcataccggccgctgcatgccgctttgccccgcgcaccgggcgggggctcggccggaatgcagccggacgcaggaaggagatgatcggcatatctgaagaactgacggtgatccgccccggcggggcgctctccccccggtgcgccggagtgctggaggcggccctggcggggcggcaggcagaggtgctatcccgcctggagggtccgctgacgggacggcggctcctgtttgtcgtctccctggatgagggcggcgtgaaccgcgggttctatgacctgctggcccatctccgcacccatccaaactgcctggaccgctgcgtggggagcgtgctggtggacgcccccggcgatctgtacaccaaggcagcgggccgggacctggtgctggccgccaaccttgcgggctgcgcctttgtgggtcgccctctggtggaaggcactggcgatctgcggaacttcacggtccaggcccgaaacgctggctgttctttggaagcggcctaccatctggcgacggcggatctggtggagcgggtgctggccttctcccgcccccggctggagcggccgaagctgctggccctccacgcctccagccgggccacctccaacaccctggccctgtgggggctggtgcggacccggctggaggaacgctgtgacatcacggagatctgcctgcggaacggcacgctggaggactgtgccggctgcccctacaccacctgcctccacttcggagaacagggcgggtgcttctatggcggcgtcatggtccaggaggtctaccccgccatccgggaggcggacgcgctggtgctgctgtgccccaattacaacgacgctctgtccgccaacctgacggcagccatcaaccggctgacggccctgtaccgcaccacctcctttgcggacaaggcggtgttcgccatcgtggtgtccggctactccggcggggacatcgtggcctgtcaggcggcgggagccatgaacatgaacaagggcttctggctgccggcgaacttctgcctgctggagaccgccaacgacaagggcgaggccctggccctgccggggattcaggaccgggcggatcggttcgcggagaatatgttatgtcagcttgcatactagaagaaggcacgcctttcggcgtgccgcttttcttgctatgtgtttggggtagtatcgaactctatcaccacgtttcctttggcgtcataggcaagaataatcggatatccgtacgcccgttccggatttcttttccgcggcaggacctccataatccaaaaaaacgtgtggtctccctgcttgataaacgcctcccgttccacagacaggcagtaaaactctggggtcgcctggtcaaaaggctccgccctaatttgcagttctacgagttcaattgtcggatcgtcgattcggccgaaatagcagtttaccatcctgtcatcatagacagcatcgtattggcccacatacaacggtgcatcgccggtacagtctactgcggaaccccgttccgtctcccatcccaatagtcctaagtgcgtatctgtcattaagagcgcattttcattttccatcagatataggaggccagtcgctctcaactccggttcccagcgccgttccacaaggtgggtccgacctatgccctgcaagtccgccgacctatgagcggtctggatcggcagcagcaagcatatccccagcaggtggttcaccatcaaaagaaatgctagtgccaggagtgcccagcgcagggccagacacttccgcgtgtacattctgctctttttcatggtgccatcccctccggcaggggaatctggatactgccggattccccatatatgtcataccgcagggtcacataggtgtcctctggttctatggctacgcatccgttccctgcgttccaccaatcaaatggccctgcaatcaaagcctcacctttctcgccgctctggctctccaaaaccatctccttgcggccaaccacgcccataaaccgccggtcgtaggaatcaaaattgacaaaggccatgagatgtccccatgggatgctgcggtaggtgcatactcgtactatccgcaccacatcatctccaactgtgaactccatcttgggatagacagcagcaatgatcccgccagatgggccagcatggtgtctgagatttgggaccctgcgctctgtaatacctgtccaaaccccaagtgtcccctccccagaaaaaaccagtactgaggccaagatccagacggccagcaaaatggccccccatttcgccaccagccagcggaaggggtattgtttgttcagctcccgtcccacctcatctggctctcccatggcggcgatggcccgctcttctgccagctcctcgtcataccccagctcccgcagggcctccatgtggtcctcgatgtggccgtccagctccgaccgaatggcctcccgctccttctccgtcacacggcgcagggacgaaagcacccggtccgtataatcccgcctgtccatatcatgccgggtccagccccggacaggcccggagcaccgcattcaccgcgccggagtaggtctgccaggcggcagcctcctcccgcagcaccgccgccccccggcgggtaaggcggtagtatttccgcatccggccggtgggggcctcctgctgatacgcctccaccgccccgtcccgctccaggccgtggagcaccgggtacagcgtcccctccttcatctcaaaggtgtggtcggatctgcgggccagctccacgatcatctggtaaccgtacatatcctcccccgccagcagggacagcaccagcagctgggcgtggtccatggtctgcttttttgccatcgggcacctcctgtccaggcaacatacctagaattactatgcctttagtatacatagtaattctaggtatgtcaattacaaaaaacgcgcgcctgcccggcgcgcgcttttttcctcaattcttcccgatccccagcagatcccggccatggctgttcaaatgcggcgccagctgctcgtaggacagccggaactcctgcggccccatggcgtaacaggcaatctcatagggggagaaggccactgtcatcccctcctcattgaaggagaccgcgtagctgctccagtttgcggcaatgtcctgatagtcctcccagtagccggcctccacggcggcttccggcgtcatgtcgatctggcggatgatctcgtcccggaccgcgtccagaaatatctgcccgtccgctgccagaatctcaggcgcgaagaactggcccgtcatcaggtcgaagttccaggccagcagtaccgtgttggggtgggccccgccggtatagctgtaatactccgcctggatgcacaccatctgctccgtctgatagacagaacagtccagctccagcgtgtagggtgtccaattcccaccggactccgtccgaaaggccagctcctcctctgcccaggccgtcacctcgtcaaagccatccgccccggcccagtcgcggaaccggctgttgaaggcctccgccctctccagggccgccgtctccgccggggaggccgcctccgtcagcacagtgccgtccggcagggtcacggtcatctccggaagctcataggagcgcacagccaaagtcgtgccgtccgccgccgcggcgctgtcctccagcgtcttcagaaccaccgtataggtcaagggctcggatgcagcctgagtgaaggtggccgcgcccgtcatcgtgccgctgtccggctgcttctgttccgggacggcaatctcctgcgatgcagccgtgggctcctccgtctccggaacgggggctgcgcaggctgtcagcatacacagcagcaaaagcagggcgatcatccgtttcataggggttgctcctttcctcagcagggcgcaggccctcctaagatcacgggaccttccctccactccgtgccgccggcggcggagaggcggggatacgccagggtatacaggtccgtggcgcggacctccagttcaaacaggcgccgggcctccgggcccaaccgccggacctgcgccggcctggtcagcaccggcacggctgccgcctcccgcatccgggagagcagtcggcaaccggtcccattggccgccagcacccgcagatagggcacccgctccggcatatcgccgggcgtcagtcccaggtaggaccacagcaccatccgccgcaggcgggccatggcgtaacgcttcgtcttggctgcggccagcagttcgggcagcgaggcggcagcgcgggaggcgtcgtacagtcgattccaaatgccctcccgcccctggtccagggcggcaaagtccgccgccgtcatggaccgcagccgggccagaatggcccggtgactgttctcccagaacaccggggcccggccggcggcctcttccagctcataagcgcgggccatggccggaggcagcagggacagggcctcctcccgtttcccctgccgcagcagcgcccggaggccggaggccgaggggtgggtgtccggcgccagggcgccgtcgtgggcgctgccctccctccggatggtcaccggccggaggggggcgttctgccccagcagggccttgcagtactcgatgcccaaaatgttgttgggagactccagcagggcggcgtcctcctccggcagcaggccggtcagcgcccgctgccgggcagcggcaaagctcaccgctccaggcagcacctctcggagccggtctcggaaggacggtgccagcagcgcggcggccacccgctccagggcggagacatcgccgcactcactgccgaacagcaggtgctccacaaccccggtggccgccagcgcctggacgcctccggcggcaaatccttccgccgaggacaccgcccagggcaggggcagctccagcaccaggtccgcgccgctctccacggcggccctggcccgggcgtgtttgcgcagcagggcgaagtccccccgctgcacgaagttcccgctcatcacgcagaccatggccgtgtccggtcccagcgccgcccggcctgcctccagaagccgcaggtgcccgctgtggagcggattgtattctacgattatacctgcggcccccatggatttctccccttccaaatgacaaaaaagttacagtccggtgtcagtctcgtcaattttttatcaatgccgcccgcctcggactttttttcgatcataccatactttccggaaaacgtccagccgggccgattccggactgctctgcggcggacaggtgccgctgcgccggaacttccccggcaaaaaagcgccggttcgttcaaaattccggttgtaaccggggaaatctctggtataatgagaagtgcgccgggacccgccccgccggggtacgggttccctttcagccaggcatctgcctgcaattcatacgatgtggggatgtccacgggcatttccaaaaaagaggagacggtaaacatgaacattctggttatcaacgctggcagctcttccttgaagtatcagctgctgaatcccgagaccggcgccctgctggccaagggcctgtgcgaacggatcggcatcgacggcaagttcacctacaagccccaggtggagggcaagcaggtgctggacgccgtcgatgtggccatgcccacccactccgaggccatccaggccgtgctgaacgctctggtggacaaggacaacggcgtcatcggctccatgcaggagatcgatgcggtgggccaccgggtggtccatggcggcgaggcctttgccggctctgtgctcatcaccgatgaggtcatgaaggccctggaggagtgcatccccctggcccccctccacaaccccgccaacatcaccggcatcaacgcctgcaccgccgtcatgggcaaggacgtgccccaggtggccgtgttcgacaccgccttccaccagacgatgcccgccaaggcctatatgtacgccctgccctatgaatactatgagaaggacaaggttcgccgctacggcttccacggcacctcccacaagtatgtctccggccgggctgccgccatgctgggcaagaagcccgaggagctgaagctgatctcctgccacctgggcaacggctcctccatcgccgctgtggacggcggcaagagcgtggacacctccatgggcttcactcccctggccggcctgcccatgggcacccgctccggcgacctggacgccggcatcctgcagtacctgatgaacaagtacggcatgaacatcgacgagatgctgaacatcctcaacaagaagtccggcgtagagggtctgtccggcgtcagctccgacttccgtgacctggagaaggcagctgaagagggcaacgcacgggcccagctggcggaggagaagttcgcctacgaggtgaagaagtacgtgggcgcttacgccgccgccatgggcggggtggacgccattatcttcaccgccggcgtgggcgagaacgacaagggcatccgcgccatggtgtgcgacggcctggagtatatgggcgtgaagctggatcccgccgccaacgacgtccgcggcaaggagaccgtcatctccgccgccgactccaaggtgaaggtcctgctgatccccaccaatgaagagctgatgatcgccaccgacacggccgccatcgtcaagggcaactaaattccgcatctccgcatattcagagagggcaggccgcaggcctgccctctgttcttttgcaaacatcccgtttcggaagcagggatcctgggaaagcgcgaggggagcagcgtccgccccgaatgggcgcaaatgccccgcaaagccttgcccccggcacagcggtatgctatactcaaaacacacccagcggaaatcttcgaaacgaggtgatcatgtatgcgggatctgcgggagtcctgccggatcgcggtggtccaggccgccccagtgatgtttgacaaagccgcctgcaccgtgaaggcggtggagctgatccgggccgcggctgcggagcgggcggagctgatcgtgttcccggagctgttcatccccggctatccctacggcatgactttcggcttcaccgtgggcagccggaccgccccgggccggaaggactgggggctgtactacgacaactccatcctggtgcctgggccggagacagagatcctgggccgggccgcccgggaggctcgggcctacgtgagtatcggcgtgtccgagcgggacgccgtcaacgccacgctgtacaataccaacctgatcttttccccggcgggcgaactgctcaccgtccaccggaagctgaagcccaccggcgcggagcgggtggtgtggggtgacgcggaccggcattacttcccggtggcgcagacgccctggggtcccatggccagcctgatctgctgggagagctatatgcccctggcccgggtcgccctgtacgagaaggggatcaccctgtacctctctcccaacaccaacgacaacgaggagtggcaggccaccatccgtcacattgccatcgaggggcactgctttttcgtcaactgcgacatggtcttcactcgggacatgtaccccgccgggctccactgcccggaggagatcggccgcctgccggatatcgtctgccggggcggcagctgcgtggtggatccctacggccactatgtgacccagcccgtctgggaccgggaggccatcatctgtgcggatctggacctgacccaggtgccccggagccggatggaattcgacggctgcggccactacgcccggccggacgtgctgaagctgaccgtggacgaccggtgacagaaatgccgaaggaggaagccccgctgtgaaacacatcaagcccggccgggggccgtcagccatgggagccctcggctccgtcatcgctgtggtcttcggcatcttctggaccgtatccgccgcctccatgggggcgcccatctccttctccatcttcggcgtgctgttcgttatcgtgggcatcgtccaggccgtctacaatttcaagaacgccgcgggcaaaaaacggtactccgccttcgacatcgtggacggcgaggaggagccggacccgctgaatcagcgcttcggcggccagcccccggaggccgtggacacgtccggaccggaggggcccctgcgctactgcccctactgcggcgccaagctgggggattcctatacattctgcggccactgcggcaagcggctgcctgacgtccaagaggaggatcatccatgaaaatcgccctgcaattcgccatgccgtcggagctccatgccctgccgggcgcccgggagctggcgccgctggagaccgtctccggcgttcccatatttgagattgccccggacattctggcctgtgccggcggcgtcagcaaggtgaacgctgccatggccgcggagctgctgtgcctgcggtacggcgtggatctgattctcaacgccggcgtggccgggtgcttcacggatctgcccaccggcacgctggtggtagcgtcggaattcgtccagcacgatgtggacaccaccgctgtgggggaccccatcggcctggtctccacggtgaatcaggtggccttccccacctggcagccggagcgctgtgcggagctgcttgcttccctgggctatcccgccgtcaccggccgggtatccaccggggattggtttgctgtgaaggggcagcgggcggagtggatccggggtaccttctcccccttgctgacggagatggagggcggtgccatcgcccaggtatgcctgcggaacggtgtccggttcgtatcggtgaagtccgtctcagaccacctgttctccgacagccaggcggaggagtacttcgacttcggccaggccctggaggccctgggccgggcggtgctgcccctggccaaggcacttcaaaaagctggcagatagaaaatggagcgcccggcggggatgatccccgccgggcgctcgtatcccgtcagctatgttccgctgggccgtccggctctacggtaaatacttcttcaatgggcaccccgaacaccttggcgatgttccaggccagcaccagagaggggttgtaccgccccttttccaggtttccgatggtctcccgccggacccccaccagctttgccagctcctcctgcttcaggcccagacgggcccggtgctccttcatccggttgcggatcacggctccagcccccagctctcccggaagccgtaccaggcggcggtcagggcgtagaccaccacagaggcagcccagccaaccgtgcagccggtaaggagtgcccgctggggggtaaaaccgcccagcgtcagggtccccagcacagcggccgccatcatcagcatcccgaccacaaacgcccgggaggcggaccgggccagctgcgcttccagcatctcgtcagacttcaaaaagaagtactggaagtccaccgcaaaggcgaagaagcccaggaatccccgcgcttccgtaaacacgcctgcgaaccccagcagggagagaaaacccagcattccatacaatatctgctttttcataagtggcctccctaatcagcgttccaaaaagcggtatatttcgctctttatgaggtgaatatatcatataccacttacgctgtcaagtatgaggctagcatgagcagtctccgcgcgtcaagcgtcaaatccccctgagcttgctttcccgcaagggcacgcaaaactcacagatatgcgctgagaccttcggatgcgcatatcgttctaggatgggtctcgtgccgtccacaggcagccgtgctgcgcgttggggaaggtctccccagaaatctgacacgccctcttctgtatgggggacttcaaatactgcccagcggccgccggcaacggtgcggaccggcaggccgcaggggtcttctcggccggtgaggatcatgcccacgtcatacctctgccggtcctccgggatctgcgccggatcgtccagagcgatgcccaggatcgttgtatcctcctgaagcagcgcatgttctctcaggtatcgtttgaactgctccatcagctgccggttgccttcgccatacccgccggtccggcgcatataggcgatctgcatgtctcccagtttctcaatggtcaagcgaccacctcctatatgttgattcgtgtccggccggacagcgaaatactacatagaattcaaatattttgcaagaacttttttaaaatgattgacttttcagattttggctgatatactaattgagccgctttgaatgggttaaaaagtgtcccaccgggaccgcccccgacagcgagcccgtaatgaaggagttgaaacaacgacatgaacgcaattatcgtgaccggcggcaagcagtacaaggtagccgagggcgacgtggtctacatcgagaagctgaaccaggaagccggcgacaccgtgaagtttgaccaggtcctggccatcctggacggcgacaaagccaccttcggcactcccgtggtggagggcgcttctgtggagggcaagatcgtcaagaacggcaagggcaagaagatccgcatcttcaagtacaacgccaagaagggttaccgcaagcgtcagggccatcgtcagccttacaccaaggtcgagatcggcaagatctccgtctgagtatgaccactgtcgtattccgtatggagggcgaccggatcaccggctttgaggcccgcggccacagcggctacgccgaggcgggcgccgacatcgtctgcgccgccgtcaccagcgccatccgtctggtggaagccaccgtcaatgacgtgctgggcctagccgcatcggttaaggttcgggagcaggacgcgtccatttcgctccatctgcccggagggctgtcccccacggcggagagcacctgtcagtctctgctggcaggcttgatggtttacttctccgcgctccacgacgagtatcccgacaacatcgaagttctggaggatgattgatcctccccatctaaaaatcttcagaaaggatggtccgtatcatgattcgtattggtcttcagttcttcgcccacaagaagggcggcggctccaccaagaacggccgtgattccaaggccaagcgccttggcgccaagcgtgccgacggtcagttcgtccaggccggcaacatcctggtgcgtcagcgcggcacccacatccaccccggtgtgaacgtgggcaagggcactgacgacaccctgttcgccactgtcagcggtacagtccgcttcgagcggctgggcaaggatcgtaagcaggtctctgtctacgaggctgaataaggaagccaaaccgccccggtcaaatgaccggggcggttttttgccgttatgcgttttcttgaaatggtccgtttcagaaacagagcgaccttctggccggcatcagtcaaagccagttgaggggattcaggatctccaggaaaaacatccagaatgtgtctttaaaacaggattttcggctccttttcccaggaaacagtgcccgtataaaggcaatcagcagacatagcaggagatacaggacagacaccagtatgaccagcaggatcacgtcctccatcgtacagcccccttctcgcagaacattttatagcgaaaccagtataacacagcctgccccacggcgccacagactcttccgccttttgattcttgtacacaggaagcttcagcagaacgcctccgctcttgacgtgtggcaggttttcggataaaataggcaggattaggaattctttgaatagatcacaatatgaggtgcaaccatggcaacttctttcatcgataaggcccgaatctctgtccgggcagggaacggcggcaacggttccgtgtcctttcaccgagaaaaatatgtggctgccggcgggccggacggcggcgacggcggccggggcggctccatcattttgcaggtggatgataatatgtccaccctgatggacttccgctacaagcgcaagtacgaggccggcaacggcgccgacggccagggggcccggaagaccggcaaggacggcacagatctggtcatcaaggttccacggggcacgctggtgcgggacgcagagaccggcgagatcatgcaggacatgtctggcagcgagccctatgttctctgcaaaggcggtcggggcggctggggcaacagccacttcgccactcccacccggcaggtgccccgctttgccaaggcgggactccccggcgaggcccatgatgtcatcctggaactgaaactgctggcggacgtggggctggtgggcttccccaacgtgggcaagtccacgctgctctccgtggtatccaaggcccagcccaagatcgccaactaccacttcaccaccctgttccccaatctgggcgtggtgtgggtagaggacggcgtcagcttcgtcatggcggacattcccggcatcattgagggcgccagcgagggcgccggcctgggccacgacttcctgcggcacgtggaccgctgccgcctgttggtccatgtggttgacgtgtccggcagcgagggccgggacccggtggaggactttgacgccatcaacgcggagctgaagcagtacagcccggacctggcggagcggccccagatcgtggccgccaacaaggtggacatcctccccccggactccgacaacctggagcggctccggtctcatgtggaggctctgggctacacgctcctggagatttccgcagccgctcaccagggcacccgggaactggtgaagaagacggcggagatgctctccgtcctgccccctgtcactgtgtatgagccggagtatgtgccgaaggccccggtgatcgatgcctccgccccgctggacatccaccgggaggacgacggcacctggatcgtggagggtccctggctgcggcaggtgatgggcaacgtgaacttcgccgactatgagagccggatgtggttcgacaaggtgctgcgggataatggcttcttccagaagctggaagagatgggcattcaggacggtgacattgtttccctatacgattttgaatttgaataccagcggtaaaatccaggggcgggccaaatggcccgcccctgtttttccaaaattcaaaacgaaaattagagaaattttttacgcttttttgtaatgaactcacaaagtttttttcaaagcttgacaggcgggcccagcgtgttgtacactcagcccaagttcaaaagcacaaaccaatgacgcggacgagtacacggacgtcgcttctccaagagagctgccggtggtgggatggcagcagaaggggccccgccgaatggaccgcagagggcgggctgaacgggatctctccccagtaagcgccgacgggcttttcccccgttaccagggaaagacgtgtgttggcacgtcgccgagtgggcgagcaatcgccaagttgggtggcaccgcagaagtcgcagacttttgtcccaagggaaccataggaatgggtccttgtgggatgaaggtctttttctttttctccaaagggccgcagatcagaaaggagcacaaccatgacattcgagaaaatcccctacaaaatctacctgaccgaagacgagatgcccatgaattggtacaatgtccgggcagatatgaagaccaagcccgcccctctgctgaaccccgccaccggcacgcccatgggcttcgatgacctgcgtccggtgttctgcgacgaactgatccggcaggaactggacaatgacacccgggagatccccatcccccaggagatccgggacttctataaaatgtaccggccctctcccctggtgcgggcctactgcctggaggaaaagctccagacccccgccaagatctactacaagttcgagggcaacaacacctccggctcccacaagctgaacagcgccatcgcccaggcttactacgccaagaaccagggcctcaaaggcgtcaccactgagaccggcgccggccagtggggtactgccctctccatggcctgttcctacctggggctggactgccaggtctacatggtgaaggtcagctacgagcagaagcctttccggcgggaggtcatgcggacctacggcgccgccgtcaccccctccccctccgataccaccagcgtaggccgggccattttgaaggagcacccgggtaccaccggctccctgggctgtgccatttccgaggcagtggaagccgccgccagccagcccggctaccgctatgtgctgggcagcgtccttaaccaggtgctgctgcaccagtccatcatcggtctggaggccaaggcggctctagacaagtacaacatcgtgcccgatatcatcatcggctgcgccggcggcggcagcaacctgggcggtctgatctcccccttcatgggtgaaaagctgcggggcgagcgggattaccagttcatcgccgtggagcccgcctcctgccccagcttcacccgcggcaaattcgcatacgacttctgtgacaccggcaaggtctgccccctggccaaaatgtacactctgggcagcaacttcattccctccgccaaccacgccggaggtctgcggtaccacggcatgagccccgtgctctccgagctgtaccatgaggggctgatggaggcccgtgcggtagagcagacaaaggtctttgaggcggcggagcagttcgcccgggtggagggcatccttccggcgccggagtccagtcacgccatccgggtagccatcgacgaggctatgaagtgcaaggagaccggcgaagagaagaccattgtctttggcctcaccggcaccggctacttcgatatggtggcctatgagaagttccacaacggccagatgaccgactatatccccactgacgcagaactggaggccagcttcgcccagctgcccaaggtgccgggacaagattgaccctagtcacgaagacagcggaggacatgttgtcctccgctattttctctgttccggtggtttttctgcataaatgtcgccggtctgcgcaaactggatccgaatccatttgcccagactggaggaatgtcttgtgtccaatcccaaccgccgcggcgccatggcgctggtgtccgcctccctgtgcctgacgctcgccgcgctgttttatttcactgccccggcaccggccctcaccgcctccgcccccatcgcggtccctgcggctgcggactgggggctatccttccccacagagggggaatccccagtgggcaatgcctctgcggaggacctggcccaatacggcgcctactacctgggggataccagccaaaaggtcctctacctcacctttgactgcggatatgagaacggctgcacagaggccatactggacgccctgaaaaagcacaatgcccccgccgccttctttgtggtggggcatatgatcgaatctgctcccgacatcgtccgccgcatggcggcagagggccacattgtgggcaaccacacgtaccaccacccggatatgtccagcatctcggacatggccgcattccagaaggagctgacggacctggagaccctgtaccaggagaccacaggacagcctctctccaagttctaccgcccgcctcagggaaaatacagtgtggagaatctgaagcaggcccaacagctgggatacaccaccgtgttctggagtctggcctatgtggactggaacacggacgatcaaccttctgcggaggaggcctatgccaaactgctgccccgcatccacgacggagccatcgtgctgctccactctacctccgccaccaacgccgcgatcctggatgacctgctgaccaagtgggaggagatgggctacaccttcgcctccctggaccagctgcccgggctggcctgaccacgcaccggaccggacgcagcgcccggcttcattctccccttgcttcctgccgcctgacatgataggatggtggagacgaaagggggcggcgtcccatgcgttctctctccaaatccaagtggatggaagctgttcagtcctacgtgctctatttctttttctactccatgctggggtggctgtatgaggtgtttctggaagtggtggtctaccgctggggattcaccaaccggggtgtgctgctggggccctactgcccggtgtacggcgttggcgccctggtgttcctgctggccttctcccgcctgatggctaagcgggagccagcgtggttccgctgggtgaagccagtgctggtgttcctgggctgcatgatcgccgccaccgccatcgagctggccaccagctatctgctggaggccctgaccggcgcctggccctggcagacctaccgagactacgctatcaactttgagggccgtatcgctctctccccctccatccgcttcggactaggcggactgctgttcctgtacgtgctccagcccctgttccaccggctggtccacagcctgtcgccccgggtgcgccgcggggcttgcatcgccgttctggtgctgctggctgtggactgcgccgtgctgctgttccggtgatgccgcctgccgcattaatcaaaagaggactgacttggtcagtcctctttctgttcttccatcatcttttccagatactgctggatgcagcggaacgtctcctcgctgaggtcgtgttccaccttgcaggcatcctccgaggccacctccggcgttactcccagaaggacaaagagcttggagagggtcttgtgccgaccgtagacacggctggccacttccaacccgctttcattcagagtgatgaatccgtccgcatccatcgagatataaccgttttcccgcagcttcttcatggcgatgctgacgctgggcttggagtatcccagctcgttgacgatgtcaatggaccgcacctgcccccgccgctgctgcaaaaccaggatggactccagatagtcctctgcggactcgtggattaccatggcgctcaacctttctctttggagaataaatcacttgccggaaaacgtgagccgcctatcggccgtgatctatttcgagcgggaaaggtcatgcggatagtggaaaaaagagagacatgctttaacatgtctctcttttttggtggagataagcgggatcgaaccgctgacctcttgactgccagtcaagcgctctcccagctgagctatacccccgaaccgcttgtcctatgcggctttcgcgctcggaacattgataagtataacaagatcatcgccaaatgtcaacacttatttttcgatttttcaaattttttcaatagggggttttcactcctcttcaggccgcaggacaccgtggaggacgaagcgtgcattctcaaattcatagctgcaggtggagagcgtcaccacccggtcctctgccctgggtgacaccttgctggaaaaggcggacttctcccccacctcctccagccaggccaggtacgcctgctcatcggagaaatccagcatccaggcactctccgccgtgtccgccacgtagccggaaaacagctccaccacataccgcccctccggtgtcaccagcagaaaaaccgggtgggcgtcatagtagacctgctcctgataattccccagggcggcaaacatagtgccgtttttcatccgatggccgtagatcaccgtgttgcggccagaaaaatccggccggcatgatgtgtccacaaaaaggcacccggcgctgttggccgtgccgtccaagagatggtccaggtaatagtcattgtccgtcccctggaccaccgggtaggagatgccggtgtccgggccgtagagccaggcagtcacatccggattcaccgccgccagggccgtgaagtccacctccggccaggccagctctgccggcgtctcctccgtctcctccgacgcagggggcagggacgcaaactgctccagtttgaaataggcgtctgctcccacccggtactcgtgcaggatccgcaggacctgatatccgctgaagcaggcaatgcccagaaacaggcagagaaagagcccgcagctccggcccttcataccccctcctcctttgcgcagtccttccagcgcaggctgcgaagctcgtccttctgctccggcgtgatccgatagctctccacagccttctgaatggtcttgttgtgggtccagcggtccaggcgacgctgccgcagatagggcagcgccgcgtcgtactgcttggccagggcggtggcaaaataccaagccgccatcatcttcacgtaatactcctcccgccggacaccggcagccagatccaagtcctccatctgaaacccctcatccagataaaagctcatcagcatccccaggccgaagcggacagtataggtgtgcgcatcctccacccagcggcggatctgtttccgcagctccggcggatgcttccggaatgccttcgggctcaacaggtcgcaggtggcccagttgtccacatagggcaggaatgtctccagcgccgccacggcaccgtcatagtccgggatcgccgagatcagcaagccgtggaggttattctcctcataatagcggtggggcagctcctggaggaagccccctgccaccggcgttccggcgatttcccgggccagcttccgcaaagccggcatccggacgccgatcaccgtctgcgggtctatggtgggtatcagcttgctctgaaaagcctgataggccgggtcccgcagggcaaagagcgcagtttggatgtccgtcatatccccgcctcccatcagcgcagctcgtccttcaaattgccgtccagatccagccactggacggcgtcctccgtcatccgcatacagccgtgccagctgttctccttggggatagaaacagagccggggttccaataccacaccccgtcctccagacgcctcatgggcacgtggaagtggccgtagaccacataccccgccccgtccagcagggtctgggagggccgctgatccacattgaaatggtggccgtgggtcaggaacagccgcctgccgcacagctcctccacctggaagtccgcctcgatgggaaagtgcagcaccatctggtccacctccgcatcacagttgccgtggacacagaggatccggtccttcacgctgttcagcatggcaaagaccgccttgggatcgtatccctccggcaggtcgttccgggggccatggtacagcaggtcccccagcagcaccaggcggtccgccccccgcttctccatcaggtccagcagcttccggcagtacagggcactgccgtgaatgtccgacgcgatccatacgttcatcgttcttctctcctgtcgtttcgtgtctcttccgggtatgcgggcccaatctccaactcctcataaccggtctcgctgtccggccggcgggtgaacacgcagctccggatttctgccagtacgatctcggccgtggtgttcaccgtgcaccccggcagcaggtggccgccgaaggcggagaggtcctcccggctgaagctggcgtgaaggtggcagccgtactccgatacggtgcccatcagggagacgatctccacatcctcctctccgctgcgcacccggacaccggtcgcgtcccgcagccgccagcgggagacgcagcccacaccggaaaccactgccccggcggcgatatgatgcgccttcacataggcctcgatctcctcgtacaaatcctgcccccggcggaggcggaaacaatgatacatgatgttccctccctgattgcccccgtctccggcggctttgcggctattgtaccacggaacggcgccgcgtacaacggatttccggcgacaatgtgcaggggcgcggcttccgccgcgcccctgcgcctcatttggaccgcttcagcacttccagcacgaaccgccacacccgctggacggaggcgatctccatccgctcccgcggggtgtggatgtccagcagattcgggccaatggacacacagtccagccccggcagcttgccgctcagaataccgcactccacgcccgcgtggatggcctcgatctttggcttccggccgtactgctcctgaaagacctccgtcatcaggtcccgcagggaggagtcctgccggtactcccaagcgggataatccccggagatggagacagtgccccccagctgcgccatcagggtccggaggcgacggtggagcatctccttctggctgcccagggagctgcggacgcagaaggtggccgtcagggccgtctgctccgcagccaggatgcccaggttcagcgaggtctgcaccagaccgtggatctccatgctcatggcctggacgccgttgggcaggcaggtgagcatgcagactgcccgctctgtggacgcccagtccataggcgtctcccgcacggtgcagggcgccgcctccacgcggaggcccgggtccgctgcggcatattcccgggagagatccgcggccaatgcctccgccgcctgccgggcgacggcatcgtcagataccaccacctgggcggacgcctccacggcgatggcgttgtcctttccgccgcccgccgccgtcaccaggcgcagctccgtccgttccgccatggcctggagcaatcggcccagcagcacacaggcattggcccggcccttgtggatctctgtgccggagtgccccccggcaagcccccggaccgtcacctccagcgccgcgccgccatagggcgcccgggtcacgggcagagtgcactgggccatgcttccgcctgcgcagctgacggtgaagatcccctcctcttcggagtccacgttgatgagcttccgcccccggagaggcgcggcgtccagggcctccgctcccagcattccgatctcctcgtccgtggtgaggaccacctccagccgggggtgggggatcgcctgatcgtccaggatcgccagggccatggccaccgcaatgccgtcatcgccgcccagggtggtgcccttcgcccggacgcagccgtcctccaccagcaggtccaggccctctccggccatgtccttggtgcagccgggctctttttcacacaccatatccaggtggccttgaagaatgacgggtgccgccgcctcatacccgggcgtggcctcctggatgataatgacgttccccgcctggtcctgatggcactccagcccccgctccctggcaaaggctgcgcaccagtcgctgaccgcctggcagttccgggagccgtgggggatggcacacagctcctcaaagaagcggaacaccccctggggctccaactgttccaacacgcgcataaacactcctttcccggcgggccattctcccggcgccgccgtctgtttccgccttgtagtatatcccattcccaggggcggcgcaagccgattgggaaaaacagaagaggcgccggccattttgccggtgcctcttccccgtgcgctgtctctcacgaaagctcagagaaccgcaggaccaccttgaacaagtctccgtccacagtcagctccagggtgcccttctggagctctgtcaggctccgggcgatggaaaggcccaggccgtttccctcgccgcctcgggcggcgtctccccggacgaaccgttccagcagttcctccgccgggatatctaacggcgcccgggaggtgtttttgaaggagatcaccgcctggccgtctcgctcctccagcgtcaggtacacccgggtgccccgctgggcgtacttacagatgttgttcatcaggttgtcgaacacccgccacagccgtcggccgtccgccaggatggtcaccgctgtctccggttgccgggttaccaggtccaggcccgcgtccttcagcttctgttcgtactcccctgccgcctgggtcagcagcacgccaggctggcagggggccagattcacctccagattccctgtggaggccttggacgcctccaccagatcctcgatcagccgcttcagccgctcggactggcgggtgaggacagccgcgtactccgggatcttctcactgttcgggggctcctttccgatgaggtccgcgtaattgatgatggaggtcaggggcgtcttgatgtcgtgggacacgttggtgatgagctccgttttcatccgctcgctgcgcatccgctggtccaccgccgccgccatgccctgggcgatgtggttcaggtcctcgccgtgggatttgaagtccagcaccatccggctggtgtccacctgatagctcaggtccccggcggccagagcccggccgcccagcagcagcttccggcacatgagggccaaagccagcaccgccaggagcagcaggagcttctcaaagatccacaggagcgccagcaggccccagctccaggcgaacatgctgaacaggatcccaaggccctccaggacacagaggcccaggaacaccagcacggtcttgcccaccagggggacgttgtgaagcagtcccgccagcccatgcgctgcgccccggaggccgctgcccagggcccgaaggaccgccccgccgccacggcggagcaagcggagggccacatagaccactgtattcctccaccagccacccagtttgagccgcagggccagggacatgcaccagccggtaaagacgcccgccagggcggcaggacccagtaccacagccagcaccacgccaatgcctccaaagttggcctccaccaccagttggatgcccaagaacagccccagtgccaccgccgccgtcagaaggtccagtgggatccgtgtcccccagccgggacggacgccgtccacgtaaggatggtgcccggcggcacacagcaggaagatgaagcagactgtcaccagcagcgccgcagcagcgatgatggcgtagatccagtagcggagggcgtaggccagttccgccagccggttggccagggcgtagtcgtcgtcataaacaaacacagaggacagcggcactgtaatccgcacggtataagcgttctcaacaacgccggcgctgggccgttccggatttgcccagtcataggaaaatctgaactgccacggactatcatattctgcaagccccgtgtaccagagctccctgccggtcttatcctgtaccatgacgtaagagatgttccgctccgcacagtagctgtctgctgcttccgtattcatctggtatacctgctcttcactgttccagatcaggaaattgagaagcgtctgcccgtctccccaggcgatattggaaaacagctcctgcttgaaagccgtctcgctggtgacatagacgtcggtgctgtacaaaaacaccgcgcccagcacaccgccggcggtaacggcggtcatcaccagcatcagcagaaaggctatgaccttggccgccgtactctccgtgagcctctttttccgtttcggtgccggaggctgcatgggctgctcctccatcaccgcctgggcgatctccttttcgatgttctgttcgatggccttcatgcccgcatccccttttccagtttgtacccctggccccagaccacctttaagtatctgggctccgccgggtcgatctcgatcttctcccgcaggtggcggatgtgaaccgccactgtgttctcactgccgaagggagcgtccttccataccttccggtagatctccctgggggagaacacctgccccgggtgctccagcagcagcttcagaatatcgtactccgtgggcgtcagagctaccggatccccatccacggcgacggtcttctcccggtcgtccatctggatagtgcccagggtcagcacctccggccggagtgcaccgctccccagctggaagtaccgccgcagctggctgcggacccgggcagccacctccaccgggttgaagggcttggtgatgtagtcgtctgcccccacgttgaggcccaggatcttatccgtgtcctcgctcttggcagtcagcaggatcaccggcacgttactcacctgccggagctttgccaaagcggtaatcccgtccatctccggcatcataatgtccagcagcaccagatggatgtccttccgctccagggcatccagagcctcctgacccgtgtgggcctccagcaaatggtagtccggattggccaggtagattttcagcgcgttgacgatgtcctgttcatcgtcgcagatcaggatgttatacatggggctccctccttggcttccatgataccggatggcggtttaataaaaaaccgggaaacttcttaagattttatgaagaccgctttcggtgccgccttccgccgggcggcacagccggacaaacgggaatctctgaacgcacggagcggcccccgcccatacgggcgggggccgcctgccccggatccgccccagcacgctgccgcagcggtctgtctggacctcgtcgaagccggattcctccatcttcccactgtaccagttctgccaccccctgctcccggccggaggggccggggatgcggacggtctcctggcagaagggatcagcagttcctcccggctgtcctgttcactccattttccgcagcgcaccgcgctgcttaagatactcctatggtaggggatttcgccggaaaaatcaaccccggaaaaaagccgcccggcgggagtttcccgccgggcggctttgaaggacgcaggcgcatacatttaggcgtccttcttcatcatgatgtccaggatggtcttgtcggtctccaccatgccgggggtgctgaccaggcccatgttgcggatggcctgctccggcgtcttgccgcagatgccgtccgtggactggagcaccacatcgctcatggccagttgggcacacatgatggcggcgttggtggcagtagccagcttcagggcgcagccgatcttgccgccgtcgcagatcataccggtgaggttgccgctcatgttgatgatggccttgccgatctgctcatcgctgccgcccatcagccacaccatggacgcggcggaggcggtggcggcagagacgccgcagccgcaggtggcagacagcttgccggtgaagatcttgatatacacgttcagggtgtgggaaaaggccagcgccttttccagctgctccttggaggagcccaggtgcttggccagctccaccacagggatgatggcagtgatgccgtggttgccgctgccggcgctgctcataacggcgtaggggcagccgctcatgcggccctcggcgctgctggccacccgcagcatggtgttggccgcgaagctgtcgcccagcaggtctgccttcttcagggccgtggcgatgccaacgcccagggtgtgctccaggccgaagtcggccagcttctcattcatatccatgccatccagcatgaaggccagctcctcctcgctgcactggtccaccagggcgcggatctccgccacagtcatgggagccagccgctcatggagctcatcctgtccaccggccgcatactccttcttcaccagcacgtcgttgttccgcacggtgaggacgatgttggagtgggtaccccggatctcgctgatgccgatgccggcggtggtgattacctctgcccgggcatacaactgtgtctcctcctgcttgatcatcaccaccacatggcgaccctccaccagccggatggcctcgtcgctgacggcgggggtgatgtcctccagcagctggaggctcttctccgggttgtgcaagcaggcgcccagagcggcggcgtacttcagccccacccgggagaagccggggatgcccacgctcatgccgttcttatagatgccggggttgacttccaccttgatggagacgatgtctccgccgatggcatggctggcgtcagcggtggccagggccacgcacaccggctccgtgcatcccagagcggggacgacctcctgccgcagcagggtcagcagttcttctttcgtaatcatgagggaagctcctttctgtatccaggcgaatctccaatggcccgcaacatattcaacctgataagataagcaaatttcgtgccaactgcctcccccgtgaatttcctgaaaaaacagcctctcccccttgtaaaggagagcgaattatgggaaaatggtcaaagtaaatggttaattgggaggtgagctgcgtggaaaaaaaggcaatctccatcattgcgctggaccccagagctgcccgctcctatgggcgggatgtggagggcctgttcggagaggtggcggatgtctcggtgttttccgtcatggacgggagcgccatgggcatgctgccccatgcggatctgttcgccgcctccacggacgcctttgggtcgccggaagagctggcccgccacgtgcctatcgacagtcagaccatggcggtgcaggcctccttccgctggcaggagctgcggcggctgaaggaactgcccgccggcagccgggtgctgtttgtcaacatgacggagaccatggcccgggaggccatcgcccagctggagcagttcggcatcacccacgtccattggattcccttctatcccggggcagagctgccgggggatgtgcacatcgcagtgacaccggacgagatgcgctatgtgccggaggagatcgagaccaaaatcgacgtgggacagcgggcctgcacctccggcatgatgatcgagatcgccctgcggctggggctggagcatctgctggagacggagaaattccagacctatttccaatcgattgcaaccagcaattacagctttgaccagatgttcgcccgctccatccggctcgagagccaattccatattttaatggagacgctggaggacggcgtggtgggcgtcaacgaacggggcgaggtcttcgcctgcaaccgccatgcggaggaaatcacccgtaccagcgccgacttggtgatgggcaagccggcctctcaggtcttcccctatctccccttctcgaaatgtttacaggaacgggagcggctgcctgccaaaatcatccgcctcaacggcatcaacgtcagcgcggaggtggtgccggtgatgcggcagcgggcctgcatcggcgcgtttgccatcctgcagcggttcaacgacgtggaggcccggcagagccagctgcgcaaccagctgcttcacaagggctaccgcgccaagtacggctttgaggatgtgatcggggagtcggatgccatccagaaggccaaggaggtgctgcggcggatggctgtcagcgagagccccatcctgctgatcggcgagaccggcaccggcaaggagctgttcgcccacgcggtccaccgggcctcccggcggcggaacgggcccttcgtggccatcaacgtggcggccttcccggaaaacctgctggagagcgagctcttcggctatgaggagggggccttcaccggcgccaaaaagggcggccgcctgggcctgcttgagatctcccaccagggcacgctgtttctggacgaggtggagggcatgagtccggctcttcaggtcaagctgctccgggtcctgcaggaacgggagatcatgcgggtgggcggcacctccatcattcccatcgacgtgcggatcgtggccgccaccaacgagtctctggagcggaaggtggcggagggcaccttccgccgggatctgtattaccgtctcagcaccctgcccatcgtcatcccgcccctgtcggagcggggggacgatctgttcctgatcctggagcagttccaaaaggagctgggcggcagcttccgcctgacgcctcaggtgcggggctttctgaaatcctactcctggccgggcaacatccgggagctgcggaacgtagtggagtactttctctacaccggccacgatcccatcaccatggaggacctgccccccaccgtgttccacagagccccgcaggcgccgatccggcagttgccggagacgccgcagcagccttcttctgatgtgttccgctttgtgctggaacagctgtatcaggcctcagaggcccggcagcccatcggccgggagcggctgctgcagctggcgcgggatgcttttgtccccacttcccaacaggaaatccgaagcattctggcccagatggcagaccagggactggtccgggtcagccgggggaggggcggcagccagctgacgccggagggccggcagctatacgaaactggtcgaatttgatatttagatcaaccaataaaaccatttgaaagcaaatttgagaaaaccggtaccaaaatacggctccgggcgggtttggcttatctgccaaacccgcccggagatttttggttagaatttccgattgtctcctctgttttaaattctttttccgtttcctcggtaattcccgcttttttggcatatattttgctatataacaaagcatcagcgcacaagaacgccgcagaaaggatggatactaatgacctaccagtttgacgcggtggtggaccgctccgggaaccactccgccaagtatgacgagcggaagaagaaattcggcacagaggacgtgatccccctgtggatcgcggacatggacttcaagaccgcccagcccatcatcgacgccctgaaggcccgggccgaggagggcatctggggctataccgcccggccggacagctattttgaggccattcggggctggcagaagcgccgcaacggctgggatatcgaccagtccctcatgagcttcagcctgggcgtggtgcagaccctgtccgcctgcgtgaagctgttcaccccggagggtggcagcgtcctgattcagacgccggtgtactccgagttctatgatatgaccgaggcatggaaccgcaaggttctggagaatcagttcgtggagaaggacggcaagtggaccgttgactgggcagactttgaggagaaactgaagcaggcggacctgttcctgctgtgctccccccacaaccccctgggccatgtctggacggaagaggagctgcgccggatgatggaactgtgcctgaagcatcacgtgctggtggtctccgacgagatccactccgacctgatcttccacggcaaaaagcacatccccactgccaccctgtcccccgagatcgccgccaacgtcatcaccggcatctctggcaccaagaccttcaacctggccggcctgcaggccagcacagtggtgttccccaacgcgcacaaaaaggaggtctttgacaagttctggatgaacatggatatccaccggaacaacgccttctccctcaccgccatggaggcggccttcaaccagggcgatgagtggctggaccagctgcttccctatctctccgccaactttgactatgtggtggactactgtgaaaagcgcatccctaagatcaagacctatgcccccgacgccacctatctgatgtggctggactgccgggagctgggcatgggcaatgaggcgctccacgacttcatgatccggaaggccaagctgggcctcaacgacggctgctccttcggccggagcctcaatggcttcatgcgcctgaacgccgcctgcccccgcgccactttggaacaggccatgcgccagctggaggccgctgtcaacagcctgtaatccccagcaagagcgcgcagagaaataagggaaaaggagaaagaacatggcaaccattcaaaagaagagcttctggcagcagtacggaggcctgattctgattctgggcggcatcgccatcggcgccctgatcggcgctttcgcgccctctgtgggtaccaccatcaagcccatcggcgatatcttcctgaatctgctgttcaccattgtggttcctctggtgtttgtgtccatcgcctccgcagtgggcagcatggccaacatgaagcgcctgggccggatcctgggttccaccgtcggcaccttcatcttcaccggcctgatcgcagcggcctgcgtgctgacctgggtcaacctgttcagcccctccgcaggcgcctccatccagctgaccaccggcgaggtaggcgaggcccagagcgcaggcgagctgctggtcagttccctgactgtgtccgatttctccgacctgtgggataagtccaacatgctgcccctaatcattttcgccatcatcttcggcttctgcgtgtccgcctgcggcggcgacgagagccctatgggcaagctgctgaacaacctgaatgacatcatcatgaagttcgtgggcgtcatcatgttcatcgctcccatcggcttgggcgcctacttcgccaacctggttgccacctatggtccagagatcgtgggtgactacggccggtccatgctggtctactatcccctgtgcctgctctatgcggtgatcttcttcccgctatatgccttcctggccggcggcaagctgggcgtccggatgatgatccagaacatcttcccgcctgccatcacagcctttgccacccagtcctccgccgccaccattccggtcaacaaggaggcctgtgacaacatcggcgtgcccaaggacgtcagcgacctggtgctgcccatgggctgcaccatgcacatggacggctccgtcctcagttccatcgtgaagatcgccttcctgtacggcgtcttcggcaaggacttcgtcggcgcggagacctatgccatggccatcgttgtggccattctctccgcctttgtgctctccggcgctcccggcggcggcctggtgggcgagatgctgattgtcagcatgttcaacttccccgccgaggcattccccatcatcgccaccctgggcttcatcttcgaccctgccgccacctgcctgaactcctccggcgacaccatcgcctccatgatcgtcacccgtctggtggagggcaaggactggctcgtgaaggctgtggccgccaagaaggagaccgcctgattccatcgctttccagattgattttatcagctatccaattttagaaaaggagtttttcacatgaacgtcattgaaaccaagaatgcccccggcgccatcggcccctattcccagggctacgcctttggagatctggtcatcacctccggtcagatcccggtggaccccgccacgggcactacccccgaaggtatctccgcccaggcggagcagagctgcaaaaacgtgggcgccatcttggaggctgccggttccggctttgacaaagttgtcaagaccacctgcttcctggcggatatgggcgacttcgccgccttcaacgaggtgtacgccaggtatttcacctccaagcccgcccgcagctgcgtggccgtgcgggagctgcccaagggcgtgctctgcgagatcgaagccatcgcgctgaagtaacggaggtatcagatgaaagtcactgtcattggaagccacctgtgccccgacaccctgtacgccctgaaccgcctgtccgaggtcaaggcggagatcgagttcaagaatctctccgccagcctgccggacctgaaggcctatctggccctgcgggacagcgatccccactatgaggccgtcaagaaaaacggcggcatcggcatccccgcctttgtcctggaggacggcaccgtcacgctggatctcggggacgtgctgaaataaagcgatcacaaagcccggcgggggacctgaaaggtcccccgccgggtttctgctgttcttcaaacctccgtgacggctcctgtaccgccctcctccatctgccgcagggccgccagggtgcccagagtggtgcccagctgggtcagcaggatcgccgtgcgggacagctcctccgtggtcatgcattttgccatggccaccgctgtggcgtagactcctgtgctccaatcataggcatccatccctcggccccctccctggtgaacagtgtatgaggcggcgagggatttcttgacgggggcggcgtgtcatttctccagcaaagaggtcagatacgccgtctctgtccgcaggtccgcagagccggtgtaccaaagggtaagaacctgttttccctgccggagcacggcgaattgttcaggacttccgattccgtccgcctcctctgcccaccagaagccgtccagagccggggcctctattgggtccagcggcagttccggccggctgtccagaaagccggcccggttctccgtcagctctgccgtcaaggtctgggccaatccggctgtcagcatacggtaatacgcggtctggagaaaagcctgctccccgtcgggcagcaccgcagactggcgggcagcgtacatctccggcgcgatgggaagggatttttcctgcacctctgtccgcaaaggctccaggccgtccagggctgtcaggtccgccagaaccatctgcaccggcggacgttcccccgcttcataaaccgtccgcgccgcatggtcccaaccagagggattgccgtccagattctgaatgctgaccaccagattcagcacagatatgaccagtgcagcgccccacgccagctgtcccagccgcagctgacggcggtatagcttgggcctctccagcgggacgcccgccgtcagagtcttccacagccgccaggtgttccgggcatccagccagagctgcatccccaagatggtcagcagcgccgcagccaccagcggcgcggctacaaagcccagccagctggcgtttctcaggatgttctccagagaagcagccgaaagcgccaccgccaggatgaaatacgccgtcattaccagccagatcagcccgccccccactgtgcggaagatcatccgccgctttaagtatcggtatccctctccctggaccaccgggtccgtgtccagctccggggcattcgggtcatcgcaccgccagacccagaagggccccagctgccccaccagccgccagcccatgctccggtatgcctccacccgctccgggtccaaagcctctttccacctttggaggggctggagccggaagcggcactcccacggttcgtccagcaacaggtccacccggctgcccgtgaagcagacggggttctcccccttgcgggccaggtcctccagccaggtctccaccgccgccacgtcgtagatgctgatggggcagctcttccgataggagctctgcccatgtctgttttcagcgcccattctcctctccccctctccgctgatctactgaaatttcatcagaacggcggcgaagtagtcagtctgtatccgcaggtccttgtgcccggtataggaaaacatcagcacgcagtttccccgccgggccaccacgcactggcacggatcctcccgccgggagagctgctcatctccggcccaccagaagctgtccagtccggggacctttagccgttccggctccccgccgccgaaccacttctgccaggtcttgagctcttcctccacccgaagggccagccctttcgtccccatgcggtaatacgaggtgttgccggagatcagattcaacgggccgccggggccttccgtggactgccgggtccagtacatccggggtgccaacagcagggacttgcgctcagcggaaaaaccggtcagctcctccgagccctccagctcccgcagatccacatataccacctccgccagcggctcgccgtccccgtccatggccgaccgggtgaaatggggatctccgccatccgggagcagccaggatatcaggacgcccgcccaaatcaggaccattaccgcctgcgtgacccgtttctggagccgccaggatctggggcgttccagagggacgccggtgcccagcgaccgcagcagccggcgcatccggaaggcgtccagcagctcgacccccaccacggccgccgccatcagcagccagaacagtccctcgcccggcagggcatgctccagctgatccaccagaggcatgtccccggcgccccagaaccagggaaggacacagatccccaggcacaccagcaggatcgcgggcagccgcagcagatggcgccgcatttttcgctcaagatacccgtaccccatgctctggaccaccgggtccgtgtccagctccggggcggccgggtcgccgcagcgccagatgtggaaggtccccgccaaggtgcaaacatattcccaccccagctctctgtaggcatccgtcatctccggcagcggagacttctctttgcgcagcaggggctggagccggtagcggctgggagcgacggagcaatcctgacaaaagattccgtaaagcccccggaaccgcagcaggtgatagccctcccggtcccgttcctccagccaggactccacagcagccacgtcatagagctccacaggccggaactccctgtattcctgccgaccgctcatagatcgctccccccttctctttctgctgaacctccgccaggacggcggcgtaccgctccgccagatctatcgttggctccgtggtgcctgtggagatgctccacacctgatcccccagccggaccactaggaaccaatacccgtagtcgtcgcgagtggacacccaggtctcgtccagtccggggatctgccaggccatgatgggccagcctttctcctggtagtccgccaagatgccgtctaccagatcgtccgccagccaggggaaacggaggcggtagtagcggttctccgtctcccagtcgcccatgccctcaaaggtccaccactggtctgtggtaagccagttgtcccagtggatggcctggacctcctgcaatcccttttccgtgatatatgggaccggctcgtcaaaggtctccgccggttcaaagggccgcgatctggggtccgccatatcggcgcagagtgatgcgatgtaaattccccacagcagcatgatcgccagggacaatccgcaggccagccggtaaggccgcctgtggcacacgggtactcccgcccgcagaggccgcagataccgtcgtagagaccaccactgccggaacgccgccaatgcgagtgccagcagaaagccccaataggcggcctcccgccacagtggcttccactcctgcacactccatacgagaagggttctctctgtcagaagcgtctgtaccgccagcaccgccagaagcgccgtgaccgcggcccagaactgcgtcaccttttgctggcggcggaacagccggtcatatgcctgggcctctgtctccgggtccgtgtggagttccggcgcatcgggatcatcgcatcgccacaggtgcacggacttgccggaggtgtccacatactcccagcccatagaccggtaggccgccaggcgctctgggtccgggcagctctcctttactggggcaggttccagtcggtagcgaacagcctttggctcccccttctcaaagaccgccaggaagaaaataccgggaaccgagacggcaaaccacccccgggcggcctggtcctccatccgggcctgctgggcggctacgtcgtaaatgttcatgggcatcagcttcagcatggcgtttcccctctttttctattgaaactccgccaggacggcggcgaagttgtccaggtgatccatcaggtcccggtctgtccgcacccgctccatcagcaccgcccgccccatccggccgatgaagcatcggtttttatccgtgtcgatcaccaccgcttggtcaaagcggctgtccgccacctcccggacctctaccacggaccaggtgtccaagaaattcgctaagcgttcccgatacagggcctccgccaggaaggtgaaccgcacccggtcgaaaccggcccacagggacgctttaaaatcccagcggaactggctgacctcccggtgatccgtcagcagactccgtctctcccggtaaacagatgaatccaagggcagggcggcggcctccggggccactgcctccatggagacatagggcaagggctccggcgcgtcggacaagggcatctcctgctggctgccgaatacagatacggcaagtgcagccaccagtccgcaaatcccccaggagacgagattctgccgcctccgccgccgtaacgacgcatccaggtcctcagtatccggcgccatccccgcctccagctggcggcgcatccgctgaacgccccgcagcgcccgcagattgccgcagagccactccagggcacagaccaccgcaagcagccacacagcccacatccctttcaggaacacatccaccggctggccgctctcccagaggctgcgaaactgcaagatcgtccagacaacaatcagcaccatggagatcagcctatgtcgccggaacagccgcagctgcctctcccaggtcagacacagggcagagggatctgtaaacagctccggcgcctgtgggtccgcgcaggcatagacccgatagtcccccaggacgccggcaggctcccaccccatttcccggtaagtctcctcccgctcacattgggcgtcataggtctctgtccgcaggggctccagccgataccggagcttcctgggctccgccggctcaaactttccgctgccatagcgagaaaacgacaccggccgccagccctggacagctttttcctccagccaccgctccagaagggcggtatcccaataggcctccggcatgagaaaacgctttttcacggtgcctcctctctcatccccggcagcagccgctccgacgccagctcctcccgctcgccatcggccacgcagaggcgcaggcgggagagctcctgccggaacagggcccggccccggtccgtgatggcgtaggtccgcttccgcccctccaccgccgcctcccggatcaagccctcctcctgaaattttgccagaatcgtgtacagcgtccctggccccaggggtacccgaccggcggtggcgtcatccacataccggacaatctccgtgccgcaccgctcctgccgcagcaggctcaacagcacatagaacatgctctccgtcaggactttcagcggctccctggccatggtatcccccctaatatcgaaacacgatactttctgggttcactataatatcgttgcacgatattgtcaagctgtctgttcgcttccagctctggaatgttttgagggttgcagcccgccccctccctcctgtatgctcttgtacagcagcgacaaaccagaaaggacgaattttccccatgaaacgaaaacttctctgcggcctgctggccgcccttaccctgacctgcgccaccgtcaaggcggcccccagccgggtggtgcccgtccaggtggacggcaccgttctgagtcagggcgtcaactacctgcagagcggcgtgacctatgttcccctccggggactgctggatgccttcggcggctggagcgtctggtgggacagcagccgaaaggtggctgccgccgcctccggcagccagtccgtcaccgcaaacccgtcccgaaataccgtgacggtcaacggccgtacatacagcggcaaggtctttgtggagcgtggccggacctacatccccctgcggactctggccaccgccctgggcggcagcgtggcctgggatccccagctgggcggcgcggcggtgacctctcccggcgcggatcacaacgccatggacctttactggctcagccgcatcatcagcgccgagagtcggggcgagaacatgaccggccagatcgccgtgggcaatgtggtgctgaaccgggttgcggcgaaggagttccccaacaccattcccgccgtgatctttgaccgcaagcacgatgtccagttcacgcccgtctccaacggcacagtgtacctgccccccacggccaaatccgtggaggcggccaagcgggtcctgaacggcgagaacaccgccggcaaggctctttacttctacgcgcccgccctgtcccagggcacctggatcaacgccaaccgggcgtatctcaagaccatcggctgccaccggttctacctgtaattgacatttctcagccagggggctaaaatagggccatcaagaagcaaaggagcaagccacatgctgttttccgatcatccccggacccactaccgcaacgccccggcccatgaggtcatctgccagttgcggttcccgtctattctcaccatcaacagcgtggagcccgccgattttcaggaggccatccgcgcggagttcccccagtatgcccggcgccaggacgccgcgccgccccgcatcaccgggctgggcagccccaatcccaaggtggagcagcagcctccggtgaccaatcacaacttcgtctccgaggacaaccagtggaagctgaatctcaccaaggacttcatcgctctgtccaccctccactatcccgggtgggaggagtttgcccgccagctggacaagccgctggccgcctttatccggctgtacaagcccgcctatttccagcgggtgggcctgcggtatgtgaacatcttctcccgtgcccggctggggctggagggtgcccgctgggcggagctgttctctcctgcctacaccgctcccatgcaggaggcggagctcccggaggaccgctttctcaactgcgcctgtgatctgacgctgaagctggattccagctgtcaggccaaggtccacgcgggccccggtgtggtgaagcggaacgcccccggcgttccccaggacccggaggtgaagttcatttttgacatggatctgtccatgaccggaaacaccccctgcaccctggccgccggtgcgctggagacgctccacggccactccacccgcctgtttgaaggtgctgtcaccgacaggctccgggacgccatggaggccggataatctgcgaaaaagcccgggagacgtgtacggacgtctcccgggctttttgtacatgttgtcacttctggaacatgggggtggagagataccgctcgccgctgtccggcagcagggccacgatggtcttgccggcgttctccggctgccgggccagctgggccgctgcccacacggcggcgccggaggtgatgcccaccagaatgccctcagtccgggccagctcccggcccgtggcgtaggcatccgcatccgtgaccgtgaggacttcatccaggacgctgcggtccagattctccggcacaaagttggcgccgatgccctgaaggccgtgtgggcccgcatggccctccgtcagcaggggcgaggaagcgggctcaaaggccaccacgcgcacagcggggttctgtgccttcagataccggcccacgccgctgacagtgccgccggtgccgaccccggccacaaagatgtccaccttcccctccgtgtccgcccagatctcagggccggtggtcttctcgtgtgccgctggattggcggggttttcaaactgtcctgcgatgatgctgccgggaatggactgatgcagttcttccgccttggccacagcacccgccatgcccgccgctcccggcgtcaggataatctccgcgccgtaggcggcgatcagagcccggcgctccacgctcatggtgtccggcatggtgagaatcacacggtagccctttgccgcagctgcggcagccagaccgataccggtgttgccggaggtaggttcgatgatggtgccgccgggagccagacggccctccgtctccgcccgggcgatcatgttggcagccacccggtccttggcgctgcccgcgggattcatgcactccagcttggccaacagcacggccttcaggtcgtggttccgctcgtaattgcacagctccagcaagggcgtgcggccgatcagctcagtgacgctgtgataaataggcattggaaatccctccgttctgaatgaatagcctcatgatacacctgccgcaccgggtttgcaacggaccatttgccgaaaatccgcctttaattcatagcatttttataggatatggaagaaaaaaagcggaccgccgacaggcgggccgctttgagatggtatactcaggccaccacggggatttccacaatcccggcggcaccggcggcgatgctgtactcggggaacaccagcgtcacagagccgtcctcattcagatagaaggaggtggcgtcatccacagtggtgaagccgccctgctccggggtgaagaagaggccgctctcatccgccgcgatcttcgcatttacggcgtcattgcagatgccgacccagtcctcgcccagcacgtcggccagggtgatgtccttgtcgttggccaggtccaggttgtagcagtaccgctgctgcatggcagcgacccagccctcagcgaaatccaccacaaaggagaccgtagtgtcggtctggctcttgatctcgtagtcgataagcacgttcatctcccggtcggcccactcttcctcggtgccgccggtagccaggaatgcatccttgtaatcatcccagtccgcctgagcctgggccagatgggcgtccacccgctcctggatctccgcgttgaccttctcggccaggtcgccctcagactccacaccggggacggtcaccttgtagtcgatgccgttctccacggtctcatagtcccggatcgtcaggacctggaacagcccgcccagcaccggtacatccgcagccgcagccgcgaaggtcggggagacattcaggcccgccatcagcacagccagacaggcggccacgctgcccgcagtccgccggaccaccttataaccgcggctacggctgctggtcctgccctgccggatgcctgcgcggacccgggcgtccagctcctccggaatgggggtggactcatattcttctcgtgcacgcttgaattcgttcataattgatctccttccattgatatccgtaatttcttcaagccggtgtacagtctggttttcacggtgttcagattccagccggtgacggtgctgatctccttgagagacaggtcctcatagaaccgcagcttgatgatggtccccacctctggcggcagagcgtccacccgttgggctagcgtgccgtccgaaggcagagggtcctcatagctgccggcgtccagtgcctccggcgggatcagcgtcacccgctttcggctgcgaagcacgtccatgcacacgtgaaccagaatgtgataaaaccacgcacggagggcctccggctccttcagctccccctgtttctccagtgccctgcagacggcggtctgcaccgcgtccagagcctcttccctgtttttcaggtagctgtacgccagtcggtaaaaccgcgcctgatccgttacgagatagtcggtcagttgcttttccaggatatgtgacacgtttctcatggtcctttccgttcgttctgctgtatagacgcgccgggagcggaaaaagtttggagggagaacaattttctgaaaaattttctgcgcaaaaaagagaccggtctcccggtctcttttcatcggctggaatcaatcgtaacgcagggcgtcgatggggttcagcttggccgccttgttggcggggagatagccgaacaggatgcccaccgccacggagacgccgaaggccacaccgatgccgccagccgtgggcatagccacgaagccatcgttgccggtgcccagcaccagagcgatgacattggtcagcacgttggccatgaggatgcccagtaagatgccgatggcaccgccgatggcggaggtagtgccggcctcaatgatgaactggctacggatgtcccggcatttggcacccagggattttcggatgccgatctcccgggtccgctccgtgacggacaccagcatgatattcatgataccgatgccgcccaccagcaggctgatggccgcgatgaggatcaggatcatcatcagggtgttcagcatggagtccatggcgtccatcatctctgcggaggtcatgaccatgtagtagtccgaggactggtaggtcttgaacagccggttttcaatgatgcccttggcagcagacgccgtatcccggtccgtactggtcatcagatacatgtccccatatccgccccccagccgctgggcattggcataggggatgtagatcacatcatcgacgctgccctcggtgctgtcgccgctctccgccagtacgcccactaccatgtagggcacgccgctgacggaaatcgtctgacccagcggatccgtccggaaagcgttttccgccagataggaaccgatgacacacacattctgatggcgctccacgtcaatgtagcggaggaagcggccattctccaggctggagccctgcatggtcttctgggtgtcggcgcggtaaaatgcctcgctgacgccgtaaatgctggtgcggtcgaagtcctccgttccctgccgcaccttggctgtggcggacacatagggcgtgacgccggagaggtactgggggtacttctccacaagcgcgtacatatcttccgtgctcacgtcccgggtgccgccctcgccgcggccgtagaccatcacctggatcaggttggagcccagctgctcgaactgggcgttcatgtaattctgcatgccgttgcccaggctggtgatgatgatgaccgccgccacgccgatgatgatgcccagcatggtcagcagcgcccgcatcttgctgagcagcagggatttgatggccagcttgaaggattgggtgaaattcatgccggctccccctctcccgcgtcctcctggggctggaccacggcctggggatcactggcgtccccgtcgtagatgatccggccgtcctgcagacggacgatgcgcttggccttaacagcgatggagttgtcgtgagtgatgaggaccacggtgtccccctcctggtttagcttctgcaggaaccgcagcacctcccgacccgtgcgggagtccagggcgcccgtaggctcgtcggccaggatcaccgacggattccccgccagggcccgggcgatggagacccgctgctgctggccgccagagagctggctgggcaggttcttccgcttgtcagccagacctacccgctccagagactggatggcccgttcgcggcgctcctctgcggagacgccggcgtacagcagcggcagctccacattttcctgcaccgtcagcttggggatcaggttatactgctggaagataaagcccagcattttgttgcggatctccgcctgctggtcgtcctccatggtggacacatcaatgccccccaagtggtaggttcccgacgtgggaacgtccaggcagccgataatgttcatggccgtggacttgccggaaccggaggagcctacgatggccacgaactccccctgatccaccgtcaggttgatgccgtccagggcgtggacggtctcctctcccatgtggtagatcttgtagatgtctttcagttcaatgagatggctcacgggatcagcctcccatcatcatgtccatcaaactggaagcctggttgctgatgaggaccacatcgccctcctccaggccgtcggtaacctcgatatactcgtcatcgttccgacccagggtgacctccttggtctccagcttggtgacgtccaccacgctcaaaccgtcctcactgagggcgccggggccgggaacagtcaccgtgttgccccgttccaccgcatccacggggatgcacagggcgttggggaccacttcgccgatgatctgagcggagacattcatgcccggccgcagatcgccgtagtcctcaatgatgatggtgacgggatagctggtggcaccgttggcggtagtgccgttgatgctgaccttatccaccacgccggagaacgtctggccctccagagcgtcggcggtgatccgcacctcctgccccacttctaccttgccgatgtccagttcatccactgccatctccagctccagatagctcaggtcgtaaatcaccgccagcgtgccggaggaagcgccgtccaccttgtcgccggccttgaagttcttctcaatcacggtgccggcaatgggagatttgatgttgtagtcatccactgcgccggaggcagtgctggcagagagctgggcggactggaggttcagccgtgcgctctcgatctggtcccggatggtctcggactccacagtgcacagcacctcgcccttggtcaccgtgctgccggccagcttggagaaatcgttcaccgtgccggaaccggaggcatacaccacagaagaggcgggcatggacaccggagcctggccgtagctggaatagctgccgatgatggcggaggcagtgacggcgtcggacaccgtaccgggattgttcagccgcacccggacggagacggcctccttgccgttgctggtgatggtggtggagttggagacataggtcaccgtgcccatctgagagccggcgtagccgtccacaaacacggtggcggcctgccccacatagaagtcactgggggaggcaaaggggaacaggaagtcgatggacagctccgtgctggccacgatcttcgccagctgcgtcccagcggtgacgctctcgccgttgtggacgtagatctcgctcaccgtgccggagatgggcgccgtggggtgcagggcctcctgggcctgctgataggacatctgggcctgctgcacggagatctgggcccggtccatggaatcctgggcgtcgctgctgtccatggtgtagagcagggtgtccttggtcacaaggtcgccctcttcaaagggagcgctgacgatatcgccggagagcagggtggtgacgttgtaagagtccgccggctgcagcgtggcggtgccggagacgctgaccgtcagatcctgccgggtgacggtggacaccagatagctgctgctgagttgggtgttgacgtttttggtcagtctggacacgcagcccgccacaatggcgatcaccactaccaaaataatcagaattttcagccagcgcttctttttcttgccgccaaagcccttcagggagaatttctttttctccgtcttttccggcgcgggcacgctgggcgcctcggcggaggtctcgttcatccattcagtttccatgttatgtaatctccttgttctcgatttccgcggtggggcgcttccccataccgcgcttgaagatgttcagaatgttttccaggcgatcccgggtcccgggatcgccaccggcctgcaggccggtgtaaatcatgggagccgccacaaccagcagtgtgcccaggatgtcgcccaggtcccggtcctgccgcaggtccagcaggtccggattcaccgcgccgcccaggcgctggagaagcgtttccgcatccagcatttccagcagcccattcttctgcatcccgctgttgcagcggatgattccggtcatggcgccgatctctcccaggtgctgattgtcgatttttgcctgcacgtaatcatacagatccaacagcgcctgaaaaatgtcgccgccgtttcggagcagaaactcctccagcagcatgaacaactgatccacatatcccttcagcagatagcggaacaggtcctccttatcctgaaagtacatgtaaaagctgccccgggggatgcctgcctccttgatgatctggttgatggacgcctcgttgaaaggccggtgggaaaactcccgggtggccgcctccaacaacttctcctgcttttccgccggcagattcaaaaaagtgctgctcggcacgctgtttcatcctctcttatacgaaatagaaggtccgttttcttcagcgccgcccctgattttataccttcctcccgggggaaggtcaaggggtttccggcgaatggaaaaaagaaacatgacaacctgtcgcttatcatagctgacaagttgtcatattgcaagagggaattgcgaaaattcacaaatatttcacagtgtttccgtcacttcatacagaggtcggacccgctgatagggctgaggccggtactccaccgaagcgatccgccgtccggagacaccgtacttgggggagtagccgaatagatccacataccgatccaaatcgtcccgctccgccgccatggcctccagcagcaccgctgcggcccgggcgtcatccaccgcccggtggctgttcaccgcctgatcctccaatccgtaggctgtgatggcatcgttgagcttgtgagggtaatcccgccggtcccggtacaccgtgaggacatccagaaaccggggtgcccgcaggacatccgcccgcccgaagggccgcaggaaatgatagaggaagttcagatcgaactgggcgttgtaggccgccagcagcgtccgctctcccccgcccaacaggttgcagaacgcctcacaggcgtcggctttctccacgccctcctgttccagctgctcttccgtgatgccggtgagctgggtgataaagggcggcagcgtccgccccggggagaggcggagcagcaggtccatgcagtccgtctctccctccgcggaaaaggcggcggcccccagctcgatgatctcgtcccgcccgaactcgatgccggtggtctccgtgtcgaataccacgatccggtcaaattgcttccaaaggcctgtctccatggcagtccctcctgtcgaatgttgtcttttcagaatagggcggccagccggaattgtcaagggggtgccgccgttgactttctcccccgggccggataaaatgaaggcagaatctcggagaggagggtactctgtgaagcgcggacttgacaccgcctcctaaaatcaaccaattattttaggaggcttatatgaacgacaatttctgcccgtcccacactgtggtggaactggatacctgggagcgcggccctgtattccgtcattttatcgacgacctgcgctgtgtcatgagcctgacggtggatctggagatctcccgattcctgaagcggctctcggccagtggcttccgcttctaccccgccatgatctgggcggtgtccaacgtgctcaacgcccacgcggagttccggtacggctgggacgatcaggggcggctggtcctctgggaccggatcgagccctactacgcccacttccacccggacagggagacctttgcgaagctggtgacgcccttctcttcggacctggagaccttccaccgccgctttctggaggatcggacacggtacgccgccctggaccacttcgacctgacggacgtgccgcccaacacctttgatgtgtcgtgcctgccctgggtccggtaccgcagcttcgacatgcacatcttcgacagcggcacctatctggccccggtggtcacctggggaaaatatgaacgggagggagaccggacggtcctgcccgtctccctgaatatccaccacgccgtggcggacggatttcatctgtcccggtttttcctggagctacaggagctgctggacgcaccggcggagcattcataaattataaaaagaagcgggaggcatccagcctcccgcttctcttcgctcaatgatcgaacttgtcgatttggacgctgtcgcagtactgggctttcagctcctgaagacggccgaatatctccgtctggcagtgggcctgctggagctccggcgtggtccagctctccaccagcagcaggtcctccggtgcctccgccgccaggaagtagtcgtacttcaggttcccctcctctttcagggagttggcccggatgcccaaatcacagagggcctgataaaaggcctcccgttggccggacttgcagtgataggtgacgttccaagttaacataagatatccccttccattttatggtcaaatttcttcacttgcgcactctgtttccgtcaaaagctccggcgccagccgggccatgtccgccgggatgggcgccgtcagggacagatgctctcccgtcaccggatggtccagatccagagcgtaggcgtggagggccggccgggggatcaggtccgggtcctcttccccgtacagccagtcccctgccagggggcagccgatggaggccatgtgcacccggagctgatgggtccgccctgtctccggccgcagccgcaggagggacaggccgttcgacctccccagcacctcataatgggtgacggcccggacaccgtcaggccggacgcaccggcccaccacagaattcgggtcccggccgatgggggcgtcgatagtgccggatttcggatccggacagccgatgcacaccgcccggtactcccggcaaaacctctccgtgtggagcgcgtaccggagccggtcgtggatgtagccgctcttggctaccaccatcagtccggtggtgcccttgtccagccggttcaccgggtggaacacgaagtccgcgccccgctgccaggccagggctccggccacggtgggcgtgtccggcaggaaattggaggcgtgggccgtcataccggcaggcttgttcaccaccagcagatggccatcctcccagacgatgggcaggggccagggccccggcgtggggcgcacccggggcggacggtggtcgctggtctccacctccagcacgtcgccggtgtgaaggatatccactgtacgggcatggatgccgttgacccggatgccgttctccgtccgggtcagccgggatatggcgtgggaggagacatggagcgcagccttcaggatatgccggaccgtggcgccgtcctgttccggcggcagggtatatgaaatcgtctccatcggacacctctccttcggcgcagcagaaaaatcccaagcggcagacaggcggcgtccaaggcggcgaacacaccccacagaccgctccagtaccaggccgccgtgtcgaacatggccaccagcagccgatgccagaaaagcagctccgccgcgatggcgaggaggtcgaacagcacatatccaccgcccagcaggtaggccccccgcccccggtgcaggcagaacagaaggaacgacagggctcaaaaggccggaactcctgcatggcaaaacctcatttctctgttattgtactctgacgccactctgtttgcaagggttttggctctggtaaaacgccatccttcatggtacaataggagcagtttttttcaggaggaactcccatgctcttatccgcagaacatctctccatcaacttcggcagccgccagctgctggatgatgtgaatttctatctcaacgagggggacaaggtgggcgttatcggcatcaacggcaccggcaagtccacctttttgaaggttctctccagcgtcacggagccggacggcggcaccatctcccggaaccccaacgtccaggtcagtctgctgcctcagaacccggcaatggaggaatccgccacggtgctggagcaggtcttcctccacttccccgccgagttccgggagctgaatgagtatgaggccaaggccatgctgaaccggctggggatcacagactttgcccagaaggtggggacgctctccggcggccagcggaagcgggtggccctggcggcggccctgatccacccggcggacgtgctgattctggacgagcccaccaaccacttggacagcgagatggtagcctggctggaggactggctccgccggttcaagggcggcctggtcatggtgacccatgaccggtacttcctggagcgggtggtgaaccacatcacggagctctcccaggggaagctgtaccactatgaggccaactactccaagtacctggagctgcgggagcagcgggcagagatggtggaggccagtgagcgcaagcgccagtctatcctccgggtggagcgggagtggatcatgcggggctgcaaggcccggaccaccaagtccaaagagcggatccagcggtacgaggccctgctgaaccaggaggcaccggaaacggacgaggccgtgcagatggcggcggcctccagccgcctggggaagaagatcatcgagctgcgggatgtgtccaaggcctttgacggccgtcccatcgtcagccgcttctcctacaacctgctgcgcggtgaccgcatcggcatcgtgggccgcaacggcgccgggaagtccaccctgctccacctgatggcaggcgaactggcaccggacagcggcacggtggaggtgggcgccaccgtgaagatcggccacttctcccaggagggacgagagctggacctgaaccagcgggtctacgactttatccacgacatcgccgatgaggtcaggaccgatgagggcaccttctccgccaaccagatgatggagcggttcctcttccccggtgatcttcagtctgtgcccatcgggcggctctccggcggggagcggcggcggctgtatctgctgtccgtgctgatggaagcccccaacgtgctgctgttggacgagcccaccaacgacctggacgtgaccaccctctccattttggaggattatctcctgggcttccccggccccattctggcggtatcccatgaccggttcttcctggacaagctggcggagtccattttcgaggtccggggagacggggagatccaccggttcaccggcaactggacggactggcaggccaagcgccgggcggaagaggccccctctcccaaggcggaaaagcccaagcccgcggcagagcgtccccgggaacggaaactgaaattcaccttcaaggagcagcgggaatttgagaccatcgacgcggacctggcggagctggaggctcagatcaccgcctgccagacggagcaggagagctgcggcagcgactatgtgaagctccaggagctccaggcccgtcaggcggagctggaggccgctctggaggaaaagacggagcggtgggtatatctgaatgagctgaaagaacagatcgacgcgcagaatgggtgaggggcctttcatcaggaatcggcgttctgcaccgtacgtacaagtattctgtcaaggggcggtatctcggcggaatagcactttacgccttgtgttatgaatatcaaaatcgcggaggcccttccaggcgttggacctggaaaaagaggggcattgcctgtgggcaagacgatgtccatactctctgcgaagcattggagataccacgcggcacactctgcaatcacattcttcgcaacaaacgagcgaatgcccagtttgagaaacgcagggaggaataccgccttctgatctgtgaggtctttgctgaatatcggcaggtacttggcgctgaaaagatttggatgattctcgcacggcgcgggcatcaggtcggcgccaaatttggcgctgacctgatgcgggagatggggttatccagagtttgaaactgcgagaaccggaggagaagaaaataccctccgtcagcaattttcagcagacaagcaatcaaatccgggccagtgatgtggcctgttttaagtatagagaatcgatatctttatatctgcgtgatcttggagctattttcccgtaaagtgatcgcgcacaaagtttcccgaaaaacagcacgcagctcattacggctacattacaaaatggcgtatgagttgcgtaagccagagacaggattcatttttcacagtgactgcggattttgtttgactttgcaaaaggccgatggatttccgtaaggagctgatggccgtgagacacagaggttcagacttagaaaatcagactgcttgcagccagaatttgaactgttcccatttttatgtcacattttactttcgaatacctttcctcaaaaaagcttgtgctgcaaggatttcgcacataaaacagccctacctaatctgataagtcctacaaacttgttcagattgggtagggtcgtttctcttattctatcaatcgaacttaggtgcggaaacctcgtttccagcaaaggtattggggccgggattggagagggagaaatacattttcgccgccttggtcgtaccaaaatcccggttggagccactgtcctgcacctcgttgaaggcatcccggaacatctggttgtgagcctcctcccggttgagcaggaagtcgatggtttcacggaccttcttgtcgtcgatctggcggtacaggtattcatagaccaccttggcccgctgctcagaagcgatgttgctgagcaggtccgcacacagatcgccggtcacggtcacataatcgccggtccaggaatagccggaggcattgattaagccggggttcaggcccaagatcacatggctctggatctcgcccgccttgacctgatctgcatctacatcgtggccgttgagcagattaatggtctgggccaccatttccatgtgtcccagttcctctgctgcgatatccagaaacaggtccttgatcttctggtccttgatgcggaagctctgggacagatactgcatagccgctttcagctcaccgttgccgcctcccagctgctcctgcagcaatgctgcatactggggattcggccgctccacggccaccggatggaataactgcttttcatgcttaaacatatctaccgctcctttttcgtggtaattcttagtttgcttgatatgctccgaaatataccggcagaaagcggctcaggagatgctaggccgaatcaaggaatagggccatcagtcgcggaactgcagctagagcaaacaattttaccgcgtacatttacaaagcaatcgataaaaccgagcggtgaatcattttatcgctgttcaaaatgggaagcaatgattaataatcggcagcagaaatcggtgataaacacaaagatgaaaaaatgggaatctctacctcagggaccatgctaaaaccggagcttccgccattgttgagatatcggtcaaaaacctttcctgagcgacggaaaaggtaagatctgtcggatcattcgctgtgcctatgcttgtccacagttcagcaaactgcttcaggaatacgaagcaggcggcaaagatgctgtggatgataaaatcatccacacgcttcgcaaaagattccccacagctaaaatcatgcccgacctccttgtagaagcccaacacagtacggtccggatctttgaagttatgaaggcaatcacggaaaagaaggataagccgtgaatgcaatcgcagaatttctaagagaggaaagagtaaccttttccgtaataccacagccagatgcctttgcgtgaaggtgttgacatgggcaaacgggaatgtgaaatgctgcgcagtgcgctggcctctacccgttatgaatacccccgcccaaactgaacagatatctgtcaccgttcagtttgggtgggggtattcaaggagcgccgggtatgggcggccgcctttgtccgcttatctctccgcttggacagccatgcctctgtctcatcaaacatgcgtctcaaccggttcatcagttcctctcccagccgctccgagaacgccccacagagtttcttcctgctcagatgtgcctgttccagaagccagtccagtttctggttcaactcgtctctttccgctttcagacactcatattccgcccgtgaaatggttaccatctccaggggtgcttgtcccgtgatttcttccgtttttcatgggtgaattatgctatattggggccaaagcgttcaaaacctccagtgctttcagccgtttcctaccccaattatatgtaggccactccccgggcggcgaacctttgaccgctccattttcaacccctccatcagccagcggtatcgctgcggcgtcaaccgccgtacctccttttcgttttgcggccgttggtatgcgcctgttccagccgcttatagcttatacagcaggatgcatccatcccggtccctgcagaactccctgatgcagtccagccgtctgccgcagagcagaaacagcgtattggtgaacgggtccggtttaaaccgttgctgcaccatggccgccaccccatcgattcctttccgcagatccgtatagctgcaggcgagatatataccttgtctgctctggtgaagttacgcagcatgatttcagtacctggcaaatcgtccacactgcagccgtgtccgcacctgaatagatgcctgctttcccttttccgttccggatgcttgcaaccactccaccccctctctcccgctcaggcagcaatgggagttctacttcgccttatccgtccctacctttgacagttacatcacctataccgtgatgtacgatgcggagggaaatgatctgtccaccatggcaggcatctggacgtcggcatcattgatacgagggctctgcggcccgaactgacacgcggcgatacccagtccatgcccaaaaaggggaacgggccaaccttgcggatggcccgttcccctttttcaggaaatttggaggaaaagaagtatatctatatgaattttattgcggatgtactgtgaatacatctccgtcaaatgtaatatgtacaacatccgcatttttcagagcgaccgctttctcagaggaaccgagggcttctgcaagcagttggacggccaattccgaagacactaccagaacattgccgccgccgtggctgtaagtttcctcacagattgtctggagggcgcccgtgagacgctggcgggcgctttcatagttttctgtcataccggtcttgtctgcggctgcatatgcggcgagacgggcatgggcagtgggctcttcccctgccaaagcatccgcaaccgcacgcaattctccgtcaaaatagccgcagcccaccccacgcagatccatgttctgattgaccatgagatcgggatttaccgcgctgttttccacgatgatccgtgcggtatggatatccttgaattgatcgctggcatacacggccgcaaactccagattccccagtgcctttccaagttccgcagcctgtgcctgaccgttctctgtcagtgcagtatccagctgcccattcaaacgcatagcggcatctgccgcggtttcggcatgaacggttagataaatctccaccggatcaggagattccattttttcctgggctttctgtgcatagctcagatcattaaaatccaaaacggtgtatgtatggtctttgtactcaatcaggacaatactggagttgtccagcggctccagttcctgctcctgcataatctctgctgcgatcatgctgttgattccaccgtgggccaccatcaagatatttccgccgccgttttgggccctttcctcacagatcctctggaaactttcaaaggcccggtctttcatctgctcataactctcggccagtccctccggatccttttcatggaactggtttgtgaattcctcagttgtcacaccgctgaactgcataccctcgtccgtcatcagttcggcataactcatcggctcataggagccgccatcgacctctttcaggtcttcgacaggtatgatctccagatctctggatgtctgactctgggagaggatgatgcgcgcagtttcctgggtgcggcccagcgtactggcataggcggcttcaaacttgacgccggagagccccaggcccacggcatatgctaccttgcgaccttcctctgtaagcggcgtgttgccgcggccgctgacaaagcggccggtctgattcgtcaaagtctgcccgtgacgggtgagatagacgtataccggcgcctcttccacagccccatcctgaacgggctcctgcacaggagctgtgtcggggggctgctgggaacaggcggacagcagcacacaggccagacagaatatactaaatgtcttaaacagacgtttcatggcaacaagcctccttacttgccctgatagcccagatcgtttacctttttagggatggaaaaggattcagagatgtcgtgcaacggagcccacacttggttgaagaaggggctgcgggcggcgacggctccataattccaagcattgcgctcgcactccgggcaccagtgccctccctttaatatcaggttcggactggcctcaaattcgtgtccgaacgcgcaacgccagcgcacgggcctgtagaaatcaccggcggtataatcgaggcaggcaccgccacggaactccgcggcttccttcatgtcgttcagccccagctgctccagtggcttgctctcatcatagccgtggttcagatagaccggtgtgcggctgggctcggggaattccacctcatcccagctttttggctgtgccaaggctgccgcccggcttccaaaaaaggcgcgcacccagtcatcgtgtccctcttccagcatccacagcgttcccatctcctgatgggcaatctgctcgtgcatggccttcatccgctcctttgtaggcagggccgcagcatccccgtttgcaatcatcgtctccatggcctgccacgcgccagcgatatactgctgataggtcatcacacggaacctcaggatatcattgagtgcgtctgagtccgtataccactggccatggaaattgaatcgggcaaaccatcggggctcaaatacatccttgaatccaaagccaaagggtttcagcatatcatcaaagtattgtatatagttcagccgaaagctctcgccgccgccaatgttgtaaatgccccgccagaacttctccgggacccaatcctcacatacgtttgccaggaggagcccagactcgatggaagtcacccattccaaaagattctgcggcggctgatggaaaatgatcggttcccgggctgccgactccttggagggcataattcctgtttgacgcagactcacccaatgcttgagcccggactcaatgaccgctctctcggcggcgattttagagactgcgtaatagtcaaatgcagatcccttgatgggatctccgcaacgcccccagtggatagggggcagacggcagccggtctctgccactgttccgatatagaccagtttgatcgcatccggatctggttgtgccttgatcgcccggatgatattcatagtcgatccaaggttgacctcaagactgcgctgcggcagtttatcggcttcgggagaaacgaacgcccccacatgcaacacataatccgcgcctgtcacacagcgcaggatatcgtcgtagcagcagaggtccccccagacaatctccaacgcagcgtcatgttcatagcgggacataaatgctttgttcttagcggaaggccggaccaaaacgcgaaggttgaagcggtcggaccgggataggatctgcttgaggccctcctctcccatggtgccagtggcaccagtaagaaatatgatttttttacttaacatgcttgttcagcctccttaccttacttactgccctttttgacaatatcctcctttcaatttttgaaaggaggatattgtcatgtttactctgcgcgataacacacatggtaccgggcaattttgccatctttttcttccagcagctcgccgcggcagggtatctcaataccggggtagcagatgatgtaatccagaacattgccgttgagcgagaccggcttggcactcatgggcattgagtggaaatacatattgaaaatcatgtccacgccctcttttcctctgacaaacatagggtccatgcctgcacaggtaggagcggtgtcatagaagatgcaatcgtcagcgaacagttcagcaaacagtttggagtcgtttttattgaagacttccgcataattggtcagtggattcatagttggattcctccttcaatttttatcacaatccctcggtgcgcaggaagccgtccgttccgccgtcggcaaaaatgatagcaccgcatatcgccacagactctggactcagcagaaacagagcaaccttggcaatatcatcagcaggcaggaacttgccggtgttatacagcatggggatagggtagttaatcatgttggcagagaaatccgggtcagccacaccctgatccatcagctcagtctgcgtagcgccgggagcgatggtgttcatgcggacgccgcgagctgcccaagaaccggaccagcggcgtacccagcgggcgatagcattcttggatgcctgatacgcctgatatttggcaggtccctccagtgttttaccataggcaaccgctgcgtcctcatcgttttggttcaacatgatgtccaccagttcggtgttcagctggggcagcgtggcggagtttgaggacaccaccaagatgacgcccttctttttctccaccagcggataggcgccttctgtcatttctctggcagcaaaatagttaatgctgacgatgacatccgcaggctgggtggggccaacgccggagcaggacacgaagccatccagtccatctggcgccgcagcatacagcgcctccagtacccgtccccgctctgctttcatcgccagatctgcggagatgttgacgtccgcagcgtcttcagcagcggcccttctggaaatgttgatgacatagtgtccctgagccttcagctgtctgccgattgccgcgccgatgccggatgatgctccggtgattgcgtaaattcccatattgatgagacctccttcatttttatcacttcgcaccttcagaatgcgaaggggaaaacaaatcaaatagagagggcggcccgataggcttcatggatagcgtttagagccagccgcggcgccgccagtgcgtcgcccaccacatagcagggaatccctgcttcagcgcaggtatcctgtagatcctgagagggaaccggcttggacccaatcgccatgaccacaagatctgccgcaagcatccgttccttcccatcctgctccacgataacttcgtccgcccggatttctttgcaggtggtatttaccaggacctggatatcttcctgcgccattgccatatgtgtgccgattttccgcaattgtcccagctcacccaaaactgagtctttcatctctacgaccgtcacgctggaacccttcccagccagaaattcagccacttccatgccaaccagtccgccgccgatcaccacggccttgcccgcggacacatctttctgggccagaagtttatgagactccacgacacaaccgctgtcagcacccgggatattggggataatcggcttggagccgatggcaatgatgacggcgtccggtttttctgccgcaatgagtgcgggtgtcaccggcgtgttggttcggatctccacgcccaagtcacggatgttttctgccgccatgtacgccgcccgttggaaatcgcctttccggggcgcggcaccggccagcacaaattgtccgcccagagtgtctccggcttcgcagaggattggatgatgtccgcgcttgtatagggcatctgcagcctcaatccccgcgatgccgcctccggcgattaggactttcttggcctgaggggccggacgcagagccatggtctcttcctccagaacagcgggattgcgcaggcaggtaatgtgttccagcgagggatcttccaggcagcggcagaaatagtcatagcagccctggtcgcagccgatgcagtatttgatagagttcagctttccggccttagccttgttgcagaattcgggatccgccaactgggcgcgggccatgaccacaaggtccgccttgtcctgcatcaggatatcctcggccatctccggcgtgttaatcctcccgcagggcatcgtcagcagaccggtctcccggcggatacgtgcggcaggctccacgttgaagccgtggggaatgtccacaggtgcaacttcatatacggtagctgcagtcagaatgttgccccgggagatattcagcacatccacaccagcgtctccggcgcacttgcagaaatcaatgacctcttcaatggtcaggccgccttccagcatatcatcctggcagtctatccgcatgaacaggggcatcccctccggcatattggcccgaatcgcctgaatacaggccaaaggaaactttttgcggttttcaaagctgccaccccatccgtctgtgcgccggttgatcccgccagaaaggaaagaatgcggcagatagttgtgtgcacaatggaactcaatgacgtcgatcccggcttctacgacgcggcgggccgcttggccgaacgcttcaataacggattgaatgcgctcctctgtaatgccgggaactgtatattccggagagagcggcatatctgagggaagcaaaatctgcgcctgtgggtcgcttgctacggcgaggccgccttgccacagctgaacagcgacacgaccgccagcagcgtgaactgcgctgcacagctttttcattccgggaatatatcgatcatcggcgatggagaggaagccagtaggggcgcttgcggcatccacagagcaaacctcaatggtattcagcccacagccgcccttggctcgggccacatggtaggcaatcagtttgtctgtcaccatgcgcccgtcttcgctggccgcactctcatgggtgcccatggcggacatcaccacccggttgcgcagctccaactcccggatcttgatgggagaaaatagtttctcgaatgacatttttctgcctcctcaacagctgttcctgacaattgcgcatactagatccgctctgtctaccgtctctgctctgtgggagacaaagggatatattctgtgcaattatcataagtgaactcaaattttatcttgtctgtatatttattataacagcaaaagaggctgcaaagatttgaaagaaatcacaagttacttgcagcgatccttttaaaaaaacagattcctcacaggagaatcggaacggttcttgtagatttgctctgttcttcctggcgtatttccaaaatatacttcaaggtctgtgtgcaaaaaaatccgaaatgctcccgcttttttacaaaaagaatatatgtattgagctcggagtaggtaagctgtataatcttctcaaaaaggaagaacggaggatgccgatggaacagatcgtgagaatgctggagaagccgcagcggtattttacagcccacgcctcttggtacggtgtggttcagacctataccgtctcagaaataacaccgttcttttgggaagacgagtgtgtgatgttctacgttcgctctggttcaggctttctacgagtgaaccagaccttatacccattaagccaaggctgtttttgcagtatgcaccaatttcatgtgttccggtttgaagcgtcttcagaggagcctctgtgcatggaagtgctcatctatccctacccggagatggcctactttgtcacaagctttgccgaagatgatttggcttttggggaatctacagtggttctgcctgcctgtcaggtggatcgtgagctagtcgagcaacttttaagcctctatcgagaggaagcccagtgcgcagacgaggacagtcggctgatccggctatgcatctcagatcagctgcggcttctgtatggaactgctgtctccgtggctccgcttttcccaatgcccctgtgtggtcagattttcctttatatagggcagcacagcctgaaggcactgacgcctgcctctgtggcagagtcttttcacatttccacactccagctgaaccgagaattgcgccgggtttgtctggaggggtttaacgctgtgctgcgtcatgcacaggtatgcaatgcatgcgcttgcctgctgcgcagcaatgttactggaaccatgatggcaaaatttgcagggttcaagagtgaaagtgcactatatcgggactttttgaggttgcggggagcaactccgcagcagtaccgtgaaaaaatgctgctgaatagaacccaggcccaggggctgatcaatgaccagctctcagagatccaagtctatgtgatggagaattttcgatcttcggtcacatgtgatgcctgtgcgcagaaattattcctgaccaagagtatcatcaaccgcctattgagcgaaaaatatggcccggatattacattccataaatatgtcaaccgtattcgtctgcagtttgcaacggggctactagcttccagcgacttgccgatatgtgatgttgctatggaatccggattcaactctgtgcatacattcattcgcttatttaagttggagtgtggtgagactcctgcgcaatatcgggagagaaagaagagggattacgcatgattctggaaggcgggaatatatacaatcacagtggcttgagccggaattggctgcatcaggacatgcttcccggcaatgttcaaatgcgccgccaggttgtatacaatgccactggctatcattatcaggaaggctgtcagtttattttggtagaccatggaggcgggtgcctcatagtcaatggggatgcctattccctggaggccgggagttgctgccttttgtttgttcaccacttttacagtattaaaccctcgcagtccgttccgctcacacttctttcttgcctattttcctacagcacatatacctttttaactaccatttcacaatttgattttctttctattgatgttccgtcgccaccgaactttgcgaatttttctccgcaggagatggtacatatccagcggatcgttgccgcactttccaagccgggaattggtgccaacggaaaaagcattcccttcctgctggaatggttgaccaggcttcatcggcagattggtcttaataaatatcattcaacttaaataccacaaaggctgggaattactaaaaccaaaagcttatgatgccataccccacggcccggtcagaatccgggctagccgggaggcgttcgagcgctccaatgaagaggaatgaatgtggaacggaggaggacctgctgccctattatgctctgttcggcctgccccgcaagctccggacgctggaaaagacgcttgagagtatccccaaagctggtcgcaggataccaggatgggctacttttgtgatgcctggctcctgctcacccaagtcgccggggcacaggaaacggtctgacttgtcctatccgagcagttcccgctctaccggtcggatggggcgtacgaccccacagagctggcggactggttccaccagcaggcaccggacatcgcataccgctttgaccagcgcaacggctatcctgctcatcaaaagaagatagagacagcttgggccgggacacaggagatggcgaaccagagcaattagatgaacctggccggttgtcaaattcagaacacctacctaagagacaagcaagatggcctccttaaaccggaggccatcttgcttgtctcttttcaaaaaaacctgcactcagtcaaaccatttttgttccagaagaaaagtgaattggtgtttaagaaagattcgggaattgtaaagatacctccgcggcaatcaggtaaactgaacacactatctgaatggagggattttaatatgaatatccgaattttgagtacagaacagatcaccgcttatgacacttatctgcgcatagaagagcgggccgctggcacccgggagaagtatctgcgggatgtgcaggcttttgtctgctggctgaatggagccgccgtgaccaaagaggctgtgactagctggaaggagcggctgctggccgagcaccgggcgccttccacagtaaacgcggccttgtccgccctcaacggcctgttccgttttcttggctgggaggactgccggacgcggtttgtcagggtgcagcggcggctgtttcgggacccggcccgtgaactgacccgcccggactatgaccggctgatcgccgcagcgcgggaattgggcagggaccggctggcgctggtgatggaagccatttgctccaccggcgtccgggtaagcgagatccgctatctcaccgtggaagccgttcagcggggccgggcggaaatttctctgaaagggaaagtccgtaccattcttattcccaccaagctggcccggaaactcttgaagtacgccaagaaaaataaaaccgtttccggcgagatctttctcacaggaaacggcaaaagcctttcaaggcggcagatatgggcagaaatgaagcggctgtgcgtccatgcgggcgtggaaccctccaaggtgttccctcacaacctgcgccattgttttgccacggcctactaccgggcctaccgggatatcgcaaaactggcggacgtactggggcatagttccatcgaaacaacccgcatctatctcctaacctccggggcagagcaccagcggcagctcgaccgtctggggctggtgtcataggcggagttaacattccgccccaaacaaaacggtttttctacctgcgggactatatacataaagaaattataccatttctattctcgaaaagcaaggaacttcctaacttccgggcatggaaaagcaagccgcaaaaggagattttttgcggcttggttttgtgcgcctcctgctctccttttattgggagcagggggctttattttttgtgcttggtccttctgctgggcacttgtgcgctaaaactgtggtcagaatgttaattcagttttcgccgggtatatcccggcgtttgtgctatctgtgcggaatgttaattctgacgctgcgaggtgatagatgtgccattggaaaagagccaggaaaggccgagcctttccgagaatacggaacgcctcagcaggccgggactgcgcctgacagacgagctggaactgcgttttctggaaaacctgcgggagcatgggcggacaaaggggacaatcagcacctaccgccgcaacctctccaagctgcggaaatacctgccggaggacagcaatctggaccccgcctttctctccagctggcagtcggaactgttggagcagggctattcccccggcaccgtaaatagctgcacggccacagtcaacggtcttttggagtttgccggacggcgggatctccaggcgggtcagatccctataaacggggaagtgtcttcgccggagctgacccggaatgaatatctccggttgctccaggcggcgaaactcctgaagaaacgccagacttatctgctggtgctgctgtttggcacaatggacctgccgcttcgctccctgtcccgtgtgactgtggaggccgtacaggaaggatgggtgtttgctccacggcggttgcgtgtcccgccctgcctgcgcgcggagctgctggcctatgccggggagcgggggatcgggagcggcccggtgttctgcacccggtacggtaagctgatggaccgtggaaatattaacgtccgcatccaatcgctggcccgcgacgcgcgggtatcggcggaaaaatgtaacccccggtgcctgcgaaaattatgtactgccacgcaagagagcatccgggccaatctggagctgctggccgagcagacgtatgaccgcctgctggaaaaggagtctttgactgcaggttggagcgactgctacaagggaggtgaggagttatgaacggtggaattcctttggcgggggcgtttcaatgcctggccaggcagccgccggaggccggatagaggcattatggagggaattgaagctccataggaaaaacaccgatttttgcagaccgcggctgtgtgccaaatccaggtctgtgcaaggaggaagataccatgaaaaggcgactgttggcaatggtcctttcgctggctatgctgatggggctgctccccacggctgcgctggcggcgggcagcggggggccttctggcggtgccccgtatcaggatctgggccagagagaggaaggggcggtgtctgcggccaagtttaccatctacaaggatggcgtgaaaggcgactcccctaaagaaaatgtgcaggctggtcagttgagcgaaaccgcgcccgatctgaccggggaaaacctttacttcgatcacgccgaggtgaacgggaagcgcgtgtatgaagcgggcactctgacggggcaggatatcacctactacggctccatcagcggggcactgtccattctgggcgagagcgaaaccattgacctttactatgtctccaagtatccggtaacgtatcatgtgaccggcgcggagaagaccgccggggacgatctggtgaagaagggtgactccctgacctttcgggcaatgccgtcggccaagggacaacgactggtcgtaaaggcaggagatactgacatttccaacaccggtacagtctttggccaggacaccggtgaaatgctctttacggtggataacgtacagaacgaactgactattacgatcaccgagacagctgcaacatcatataccttttcatataatacaactgacggcgcattccgcaatggccgcattaccagcggtaacaataatcagagcataacgccgggcggaacgatcacttttagaattgagtcaacagcgggcagcctgttaaatcggtacacattgaatatgctggtcatcaacggccacgaggttcagactcctggcacagagaccggcgagggtgcttatgtagagtctacccttccaagcggcgaaacagtacggataactctggtgcaggaggacactacagcagctccaattcattatcagaatgattatgaggttacgatatccgatgtgtacactgacctctatatcagcgaaggtaattttaagcgcacagacagaaacgaggtcatcatcaaggaactgtccggcataggaaatattgtgggctgggacgatggcgctgaggaatatgttccgggaagcgtaaaccatgtgtatctccagacgggcagaaccggcaacgagttctacttcaatctcaagccaggctatgaaaaaccgcagcttaccgtcaaggtcaacggtcaggtaagcgaagcggagatgaattttgaaaagaatatcggaaatctgcacgacgggagagaaccgagctatacgcaggagcaatatcagtaccgctttgatcttcccaatggcttgggagacaacatagagcttttcctgaccgcgactcccatcacctattcggtggaataccggaatgataggaataacaacgacctgattggcgaaccagagacgggcttcacagtggtggagggcaacaaggataccatcaccatcaccagccggacaccttatgagacggtaaaggggtattcgccggatggctacgttgtaagaggaaccagtgccccagtgtatcacgccggcgatattgtagatgtaaaagatgtagccgccgatgccgctgggaccaccatcatctttgtaccacactgggttcctgtgaatgaagtgaacgagcggaatatcaccatcaacctgtacatcgaagacccgaccgacatcaacggcagtgacattccggcggcgaactacctgcgcacggtggcggagggcgacgccctgttcagaccgaacgaggaacgtggccgggagcatatccgagagtatattagcagctctgatgagccgtggaaagacacttataacgatgaggactttgtgctgcgagagggtggagagatccaagtcgttaaggaatcggttagctccttagatttccactttgatgtgaaaaagggcaacctgacggtgaaattccagtggggtgcgggtgagcagcccgacaccgcggtgcctgctctgccagagaatatcacagagcaaattgccatcaagcaggcattttctgtggatgtgagtgagtccataccggagggctatactgcttctacgacaaccgttgcggggacgatgatcgaagcgggtgtggagaaaaccgtttacctgtacaaggatgcggacaatgacaataagccggacaaccacaccatcaccctgacgtttaatgccggtgaaaacggaatcattgatcctaataatctgacatccggcggagcactgtcagaggatcaaaagaccctgacctacaagctggtaaaaccagtggaaggcgaactggagggcgacaagtatccgcagatcccgcaggtcaacgcaacggcggacagtatggtctggacgggctggttcaacaataaaaatgaatccagccgctacgccgactatgcgaaccaacccgtcggtgcggacgcggcagatctcacctttgatgcgcattacgacgctgccgaaggccataaagaagttgccatccgctattacaccgagcaggagagcggagagtttggcctcgcccgtacccttaccagttaccggaaacccggcgaaactgttacatacggccgccctgcccgtaacggctatgtgacttccaatgaggggacatccggcagcctgaccgtgaccgaggatggaccaaataccgccgatgtctattattatcttgacacggacaacaacgacaagccggatacctacacggtgacgctgaccttccggggcaccggctatggcagttgggatattgaggacaccatgtgggagcagatggaggcaggaaaggattacatctatgacacggactcccgtgctctgaaagtattccttgtaaaagcaaacgaagcaggctttgaggcggagacctatcccgaggcccccaaagtaattcccgaagatacctacctgtttgactcctggcaggatgacagcaagcacgcctatggctccggcacggagggcgacggcatcaccgttggaagttccgtgggggcggaagacgccaacaagagctacacgtcggtctacaacgaggataagaacaacgacgaaaagcccgacgacgagcagtacattacgatcaccttccgggctggggagcacgggacgtttgccgatagcgaaaagacagtgacttatgataagctgctgccgggctacagctcttatccggaggcccctgccgtgacagcaagcacgggctggcagtttgcgggctggagtccggaatacgataagagcggaacaatagaagcgactgtacaggaaagccaaatgtacacggcgacttatcgcgggcaaggcacgctgacctatggcggcaacgcacagagcggcggagaggttttcgacctgccggatgagcagaccgtttgggaaggaaccaccgtggagctaagcggccaaacgccaacccacacccccgtcaacgaaacatccgttgtattcatcggctggtccagaacgaaaaccggccaaatctatggcgaggaggatcaggaagcgtttgagaagatcgcgttgttgcctggcagggtttacatcgacagcacggctttgacgatctacgccgtatggggctatgatactgatggcaaccagaagccggatgtgacggaacccacggaaaagcccaacctgatcaatgtcgtaccgcctgcggcaatcaccgtggaaaacggcaccgccattgaggagatggggcttccaacgcaggtgacgattcagaccacgaagggcgatatgcaggctaatgttacgtgggatactcaaaacacaagctatgatcccagcaaggcagaggcgcagaccttcaccctgaacggcacgctcacgctgccggagggcgtcacgaacacgaacagcattcccttgatgaccaccatcagcatcaccgtgaatgccaaggatgtggaacccggccccgatccttctgagtcctacaccctgacctacgatgccaacggcggtttcggcgggccggggcaggagaaagtaagcgcggatgaagcggaaaactatcaactgaacaccaccgacaaaccgactcacaagacggctgaagatggcaccatgatcatcttcatcggctggagcgctgagcaggacactaaaatctacggcgcttccgataaggacggcccgaataccattgacaagctcaccctgactgccaacgatgaagtttatgccgtctggggctatgacgccaacgagaacggcacgcccgacgtggaggaagacggcaagtacaccctggcctatgacggcaatgccatcaacgacggtgatcaagtcgctggcgtccccgacggcggagaaatcaagtatgtttccgggcaggtcgcagttctggacaccgaagaacccacctacaccttggcgccagccacggatgactccgctgtgattcccagccccacagacgagccggagacagagacgctccccagtggagagtccgcaggtgaggaagagcccacagagagcgaacctgccgcaaccgatcctgttgaggaatccatccctaccgaggagagcgccccccccgtagaaaccactcccgcgcatgtgcccgagttagcctccatcggcatgacgcgcctctcctaccgcagtgcgggcgatggcagtggcgacagcgtggtgttcatcggttggtccctcaaccagcacagacagattttcaagggaaccgataccgaagctttcaagtatgtacaaatcgttcccgccgtgaccttcgacgatgaagacatcaccgtgtacgctgtctggggctatgattccgacaacgatggcacagccgacgtgctgggcgagaattatgtgattcgctcctatgccggtcccaacggcagcatcgatccgagcggagacaccaccgttgcagagggcggcgaccaaggctttacctttattcccgactccggctatgcggtggataagatcgtcattgacggtgacacgtatctgaacgacggcaacctcaatctggccggctatgatgcggacagcaagacctacaccttcaccaatgtgcaggccgaccgcagcatcgtcgtgaccttctccgccgatgcggacagcgacggcgttcccgacaagtacgatcccgcgccaagcgagagatacactgtcaccgccagagtaaacgacggtaacggcaccattactcccgtcagcaagaccgttgacgcgggcgatgatgttgtattcaccattaccgcctatggaggttacgcactagactacatcactgtggacggcaaggtggtctactccaacaatgatgcagaaaatccattcaaggatacctggacgctcaagaacgtgcaggcaaacagcgaagttgtggcctactttggcgaggatcagaacggcgacgacgttcccgatgcgccgacctacctgaccgtcacggcgcgggccggtgaaaacggctccatcagccccagcggcaccttgctggtgaagcgaggcgagagtcagagcttcagcatcactgcaagctccgactaccatatctccgatgtggcagtaaacggcgtaagcgtgggcgcggtcagcagctatgagatgataagcatctccgagaacatgaccatcacggccagcttcgcccgcgacagcagcggcggcggaagtcacaccacccgctacaccatcacggccagcgccggtaagggcggagagatcagccctgacggaagcgttcgcgtggtccgtggcagcagcaaaacctttaccattaccccggatgcgggctatgtgatcgaggatgtgctggtggacggcgagagcgtcggcgctgtggataagtacacctttgagaatgtgcgtgaaaagcacaccatcgaggcggtctttgccgagcagaacggcggtgtggcagacccggacgacaccggcgtatctggctggctgaacaccaaggaccacagtgcctatctcggcggttatggcggcgggtggtttgggcctgacgataacatgacccgcgcccaggtggcgcagatgttctataacctcctgctcaataagaatgtgcccatcacggtcagcttctccgacgtggccccggacgcatggtatgccgaggcggtcaataccttgggcagtctgggcatcgtcgccggtatcggcaacgggcaatttgcccccgaccgggcgatcacccgtgcggagttcaccgtgatcgctatgcgctttgcagaactggacaccagtggggagaacatctttacggatgtatccgagaacgactggttctatgactatgtggtaggcgcgatcaagtatggctggatcaccggctactccgatggccgcttcggtccttacgacaccatcacccgcgcccaggtgaccaccatcgtcaaccggatgctggaccgcagtgcggatgaagcctatgtggaccgccacgcagatgaactggaacagttcaccgatgtgccggacactcactgggcttactacgaggtcgcagaggccaccaatgcccacgactacgaccgcaccagcggcagcgaagactggacacagctctggtaagcatactgaacagtacggaggaaagggacttcgttccctttcctccgtatgcataaataaaataaggagttctttaagccgtaatatacttaattgccgcattgccgcctttgcagaaatggaagaaggcggcaatgcatcccacttcaataccgctctgttaaaacacagcatccctctgccggatgggcctgctgaatcattggagaagcacatgacaaatccggaaaccttttgcggtgtgccgtaataccccatttttcttgtaactactcattcgttttatccattgccgagaagtgcactgccggacaattggcattggaacatctttttagattccgtttataatttgctgtcttaacttttggctttaggcccatgaaacacacgggttctattttgtatccccctttctttcacgcaggagaggatgcctgttgacatcccctcttttttacttccctcttcctcctgtctccttggcaggacgcagttctgcactggaggaagaaaactcaagtacgagacctacctcaagcttatcatcgccaccgggatgcggcagggcgactactgcgcgatctgcaagggggtgacatcaactggcaagagcacatctcatcggttcagacagctgtttcatgcgcacactgtagtacaatccttctccaattcatggcgtccccatgacaacgctgtcgccgagccattctccgccacactaaaacaggaagagctttaccggaaggattatacctccgaggcagacttcaaacaatgtcttgcctcctgcatcgagtacatcgagctttacagcacacagcggccgcatcgcacgttgaaaaaccgcataccctgtcgggtggaagaggcattcatgaacagcaagtgaaggggagcggtgtgctgacatatcaggggttcgaatctggccgattacatgttttgtattttgattttgtcctgtttgtattttgcagatgacacaaggcaagaactataggaaattctgacctccttgcagtgcaaaaagttcaggcataaattgcccctacccaatccaaacaatgacatgcatttgttcagatcggataggggcattcacaatggtggaggtgaggggagttgaacccctgtccgaaagcactttaacgggactttctccgggcgcagacggttattgcgggagtctttctccctgttccccttccggatggcaagccgtcacgccgtccggtcaggtgagagtcatcatgcgtgggcggggcaactcttacccgccgcacggacgccacatcaacgacgccttccccggcctgtggccactccggttcagacggccgcctttaattaggcagcaatagcaacttgtctgttgttatttgatttataaattgcccgttttatggcggtcaggcgccgccgcccgctggtcccgcctccatacccccgtcgaaaccggtacacccccctgtcgtcgggacagactgtgctctacccgctcccggctgcaccgagagctcgcaatgctccgttgtccctccacttcccatcacaaacgcttcactggtttgtgatgggagcctgcgattcgcatctccatgccgagggcctttctgggatatctggcaggataccaatggagattgtaacacatcccgctgtcggaatgtgttacaattccatgacatttcaggttttggtaaattttaccatcagcttcaccggcgcgactttggccagcagccggtagaatttgtagaacagccgcggcgtgtacatagtcctgcccgccttggcggcccgcagcgcgcccgccgctacccgcacctggtcgcagtaaggcaggtactcaaaggccggggaacggccagtgatgctgcccacgtccaggaactccgttttcatggggccggggcacaccgccgtaacggtaatgtcccttcgcttcagctcttcactgaggcccacagtgaaggaggacacatacgccttgctggcgccgtacaccgtcatccggggcgtggggcagaaggatgcgatggaagacgtgttgaggatgcgtccccccgccggcatatagggaatgaccaggttcgtcatcgccgtcatggccctgacgttcagatctaccatccgggtctggacagcggtctccgtctcccccatccggcccaggtaaccgcagccggcgttgttgatgaggatcgccacctccggtttctccgccgccagtttttcctgcagggtggtaaaggacatggaatcgcacaggtccaagggaaggcagaccgtctccacccccaccatctcccgggcgatctcctccagccggtcctcccggcgggcaatgagccagcagcactcaatctccgggaatatgtccgtcagctggcgggcaaactcccgtcccagaccggaggacgcgccggtgatgatggccgtcttcattgggctctccccctctcagcgcttttcaggctccggatagtccacgccctgggtgtccacccgaatgctctgaatgaccaccggtgtcttgggcttgtcgttccagtcggtggggacctccgagatgcggatggcctcctccacgtttccggtcacctggccgaaggcggcgtactgcccgtccagatggggcgccggggccaccatgatgaagaactggctgccggcggagtccggatgcatggcccgggccatggacagcacgccggtggtgtgcttcaggtcgttctggacaaagccgttgccggagaactcgccccggatgtcatagccggggccgcccatgccgttgccgtcggggcagccgccctggatcatgaagccggggatgacccggtggaagatcaggccgtcataaaagcccttgttggccagggagatgaagttggccaccgtgttgggagccttggcggggtatagctcgccggtcatcacagcgccgttttccatggtgatggtgacaatagggttcgtcatgtcagacatatcatcgattcctttcttttagggtgcggtcaatctcccgcttggcgtcccgctgggaggcagccgcccgcttgtcatagttcttcttgccccggcacaggccgatctccagcttcacccgggaatccttaaaatagacggacaggggcaccagggcatagccgtcctgcttcaccagggcatggagcttgcggatctctcgtttgtgcatcagcagccgccgggagcgcaccgggtcccggttgaagatgttgcccttctcatagggggagatgtgcatcccatggacgaacagctccccatcctttaccgtacagtaggcgtccttcaaattcagcgttccggcccggatggacttgacctccgtgcccgcaagctcgatgcccgcctcgtaccggtcctccacgaagtagtcgtggaaggccttgcggttctgggccgcgatcttgattcccttcttctccgtggggctcacctctttcctggaaggttttattataataccatattttccccgcatcttcaagagaaagtcacagttggctttttctggaggatatgctataataaagtgattgagtatgtcctgaatatacaaaaaatagacacaaggtggaatgctatatgaatcagactgcggatctgacggagaagaccctcagccgggaggaaaagtaccagggaagcttcctgagcctgcacgtggaccaggtgcagctgccgaacggcaggacctctttccgcgaggtagtagagcatgtggacggcgtggccattctggccctggacgaccggaacaatgtgctcaccgtcacccagtaccgctatgtgatcggaaagacgctgctggagatccccgccggaaagctggagccgggcgaggacccggtggccggtgccctgcgggagctgaaggaggagaccggtgccgtgccggacaccttcctgcccatgggcgtgaccctgccctcccccggctgtctcagtgagcggctgtacctcttcctggcaaagggcctgcacatggagtcccagcagttggacgaggatgaattcttgaatgtggagcgcattcccttcaatgagatggtccaccgcgtcatggacggggagatcgaggacagcaagaccatcgccgccgtgctgaaggcaaaagtgcttctgaatctttgagaggagactctgccatgagcgatccgaaaaccgtcctgatcgtggaggacgagaagaatatcgtggacatcctgcggttcaatctccagcgggcgggctatcagacgctggaggcctatgacggagaggacggcctggctcaggcggtatccgccaatccggacctgatcctgctggatgtaatgctgcccaagaaaaacggctttgacgtgtgccgcgccctgcgggatcagggcagcagcgttcccgtcatcatcctcaccgcccgggaggaggaggcggacaaggtcctggggctggagatcggtgccgacgactatatcaccaagcccttctctatgcgggagctggtggcccgggtaggagccaacatccggcggaccaccatgacgccgccggctgccgcctctgccgcggcctccgccatgcccgtgtccggggatttgtctatcaataccgacagccaccaggtcttccgggccggtaaggccatcgacctgacccagcgggagtatgagctgctgacctttctggccagccatcccaacaaggtctactcccgcatcgacctgatggagcaggtgtggaactacggctatgtgggcgacgacgtgcggaccgtggacgtgacggtccggcgcctgcgggagaagatcgaggccgaccccgccaatcctgtcttcatcctcacccgccggggcgccggctactacttctccgtgaaatgactccgccccccattctctaaggaaagaaggtgttcgccgtgttccgcagcctgcacatgaagctgatgctgattctgctgctgctcatcacctcgctgatggcggtggtaggtgcattcctgaccaccagcgtctccagcttctatatcgacaccttttacgagcagatcagcgccgtgttcagcgacgacagcgacggctatgtctccaccctccgggcccgggcggccgaaccggacggcgccgccggcatcaaggagatgctggagggccgggccggctccctgggcatcgactaccgcacccggaactacttcatcctggatgggcagagcggcacctacctggacgggtctgcagaggcgtcagagctcccccgggagcagaccgccaacctgctgaccgcccggaatgccgtggctcagggcgacagcaccctggtgggagaccgcagcgacatcaccgccgactatatggacgcagccatccccatcatggggggcggaaacgcctacatcatttacatcctggacaacaaggacacagtgacggacctgaactcccagctcttcctcatcatcatgcaggcgctggtgatcggcctgctgatctctgtcctgttgagcttcctgctgtccaagaccatggtgggccccatcgaaaagctcaccgccggggcagagcgggtggccgcgggagactttgacagccagctccccgtggagtccactgacgagatcggcatcctcacgggcaccttcaacgagatggccgatgtccttcaagccacgctggccgccgtggagaacgagcggaacaagctggacaccctgttcctccacatgaccgacggcgtggtggcctttgaccacgacagcctccttatccactgcaatcccgccgccaccaatatgctccatcgcagtgtgccggagggcactacctacgataccctcttcggtcaggtctatcccttccaggagaccctggccctccaaagacccaactacgccgaggcggagatggaggtgggggaccggacgctggagctgtttctggcgccgttttccgaccaggccagcggcggcgtgctggtggtgcttcatgacgtgacggagcagcaccgcaacgaggagcggcgcaaggagttcgtggccaatgtctcccacgagctgcgcacccccctcaccaacgtccgcagctatgccgagaccctgcgggacgcggagggagacatccctgtggagacctccaacagctttctggacatcatcatcacggagacggaccgcatgacccacattgttcaggatctgctgaccctcagccgcctggatgcgggcaatgcggagctggtgctctcccgctttcctttcggggacgccattgagagcgtcacccgtgccaatgccctggccgccaagcagcacgggcacacgctgacctatactccgccggagagcctgcccttgatcgtgggggaccggagccggctggagcaggtgatgatgaacgtcatcggcaatgccgtcaaatatacgcccgacggcggacacatcaccatcaccgccggctccacagaggcggaggtctggatggaggtctgcgatgacggcatcggcatcccagagaaggatcgggaccggatcttcgaccgcttttatcgggtggacaaggcccgttcccgggagtccggcggcacgggcctgggtctctccatcgccagggagatcgtccagcgccaccacggcaccatcgccctggcgccccacgagggccccggcaccaccatccggctgacgctgcccatcggcgggccctccaaccccatctgagaaagtcacatccgcaaaaccgctgaaaggaggctgcccatggatcaaacggcccggcgcaggcgccgcaacctcatccagaacatcgccatcgcgcttctgtccgtctcggcggtgctcctgttcgcccagctgcagctgtacaatctgggcacgtcggaggacccgctctatctggagcggctgaccggcgagggctcaccctcccggctgcgggagtttcccgctccggtacgggtggtcctcacggactcctacggccggtatggcagcctgggcttcactaccaacagtgacggcttctccgccctgggcctgcgggaggctctgggctccgtccagcaccttgctccttctgcaacggatgcctttcggggtgccctctcgggcccttccatctattttgattttttgaatcccctgcccctccaggtgcttgccgagctcaccggtgcagagggcaccgcgttggagggaaatgcccgctgtctgctgctggccgcaggggcggacggctccgtccatctctatgtatgggacggtgctgataccgtcctcaccggcaccgtcgcctccaccgccctctccatagattctcttacagaggcagtgagccagtccggcatgggaagcgtctccttcgcctttgaggttgtggagatggagccgctatacggcaagctgtttcccctctccatcctgccgacggagttaccgcagctgccggtcctctctgccgcttcatccatctccggcacggactggctgctggcggctttcggcttcaacatcaacacgcgggagcgctatgcggaggccgacggcacggaggtcatcaccgaggtcgaagccgatcgctcccttcacatccgtccctccggggagatcacctaccgcagcggaacagatgctacgctggagatctccgcacaggaggaggtccccactgcggcggaagccgtgctgggtgccagtatcctgctggaacagctgacagaggaccgctccggcgaggcaaggctgtatctggagtccgtcagtcagggcggagacaccacccagcttctgttcggatatcagatcgatggtgtccccattcgcttctccgacggcggacacgccgccgagatcacgctctccggcaccagcgtcacccgcctcaccctgcggttccggcagtacagcaccgccggggagacgtcgctcctgctgccgctgcggcagacgctggccattgcagcggagcatcccggcacagagctgtctgtgggctatgccgacggcggcggagactcggtatccgccagctggctggcggactgagtgcagcggatacaagccgctccggcggtggaaaggaggtccgacggatggagagcttccgtctgaaaaacatcatcattctgatcctggctctgatgaatctctgcctcctgggcctgctgggagtacggctgaccaccggctattccgcccaggcagaggcccgtcagcagatggtgcagctgttcgcggcggagggtgtctctctggatgacggcattatccccggcgccacaccgcccgccggcctgaccttgtccagggacccggacgaggatgagaagctggccggctttctcctgggagatgagctggtcatgtctgatggtggcggcggcgtcaccacctatcaaagcgaaaacggcagcgccgtcttccggtccgacggcacctttgacgtggtgatcgaacagagcggcgagacagcggacgccctgtgccgggccttctgccgtgcgttccactacgaagccctcgccttctccctggatggggaggacggcagcgcctccgcggtccagacctacgacggggccccggtggtcaactgcaccgtctccttctccatctccggcgggcgggtggcctccgtcagcggtacccacctgccccaggcgggacagaccgccaatgggaacggtgccctgtccgctctggatgccctcaatgccttcctcggcaccgttcagagcggcgcggtggtcactgccgtgacggacctgtacctctgttatgagctgcagagcaccacagccactcctatggccctggtgcccgcctggtgcgtttctacggatacggctgattattatgtcaactgctacaccggcgcggtctcctccggctgagtaactggagccctgccgggcagataatttgtttccaaatttctccgcctgtgcgccgcgattcggcctgaagcggctgttttcagccgtcggcggctttggaattttgacgaattttgacgcggaacccgtccggctcgcaggaagggtttgcattttgcgcggggatatggtatagtttgggtgtgtgagcttccccatccggaaaatttctccggtttcgcaggtctttagcgggtatgaagcggcacgggccgggcacactgtttcatagaaattacaggtgccgccacaaaagaaagcgccttttgaagagagggtatcgactttgacaaagtatattgtacagggtggtcatcccctgtttggtgaagtagagatcagcggcgccaaaaacgccgccgttgccatcattcccgccgctctgctggtggacggggtctgccggatcgaaaatatcccccagatctccgatgtgacgctgtccctgaagattctggagcatttgggtgccggcatccgcgtcatcaaccgccatacagtggagatcgacgccagccgcatccgctccacccgaacctcctatgagttggcccggaagatgcgggcctcctattatctgattggttctctcctgggccgcttcggccaggcggaggtcgccatgcccggcggctgcaacttcggggtgcgccccatcgaccagcacgtgaagggctttaccgcgcttggcgccaaggtcatggtggagggcggcttcatcaacgcttccacggagaccggccgcctcaagggcgccaacatctatttggatgtggtctccgtgggcgctaccatgaatatcatgatggccgccgtccgggcggaaggcaacaccgtcatcgagaacgctgccaaggagcctcatatcgtggacctggccaacttcctcaactcgatgggcgccaacatccggggtgccggcacggacaccattaaaattcagggcgtggaccgcctgcggggcggcagctacgccatcattcccgaccagattgaggcaggcacctatatggccgccgtggctgccaccggcggccagatcctggtgaagaatatcatccccaagcacatggattgcatcaccgccaagctggtggagatgggcgtggaggtagaggagcgggaggacacccttctggtccgccgcagcggccccttgcagaaggccaatgtgaaaaccatgccctatccgggcttccccacagatatgcagccccagatcaccaccgtcctctgcctggcggagggcacttccctggtgacggagagcgtctggaacaaccgctaccgctatgtggatgagctcaagcgcatgggcgccagcatccaggtagacgacaagaccgctgtggtggagggtgtggaccatctcaccggtgcgcccatccaggcctgcgatctgcgggccggcgcggcattggtgatcgctgccctggctgccaagggcgagagcgagatcagctgcgtacagtatatcgagcggggctatgaggatatcgtcaccaagctccagggccttggcgcttccatccgtaccgtggaggtccccggtgagtccgaggagctggaggctcacattggctgaaacggggtacaggcttctctaggtttcccccgctgccgcggggttatacaatcaagacatttccatagatcgagcgattttacgtccgcgatggaggatggcgactttcgtcgacggcctcccttgtggacgtcttacttttcaccggaagaggtatgttttttgaccaccgtacatacgctggcaagcggttcctccgggaacgcgctgctgctctcctgcggggagagctatattctgctggatgcgggcatttcctgccgccgcatcactgccgctttgcgggagctgggcctggagctcggaagcctcacggccattctcatcacgcacacccacgcggaccacatctccggcctgcagacgctgctcaagcgctgcgccgccccggtttttaccaccgagcgggccgcccgggagctatcctggcggctgcccggcgcagagacacggctggacgcgctggacttcggcatcccccagtctatcggagagtttgccgtgacggcatttcccacatcccatgacgctcccggttcctgtggtttccggctggacgccgccggcggcgccgtcggtgtcctgacggataccggctacgtcaccgacgaggctgccgacattctggagggcgtggatctggcggtgctggaggccaaccacgacatcgagaccctccgcagcgggccctacccctactatttgaaacagcggattctgggcgcacaaggccatctcagcaatgaggatgccgcccgttttgccgccgttctggcgcagagcggcacatcagagatcatcctggcccatctgagccgggagaataatacgcccgccatggcgcaaactgccgtagaacgggctctctccgccgcaggtgtctcgcctctgctgtctgtggctcccagggactgcctgggcccagcccacaccgtgagcaggaggtccgtatgcagaaggtgacgatcctgtgtgtcggaaagctgaaggagaaattttatatagacgccgcggcggagtacgtcaagcggctgtcccgcttctgtaagctggagctggtagaactgccggaggagcggctgccggaggacccctcccccgcccagatcgaggcggcccttttgaaggaggctgctgccatccgggccaagctcccatccggcgccgccctgatcgctctgtgcgtggagggagagccgcggtccagcgaggcgctggcccggcagatggctgcctgggccagccagggcgtgggacatctggtgtttctcatcggcgggtcctttggcctgcacccctccatcaaagcagaggccaggctgcggctctccatgtctcccatgaccttcccccaccatctggcccgggtgatggtgctggaacagatctaccgggcgtatcagatcaacgcaggcaccaaatatcacaagtaaaggacgtggaactatgacagaaccggcaaaggacttctgggcccgggcggaccgggacctgctggaccgctggccgaaagacgaggcaggcgcaccggaacccgccgccaagctggacatccagtgggagctagacagccaggcggacatcactgtgtcgtttttggaaagctgcggcatccccgccttccagaatgggtccctgggcaaggtgctgggaggcttcgcctcccagggagtagagatttgggtccccgcctcccaactggaggaggcccaggcgctgctgaacacccccgcggaaatcccggagcaggactaatgtcccgcctccgttctcaatttacacaacaggaggtatctctcgcatggattttatgaaggaatatgaaaagtggctggcgagtcctgccctgtccgacgcggagcgtgcggagctggagagcatccgaaatgaccccaaggagattgagagccggttctacggcccgctggagttcggcaccgccggcctgcggggcatcatggccgtgggcctgcacaacatgaacatccatgtgatccgctgggccacccagggctttgcccaggtcatctgcgccgagggcgaggagggcaagcgccggggcgtggccatctgtatggactgccggaaccactccatggagttcgcccgggcggcggcggaggtctgcgccgccaacggtatccatgtgcggatcttcgagtccctccgccccacgccggagctgagcttcgccgtgcgggagtaccgctgccaggcgggcatcaatgtcaccgccagccacaatccgaaggagtacaatggctacaaggtctactgggaggacggcgcccagctgccccctcaccacgccgacgccatcgccgctgctctggaacagatcgacgtcttcaatggcatccggcgcatggacttcgacgaggcggtgaaggccggcctcattgagactatgggggaggagacggaccggaagtttatggccaacgtcactgccatgattaacgacaaggaaaccgtggccaaggtggcggacaccttcaagctggtgtacactcccttccacggctgcggctacaagctggtgccggaggcattgcggaccctgggcatcaagcacctgatctgtgagcccaagcagatggtgatcgacggcgacttccccaccgtggtctcccccaacccggagaacccggagggcttctatctggccatcgacctggcccgggagaatgacgtggacttcatcctgggcactgacccggacagcgaccgggtgggcatcatgatccggaaccacagcggcgagtaccgccccgtcaccggaaatcagaccggcgtgttgctgctggactacctcatcggcgccatgcgccgctccggcaaaatgccggagaagcccgtggccctcaagaccatcgtcaccacggagatggcccggaaggtggctgagtccaacggcgtcacctgctacgacaccttcactggcttcaagttcatggcggagaagaagaacgccctggaggccgccggcgaaggaaaggtcatcttctcctatgaggagagctacggctacatgctgggcgactacgtccgggacaaggacgccgtcaccgcctccatgctgctgacggagatggccgcctggtacgccgcccagggcatgacgctgttcgacgccctggagaagctatacgagaagtatggtcactacgccgaaaagacctacaacctggtgatgcccggcctggacggtctgaaggatatggcgcagctgatgaagaatctccgggagaatcccccggcggagatctccggcgtgaaagtcgtcacccggaaggactacaccgacgggtccgtggtggactgcgccaccggtgcgaagagcgccatggagctctccggctccaacgtgctgcggttcgagctggcggacggcaccaccattctggtgcgaccctccggcacggagcccaagatcaaggtgtatattctgacccagggcgcggattctgccgcctgtgacgccaatctggagaagtacggccagtgggtcaagacgctgcaaaaataagacgtcccttcttagtatccaaacaacggcgcccgttcctttcggaacgggcgccgctttttgggttttcagaaccaggccgcctgctgctcccggaaccggggctccgggccgtgggcgtaggggtcgtaacggcccaggttgcagccgaactcctggagacgggcgatctgccccgttgccgtccagcggaccagggtcataccctcgaacacctcccggcggccgtcgtccatccggttggcgaaggtccactccaccaccgtctggtcccccttgtggaagaactggcggatatcccaccgctccaccgtgccccggcgattccactcggtgaaccaccaggcgatcttgtccgcgccgtggtactccgggccccagctctcgatgtacaccgcgtccggggcgaaaaggtcccggatgccggtgtcccgcttggtgagccacatgtcgaaccattggcagatggccgcttcccgctgttccatctgattgctcctttccgctgtatctgctcttatctataagcaaaatgaattaggatgcgaggatgttctgaacctccgccagcagggtctccccgtcgtgcaggggatagccgtccaccgcaaagcgcccctgactgcccaccaggatgacggattccccattggcacccaggagcatgacggtatccgcttccagaggatataccccaacgggattcttccagcggaacctagaggccccccgcattgtagcctccaggtccgccagctgctccggccggagcgacgccgtcaaatcccgtccgtcctgccggacctccagcagctggaagtcctctccccctgccggggcgggtagcaggaagaaatagccagccagggctgccacggccacaacacataccagcagaactttccatgttcttttcatatgcgccccttctttgtcactgctccggcaacagggcccaaagctgttccaggagttcttcgccattgatgaggggataccgtctgtcaccatcataaattacggcggtgtcctcgtccagatagatatgccatagcccctcactgtctctcccgttgatctccacactgctctccgagagccatggagagcagccaacacggtaccccctctttccgcgcccagcaccagtcccttgatggcgtctaaagtatcctgatcgatctgttccgtgatgtcctctagtgtctcccctgctctgatgaagctgatttcaaagtcccctcccaccgcagggtagtgcaggacataccgtgcgcagattcccacagtcatggccgccaccgctgccactaccacaacgcacgccagcaaaattttccattttcttttcacaggcgcatccctcccctgtcacggctccggcagcagggcccagacctgtttcagcagcccttcgccgtcaataatggggtagccgcccctttgtccgtcgcagagtacgcaagcttcgccgtccagctcaaagaaccagggtccatggctgtcgacgcctatgatctgcaccgtgtcctcccgcagctgccttggaaagacgtttctgcggtacccccttctctctgcttgccgaagcaggtcattgagggcgttacaggtattctggtctatctgaccggtaatattctccagcgtctctcccacattgatatactggacttcgtagtcctcccctaccgcggggcggggaaggagataccacgccgcagcacatgctgccgtcactgccacgacgcacgccagcaggattttccacttctttttcaagagaaccgccccctctctggctccatcataaagggaccgccctgggcctgtcaaggcggaacgcagatttttccaacgttattcttgacatatgttcaaaatcatatataatgggcatatgttcaaaacaagggaggaacacccatgccgcgcagcgccaaatgccgccgggtctgccagatgccggcccactgccgctttgctccggaacagcccgcccacggggaggccgtggagctgacagtggaggagtatgaggcggtgcgtctgatggattacctgggcctgaaccaggaggaggcctccgcccagatgggggtggcccggactaccgttcagcggatctatgcccaggcccgacagaagctggcggtctttctggtggaaggccgtccgctgcagatcggcggcggcagctacgccctctgtccccaggaaagttgccggggcttcagcaggccctgcggccggtgtgcctcccaagacggaaaggaagcgtcctcatgaaaatcgcagtcacctatgaaaacggccaggtgttccagcactttggccacacggcacagttcaagctctatgatgtggagaacggcaccgtagcctcctcccaggtggtggataccaatggcagcggacacggggccctggctggctttttgaaggaccatcaggtggatgccctgatctgcggcggcatcggcggtggggcccagatggcgttggcggaggcaggtatccggctgtacgccggctgccagggcgacgcggacacccgggtggcagaactgctggcaggcacgctggtcagcgccgatgcagccacctgcgaccatcaccacggtgaggagcacacctgcggcgaccacggctgcggccaccacgagagcggccatacctgcggccactgctgagaccggaccgggagggcgaaacgccctcccggtttttgtgcagcaccttttggaaatatgggattccctttctgcataggatgggaacagcggactttgacacttcgccggaaaggatgatccccttggagcaatacatggaacagcattatcccttcaccctgccgcccctgccctacggctatgacgcgctggcgccggagctgatcgaaaaagtgctgtatttccatcacgacaagcacttcgccgcctatgtggacgctctgaaccagctgctggagcggacgcccgcctatcagtcctggccgctttggaagctgtgcctaaactgggaggaactgccggatggcctgcgacagggcgttcggaacaacgccggaggcgtctttaatcatgacctgtatttccgcaccctccaccccctgccggtctccgccccggacatggcgctggagggcgctgtggtacgggacttcggcggcatggcaggtttgaaggaggccatgcgcaaggcggccctggggcaattcggctccggctgggcctggctatccgcagacggcgaggggcacctggctgtccaaaagaccgcaaaccaggacacaccgctgcccctgatccccttgctgtgttgcgacgtatgggagcacgcctactatctccaataccagaatcgccgggcggactacttcgaagcctggtggcgactggtggactggcctgaggtctcccggctctataccggctgcctggcctgccgtccgccccggccctgatggaagattccagaggcggcggcaatcgccgccgcttttggaaaactccagaaaataggcgttgacaactgcttccttttccgttatgataatatgtcgaatgaagacgcagaggaaggagcgtacccatgaatttcttgctgaccggcggggctgttttccgggatggaactttccagaatgtggatgttgccatttccaaaggccgtattgtttccgtttctccctccctttcccaggaaggtttttccgtaattgaatgtcaggatcaagtcattgttccaggtttcgttgatgtacatgttcatcttcgggagcctggattttcttataaggaaaccatcgcctccggcacggcggcggccgccgcaggaggctacacggcggtgtgcgccatgcccaacctgaatccggtgccggactccctggagcacctgtggccggagctggacgccatcgcccgggacggccgggtgcgggtgtatccctatggggccatcacccggggcgaaaaaggcgcggagctggcggacatgccggctatggagccctttgtctgcggcttctccgacgacgggaaaggcgtccagtccgccgaccagatgcgcgatgccatggaactcgcaaaacagctggacaagcccatcactgcccactgtgaggacgagtccctgctgactcccggctggtgcatccacgacggggagtgggcgaagcggaacggcttccccggcaacgcccctgagagcgagtggaaacaggtggagcgggatctggagctggtgcgggagaccggctgccggtaccacgtgtgccatgtctccaccaaggagagcgtggccctcatccgcaaggccaaggcggaggggctgccggtatcctgcgagaccgggccccactacctgatcctctgcgacgaggacctgatggatgacggccggttcaagatgaatccccccatccgctccgccgcggaccgggatgctttgatcgaagggctgctggacggcaccatcgactgcatcgccacggaccacgccccccacagcgcggaggagaagtctaggggactccgcagcctcaacggcatcgtggggttggagtgtgccttcccggtgctgtatacggagctggtggagccgggcatcgtccccttcgccacgctgctgaacgccctgtgcgtcaatccccggcggctgttccgcctgcccggcggaaagatcgaggcgggagagatcgcggatctgaccgtgctggatctgaaccggccccatgccatcaacagcggtgccttcttctcccggggccgctccacgccctttgacggctggaccgtcaccgccggagtggacaagaccatctgcaacgggaatctggtgtacaccgccagctcccgcaacatcaataagacccccattcccccctgtcaggaggactacctatgaaacaatccctctttaccatggaacacgcccggcagctgaccgccgacacctatgagctggtgctgtccggcgacacctccgccatcacggcgccggggcagttcgtgaacatccagctgcccggcaaattcctccggcggcctatctccatctgcaactggacgaaggacgccctgctgctcctggtccgggtggtgggcgaaggcacccatgacttagtgcggtgcgtccccggcacagagctggatgtgctgtcgggtctcggcaacggctttgatctggcaaagggcggggcccaccccatcctgctgggcggcggcatcggcatcgcgcccctgtacggcctggcccagcggatgctggaggcgggcatcgcccccacagtgggactgggattccgctccggcggagacgccttttacctggaggaattcggcaagctgggctgccgcctgatggtggccacggaggacggcagcttgggcacaaagggatttgttacggatctggcccgtcacgtgccggagtgcggctacgccttcgtctgcggccccacccccatgctgaaggccgtccacggcctgccccagctcaccggcgggcagttcagcttcgaggcccggatgggctgcggcttcggcgcctgcatgggctgctccgtgcccacgggaaacggctacaagcgggtgtgcaaggacggtcccattctgtacaaggaggaaatcgtatggtaagcctgtctgtccgccttgcaggggtggagctgaaaaatcccgtaatccccgcctccggcaccttcggctatggccgggagtacgcagagctgtatgacctggacctcctgggcagcttctcctggaagggcactaccgcacagagccgtccgggcaaccctcagccccggatcgcggagaccgcctccgggatgctgaacgccgtgggcctccagaaccccggcatcgacgcggtgatcgcggaggaggtgcccaacattgcaaagatctttcatgggccggtgatcgccaacgtggggggcttctctcttcaggagtacgctgagaactgcgccaagctcaacgacgtggagcaggtgtccattctggaagtgaacatctcctgtcccaacgtccacgccggcggcaggaactttggctccgatccaaaagctgcggcggaggtgactagggccgtgaaggctgtcacccggaagccggtcttcatgaagctctcccccaacgtcacggacatcgcggagatcgcaagggcctgcgctgacgcgggagccgacggcatctgcctcatcaacaccctgttggggatgcggatcgacctgaaaacgaaaaagcccctcatcgccaaccgcaccggcggactgtccggccccgcggtgttcccggtggcggtgcggatggtgtgggacgtgtacgaggcggtgcagctgcccatcatcggctgcggcggcgtctcctctgcggaggacgtgtgtgagatgatgctggcgggggccagcgccgtggagatcggcgccgccaacctgcgggacccctatgcctgcaagaagatcatcgaagccctgccgggcgtgtgcgaaaggctgggcgtggagcgtatcgcggacctgaccggcgcggcgcacggctgaacgctgtcaccgagaaatttacagaaaggactgtttgaatatgagcgcaaaagacgtcatcatcgccctggacttccccacccgtgaggagaccctctccttcctggaccagttccccgccggggagaagccctttgtgaagatcggcatggagctgttctatgccgagggcccccaggtggtccgggacatcaaggcccggggccacaagatcttcctggacctgaagctccacgacatccccaacaccgtgaagcgggccatggcggtcctctcccgactggatgtggatatggtgaacctccacgccgccgggacctctgagatgatgcgggccgccctggagggcctgactcgtcccgacggcacccgccccctgctgattgccgtcacccagctgacctccaccgacgccgccgccttgaaaaacgagctgctgatcgacacccccatggcagagacggtgctctcctacgccaagaacgccgccgccagcggcctggacggcgtggtctgctctcctctggaggcggctctggtcaaggagcgttgcggcgcggacttcctgaccgtcacccccggcatccggttcgcggacagtgccgccggcgaccagaagcggatcatgaccccggagaaggcgggcaagtccggctgcgactacatcgtggtgggccgtcccatcacccaggcggaggacccggtggccgcttatcggagagcggtcaaggacttttggggctgagcggaacgggggcacgtctgcatgaaatttgatttgatggaacttgcccttgtcattgctgtctttttcatggtactggcattcggagtaatctggatcaaagccctgccattcggttataccgagtcggcgctattgtaccttgcagccattgtggccgcaagtgctttctgggtcggccgaaagcactgaccatcttcgcacatttggataaggaggatttttccatgaacttagaacgtgaaatcgcccacgatctgctgagcatcggcgcggtgttcctgcggccggacgagcccttcacctgggccagcggcatcaagagccccatctactgcgacaaccgcctgaccctcaccgctcccgccgtccgcacggccgtggagaagggcttggtggagctgatccgcacccattacccggatgcggaggtgctgatgggcacgtccaccgccggcatcgctcacgcggccatcgtgggccacctgatggacctgcccatgggctacgtccgctccggcaacaaggaccacggccgccagaaccgcatcgagggcaggctggagaagggccagaaggtcgttgtggtggaggacctgatctccaccgccggcagctgcattgaagttgtagaggcgctgcgggaggcgggtgccgaggttctcggcgtcgcatccatcttcacttacgggctccaaaagggcctggaccggctggccgccgcgaacgtcgtcaaccactccctctccaacttcgatgccgtctgcgaggtggccgctgaggaggggaagatcaagccggaggacattgagcggctgaagaggttccgggccaacccatccgacgaatcctggatcacgtcgaaataaattccgctcattccgcttccggctttgccgggagctattccctgccgcccgaggagcggctccctcccaccacacccctgaaaggagttcatcatgcccagaaatctcatcgacatcaccgacctctccgtggaggagatcaatcagctgatcgccactgcggaggacattatcgccaacccggtcaagtaccaggacgcctgtgcccacaagcagctggcaacgctcttcttcgagccctccacccggacccggctctcctttgagtccgccatgctggccctgggcggcagcaccctgggcttttctgaggccagctccagctccaccgccaagggcgagaccgtgggcgacaccatccacaccgtcagctgctacgccgacatcatcgccatgcgccatcccaaggagggtgctccctacgccgcctcccagttcagtgaggtacctatcatcaatgccggcgacggcggccacaaccatcccacccagacgctcaccgacctgctgaccatccaccgggagaaggggcggctgaacaacttcaccatcggcttctgcggcgacctgaaattcggccgcaccgtccactccctggtgaacgccctgagccggtacgatcacatcaacttcgtgctgatctcccccaccgagctgaagctgccccggtatgtgaaggaggaggctctgaagaagaagggcatcccctacacccagaccacggatctggagtccgtcatcccccagctggacattctctacatgacccgtgtccagaaggagcggttcttcaatgaggaggactacctgcgcttgaaggacagctacatcctgacaccggagaagctggagaacgccaaggcggacctgtccatcctccaccccctgccccgtgtcaacgagatcactgtggcggtggacaaggatccccgggccgcctactggagacaggtgaagaacggcaagtacatccgcatggcactgatcctgaagctgctgggcattcaggtgtgagaaggaggcattgacgctatgaacatcgacagcatccaaaacggcgtggtcctggaccacatccaggctggcaagagcatggacatctaccgctacctccatctggaccagctggactgctccgtggccatcatcaagaatgtccgcagcggccggatgggtaagaaggacatcatcaagatcgactcccctatggaggtagatctggatgtgctgggctatatcgaccccaacatcaccgtcaacatcatccgcaacggcgtgcgggtggaaaagaagcatctggagcttccgaaaaagctggtgaatgtcatccactgcaaaaacccccgctgcatcaccgtagcagagccccagctggacgccatattcctgctgagcgatcccgccactcacacctatcgctgcgcctactgtgagaccgcaaaggacaagaagttctgattccccgtgacggcactgcccgttcagactgcgtggacatccagttttttcccctccggcagggccgtatatacggattctgcattgcaggaaagttttcctgcaatgcagaattttttttgcaatttctgttgcgttttggaggaaaatggcgtatactgcggcccggatttcagaaaacggaggcactcctatgaagcatcatccctcttggaccgctctgcgcagctacgcgatcacagccggtctggcctgcctgatgggcgtcagctatgagctgttcgtctttcccaacgccttcgccccggcgggcatcaacggcctagccaccatgctgcaatacctgctgcacatcaacatcggctacctctccctgctcatcaacctgccgctggtcctgctggcctggaaaaaagtcgaccgggacttcgcccgcaaaacgctggtgttcgtgctgatgttctccgccgtcacgctggtgctgggccagatggacctaagcgccatcgcctatgactccggctcctccgccatcctggggcctgtggcggccggtgtggtcagcggcgctgtgtacggctgggtgatccggcagaacggctccaccggcggaacggacatcgtagccgcctgggtgcggaaaaagcacccggaggccagcctggtctggctgatcttcagcctcaatgccgcggtggcggtgttgtccttcttcgtctacggctgccagttcgagccggtgatcctgtgcctgatctactgctatctcagctccagcatcagcgacaccattttgaagggcggcaaatccgctatgaaattcgaggtggtcacccggcagccggaggagctctcccggcagctcatgcagcagctgcgccacggtgtcactgtgctccaggcggagggaatgtactcggagactccccgttccctgctgatctgcgtggtgaaccgccatcaggtggttcggttccaggagattctggcccgcttcccggataccttcgcctgcgtctccagtgtcaatgagacctgggggaatttcaaacacgtggcatagaaaaaccggcggaggccgtacagcctccgccgatttttcaggtttttactccgccgcccgctccagccggtccaaggggaacggcggtgcggccagaggcttcaccgccaagctcatcagcagcatggggttatcatccgccgccacccggttggaatggagcacgccgcagatcttgcagcggtggatgatggcccactcgccgcccttgcggacccagacggccaccggctccatggtgccgccgcagtcggcggcccggtcccccggctcgtcatccaggtggacgctggcaaggcagttggggcagtggttgcggtgctgggttccggcagcctgaggtcctaccggccagccgcagacccggcaggtgaatacatcccggcagggatcctgccggtagtccaggcggcgccgtttcggtttttgcgggattcgctgggacattggaaattcctccttggtgttgtcttactgccctcagcataccctgccgcaggccggtcccgcaaccgtcaactcggttcagaaataagaaagcgccatgcgggagtccgcatggcgcttgtgttcttattcatttctcaggcgggcgatgatcttccaaatgctcttcggcgccagaaagtaggcttccgccagctggtccacagaggtcccctcccgatagcgccgatagatctcctgatttcgggccagggtctccgccttgcggccattggccgcgccccagggtttgcggctggtctcccgccgggggatgtacagatactccccgtcgatatacgcctggacctgggccagcaggtccggcggcagcacgtcggctgctttcatatagcgcatgatgctcctccaaagctcttgtgatttggaatgagcagaggctatatgccaaatctctttgtttgacgcgatagcctctgctatgcgtcaaacgccgaaacacaatgattcaattgcaactggattccctcatttccctgaccgctgcagccggttttttcagtggcaggaatttttttctgccgctgtcactataccatagatctccggggcagtcaacataaatccgttattacaggaagcaacaggaaaataccattcttggacaggtaccctaaatcctttaattatgtaacggtttatccgttcacgcacagcgcaaacgggtaaaccattatagtggaaaactcatcgtcgcaatagcgacaatgagttttccgcacaattactctcattaacctctttctggaatccatccatacttacccatttctactatattgccgtttatttcgtagtccaacctatataacacttcatccgaactcgacaaagcaaccgcttcaaatttaacatccatatcgctcctatcatctgtttttatttgtattacaacgggttgattgagaggagcttctctttgaataacagtatctccacttttgattctaatcgatctcacctctgggtcgtgagaaattgatacaacccaacccgcatccacatcttctcccacccaaaatttattaagaagttctacgccgctttctgttttttcttgtccactcgagccaacataccctctccataaaaattttgtttttttacagtaaacagtataatattgttctccagcatccacgagataaaatacgcaatttgaatttattctctcattgagcaggataactggagcttctgccggataaaaacgcacagcttttacggcgctctctggtgtaagtcgatacccaatgaagacattacttataatcgtaataactataagtatggcggccatttttaataaatttgtttttgtgttttttttcaatctttcctccaaaattatttatcacaatgcccctggtatataatatactaggggcatcgtgatggaatttactttttaccagcctgtctggaaattctgtttgtatgatgttgatgcactgtgacctacaacagatccattttcaaaatttgcatcaactgttgtagttgcactaagagaaaacgccgttgcaaatccgcttgctgcactgatttgaggccaatttagtgtcacaaaattcacattattgtatggtcccagagttctttcataaattttgcttccgcttgttaccgcaggtggccacgaaaccgatacttgcagccctgttgtttcaaatgtctcagtaatataaatggagcttggagtataatcagggcttgtataagcagctttacttacccccccaacaacccaaagatatgcgtaattattatcaatacttttacaaaatgttccagactgggatgctgttaatgaaacatctgttggagagtgttcactcgtgttgaacttctttgacgcggtagccgtagggcccgatgcaagaggcatcggagcatccgaagccatttcagattctatctccctgattgcgccttccatgtcagtctctgttaagccctcatcagtaaactcatacgttgtgacaataaatccctgatcgtcatacgttttcacagtcgtggagataccgttgatttcaatattttctgtgctaatcaatcggttgtcttctttttcaaactccgtagctgaacctgtaatgccacatgacagtaccatcacaagagccaaaaccaacgcagcaatttttttcatagaagccgcctcctttcaacatccctaataatttacaaatccggaaacactcactttgtaactggagttgtttcttaccgcaaatgtataggtccctctgagatcgatcctgatcgtctggttaatgctcccgttgcttcctcgtacagggtaaaatagcccgtcggagtcgatcagtccgaagtcgacactcgctgacgccggagaataagatgccgtaatggtaacggtttccccatattccatcggaaagctggtgcttgcttttctcatgctcttcgcagaaatctcaaaatcaaactcgcctgtggctcttggttctgcgatctctgttgcctgttctccaatatcagctgcaacggcctgagcgggaatacagctaaaaattgcaatacaggcgaacaataagcacagatatcttttcatccccattggtttcacctccttcctgttactcccaattcaagttaaaatccggctcttccaacaacgtactttcttctccctgaattgaatgtaaatccaagccattttccttctgccctcttccataccagaaaaggaagcataccagcagggccaaaacaacggcgccgatcacaagcagcctcatccactgcttttcttttttctgtaccttctgctccggcgccctctctgcagccggggccgccggagcaggaagttcgtccccgctttcatccagcaaatactccagcgggacgttatagagcctgctcagagattgcagattttctattgatggcctggacgtccctgtttcccattttgttacggcctgccgggacacatccagcttttccgatacctccgcctgggacagcccttctctttttcgcaaacaggccaattttttctctagggtcattgtttacatctccaaatctatcccagcaagaaatgaaagtaaaccgcccgcggcttactttccggcaaccaacggttgccaactgggttttttatcctttttttgaggtttccatgccccggaatgtccgctcacgctgcgccgctgcacatatcacgttggactttcaaggggggccgggcaacaccaaacagggggatgccgcctccttttcagcccggtagttggtcttgcgcacagaaccgacatcccaccccgcttggaaatcggccctatggtatcatctccggcaggggctgtcaagcctgcggtcccgggcaaaaaagcagccgcagagcgttgctctgcggctgtttcatttggttttacaggccccgccactcctccggccggaggcggctcaggtcgtgctccgccgcgtcgatggtgcggagcatggcctccttgtcccggttcagcgtgcccttcagcaccaggtagttgctggcgtgattcatccggaacacgctgccggggctgtccagatgctccatcagcagccgggtttcctccagcacctggggctgggtcagcagttggaagctgccgtcccgcacccagtcgtaaaggggcgtctccggctccaccatcagcgtcagcatcccgatatactccgggttcatggcgttgaaggcctccgccgtctcgatggcgtggcgctccagcagctctgggccgcccaggcccgtgatggcggtgacggacagcgccatgccgcaccggcggaccttccggcccatctccacgatctcggcggacatgtggcctttgcgcatccgcttcaaaacgtcgtcgcacccggactccagtcccatgtagaccatggtcaggcccttgtcccgcagcgtccgcagctcctcctccgtccggatacggatggaggcaggggacgcgtagctggtgacccgctcacactctgggaacagctcccgaatggtgtccaggatggtgtaaagctcattcgctttccggactaatgcatcgccatctgccagaaacacccggtccacccggcggtacacgccccgggcgatgcggaagtcctccagcacctcctccaggggacgaatggcgaagtgcttctccttatacatgctgcagaaggcgcaggtgttgtggctgcacccgtaggtcacctggacgatgaggctgtacgcctcagagggcggacggtaaacgcttcccttgtatctcatacgcccagcttctccagggccgccatcttcaggcagacgcacagcacggcgatggcctgctccagctcctcaacagggggcagggaaggcgcgatgcggatattgctgtcctggggatccttgccataggggaaggtggcacctgcgccggtcatggtgacgcccgcctccttgcacagggccagcgtccgcttggcggtgccgggcatggcgttcagagagacgaagtagccgcccttgggccgccgccaggaggcgatctccagcggcgcgatctcccggtccagcgcgtccaccacacagcggaacttggggcccatgatggcggcgtgcttcttcatcagctccagggtgtgggccttgtccttgagatagagcacatggcgctgctggttcaccttgtcgaagctgatgacctggacagtgaggagcttttccatgtaagccatgttggcctcggagcaggcaaagcaggagatgccggcgccgggcagggtcaccttggaggtggaggcgaactcgaacaccatgtcggcgttgccgtatttttcacactccgccaggatgtccgggaactccacatagtccccctcgaactcatggatacagtaggcattgtcccacatcagcaggaagtccggggcggcgggcttcatagaggcgatgcgccggatggtctcggcggagtagatgatgccgtcggggttggagtacttgggcacgttccacatgcccttgaccgccgggtcctggatggccttctccaccgcgtccatgtccggtccctcgtccgtcatggggatggtgacgagctcaaagccaaaggactccgtcaccttgaaatgccggtcatagccgggggcggggcacaggaacttcaccacgggctccctgcaccaggggcgctcgctgtggagcagaccatgggtataggccttggagatggtatcgtacatcagctgcaggctggcgttgccgcccacgaacacctgctccggccggcagcccaggatctccgcgaacagccgcttggcggcgggcaggccactgagttcgccgtagttacgcacgtcgacgccgtcggacacgtagtcttccgtcttctgcatcaggctgaaaatatcgctgaccagatccagctgcgccttaccgggcttgccccgggccatgttcagattcagtccccgggccttcagctcctcgtactcccgggtcacctcggcgtattccgccttccactcctcggcggtcatcttgggataagcagtcattacagcgcttcctttctgttgaaaaatctttacaaatccaattcagtatatcgttttttcaacaaacttgcaaccccatttctcctgggcgcaaacacgaaaagggccccgccgaaatgggcggggaccctgttccgctttcctcagcagccgccgcagccgatgcagctctctgcgcaggtgatggtggggtcgcaggtagaaatggtcgtgccgtagcggaccgggatggagacacagaccttctgggtcatagtcacggtgcacatggttccgtctgcattggtggcgcaggtgatggtgggattgccctgacaggtgacggtggggctgcccatgactgcggtgggggacaggatcacggaggcagtcacatccacacactgggtactgaccttgttgcagccgttcagggggcaggattcttcggactgatatggtaaaatgggctcatgctcataggcttcattgatacgcaaaggaattccctcgtttcatggaaattatatccggcgtttccgccctggatacaacccatcttatgcgcggcaacgcctgactgcgcctgtcagctctgctgaaattctgcaagggcccgccgcaggaagttcttggtctccggtccgcagaaggcggcgtccaccgccgcctcctggcaggccagcagttcctcacgactcatataggcgaattctgcggcccggcgcagctcctccgtcagggtcagcccgcccaggaaggtaggatcgtcccggctcagggtcaccaccgcccctgcatccagcagacgccgcaggggatgatcctcccgccgccggtacagcagtgtcaggttggaggtcaggcagatgttcagcggcacccgctcccgcaccagccgggccgtcaaatccgcgtcctctgccgcccggacgccgtggtccagccggtccgcctccaggagatccagggcgtcccgcacgccatccggcccgctgctctccccggcgtgggcggtgcggccgaagcccgccgcacccgccgccaggaacgccggacggaaccgctcccccgttcggcccgccagggcctcgttcccgtcaatggagaggcccgccagccggtgggtccggtgggctttcatatcctccaccagggccatggcctccgcccccgtctgggtgcgggagagagacagcgtgaatcggcagtctgcgccgccctgtgccgcagcccggtcaaacccagcggtcaccgcggcgatgatctccggtaccgagaactggggccagtgggtggggttcaggatcatctcgctgtacaggatatgctcccgtccactctccagcgcagcgtgctccgccgcctccgccagctcctccggcgtgcccacaaaggagcagatgttgtccagaaaggcgaggaagtcgctcaggtcctcagcagagcagtcgtacagccgctccgccgggcggggcagctcccgcccctgccgggccgcgaaccgcgccagcatctcccccggcatggtggactccagatggacatggagctccaccttgggcatgcgcgtcaaaaaggcagtcagatgttccattgcgtttgctcctctggttgttttttctataatgaatgtagggcaccggagggaaccaccggacccgctgttttccattataccataccggcgccgatgtgccaatccccggaaaatacccttcccttttgtcagagccgtgctataattctgttaggatcatgtaaatatttcaggaggagggctctccatgggtgaagaacaggaacagaaattccaccagctcacagaagaaccggtgagccggatgatctcccatctggccgttccctgcatcatcagtatgctggtgaccgctttttacaacatggcggacaccttttttgtggggatgctgcgcagcaacgctgccactggcgctgtgggcgtggtgttttccatgatggcggtgatccaggctgtgggctttttcttcggccacggcagcggcaacttcatctcccgggagctggggcggcgcaatacggattcggcctctaacatggcggccaccggctttttctccgccctgttcaccggactcctcatctgcgttttcggcgagatcttcctgacgcccctggccgcgttcctgggctcctcccccaccattctgccctatgccaaggactacctgcgcgtgatcctcatcggcgcgccgtggatgaccgcctccctggtactgaacaaccagctgcgcttccagggcaacgccatctacggcaccatcggcatcgccagcggcgccgtgctgaacatcgggctggatcccctgctgatcttcgtctttgacctgggagtggcgggcgccgcctgggccaccatcatcagccagttcgccgggttctgtctgctgctggcgggctgcacccggggcgccacccttcacatccatatctcccgcgtccagctgaaatggtcctacttcaagctcatcatccagggcgggctgccttccctggcccggcagagcttggccagcgtggccaccatctgcctcaaccacgccgccatgccttacggagacgcggccatcgccgccatgggcgtggtccagcggatcaccaccttcggcgcctccgccatgatcggattcggccagggcttccagccggtgtgcggcttcaactacggtgcccggctgtatcaccgggtgaaggagggcttctggttctgcgtgaaggtggccgccgtctttctgctggtgatcggggcactggggttcgcctttgcaccgcagctcatcgccctgttccgggatgacccgggggtcatcgccatcggcacggtagccctgcggttccagtgcgtgactttcttcttccaggcgtggatcaccatgagcaacatgatgctccagaccattgggcggaccgttcccgccacctttgtcgccatggcccggcagggcattttcttcattcccctggtgtggcttctctccctgtccccgttgggacttctgggcgtccagatggcccagtccgtctccgatcttctcactctggcggcggctgtccccattcaactgtatgtactgcgccagatgtcacagatgcagcccgccaaggtttgaacccgaaacaggaaaaagcaccctgcggccgacggccgcggggtgctttcaggttgtcttacggtcctctcatgcgggcagcagcgcctccaccgcggcggccagcgcctcaccctcccgaatggcataactccaatccggatcctgatagacggcgaagagcccgtcctccatggagagtaccacgtgcagggcctcctctccgccgatgacgttcacctccaccatatcccggaaggaatgcgccgggagtccgccccgggaaatcagaccgcgggaggcgccctccagcagatccagcacctcgtccccgtccacctgggacgagatctcctgtccccggtaatagagcgaggtgagccggtactccacctcctcgtccaacacgggagccgacagggacagcaccaccgctccggccgccactgccagcaccgcaacgatcagcaccacaatgctctttcgcatcccatcacctcctgttttttccattatatccggctccgctccccgctgtcaagcaagaaagcgccgccaaaggcagcgcttttctgttcggctccgcggcgcggacaagctgttattccgcaggttctgcccggcgcagagcctcatcctccgccgccagctccggaaagacgggcgaccagaggcggaagcaccgcccttcgatcatgcgccggtaggcaaaggaatcccgcacccgctccggcaggaggacgccagcccggcactcgtcaccatcctcgtgggtgtcagaccctgccaagcgcagatactccgggtggcgcttcgccagctccagggcccggtcgttatggttttcatggcggggatgggcgttgaggatctccgtgccgtggacagcatcttcaaataccgtggtattgccgtcgcggtaagggtgggcgtggacgatcagtacttggtcgtggaatttccggtagaacccccgggcgctcatgcagcacagatatgggttcgcccgcagccacgcctcgtcaatgccatagaccagatagtcgttgtcgttctccgggaagcgcagctccgcccccaggatcacatccagccccagttcgtctccccgggccttggaggcccggtagccggcaagatagtggtcgatcacatggtcccagttgtggtccgtgtcaatccgggacaagtactccgggtggaggtgatctgtcaccaccaggccggaaaatccgtgcccggcatagcgatccaccacctccgccgccggcagatggccgcatttgctggtctccgccgtgtgggtgtgggggtcgtagagatactctttcatagctgatcgcctcttcttatccgtcaagcagtgcgccgcgccgcagaacggcagacgtctctcatgtcaacgccctgcaggagctgcgcttcaccagactgggcatcaggatctgatggacgtagccctgggtgccccgctcgatcttatccaacagaatctccaccgcctgaagggccatctcccgcttggactgctccaccgtagtcaggtcgatccgcggcatggcggcagatgcgatgttgtcaaatcccatcagactcagctgctccggcaccctgatcccaagctcgtccgccgcccgcagaatccccagggcgttggagtccgtggaggccaggatggctgtatagtccaggggcttggtaaacagctcccgggccagctcatagccgccggccactgaggagcggggaaagctgctgtccacaatccgcggtgtcagccccatgtcccggcaggcccgcaggtagccctctgcccgcagttggtgggtgacggtgtgcctgcggccgaagtacaggatctcccggtgccccaggctccgcaggtattccatggccaggtaggtggccccggtattgtccgtggtcacacagctgaggggttcgtcccgcagatcctcgctgaggaagaccgtgggcacctgctccgtgtagacccggagctcctcacagctccggtgctcctgggggacgatcagcatcccgtccacctggcggcccaccagcagctttaccaccgccttctcctgccgcagatccggcccggagttgcacagcatgagattgtagccccgcgcccgggcgctcatctccgcgtggtacgccagctctgccatgaactgattgtcaatagaaggcactaccagaccgatcagctccgtcctccgcatgaccatggagcgggccacatagtttttggtgtagcccatctcgtcgcacaggcgcaggatccgctcccgggtctcccgcccgatctgtgggctgcctgacagagagcgagagactgtggaataagagacgcccgccgctcgggccacgtccttcagcgtgacgttcttcatctgactctgcctttcccgccgccggtgcggcgcattctgcgcaaacgctttccccacccgccaaagccggccggaggcgtatgccgtcccatatagaatagcgaatttgccggggcttgtcaattacagaacgatgcagggccttccgccgcaagccttgccgcccgtaggtgtttctggaaaatcgaggaaaaccttgaagtgctgctttccatggttttcctttctctaggtagccactcccccctgcgcctgtgtaccttcctatctgcggaagttattcttgtgaaaattcaaactcatattgactccgtatagaaggatggggtaaaatatagaaaatgtcagggttgatttttggtcaaaaccaccatatttttgtgcagacattgggaaatccgccgatacacgcttcttcagcttcgccccacggcaccaccggcgggacgaattttcaaaaacctttgataacccccttttcatgttttggaatttgtggtattctgaaagcgaagtaatcgttttgctttttctgttggcgcacacacattgcattctcacttctcagcgacctgtccccctgtcgaacctatgcggcgcaggtttccgcgcggcgtgcaatttaagtgaaggaaaggaagaaacaccccatgaacgaaaaaaagtgcaaagttctggcggctgagatccggctggaaacgctgaaggtcatccactcccggggcttcggccacgtgggcggctccatggacctggcggacctgatggccgtcctgtacggagaggttatgaagtttgacccgaagaacccccggtgggaggatcgggattggctggtcctgtccaagggccacgcgggccccgtggcttacgccacttttggcctgatgggctactatcccatggaggaagcttataccctcaaccatcctcacaccaagttccccagccacaccgaccggaagctgacccccggcgtggatctgaccaccggctctctgggccagggcgcctccaccgccaccggcgccgctctgggcaacaagatcgatggccgtgacagccacgtgttctgcgtcatcggcgacggcgaggccgacgagggccaagtctgggaggcattccacttcgcatacgcccacaagctggacaacatcatctacttcatcgacaacaacggctatcagctggacggccccaccgccgacatcctggaccacggcaacattgccaagaaggcggaatccttcggcctgtatacccaggagatcgacggccatgatgtgaaggccatctacgacgccatccagaacgcttacgccaagaagggcgtgcccagctgcatcgtgctggacaccagcaagggcaagggcgccactttcgctgagcccaagcacgaccactcctcccagcccaatgaggagcagtgggccgaggcgctggccgccgcggaaaaggctctggaagacgccaagaacgcttgaggagggtgagagcaatgaacgtgaaactgatcggtaagcatgaaaaggactcccgggcctgccgggacggtctcgccctgaccctggacgagatgatggcgcaggacaagtccatctgctatgtggactgcgacctgatgggctgcatcaacaccaagcggctgcgggagcactatcccgaccgggcctttgaggccggcatcgccgaaggcaacgccgccggtgtgtctgcgggtctcgccgccaccggcaagaaggttttcttccactccttcggtaccttctcctcccgccggtgctatgaccagatctatatgtcagctgcctatgccgggctgacggtccatgttctgggttccgacgccggcgtcaccgccgcgttcaacggcggcacccacatgccgctggaggatgcagccatgtacctctccatccccgaaaccacagtgctggatcccgccgactatgaccagcttgccagtatcacccgccaactggtgaacatcgacaagggcgtcacctacacccggttcgtccgcaagggcatcatccaggtgtacggcgagggaagcgagttcgagatcggcaagggtgtggtgctgcatgagtccgacaaggatcaggccaccatcatcacctccggcatcatggtggacgagtccctgaaggcctatgaggctctgcaggcagagggcatctctgtccgggtcatcgacatgttcacctggaagcccctggacgaggagctggtggtcaaggccgccaaggagaccggtgccatcgtcaccgccgagaaccacaacgtcacctgcggcctgggttctgttgtggccaactgcctgtccaggaacgcccccaccgtacaggaatttgtgggcgtgcaggaccagttcggtcaggtgggtccccaggacttcctgatggacgagtacggcctccgcgccgccaacatcgtggccgccgtcaagaaggccatcgcccgcaaataagttcagatacccggcggggtccctcaggggccctgcctgtatcgccatatatcattttgaaaaggagacaagaatcatggatgctttttccgcttccctgatggctgacaagcgggagattattttcgctcccacagtgtacaagttccagaccttcgcccagatggcggaggagttcaagctgaacgagcgggacgtggtgctgaccaacgagttcatctatacccccttcatgaaggatctgggcctcaagtgccattatgtattccaggagaagttcggtgccggcgagcccagcgaggaaatgatccaggtcatgtacgacgccatcccctacgacagctacgaccgcgtcatcgccgtgggcggcggcgccattatggacctgtgcaagctgctgggctgcaagcgccccgataccgtccacaacctgtacttcaagcgattccccgtggtgcacgagaaggacgtcatcgccatccccaccacctgcggcaccggctctgagtgcaccaacatctctgtggctatcgtcaaggacgagaaggacggtgtgctcaccggcggtgagaccaagctgggcctggtgtccgacgacatcatccccaacaaggtgtgcctgatcccggagctcctcaagaccctgccctacaagcccttcgcctgctccgccatcgacgccctggtccacgccaccgagtccttcctgagcccccaccgcaagaccatgacctccgagctcttcagcgagaaggctatggatgtgattctgaaaggcttcaagctgatcgacgaaaagggccaggacgcccggttcgagtatatggatcagttcgtgaccgccagcttctacgccggcattgccttcctgaaggccggctgcggcccggtccacggcatgagcttccccctgggcggcacctatcacgtgccccacggcgagagcaactatatgctcttcggcgccatcatggactactatgacgagcacaagcccgacggtgagatcatgaagttcaaggagctggtgtccagcatcctgggctgcgaggtcaaggacgccatccccgagatgaacgccctgctgcagcgcatcctgcccctgcggcccctgcgggactgcggcttcactgaggcggacttcaaggccttccccctgtccgtcgaggccaaccagcagcgcctcatgaccaacgcctactaccccttcgacctggagtccgaagaggccatctaccgcaagtgctattaaaatttttccagacaacgaagggagagacggcggctgccgtctctccttttttcctttcgccacgcggtttctttcctctatacaccgcacctttctttgcatttttgtacagtacacacaaaaatataatgaaatcaaaaacattttatgggcgttctttttgagattgaggattgactttccgaaagagagccgctacaattggaaacaacatcaacgggttgtctgttttgaaaggagtggaacaccatggcattttacacgacgtcttcccagtccatgatgatgaatggtgcgtccgctcgccaggcggcgtctgcttcctgcgcctattccacggagatgtcccgtgcttccatgatgaatattgctctgattctggacgccattctgctggcgtccattattatttgcgccctgattccccttgccattctggtatccgtactggcagtggccctgtttgttctggtactggtattgttggcagcagagtatcatcatacgccgagatcgcgacgaggtgcataactgtttgatacagtaaagcggctccgcatctggcggggccgcttttttgtataatctgaaccaagaaaaggagattgcaagatgaaaaagaagttctttgccctcatgatggccatggttatggtcctcagcctggccgcctgcggcggctcggatgaagccgactccaactccggcgattctgccggcggggagagctccggcagcagcgccttcaaagtcggcgtcattggccccctgaccggcggcgccgccatctacggcacctgcgtggccaattccgcccagatcgcggtggacgaaatcaatgccctgggcggcgacatccagtttgagctgatgactgaggacgacgtcaacgacgctgagacctccgtcaacgcctacaacgccctgatggacgacggcatgcagatcctggtgggcaccgtcaccacccagccggccctttccgtggtcccgctgtcctatgaggaccgggtgttcaccctgaccccctccgcctccggcgacgatgtcatttccatcaacgacaatgataacgtgttccagatctgcttcaccgactccaaccagggctcccgttccgcccagtacatcgatgagaacttcgacagtccgaagatcgccatcatctacaaaaacgatgaccaatactccatcggtatccgggacaacttcaaggcagaggccgattcccgcggtatggacatcgtctatgagggcaccttcaccgaggccagccagaccgacttcaacgtccagctggctggtgcccagtccgccggcgccgatctgctgttcctgcccatctactatacccccgcctctgtcattctgacccaggccaacgccatgggctacgcccccaccttcttcggcgtggacggcatggacggcatcctgaccgccgagaacttcgatgcctctctggctgaaggcgtctacctgctgactcccttctccgccgactctgaggacgagatgacccagaacttcgtggcggagtatcaggaccggttcggcgagatccccaatcagttcggtgccgatgcgtatgacgccatctacaccctgtatcaagccatccaggccgccggcgccaccgccgacatgtccaatgaggagatctgcgatgctctgatcgaggtcatgcccaccctggccgtcaccggcctgaccagcgccggctccgagatgacctgggacgaaaacggtgctgtgtccaaggaccccaccgcagtcattatcgaaaacggtacctatgtcactccctgacagcggaacacacactccactgtaatagaggacagggatcggctgccggaactccggcagccctccctggacttctatggtggaaaccgacgcggggagctgtcaccgccccggtttctgccatagaaggggaaagagaggaaaatacttatggaatttctatcctacctgatcacgggcatcagtctgggaagcatctacgccatcatcgccctgggctacaccatggtatacggcattgccaagatgctgaatttcgcccacggcgacgttatcatggttggcgcctatgtgtccttttacgtgaccatgtttgcaggcagcaacctgctgggagaggatccctccgcactgaccaccggcgctgtggctctggtgtccgtgctgctggctatggtggtctgcacggttctgggcgtggtcatcgaggggctggcttaccgccccctgcgccaggccggcagcctggcggtgctgatcaccgccatcggcgtcagctacttcctgcagaacgcagcgcagctgctgttcggcgcgaatcccaagaacttcacccccgtggtcagcggccagctgacgctgtttgacggacagcttcggatctcctatgtggcgctgctgaccatcacggcctgcgtggtcatcatgctggggctgaccgccttcactggaaagagcaagatgggcaaggccatgcgggcctgctcggaggaccggggcgcagcccagctgatgggcatcaacgtcaacgccaccatctctatgacctttgccatcggttccgccctggcggccatcgccggggtattgctgtgctcttactctccggtgctccagcccaccaccggctccatgcccggcatcaaagccttcaccgctgcggtgttcggcggtatcggctccatccccggcgccttcctgggcggactgctgctgggcgtcattgaggccatggcgcaggcctatatctccacgcagttgtccaacacgatcctgttcgccgtgctgatcgtggtgctgctggtcaaaccgtccggcctgctgggcaagtatgtgcctgagaaagtgtgaggtggcggtatgaaaggctatttcaaaaacatgaaaaccatcaccaaggtggacttcgccacctatctgggcgtgatcctagcctttattgtggtgtcggtctgccaggcccagggactggtgaaccgttctctgggcggtatgctggttcccatctgctgctacgtgtgcatgtccatctccctgaacctgaccgtcggcattctgggagagctgtctctgggccatgccggcttcatgagcgtgggcgccttctccggcatcattgccgccatgagcctgcaatctgctgtcccaaatgatctggtgcggatgatcgtcgccctggtggtgggcgccttctttgccgccatcgtgggcttcatcgtcgggattccggtgctgcggctccggggggactacctggccattgtcaccctggccttcggcgagatcatcaaggatctgatcaactgccttctggtgggctgggatgagaacggcctgcacatcgccctgaacgtggacggcaccaagagcatgtcctctctcggcctcagcgaaaacggcatcgaaatcatcaagggcgcccagggcgccacgggcaacgcccgcatcgccacctttgctatgggctttgcactggtgatgattaccctggtggtggtgctgaatctggtccgcagccggaccggccgggctatcatggccatccgggacaaccggatcgccgccgagagcgtaggcatcaacgtcaccaagtacaagctgattgccttcgtcacctctgcctccctggcaggtgccgccggtgccctgttcggcctgaactactccaatgtcactgccgtacagttcgacttcaacacctccattctggtgctggtgtatgtggtgctgggcggtctgggcaacatctggggctccatcgtggcaacagttgtcctgtatgtgctgccggaggccctgcggcagttctctgactatcggatgctggtgtacgccattgtgctgattctggtgatgctggccaccaacaacccgcaggtgcggacgctgattagccggatcattcccagaagaaagggggcagccctcgatgagtaagaaatttgaaaagggcaagatggtccctgttcccagccatgccatcattccggagcgggacatcgacaaatcccccattctggagtgcagccacctgggcatcgacttcggcggcctgcgggcggtgaatgacttcaacctcaccatcggccggacggagatcgccggcctcatcggccccaacggcgccggcaaaaccaccatcttcaacctgctgaccaaggtctatcagcccacccggggcaccatcctgctggatggactggatacctccggcaagaccacagctcagatcaaccgcatgggcattgcccggaccttccagaacatccgcctgttcaacaacctctccgtggaggacaatgtgaagatcggtctccacaatcaggagcgctactccgccatcaccggcgttctgcgcctgccctggtactggagccgggaaaaggccgctcatgagcgggcactggaactgctgtccctcttcgggatggcggacttggcggaccatcaggccggttcccttccctacggcgcccagcgccggctggagattgtccgggccctggccaccaatccctctcttctattgctggatgagcccgccgcgggcatgaatccctctgagacggcggagctgatggagaatatcgtcaagatccgggacacgttccagatcgccgtcatgctgatcgagcacgacatgaagttggtcatgagcatctgcgagggcatctgcgtcctgaacttcgggcaggtcatcgccaagggcaccgccgaagagattcaatccaaccccgccgtcattgaggcatatctcggtaaacagaaggaggcgtgaccatggaaccgattctgaaagtcagcgacatcaacgtctactacggcgccatacacgccatcaagggcgtctctttcgaggtaaatcccggagaggtcgtcaccctgatcggcgccaacggcgccggcaaatccaccacgctgcagactgtctccggcctgctccactcccgcaccggctccatcgaatttctgggggagaacctgatgggcgtcccagcccacaaggtcgtggccaagggactcgcccaggtgccggaggggcggcgggtcttcctgcagatgaccgtagaggagaatctggaaatgggcgcctatacccggtccggcggcgacatcgacgcggatctggaaaaggtctacgcctatttcccccggctgatggagcggcggcggcagatcgctggcaccctctccggcggcgaacagcagatgctggccatgggccgggcgctgatgagccgtcccaagctgctgatgctggatgagccctccatgggcctggcacccattctggttgagcagatcttcaagatcatccaaaccctccatgaggcgggcaccaccattctgctggtggagcagaatgcccaggcagccctgagtatcgccgaccgtggctatgtgctggagaccggaaaaatcgtcacctccggcaccggaacggagctgttggcctccccggaaatcaaaaaagcctatctgggcggctgaagtctcagaaaaaggagagcgtgtgctctccttttttctttgcaatctgccgggcatgtggtatactgctgtcatgacggaaaggagggatcccatgcgcgcggaagaacggcggcaggccattcgggagcttctgcagcgggcaaagcagcctgtcagcgcaacggccctggcggctcaattctccgtcagccgacagatcatcgtgggggatattgccctgctgcgggcggctggagcagacatctccgctacgccccggggctacgtgatcctgcgagagacgggaggtctggtgcggcaggtggccgtccagcacgatgccgctggtatgggagaggagctaaacgctatggtggaccagggctgcacggtactggatgtcattgtggaccaccccatttacgggcagctgaccggccctctgcagctctccaaccgctatgatgtggggcagttcctctcccgctgtgcgcagtccgacgcccgcccgctgtcggaactgacggaggggatccatctccacactctctcctgtccggatgaggcggcattcggccgggtgtgccgggagctgcggcggctgggcgtcttgctggaaggttgaacatgtaaaaaagcagttgacaggaaccgggattttgtgtatgatacggtttacaggtgtcaagacacctgtaaaccgtattttttgattctacataaagcaggtgtctcccatggaacaggtcaaaggctttctgaagcgcaaaaacattgtgatctccgccaagcggtacggcattgacgccctgggcgccatggctcagggactcttctgttccctgctgatcggcacgatcctcaacaccatcggcacccagttccacattggctttctcaccgcccaggtcatcaccatcaatggcgtggggtataccatcggtggactggcgtcgttcatgagcgggtccgctatggcggtggccatcggctacgctctccaggcgccgcctatggtgctgttctccctggtgacggtgggctatgcctgcaacgccctgggcggggcgggcggaccgctggccgtgctgttcgtggctatcatcgccgctgaggtgggcaaggccatcagcaaggagacgaaggtggacatcctggtgacgcccatcgtcaccatccttgtgggcgtgggagcggcctggatcattgcgccccccatcggcggagcagccagcgcctttggccagctgattatgcggaccacggagctgcagcccttcttcatgggcgttctggtgtccgtgctggtgggcatcgccctgacgctgcccatctcctccgccgccatctgctccgtgctgggactgaccggactggcaggcggcgccgccgtagcgggctgctgcgccaacatggtggggttcgccgtcctctccttccgggaaaaccgctggggcggactggtgagccagggcatcggcacctccatgctgcagatgcccaacatcgtgaagaacccccgcatctggctccctgccatcctcacctccgctgtcaccggacccctggccacctgctttttcaagctggagatgaacggagaccccatcaactccggcatgggcacctgcggcctgtgcggccagctgggggtctggaccggctgggtcaatcccagtgacgcggctctggccaatggggccgccgccatggcccccaccgcctttgactgggtgggactgatcctgatctccttcgtcctccccgctgtcctcacctgggccttcgggctgttcttccggaagatcggctggatcaagccgggggatctgaccctgccgcagtaggtaaaatgcccggaccgcgatgcggtccgggtaattttatttgttcaggccaaggaacacgagacagccagtcaagaaccacgggctgtatcgcataagtgtatagtagttcatatttttgatccaatcaacaaacccaggaatatttgctaaaaaaatgaatctatgcccaaaacaataaatcacaaatattagataatacccaatggcaacagcgccaaatatcaaagccatcatccgaagccgcttggatggcaggcggaggtcgacaaccaatgccgtaccggacatcaaaaggcctccagccgccagagcagcagctgacggcacagtcaaagcgtaccatacccacggcataaggtcatatgtttcccagcaaatctgctgcacaaagggccttaatactgtttccagcacgcagaatatgaataacaccgctacacagatggctgtcaaagctgcatacttccgttgaccgcgtcgataactttcctctcgccccgggccgtagatcagctcccggacgtcggcgttcagcgcctccgccaaggtggtcagggtctcgatatccggctgggtctttccggtctcccaggaggacaccgcctgccgggtcacatggagccgctccgccagggcgtcctgggtcagcttctcccgctggcgcagctgcttcagattttttcccaccgcgttcacaacctcgcctcctgctgccagcgtaccacagtcccggcgctttgtcacgcaacaaagtgttgcgcgccctgcaagggcttgcggcggaccgcgggatatggtatcgttaggatatccgagatcaaaaacaggaggaactgtcatggaataccggaaatttggggacgcctacatcgtccgcctggaccgggacgaggagatcctggcccagctgaagatcttcgcagaaaaggaacaggtcaaactggcctctgtcaccggcctgggggctgtgaaggacttcaccgtaggagtgttcgactccagcgccaaggcttacaagtccaaccgcttccagggggtctatgagatcgtctctctggtggggaccatcaacacgatgaacgacgcgttttactgccatctccacatgtgcgccgccgaccaggagggccacgctttcggcgggcatctgaacgaggccgtcatcagcgccacctgcgagctagtggtcacctgcctgcccggagagacgaaccgggtattcagcgacgaggtgggactgaatctgatctccttctgaaatccgcggaaaagaggctgaggagtattcctcagcctcttttccgcttttgggggacgctgtcctcacccgaaggcccctgccgcgtggtcccgcagaggcagctcctggaaaatggatgcctccaccgcctcgtactcccccggcgtccgaaggcggcgcattttcttgtcatggcgttcgccgccctcgaacaggtggatcaggaagaaccagacctccttcatccgctgggccgccgggcccacctggccatagaagtcctggtaggactgatacagcgtccgggtgaaggtctggagctcctgccgggtggtggggacgccgccccggagcttccgcagcagggccgggtccgcgatggcccctcggccgatcatcaccgcgtcgatggcaggaaagtccaccgcaaagactgtgcagtcctccacggtcaccagatccccgttgtagcacaggggattccggctgcgctccgccgcccaggcgaaccagtcccggtgcacggtccccttgtagaactgcttctgcacccgggggtggatggtgaggcaggcgatgggataacggttgtaaatgtccagcagccgctcgaactcctccggctccttcacccccagccgggtcttgatggacaccggcagcttcacggcggcgaatacctcgtcaaagaaccgctccagctcctccggctttgccagaaagcccgcacccttgcccttggcggtgacggtgccagagggacagcccaggttcagattcacctccgtatagcccatgtctgccacgatctccgccgcccacagaaagtccggtgcccggcaggtcatcacctggggcaccacaggaagccctgcgttggccgccgggtccagctcccgttgatcccgcttggtcaggatatgctgatccgtaggggagaaaaacgggatgaaataccggtccgccccgccgaacatccggtggtacacctgccggaacaccaccttggtgataccatccagcggggcgaagtcgtaccgctggatcatcccagtgccgtctcccactccgcctggcggaagccggtgcggacgaagtcctcccccaccagaatgggccgctttaccagcatcccgtcggtggccagcagggccagctgctcctcctcgctcatctccggcagcttgtccttcaggcccagagccttgtactggaggccgctggtgttgaagaacttcttcaggggcattccgctcttctcccaccagccccgcagctcctccgccgtaggattttccagcttaatatcccgggcctcgtaagagacgccccgctcgtccagaaaggctttcgccttctggca

SEQ ID NO: 4946 - DNA, 1408 bp, Unknown
  gut microbiota DNA sequence
cgctacgcccgccgacttctgctgccacaatacggatcgcgacgccgaggccgagatcgtagcggattacgtgaactgtggcgtcgattacgtattcggcggcggctccaagctattcgagaaccgtgcggacggtcgcgatttgttcaaggaattaagggagaaaggttaccagactccccgtagctgggaggaactggcgaagattcaaaaaggcaaggtattctgcgttaccgataccgtagacaccccgcttcccgccgagcgaggcgatctcttggctcgtgcctcgatgaaagcgatcgatctgttgggacaaaacccggaaggtttcttcctgatggtagagggctcccaattggatgattacggacatttcaacgatatcgacctgttgatgcaagagacacatgatttcgaccgtacgatcggacgtatcttcgaatgggccgcccaagacggtgagacattggttgtcgtaaccgccgatcacgagaccggtggccttaccttggtagacggggatctggacgagggccgtatcgtttgtaagttctctaccggtagccatagcggcgtaatggtccccgtttatgctttcggcccgggtgccgagaacttcacgggtatcttcgagaatacggatatcttctggaagatcaaaaagctcctgaatctataatcaaacagtattcatccgatggagagtataacaggccgctatcccgctagtcaagtaccgcaatcctcccggtagggtaacgcagtacccctgcccaagtaccgcagtactttggctgagaggacagcggtacttgactagcaggacagcagtacttgactagcagtactacggtacccggccgggaggaccgtgttcaccgactgaggcgcgccttctccctctctcccccaataaatatcataaagaatgacaacaagacgaaacttcttaaagcaatcccttcttgcggcaggtgcggcctccgttcccgccgggaaccttttagcgcaagagaaaatggaagagaaacgacccaagtacaatcttccttacaagaacacctacctgaaggaacccttcgtgaccgagaacgagttccggacagcgaaaccggagaccatcacgcccggaaccttcgaggaggccaagcaaatcctcccggacccgacttggagcggacacgagaaggaaatcgagatgtactggaaggcttggcaaatcggcatcggcaacatcaaggccccggaaccggattccggtttcgtatgcagctacctcgatgtcgcctacaacggcaatatcttcatgtgggactccgccttcatgatgatgttcgcccgtttcggtacccgcttcttccccttccaacgtacgttagataatttctacgccaaacaacatccg

SEQ ID NO: 4947 - DNA, 1298 bp, Unknown
  gut microbiota DNA sequence
atctgcctgttctgggtggtttgtattcaggctatgcggctgaggatccgtgagaggcctcgcctcaaaagacgccctgctccatcatggcctcagccacccgcttgaagccggcgatgttggcgcccgccaccaggttgtagcccaggccgtactcctccgcagcctccacgctcatctggtagatggtgttcatgatccggtgcagctgcgcgtccacctcttccgccgtccacaccagccgctcactgttctgcgccatctccagtgcgctggtggccacgccgcctgcgttcaccgccttgctgggcgccacgatcatcccgggctgctccatcaagaaccgcagcgcgtcgttggtggtgggcatgttcgccacctcaatgtagtacttcacgccgttggccgcgatctgcttcgcctgctccatgtgcacgtcgttctgcatggccgagggcatcaccacatccgccttcaccccccaaggcttctcaccggggaagaactccacgccgaacttctccgcgtagtcctgtacccggttgcggccgctggagcgcatctccaccagatacgcaatcttctcctccgtggctacgccgtccggatcatagatatatccgtccgggccggacaatgtcaccaccttggcccccagctgcgttgccttcctgcagatgccccaggtcacgttgccgaagcccgcgcaggcgatggtcttgcccgcgatccgctccccctcgtgctccagcacgttctggagatagtataccgcgccgtagcccgtggcctccggccggatcaggctgccgccgtaagagaaccccttgcccgtcagcacaccgttctcccaggcccccttcagccgccggtactcgccgaagagatacccgatctcccggccgcccacgcccatgtccccggcaggcacgtccacgtccggcccgatgtaccggtacagcgcctgcatgtacgcctggcagaaccgcatgatctccgcgtccgacttccccgccgggtcgaagtccgcgccgcccttgccgccgccgatgggcagacccgtcagagagttcttgaagatctgctcaaagcccaggaatttgatgatgccgggatatacgttggcctggaaccgcaggccgcccttgtagggccccagcgcgccgttgaactggcaccggtagccgatgttcgtgtgccactgaccctgatcgtcctcccaggagacccggaaggtgaacatccgctccggctccaccatccggttcagcaggtccaccttctcatactccgggtgc

SEQ ID NO: 4948 - DNA, 14003 bp, Unknown
  gut microbiota DNA sequence
aaattcagtatagattcccttggtttacgaaaaaactgtgaaatttcttaaatttttatgaagagagccgccctgcgtggaatcacgcagggcggctcatattactgccttctgcggcgcagcaccatcagcacagcgcccaggaagatggccaggtccgccagattgtaggtgtatttcttcagcggccccggcgcctttggaaagcgcagatagtccaggacccgtccatggcggatccgttcccacaggttgctgagtccgccgcctagcagcagtccggcccccaggccccggccgccgcacacccccagcagcgcccacagcgccgccagggacagaggagccatctgccggccgttcagcgggacaaggccgaagccggagccctggttgtaccggggttcgatccgcacccggccgccgtccagctccttttggggcagccccttgcgctccagggttccgcggacctggccgcagagggccagcaccgcgcctgcggtacagctcaatccgatcatggcttctcctcctctgtctgtctctgggcccgctccagggcggagcggacgtttccggtcttctgcctgcggttgttggcggccaggatgtccgcgatctggccttccacctgctccacctcctgccggaaggcgctggcggaaagccgcagggccccgtggcccagaatgatcagctgctccgggccgtcggaggtagccacccgcacccgatggcggcggccaatctcgtaagtggcccgctcgatataggcgtccgccgtctccgcctccttggtgtagaccacgtggatgtcgtggtacttctccacgctgccctggccgcccttgaccttataggcgtcaaacacggcgatgacctcgcacttccggaagccccggtagttgctgaggagatcgcacagctgcttgcgggcggcgtccagattgtcccgggcgatggccttcagctcatcccaggcaaaaatgatgttgtagccgtccaccagcaggtactccggtccggagaactgctcccggatggtccgcttttcctgctctgcctccgctgtcggagcagggcgccgggggtctttcgggggaataaaggcccgccgcttcatggggccgtaggtccgctcgaagatggcctggagctccttatcctgctcgatggtcccagcgtagacagaggcgcgccgggtatcagacctccccgccggctcctctttctccggtcccaggtccaggccgctggacacgtgcgcccgggcgggcacttcatcccaggggacgatgacgccggcgccgtggctgcagaacacggagtccggggagttgtccaaatccgccgtcgggtcgtaatcgacggacgccagcacagcgtcctggtccgcacagggcgcataaccccggagggaacagagcagccgcccccggccctgggtgtaggcggccacctcccgggcgtagtcccccagagcggacaccgccacggcaccagtgagcacagcctcctcccccgccgtctccggcggagacagctgcgcccccatctgctggaggtccgtcatggcccggcccacctgaggggcgggcagctccaggcggaagtcgtaccagggctccagcaggatgctctccgcctccatcagcccctggcgcaccgcccgataggtggcctggcggaagtcgccgccctccgtgtgcttcacgtgggcccggcccgccgccagggtgatcttcatatccgtaatgggggagccggtcagcacccccaggtgctccttctccgccagatgggtcaggaccagcctctgccagcggccctccagctggtcctccgggcaggccgtcccgaactccaggccgctgccccgctccccgggctccagcagcagatggacctctgcatagtggcgcaggggctcaaagtggccgatgccctctactggggcggcgatggtctcccgataacagatggcgccggggccgaaggccacctccaggccgaaccgctcccggatcatgcgttgtaagatctccagctggatctcccccatcagctgcacgtggatctggcgggtctgctcattccaggcaatgtggagctggggatcctcctcctccagctggcgcagattgcccagggcagtgtggggatccgtcccctccggcagcagcacctgataggtcagcaccggctccagcgccggggcagtccagccggtctcaagccctaagccctctcccgcccggctgcgggagagacccgtcacggcgcacaccgtccccgccggggcctcctccaccgtgcggaacttggcgccggagtagatgcggatttgatccgccttctcctcccacacctggtcctctcccagaccggggcggcggttggtcaaaaggctcttcacccgcagggtgccgcctgtcacttttaaataggtgaggcgggtgccctggccgtcccgggcgatcttgtagatccgggcgccgaaggtctccggataggcgggaaccggggcatactgttccaccccctccaggaattccgagaccccctccagcttcagcgcagagccgaaccagcaggggaacagcttccgcttcccgaccattcgccgcaggtcgccgtctgtcagaactccggtctccagataccgctccagcactgattcatcgcagacggccgcctcctcccggaacgattcgtcccgttcgccgctgaaatccacacagccgctgcccagatgctgctttaagcctgccagaactgcggcccggtctgcccccgccaggtccatcttgttcacaaaaagaaaggtgggaacgtgataccgctccagcagccgccagagggtgcgggtgtgggcctggaccccgtcagtgccgctgatgaccagaatggcacagtccagcacctgaagcgtccgctccgcctcagcggagaagtccacatggcccggcgtgtccagcagggtgacctccgtgtccttcagggaaaacaccgcctgtttggagaagatggtgatgccccgttcccgctccatggcgtccgtgtccagaaaggcgtcctggtggtccacccggcccaggcgccgcagggcgccgctctgatacagcagcgcctccgacagggtggtcttccccgcgtccacgtgggccaatattccaacgaccagctttctcatgtctccactccatctttcgtgttcatgcaggtttatcatatcatctcccggctgcgggcgcaagacgccgtccggggcgtttttcttgcattgccgatatccccatgctaaaataaagggtcagaacatcgggcgcacggcgccctttcgggaagagttgtgcttatggaagattatgtggaaaaattccgccaggcggacgccctggctcagaatattctgcgcctgacccggaacaccctgctggtgaacctgcggttcctggacctggccctcagccagtttcagctgacctcctatccaggtaccctggccacggacggccagcacctgttttacgacacgtactacgtcctgtccatgtacaagcgggagcggggccggaatgtgcgggactacctgcacatcgtgctccactgtgtgttccggcacctgttcaccagcgccaacatcgaccgtcggtgctgggacctggcttgcgacatcgcggtggaaagcgccattgaggacctccacctggagagcgccgcctgcaaccgggcctatgcccaggaggagacgctgaaggagctccgctcccaggtgcggctcctgacggcggagaagctctaccggtactttctggaccggcagctctccgacgatcagatggcccggctgcgggaccccttcctggcggacgaccaccgggcctggtatctgccggtgaagagcggccagggcgccggaggaggcagccagtccaacggccggacaccggagaccggcacccccggcaagcagaagtccggccggggcggccagggcagccgggcccggacgcccaagtccggcacggaacggcgggaccgtgacctggagcagacctggcgggagatcagcgagcgactccaggtggacctggagaccatatcccgccgccacggcaccgatgccggcaatctggtccaggagctgaaggcggtgaaccgggagacgtatgactatgcggacttcctccgccgctatatgagcctgggcgaggtcacccaggtgaatcaggacgagttcgactatatctactacacctacggtctgtccctgtacggcaatatgcccctggtggagccgctggagtacaaggaggtccggcggatcaaggaattcgtcatcgccatcgacacctccggctccgtcagcggcgacctggtgcagcggttcgtcaccaagacctacaacatcctgcgccagcaggaaaacttcttcaccaagatcaatctccacatcatccagtgcgacgcggaggtgcaggaggaccggaagatcaccagccagaaggacttcgacaactatctggacaccatgcagctccacggcttcggcggcacggacttccgcccggtgtttcagtacgtggacgagctggtccgggccggagagttcaccaacctcaagggcatgatctacttcaccgacggccgcggcatctttccggagaaaaagccggactacgacgcggccttcgtttttctggacgacgggtacgacccgccggacgtgccggtgtgggccatcaagctggtattacagagcgaggagatctgaaccatggaaacacaagtggaatgcctgcggctggagggccgccgggccgtggtgcagccggaggggccggtggcccgggtcagtgccaaggccgtgcccgccctgcggggcgtggagattctggtgatccccccggatgtggatgccttttacggcctgaatcgctttgaaaacctgcggatcgtggaatacggcggcacggcggatgtgttcgcctttcaggacagcctggactggctgtcggagaagctggccgacgaggaggcctttctcttccggctggccaccaacgccatcggcgcccgccccatctccccggcgctgaccgctattgcggccccccgcatgcgccccattcacgccatggtccactgggactgcctgatggccgccttggacgagcgggccgccaacggcaccgtccggcaggacacctcccgggagaatatcttcctgtgccagggctacgcccagttgaagcggctggaatacgccttctatctgggtttctctttggaagaggaagggtacgccccggagatcggcgcctgctaccggcaggaggaccgcttcaccggagaggagcggctgatctacgcgctggccctgctgcggggccactcctatcaggagttctacaccaacggcggcaccaacgacttccggcacatgcggcccaaggaacattatctggagcatctgcgccggaacttggccctgacggacaacgacgccctgcgccgccagctgctgcagctggcagacctgggctttctggaccaggacaactgccgggccgcggtggacctgttgctgcgcagccgtctgacagaggccaccgcctttcttctggactactgcaaccgccgctggccccgggagacggctggggcggacacagattttctggacgcggaatttgcgctttgaatcataccgatactgaggaaagtcaggttgaatgaccatgaacatcaaagaggccaaggaacagatcaaaaacgccatgacggcatacttcaccaaggatgagttcggcagctacgcagtgccggtggaaaagcagcggcctgtgttcctcatgggccctccgggcatcggcaagaccgccatcatggagcagatcgcccaggagttggacgtgtgcctggtgtcctactccatgacccaccacacccggcagagcgccctgggtctgcccttcattgagaagaaggtctttaaccgcaaggagtaccaggtctccgagtacaccatgagcgagatcatcgcctccgtgtacgagactatggaggccaccggcaaaaaggagggcatcctcttcctggacgagatcaactgcgtcagcgagacgctggccccttccatgctgcaatttctgcaatataaaatcttcggccgccatcgggtgccggagggctggatcgtggtcactgccggcaacccgccggagtacaaccgctccgtccgggagttcgacatcgttacctgggaccggctcaagcgcatcgacgtggagccggacttcgatgcctggaaggagtttgcctaccagaagcacgtccatccggcggtgatgacgtacctggagatccggaagggtgacttctacaaggtggagtccacggtgaacggcaagcggttcgtcaccgcccggggctgggacgacctgagccagatgattcacctgtacgagcagaaccacctgccggtggatgagaagctcatcatccaatatctccagaatcccaagatcgccaaggagttcgcggtttactacgacctgttcaacaagtaccgcagcgactaccaggtggacaagatcctcgccggcaaggccaccaaggccatccgccagcgtgcctctgccgccaagttcgacgagcggctgtccctgctgggtctgctgctggacgccgccaccggcgagctgcgctccgtggtggagcgggaggagatgctgcgggagctgcttggcatcctgaaggacgtgaaagccgccctgaccgcgccggaggcggatctcgccgctctgctggaggaacagctgcgccgtcagaagacccgcatcgacaccggcaggcggtctggcagtctctcccaggaggcggagcgctctcaccgccggatcatcgccgctctggagcggcagaaagccctggctggacagaccgtggacagtcagacgggctttgctgcagtgaaggcggacttcgaccagatggtccagggcctgaaagcccaggccaagaccgccggggagatgctgaacaacctcttcgccttctgcgaggaggtgttcccggaggggcaggagctgctgatcctggtgacggagctgaccatcaactactacgccgccaccttcatcagccgctacggctgcgacgcgtatttcacccacaaccaggagctgctgttctacgagcgccagcaggagatcatctcccagctggagtccctggagctgaactgaccgcggggggagaggaggggctcatgtaccgcattttcatcgtggaggacgacgcggccatcgccggggtcatccgccgccatctggagggctggggctacaccgtccgctgcgcggagcggttcgacgacgtcttgtcggagttcgccgccttcgacccccatctggtgctgctggacgtctccctccccttcttcaacggctaccactggtgtcaggagatccgccgggtctccaaggcgcccatcttatttctcacctccgcctcggacaatgtgaacgtggtgatggccatgcagctgggcggggatgacctgctggcaaagccctttgatttacaggtgctctccgccaaggtccaggccctgctgcggcgggcctacgacttcggcccgtcttcccacctgctctcctgcggcgccgcggtgctgaacgtgtctgatgggacgctggatgcccacgggcagcgggtggagctgacgaggaacgagtgccggattctgcagctcctgctggagcacaagggggagatcgtcagccgggacgcattgatgacccggctgtgggagtccgacagctttgtggatgagaacaccctgacggtgaacatcgcccggctgcggcggaagctggaggcggcgggcctcccggatttcatccgcacccggaagggcgccggatatctggtggaggggtgacggaatgctgacagcctatctcaagcgccagtggaagctgctgttgctgctggccggggcggtggcggtgttcgccgccgtgttcgccctgtacagcctgccggtggaggcggttgcctatgcaggccttctctgcctaatgctggggctggtcctgtttgccctggggtactccgcctttctccggcggcaccgggagctggaagggcttttacgaaaggtccatgagtcggtgctgcccctgccgccgccccggggcgtactggaggcggactatcaggccctgctgagggcggtctgcgccgaccgggtgcgtctggcggcggagaaccgggaccggctggaggacatgacggattactacaccctctgggcccaccagattaaaacccccatcgccgcggcccggctgctcttgcaggaggatcccggcgctgtgggcacggaggtggaagtggagctcctgaagatcgagcagtatgtggacatggtgctgggctacctgcggctggacagcgagagcacggactatgtcctccgggacacggacctggacggcctgctgcggcaggcggtgcggaagttcgcccggatgttcattctgaaaaagatcaccctggactttcgggagaccgggcggacggtgctgacggacgggaagtggctctccttcgtggtggagcaggtactgtccaacgccctgaaatacacccccgccgggggccgcatccggatctacggggacggagagacgctggtcatcgccgacagcggcatcggtatccggccggaggacctgccccgggtgttcgagaagggcttcaccggctacaacggccgggaggacaagaaatccaccggcatcgggctgtacctgtgccgccgggtgatggaccggctgaaccacgggatctctatcgtctcccgccccgggcaggggacgctggtgcggctggacctctcccggggccgacgggtggtggagtgacccaatgtgacgaaactgtaaggaatcgggccggactgtaagccaaatccatggcagacagtccggccctttggctacaatagaggcatgatccgatacgaggaggaatcttgatgccattgttggaagtacagcatgtacagaaaatctacaccacccgcttcggcggcacgcaggtccaggccctgtccaacgtcagcttctccgtggaggagggggagtacgtggccatcatgggtgagtccggctccggcaagaccaccctgctgaacatcctggcggccctggaccgccccaccgccggggaggttttactggagggcaggcccctctctgccatccgggagcgggatctggcggccttccgccggtcccacctggggttcgtgttccaggacttcaacctgttggacaccttctcccttcaggacaacatctatctgcccctggtgctggcgggcacagactaccgggagatgcagcaaaagctccgccccatcgcagatcagctgggcatctcggacatcttggcgaaatacccctatgaggtctccggcggccagaagcagcgggctgctgtggcccgggccctcatcacggacccccagttgattctggcagacgaacccaccggcgctctggactcccggtcctccgacgccctgctggagctgttcggagaactgaacggcaccgggcagaccattttgatggtcacccactcggtaaaggcggccagccacgctggacgggtgttgttcctccgggacggacaggtgtaccaccagctctaccggggcggcgagagccaggaggcccagttccgccggatctccgacaccctgacggtcctggcgggaggcggtgagccccatgcgtaagtccggattctttccccgcttggccctggtgaatctgatgcgcaacggccggttctatgggccgtatctgctctcctgcggcatgacggccgccatgtactacattctctcctacctgaccttcagcgacattgtggcctccgtccggggggccggatatctccaaagcctgatgtacctgggccggctggtggtgacgctgttctccgcggttctgctgctgtacgccaacagctttgtgatgaagcgccgccggcgggagctggggctgtacaacatcctgggtctggagaagcgccacaccgcccgcctgatggtgtgggagacgctctactgcgccgccgcggccattgtgggcgggctcgcggcaggggtgctgttgagcaagctggtgctgctgctcctattgcagctgtcccacctgccggtggagtatggctttgagatcagcctctccggcatggccgataccgccgctctcttcggcttcctcttcctgctgacgctggtgtggaacctgttcgggctgctccggtcccgtcctgtggaactgctccacagcgccagtgccggggagcgggagccccggacccgccgcctgctggtggtgctgggggccgtcactctgggggctggctatgccaccgctctgacggtagaggacccctttaccgccctggcctatttcttcctggcggtggcgctggtgatggtcggcacctactgcctgttcaccgccgggtccatcgccctgctgaagcacctgcggaacagcccccggtactactaccagcccaagcacttcaccgccgtggcggggctgctgtaccggatgaagcagaacgccgtgggcctggccaacatctgcatcctctccaccatggtgctggtgacggtatccaccaccgtcagcctgtacgccgggctggagggagctttggagcggatgtatccctatgatgtggacgtggtccagtccctggacgaagtgccgccggaacaggagacaacactgaacgaggacaccctggaacgggtccaggccgcagcagcagacgcgggccggaaggtggaactgctccagtggtccactccgggggacaccgtcggctattacacaggaaacaccttcacccttgtggcgcaggagggcgtcagcaccgaaatccggttgctcaccgccgatgactacggccgcctcaccggccataccgtggacctggagccggaagaggtgctggtccaggcagagaatctggacctgccggataccttctatatcgaagacctcccttttcacatcgctgggaccatcatggactttccccgatacaacagctccatcctgatctccggccagacggcgcagcttttcctggtggtggcggatgagaccgtagtctccgccatcagcgaccgggatgccagcagagtccaccgggaatttcgtgtccaggtggacctggacggcacggaagaggaaaagctggcctttgtggaccccctgctggcggcggacgccaatgacgtgtactccgtcatcagccatcaggacaacgctgtggacctgtacaccatgtacggcggcttcctgttcctgggcgtgtttctggggctgctgttcctgctgtccacggtgctcatcatctactacaagcagatttccgagggatatgaggaccagcgccgctatcagatcatgcagcaggtgggcatgagtccccgggaggtccgctcctccatccgcagtcaggtgctgctggtgttcttcctgcccctggtgacggcgggcatccatgtggcggcagccttccccatgctgtgcaaactgctggagctgttcaacctctttgacgtccgtctgttcgccctctgcgccgccgggacgctgctggtgttctgcgccatctacgccttggtctacggccttaccacccgcacgtacagccgcatcgtgggcggacaataggacacatggagcgcccccggagatatcagatataagataaaggataagagatgcccttgtttgggaagatctcttatcctttatcttttcacttttatctgttactttgcaggccggatcatggcccggcgcagcagcagccagctgagggcgaagaacgccgcccccatggccagcagcaccgccgccgcgttccagggggatgcggccaggaactgtccgaaagccgccagggcctccaccgccgcccgcccggcggaggtggtgcccagccagctaatcagcggcacactgccgaagatcagcaccagcggcacggtcacggaaatcaggatggtccagaacttgttcagccgccagtacagggcggagcagaactgccccagggccgccagcatccagcccaccgcggcggagaagatcgcgccccgcaccaggccaccgatcccggcaccggcggagggtccttcatagatcacctggtacagatctgtaatcagcagccggccctggccgcccaagactgtttgataggcgcccataatcaccgtgacacccgctgccaccagcaccgccgccaccgccagggcggccacgtccgccaggaaggcggaccgacgggacacgccgttctggttcagcacccgctgattctcccgcaggcccaccatgcccaacacaaggccgaacatccccacggcaatggaatagccgttgaagctgccctccatagccgtctctccggccaggaaataggtgattgccagcatcgccgccgggatcagcgccatgaccagccacaggatcgccactgcccggaaataattccggacctcataccggaaggcccggccgaatcgcgtgttcatctctgatcctcctcttccatcaggctgataaaatactcctggagccccacgcgccgccgctccagcccggcgggcaggtcctctgtccccccgccccggatgcagacggtcttgagtccgcccagcacagaggatgtaaacacgtcccgcccggcggcccagctgtccaccaccccggcagggccggacaccgcccagcaggcggcggtcagctcttccgtgggcgcgtcctgcaggatgcgtcccttccggatgatgaccgtgtgctcgatgaggtccgccacctccgcgatcaggtgggtggagaccaccatggtgcaggggtgctccgcgtatttctgcaccagcagcttgtagaacaggtcccggtgctgggcgtccagacccagaacaggctcgtcaaacagcacatagggggtgttgacgctgagacccaaaatcagacggaagatggacccgtagccggtggagaggccgttgatcttcttgttcaacggcagttcgaactgctttgccaggctctccgcatagctccggtcgaagtccgggtaaaacacggccgccgtgtccagggcccgcttcaccttcatgtcgtcgggatacaggttcttctcccccaccaggaacagcttgcccagcgccgcgtcgctgtcggcgggtgcgccgtccacggcgacggtgccgctatctgggcacagccgcccggtgaggatgttcagcagcgtggacttgccagcgccgttgttgcccagcagcccgtagatcttcccctcctcaaaggtcaaagacacatcctccagggcgcgggtgtccgcaaaccgcttggagatgtgctgaaactcaatggccatcttctttcattcccctttccagaagttccagcaactcctgatccgtcaggcccagattccgggcctcccgcaccatccgctggacgtagtcctgataaaaccgctcccgccggctctggcggagcttctcccgggcgccggaggccacaaacatccccacgccccgtttcttgtacagcagccccgcgtccaccagcaggttgatccccttcagggcggtggcgggattgatccggtactgcaccgaatactccgtgatggacggcacctggctctcctctgggtaggccccggagaggatcgcctcctccagctgctccgcgatctgctggaagatgggccggtcttccgtcaacgtcaaggcggttccccctttcctgccggtttgttatctggttaattagtctagtaactaaccgtgtggctaatatagcatgagccacatctcttgtcaaggggggagcgcggaattttttgccccgccctgcttt

SEQ ID NO: 4949 - DNA, 19979 bp, Unknown
  gut microbiota DNA sequence
ctttctccttcaatccggaaacagtttggcggcggtttcctccagctctttgaaaaaaccgctgatgtggccgccgtcgttgacggcgtgggcaaactctccgcctaccggcagcaccgtccggtcccctgccgggtggaccttccccagcaggacgaatggcgtgaagtccggcttgaggtccccgccgaagctgaaggcggagaaggccagccccggcatggcggagataccgcagacatttgggggcagggtctcgtcgcagagcaggcggccgcaggtctccgcccgggcgtagtccgcctgaaagtcctggcggaacacatcatagtccggcataaagcgggtgaccttcatggcgaataggtccggggcgtcccgccggggcacggtgtaataggggtgcagcacatcccagatcccgatccgccctgcctcgtcccggccgtagcggaaatgcacatgccggttcagcacggcggccgcgcaccagatcagggccggatacagcttttcgccccgggccttcgtgtgccgatacagcggtgtgatatccacctccgccgtcagatagatggcggtctggcggaaaacctccagatactcccggcgctcccaggtctgctcgtcgatgggcgtaaaggccatggcgctcctccctctccggcgtcctccgccggccgtttgggccatcgtaccacaggccgggccaaaagtccactgccgccgcggtccatgcgaggcgaaaatccgcagttgacaaacttgccgcggcgtggctataatatgttccaaagcaatgatggagagggacggagaccggcgccctcagagagccggcgggcggtggaagccggcggcaagggtctccaggtcctatggctcctgagccgagggttcgagggcggcgcgccgccggtagggcctctccgaggactgccgcgtcagggcagaggggttgctggaccccaaaaggggcgtcgggccgtgaggacggcgcaatttgagtggtaccgcggaagcctgacggctttcgtctcaaagtttttctttgggacgaaagccgttttttcgtctccaaagtcatcttcatccagtcgaaaggagcacacaccatgagcgattaccgcatcgaaacgaaatgtgtccaggggggctacacccccggcaacggagagccccggcagatccccatcgtccagtccaccacgttcaaatacgccaccagcgaggacatgggtaagctctttgacctggaggccaacggctacttctacacccgcctccagaaccccaccaacgactatgtggccgccaagatctgcgagctggagggcggcaccgccgctatgctcacctcttccggccaagcggccaacttcttcgcgttgttcaacatctgctcctgcggggaccacatcgtctcctcgtcctccatctacggcggtaccttcaatctgatctccgtcaccatggcgaaaatgggtatcgaggtcaccttcgtctccccggactgcaccgacgaggagctggaagccgccttccggcccaacaccaaggcggtgttcggcgagaccatcgccaacccggccctgacggtgctggacatcgagaagttcgccaaggccgcccacacccatggcgtgccgctgatcgtggacaacaccttcgccactccggtgaactgccggccctttgaatggggcgccgacatcgtcacccactccaccaccaagtacatggacggccacggcgcggcggtaggcggcgccatcgtggactccggcaagttcgactggatggcccatgcggacaagttccccggcctctgcaccccggacgacagctaccacggcatcacctacgcggagaagttcggcagggagggcgccttcatcaccaagtgcaccgcccagctgatgcgggacttcggcgccatccagtccccccagaacgccttctatctgaacctggggctggagagcctccatgtgcgcatggcccgccactgtgagaacggccaggcggtggcggagttcctggcggcacatcccaaggtggcctccgtcagctactgcggcctgccaggggacaagtaccatgccttggcagagaagtacctgccccacggctcctgcggtgtggtgtcctttgagctgaagggcggccgggaggcagcgggcacctttatgaagcatctgaagctggccgccatcgagacccatgtggcggacgcccggacctgctgtctgaaccccgccagctccacccaccggcagatgactgacgagcagcttgccgccgccggcattcccgcgggcctggtgcggatgagctgcggcctggagagcaagcaggatctgatcggcgacatcgcccaggcgctggaccaggtgaagtgagatgcccatcaaaatccccaaccagctgcccgccacctccgttctgacgtcggagaacatctttgtcatgacggagacccgggccatcacccaggatatccgccccctgcagatcctgctgctgaacctgatgcccaccaagatcgagaccgagacccagctggcccgggtgttgggcaacacccccatccagatcgagctggagttgatcgcccccagcggccacgtgtccaagaacacctcccaggcccacatgctggccttctacaaatcctttgacgaggtgcgggaccggacctttgacggcctggtcatcaccggcgcgccggtggagaaccttccctttgaggaggtggactactggccggagctgtgcgagatcatggagtggtccaagacgcacgtccactccacccttcacatctgctggggcgctcaggcggggctgtactaccactacggcatccccaagcggcagctgccggagaaactcttcggcgtgttccgccacacggtggaggatcccaacttcatcctcttccggggctttgacgacgagttctgggtgccccactcccggcacaccacagtgctgcgggaggacatcgaggcaatcccggagctgaagatacttgcctcctccccggaggccggggtctacgccgtcaagaccgaccagggccggcagatcttcctcatgggccacgcggagtatgaccgggacaccctgcggaatgagtacatacgggacctgaccgccggagcggacatccgggtccccaagaactacttccccggcgatgaccccagccgcaagcctgcggtgacctggcgctcctgcgcccacctgctgtactccaactggctgaattacttcgtctaccaaacctccccctacaatatccgggatattgaacggggcatccgcaccgacgactgagcccaccgccgttccggccgcttctgcggccggaacgttttttctctcatcgcgactttgaaaaaattctcttgactctcacacagtggcagggcataccatagcagtgagctcaagaaaacgcatatatgcggagggatcctatgttcaaaatcggagaattttcaaagctgtccagaatcagcatccggatgctgcgccactacgacgagatcggcctgctggtgccggaggagaccgatccctggaccggctaccgccggtacgcggcggcccagctgatgaccgccaaccggatcaccgccctgcggggcctggggttctccctggcagagacggccgcgctgctggcctgctgggaggaccggaccgccatggagacgcgcctgctggcccagcgggcagcggtggaggcctccattcaggaggcattggaccggctgcggcttctggacacaaccatcgaacggctgagaaaggatgaaaaacagatgaactacgatgtcaccatcaagaccctgccggagcggcaggtagccagcgtccgccagatccttccctgctacgaccgggagggagacctgtggcacatctttgtgagggagaccgcccttctccacatccaggacggcgacccggccctgtgcatcagcgtctaccacgacggggagtacaaagaggcagatgtggatgtggagatccaaaagacggtgaagggcacataccctgacaccgagcacgtcaaattcaaaaccatcccgccggtgacagtggcctccgccaccttccagggcccctaccgccagatcggcgaggtgaatcaggcggtggcatcctgggtagaggacaacggctatgcctttgacggactgttcttcaacatctaccacgtcagtccccacgagacccggaacccagaagaatttgtcaccgaggtctgctacccggtgcggaagcggtaagcaagcaggcggcgctttccagcgccgcctgtcttttttacagcgtgtgccacagataccatcccaggcatcccaggcacagagcgccggtaaaaatgcccatgcccagagcggaccggtcccggtcagtccggtaccgggcaaaggcccccacggagcaaaacacgaacagcatcgccgccacgtctccaaatacctgtccggtaaacgcctggtagatcatcaacagcagcgccaggacacacatggcgtaaaagcccgcgtcgtctccccggcggttgacctcctcccggccctcgtccacgccctcttggcggtatctttgcagaattttctccttctccacagagatctctcctctctccggaacgaccggccgtcagttagggatgcggaaggattgtgctccgccgcaggcaggatgatttgccccggtcagcgccgctggacacccaaactcctaatttctcactcaaaatagaacagttcctcgaacttcttgtccaaggcgatgcagagaatcagcgccagcttggcggtgggattgaactgccccgtctcaatggagctgatggtgttgcgggacacgcccaccagctccgccagctgggtctgggacagccccttctccgcccgggccaccttcagccggtttttcaggatcagctgatcgtccatggcgctcaccccagcaggaacatggccaggttgcccgcgaacaccaggccgcaggccgccgccagcaacgccaagccccgccgccgggtcctccaatacaaatgcagctctacgcccgccagatacagaaacacgatggccgtgtagtcataggcatcctgcccgttcaccagccgtataatggcgagaatgacacacagcagtaccatcaggatcccgccgataccaaaggacagccccagtacctgctgctcccgctcgtccattccaatcgcccccgcctgagcctttttcaaaatctcatcccggtccatgcgctacctcctctcaggccatttgaaagaattttaccagattccagatcaaaaacgcaagagagatcagcagcgtcacgatgtcggaggtattccgccgccgggccagccggtagacccggttggccacgcaggccgtccagaacatggtcagcacatcctcatgcggcagcccatggacccgcttccaggtcagcagaatcaggcccatcaaaaacacgaagagcaggctgaaggactccccctccatgcggatggtccgctcccgttcgtcacccttctggttctcccgccggctcttctccagaatttcctgtttttccatagcgttctcccttttctttctttgccaagccatagggcctgcctctcatcccagtacgccccgtacataaacggccagattcaacaacgcggctcccgccagcagcagactcaggatcagaaccagtcgccagccgcccggctgtgccgcaggatctcctcccgatccatgccgaaccattttgcatagtttactttttattttaccaagttttctttacaagcagagcataccatataccaagtaaacttgtcaatggggaatcaaaaaagatgcccggaaatttccgggcatcttttttcaaaaacgcagccaattaccggcccgccttgcggtccgcctcaatcagcagcttcagggcctccacagacaccttcacggaggaggatgtgtcctcactcatcttctggtccaggccggcggcctcccgttcctggttccacaccacatggaagcaggagccgcaccggcagcccagagccgccgccaccacgaacagggcggcggactccatctcactggccttgacgcccagccgcttccaggattcccacttctgctgcagctcgtagtacacgggcgaggcagcggggtcgtgctggccgtaaaagctgtccttgcactggacgatgccggtgtgcagggggaagcccagcttcttggtggcctccaccagggcgtttgtcacctggaagtccgccaccgccgggaactcaatgggggcgtactcccggctggtgtgctcataccggatggcgccggtggctaccaccacgtcgccggactggacgttcagatcgataccgccgcaggtgccggtgcggatgaacgtgtcggcaccgcatttgtggagctcctccatagcgatggaagcggagggaccgccgatgccggtggagcaggcggtgaccttctcccccagcagggtgccggtccagacgttgaactcccggttatacgcgatctgcttggcgtcgtcaaacagggcggcgatggccgggacccggcccgggtcaccgggcaggatgcagtagcggccgatatccccctgagcacaggcaatgtggaactgctttgcaagctcttgcataaaatcacctcattgtgcaatttccagaatgtgtgttttagtgtgactccagtatatcaaatctcatcggtttccgcaaccggagattccggttctgccagcctctgcaatgccggtccggtaaggcggtaaacggtccagtcctccatggtctccgcccccagggacttgtagaagccgatgctgggggtgttccagtccaggcaccaccactccaggcggccgcagtcccgctccgcggcgatggccgccagccgccggaagaaagccttgccatatccctttccccggtgctccggccggacatacaggtcctccagatacaggcccgcccgacccaggaaggtggagaagttttgaaaaaacagggcgaagcccacctctgtcccgtcctccagggcaaagaggacctcggctcggcgcttttcaaacagctggtcccggagggtggcctcatcggccaccacctggtccagcaggtgctcgtagtcggccagctcccggatgaattgcaggatcaggagcgtgtcggtctcctgtgcaaatcgaaaggtcagtgccatgtcaaccccctcatttcagtgttgccgggctcgccgcccccatggggagcaccccacaggaatcccgcatttaattggggcggtcaggcagagccctcacactccaaggtcccgccgcgcaggacgcctgatgccgcaccgcggcgacaggctccggctcacttcagcgtcaccacggtgacgccgctctctccctcgccgtagacgcccaggcggaagctcttcacagccttattccggcggaggatgtcgtggacggccttccgcaaggccccggtgcccttgccgtggatgatggttacggtctccagtttgcccatgacggcggcggaaatgaagttttccaccacgctctccgcctccagtgtctccatccctcggatgtccagttcccgggcggcagaagcccgcagggcgcggtcggcgttctggcgaatggtgacagagggcgtcttcttcctggcggcccgctcgtcatcctcgataagacgcacttcgtctaccttggctttcatcttcaaaataccggctttcagctgcaaggtgccgtccttgcccacggacactacctccgccggcgttttgacaccggggatctccaccagatcccccgcccggatggggcggctgggcttggggatgggctcctgccgggcgtcgcggcgggacacggcctcctccgcctcgttcagcgtgcggcggagggccgcacgggcctcattttcgttcagcatccgttcggccttggcctgggccttccgcatctcgctgagctcctggaacacctggtccgccgccgtccgggcgtcccggaggatgcgcttggcctccgcctcgccccggctccgggcgttgtccttggcccgctccatctgctcccggaactcccgggcgcgcctggcgtcctcttcccgctggcgcagcaggcggtccgcctcctgctcccgcttctccagggcctggcgcttctcctccagctgggtcaggatgtcctcgaaccggacgctctcgccgctcatctgcccctgggcggcggcaatgacgtcctccggcagccccagccgccgggagatggcaaaggcgttggatttgccgggaatgccgatcagcagccggtaggtgggcgccagcgtctccacgtcgaactcgcaggaggcgttctccacccctgccgtagtcatggcgaaggtcttcagctccgcatagtgggtggtggcggccaccttggcccccagccgccgcacgtgctggatgacggcgatggccagggccgcgccctccaccgggtccgtgccggcccccagctcgtcaaacagcaccaggctgtgccgatccgcctcttttaaaatctccacgatgttcaccatgtgggcagagaaggtagacaggctctgctcgatgctctgctcgtcgccgatgtccgccagcacccgctcatagacggacacggcgctccggtccgccgccgggatgtggaggccgcactgggtcatcagcgtcagcaggcccagggtcttgagggttacggtcttgccgccggtgttgggaccggtgatgaccagggtgtcaaaggtgtcccccagctcgatgtcgatgggcaccgccgtcttggggtccagcagggggtggcgcgccttgcgcagatggatggccccgtcccggcggacctccggccgcacggcgttcatcttgtagctcagctggccccgggcgaagatcaggtccaggtggaccagggtgtcgtagtcccactggatgtcctcccggtgggcggcagcctcggcggagaactccgccaggatgcggtcgatctccttctgctccttggcctgcagctcaatatactcgttgttggcctggaccacccccataggctccacgaacagcgtggctccggtggaggagatgtcgtggaccagtcccggcaggtcgcccttgtgctccgccttcaccggcaccacgaagcggccgtcccgctgggtgatgatggtctcctgcaaaattttcccatagctgggggaggagatgatcttttgaaggatctggcggctcttggcctgggccgcccgcatgtggcggcggatgtccgccagctccgtgctggcggcgtcggcgatggtgtcctcgtccgggatggcccgcttgatcttcccctccagaaagcggttgccgtggagggagaggaacaggtggtcgatggcggttttctccgccgcctcgtcgttgaagtactccttggcccggcgggcggcggtcagcagatccgcgatggtcagcagctcccgagtgttcagggcgccgccccggtccgcccggtccagggcctccgccaccggcttcacgccggaaaaggacgggctgccccgcaggccgatgagatttcgggccgcgtccgtctggtccagcagacgcagcacctcctccggctccgtctccggccggatgcgcagggcccgctgcctggcctcggcgctgaccgcctgctcggacagcaattccagcacccggggcagctccagggtgcggatggatttgtcaaataggtcactcatgattcggttctcctgtcaagggttttcacttcatcgtccctgtcgtcagctgcttcatctgccggttcctccagcacccagggcagggtcacggaaagccagcactggaagcagggctccgggaagttccggaggaacggtcccatatctgtggcgaacccggcggtgacgccgggggcaacgggcagctctccctcccccgcttccagcaggcggcctgcaatgtgccacatgggcatataccaccgcccgccctggcggggaccatagtcgccaatatctccgggcctgcggaggttaagccccaggggttccagaaacgctgctgcttctggcggcaggaccccaactgcggcagcatagtttcggcagtaggcgcagccgcagcccccggtagcgttaccgtaacggccataccaggcccgggtggcctccacgtccacctccagccggtaggagccgaggacaaattctgtcatattccgctccgtttcgtataaatcagcaaaagaaatacaaaatgtatcttatttcgacaactcttccggcggctggaggctcttgtaaaattccagcgtccggaatccccgctccagctgggcggccacgaaagcctccgccgccgcggagagtcgctccagcgccgggcctgtcagccggaacgagtagagccgcttggggtccccgtacacgatatgccgcagggccgccagggaatccgggcacaggggcatggagagggcgctctccttcgcgccgcagctccggcaccgcaggatgccctgtaccacgtccagcaggggctgctccgggtccggccggccgcagtaggcgcagctgtccgccaaaggttcatatcccgccaagcacagcagtttgatctcaaaggcgggcttcaccagtgccggcggcttctgtaaagcggagagggcgtacagcccgttcagcagatggggcagcagtgccccggcagggacctccggcgccgtgacggtctctgtcagctccgcgaagtagcagcccagggccagcgcctccagattcgtccgcaggccgttgaacagttccgccgtggctccttcattggcgtagtaccactcgcccttctgatagagggtccactccgaatagaccagctgctgagcgcaggcggcgtacttgcagctcttccgccggacgccccgggcgatgacggagatcttgccccggtccgctgtcagcagcgtcaggatcttatccgcctctttcgtctccgtctcccgcaggaccacgccctttgtcacgatgtaggcccgctcggccaacgcgctccctccttatgtacggagagcgtccgccctccgttctatgcgctgatcccgccgccggactcctggtccagagcggcctgatacagcaggtacaccagcggttcgccggtgaggcagaagcactcccaaagcctttgtgtgtccattccgcagacctcctcccaggagtagtctgcgaatgttgtcggatttttatggctggaaatctctagcctccctcgatctccatggtccgcatctctccggcggtgatgttgtttttcgcgccgtaatcggtccagtaccggccggaggcccagacgaacatccgcctgttcagcggcatccgcaccgacagcacctcgctccgtcccgcccgcataccagcggccaggcggcgcaggccccgccgcaccagaaaggaaaaaggcgtattcaagatcgcctctcccgagccgatctgcagcgccatcccccagggaaatccatatcgtttgcagaaaaagcgcaccatttctaccgcaggccgggtctgctccggctccagaaagccgcagttcaccagtacgtggatcctggggcgggccgttcccctccatactgcgagttccttcagggtcctcatcagcaccgccggtatgccgtctgcgtacagggggaacaccagcagcagatccgtacagtcctctggggagagcggtccacccctcagcgcggtatactggtccgccgtctctccccaatacggaagaaactgttcgatatacctccgggagttggaacggggcgcccggggactcccattgacgatcaggagctttcccatgcgcgtacctcctccctaatggccccggccagctcctcttcccgaaggaagcggacactccagctccgaaacagcatattatgggcgttgcgggccgccagcagacggaagagcgcctgctcctcgtctccggtatctccataggccagaatcaccgcgtctttctccgccaccgcccgctgtatatggtgcgtctctccgtggtgtatccgaataaacgcctgctggatgggaatggcccgctccagcatggtcttcatcggtacgtcataggacccgcagaagagacggctgacatagatcacatggtcgctgtgggcaatcaggggatatacgcctacagcgtcgtcccggatcacgcaccgccccggcgttctgacccagcagctgaagcagcccatacaatccgcgattttcagctggctcaggtccacatagtgccagtcctcccggaccggcagtccggctggcagtgccgtgtcgctcaataccagtctcatattctcactccccgcacggcagcctgcggaataccggagaccgcacgcttcctccttattcgtcccggtagccgaaagaccgtacgtaattcacgttgtcccgccagttctccttgaccttcacccaggtctccagatacaccttggtgcccatgaacttctccatatcctgccgggccagggaactgatctttttcagcatggccccctgcttgccgatgatgatccccttgtggctggccttctcacagtagatggtggcatccacatcgatgacgccgctgtcccgctcagagaacttcgtgatctccaccgccgtgccgtgggggatctccttgtccaggcacagcagcagcttctcccgcaggatttcccccatcacctgccgctccggctggtccgtcgtcatcccgtccgggaacagctgagggccttcctgggcatacttccgcagttccttcatcagatccttcaggccgctgccggtgtgggcggagatggggatgatcgcgtcaaagccgtcccatgcctggttgtaagcggcgatcaccggcagcagctccgccggttccacagtgtcaatcttgttgacgcagaggatgcaggggatctcctcctcccggatccggtcgatgagtgcctgctccgggccgcccacatgggggatgggctccaccagcagcagggcgcagtccacgtcggagaggctggaggtgacgaccttcaccatgtagtcccccagggcggacttgggcttgtggaggccgggcgtgtccagcaggatatactgggtgtcctcccggttcaccacgccgtagatgcggttccgggtggtctgtgccttgttggagacgatggctaccttttcccccaccagggcgttggtcaggctggacttgcccacgttgggccgtccgcacacggtaatcatggcgacgtttttgatgtttgacataggtgatcctcaactttctttgagcattttcgcgggcgatcccgccccgcctgtttcacagtatcacacgcccgccggaaaaacaaccgttccggcggcatttcttcggggagatgcgggaatttcagcaaaattgcggcgcttctgctcttgccaggggcctatggagctggtatactgatagagattttgtcgaatttactccgggaggtgcatatatgtcagcctcggtccccactctcttcacggaaaccacgctggacggcttccccctgtgggtggtccttctgatctgcggcggcgtctttctggccggctttatggacgccatcgccgggggcggcggcattatctccgtccctgtatacctgatggccttctccggcctgcccacccactttgttttgggcaccaataagctctcctcctgcatcggcaccgcgttttccaccgcccgcttcatccaccaggggtacgttcactggcggctgttcctgcctgccgccgggctggcggtggcaggctccgtctgcgggacccagctgcagcttcacacgccggatgtggtgctgaagtatctgctgctggcggtgctgccggtggtggccttcttcaccctgcggaccaaaatgtggccggaggagccggcccccatcccgccccggcggcaggcggccatcgtctgggccgccgcgctgctcatcgggacgtatgacggctactacggccccggcaccggcacctttctgatgctggtgttcatccacttgggcaagatggacacccgccacgcggccggcggggtaaaggtcatcaacctggcctccaacatcggcggtgtgtgctccgccctgatggcggggaccgtcgttctgggtgtggggctggcggccgctctggcctccatcctgggacactatctgggcgccggcctggccatcaggaacggcagcaaaatcgtccggcctgcggtggtggtcgtgctgctcctgctgctggtgaaggtgatctcggagctgctgtttccgaacttctggaattgacgccccatagacaagggcctccgcatacagcggaggccctttttgcgcggtcttaccgctccagcagctttttcaggtaccagcccgtgaagctcgaccggcaggcggccacctcctccggcgtgcctgtgcgcgtcctcgcctgctccggatcccgcgccccggccttcggcttgctgcctccgcggcccgtcctttccccaccggacccgcttcgctgggctccggcgggggctccaaggggatcgtctgccccggcttacttttccagcacctttttcagatactgacctgtgaagctcgaccggcaggcagccacttcctccggcgtgcccgtgcagacgatggtgccgccgccgtctcccccctcgggacccaggtcgatcaggtggtcggcacatttgataacgtccagattgtgctcgatgaccaccacggtgttgccgctgtccaccagccgctggagcacctccaggagcttgcgcacatcgtcggtgtggaggccggtggtgggctcgtccaggatatagatggtcttgccggtggcgattttgctgagctccgtagccagcttcacccgctgggcctcaccgccggagagctccgtggagggctggcccagcttcacataccccaggcccacgtcgcacagggtctggagcttgttgcggattctgggcagaggtgcgaagaactccaccgcctcatccacggtcatctccagcacatcggcaatgttcttgcccttgtagcggacctccagggtctcccggttgtaccgcctgcccttgcacacctcgcagggcacaaagatgtccggcaggaagtgcatctcgatcttcagcacaccgtcgccggagcaggcctcgcaccggccgccccggacgttgaagctgaaccgccccgggccgtagccccggctcttggcctcctgagtggaggcgaacaggtcccggatgtcattgaagaggccggtgtaggtggcggggttggaccggggtgtccggccgatggggctctggtcgatgtccaccaccttgtccagatactcgattccctcgatccggtcgcacctgccggggtggaccttcatccggttcagctccacgcccagcttcttgaacaggatctcattcaccaaggagctcttgccgctgccggacacgccggtaaccacggtaaaggtccccagggggaactccacgtcgatgtgccgcaggttgttctccgccgcgccgatgaccttcaggctcttgccgttgcccggccgccgggtctccggcacggggatcctcttcttgccggagagatactgacccgtcaggctgttggggttggccatgacctcctccggtgtaccggcggccaccacctcgccgccgtggatgccggcgccgggaccgatgtcgatcaggtagtccgccgcccgcatggtgtcctcgtcgtgctccaccaccagcagggtgttgcccaggtcccgcaggttctgcagcgtcgccagcaacttgtcgttgtcccgctggtgcagaccgatggagggctcgtccaggatatacagcacccccatcaggctggagccgatctgggtggccaggcggatccgctggctctcgccgccggagagggtccccgcgctgcggctgagggtcagatagcccaggcccacggactggaggaaccccagccgggacttgatctccttcaggatccggtctgcgatcaggtgctgctggtgcgtcagctccagccggtccacccattggagctcgtccaccacggacatccgggtcagggcgtcgatgtccttgtcccccacggtcaccgccagggactccttcttcagccgctttcccttacaggtgggacaggggcactcggccatcagctcctccagctcccgcttgctggcatcggactgggtctccttgtagcggcgctccacgttgttgcagatgccctcaaagggctgatacagcacgcccttgccccggggctggtcgtagtggagctccagcttctccccgccggtgccgtagaggatgatgctccgcacgtcctccggcagggtctcccaggggtcggtgagggagaagtggtatttcttcgccagggcgtcgaagtacatccgggagatgccgtccccccggatgttgttccagccgctggcctggatggccccctccaggatggagagggacttgtccggcacgatcagttccggatccaccttcagctggctgcccagacccgtacaggtgggacaggcaccgaaggggttgttgaaggagaacatccggggcgtcagctcctcgatggagatgccgcagtcctcgcaggcataattctgggagaatgtcagatcccgctcctcccgcaggaggttgacgaccaccagcccgccggtgaggccggaggcggtctccacgctgtccgtcagccgctgctggatatccggacggatgatgagccggtccaccacaatctcgatggtgtgcttcttgttcttctccagcttgatctcctcgtccagctcgtacagattcccgtccacccgggcccggacgtagccggaccgcttggcgtcctcaaagatcttggcgtgctcacccttcttgccccggatgacgggggccatcacctggatgcgggtgccctccggcagagagaggacctgatcgatgatctggtcaatggtctgctggcgaatctccttgccgcacttggggcagtggggggtgcccacccgggcccacagcaggcggaggtagtcgtagatctccgtcaccgtgcccacggtggaccgggggttcttgctggtggtcttctggtcaatggagatggcggggctgagaccctcgatatagtccacatcgggcttgtccatctggcccaggaacatccgggcataggagctgagggactccacataccttctctggccctcggcgtagatggtgtcgaaggccagggaggacttgccggagccggagaggcccgtcatgaccaccagcttgtcccgggggatggtgacgtcgatattcttcagattgttggcgcgggcgcctttgacgatgatcttgtcctgcataatgtgtatgattgactcctttcaggagaggtttctcttttcagtgccggaaatgcctccggcggaggtgtagaggcgcttttcaaccgcccggggagactggctcccgccagggggccgtttccacgggggatgcgccccccattctctttttgtcagcgccaaaaagagaacgcgccgcgcccggtgtaagagaaaaaacgcttttggtcgcaactttgcacgtccgtgcaaagttgctgtacgggagttgacgagagatggtgcctgcgggtttgcgatgacctcccgacgggcgcggcggggtgcggtacaggcttgaacgcggattcccgcggcgcgggtgcaaaggtcaacggggtgcaaggacgcatttggtctgcttctctttccgcgcgttccgctgcgctacgcgctgccggattcttcgcgggagcgtgagcggtagcgaaaagagaagcagctccatgcgacaaccaccccgacgaggtcggcgccatccgccacgggacggcagcaacaggaatcgcagaagagcatagcgtgcccgaaggccagtccaaatcggagcaggcaccgatacgccgacccccgttgcgcgcggagggccactgcaccggagcgcgtccaagcggccttttcttttggaccgtgcacggcccgttttcttttccgcaagtcggaaaagaaaacggggggtgcatcccggctggacaagccccctgcgggagcagaatccccgtggccgccggacggcggcccaaatttccacgggcggtttgtaacctcccttacacgctccaggggcggccataccatcgggccgccgagggcggtggcccctacgggtgcacggaacggatttacccccgcgcgtcgctgcgccccagcagataatccgtggtgacgctgaagtaatccgcaagaaagcaaagcgtcagcgatgggacattgacctttccatattccattctctgataatggacaagggtaatttgaagcacttctgccatatccgcctgccgcagatgccgttcatcccgcagggcacgcagtctttctccaaatatttttagtgtttccatggagttctccttgacatatatcatttaatgatgtatcatcaatacatcattaaatgttgtttgaaggtgatccaatgaatcccatctatctccgcctcttcgacggctacgccgccgacattctgcagaaagcagaccccttcgattccaaatccgtggatcagctggcggacagcctctccctctccggggacgcccgcctgtgccttcaggacgcctttctggcccgctacctccagtggtccaccgacgccttcaccctgggactccacctgggcctatccctggtccacgacaatgtccgccgtggaggcccccagcaggtctagcagcgcccggggcgccagctccacctgggcgccgatcttcccggcggagatatagacggtttcgtagtccagcgccgtccggtggaacacggtgggatactgcttcttcatccccaccggggaacagccgccccggatgtagccggtaacggcgttgatctccgccacgtgcagcagctcgatggacttctcccccaccgccctggcggccttcttcagatccaggttctccggcgccggcacctcgaacacgtagatgcccttggacgccccccgggctaccagggtcttgaagcctctggctgggtcctgccccagagcctccgccacgtggacgccgtactcccgggtgccctccggcccctggctgtcctcataaaaccgggcggtataggggatctttctctggtccaggatccgcatcacattggtcttttcctcttttttcttcgccattgcaaacacctcagctctccgcgggctgctccgccagctcccgccggacgtatttgggcagcttctccaccgccagggcgtatgaccggccgcacaggtcccgcaggacctcctccggcagttctccgtccagcaggcaggaaatccaggtccgcttatccgaataaaatcccggcaggatgtccggataccgggcccgcagcagctcgccctccgccgccccgcatttcagattcaccagatcgtggccgccgtaaattttgtactccggccccggcgaacagacagcggcaaacagcctgccccggaccttatagcggaaccactgccacaccggctgatagtccttctccacgccgggaaacgacagcaggtatgcgtccagccattcgtagtgcatttacttctccccccgcagctcgatgatccggtcacgcagcaccgcggcgtacattcccacacggctccgccgtgcgggagcccttttcattttaccaaccggccagaagtgaattctgcccggttcaaggttttgcctccgtcaaaacgcttgtacgccggactcccggcgattcgagtacg

SEQ ID NO: 4950 - DNA, 35990 bp, Unknown
  gut microbiota DNA sequence
ctccccccgcagctcgatgatccggtcacgcagcactgcggcgtactcgaattccagcatcttgctggcctcgcgcatctccttctccagcttggcgatctccgccgcccgctcctgctccgtcagcttgcgcttcttgtgggcccggagggtgtcctcctccgcggtcttggagatctccaaaatctcccggacgcccttgatgatggtcttgggcacaatgccgtgctcctgattataggtgtcctggatggagcggcggcgttccgtctcgtcgatggccgcccgcatggagggcgtgatctcgtcggcgtacatgatgacgaggccgtctgcgtttcgggccgcccggccgatggtctggatcagagaggtctcggaccggaggaagccctccttgtccgcgtccaggatcgccaccaggctgacctccggcaggtccagcccctcccgcaggaggttgatgcccaccagcacgtcgaactctcccagccgcaggctgcggatgatctccatgcgctcgatggtctggacatcggagtgcatgtaccgtacccggatgccggcgtttttcaggtactccgtcaggtcctccgccatcttcttggtgagggtggtcaccagtacccgctcgtcccgggcggctcttgcacggatctcgtccatcaggtcgtcgatctggccggtgacaggccggacctccaccctggggtccagcaggcccgtggggcggatcacctgctccaccacctggtccgcccgctcccgctcataggggccgggcgttgccgagacaaacaccgcctggccgatccgctcctcgaactcctcgaacttcaacggtcggttgtcgtacgcacagggcaggcggaagccgtacttcaccagggagtccttccgggcatgatcgccgttgtacatggcccggacctggggcagggtcacgtggctctcgtccacgaacagcaggaagtcgtccgggaagaagtccagcagggtcatgggggcggagccggcgggccggtcggagatgatgcgggagtagttctcgatgccggagcagtagcccagctccgccatcatctccatgtcgtactccgtccgctgacggagccgctgggcctccaccagctggttgttgtcggtgaagtatttcacctgatcctccagctcccggcggatctccagaatggctttgtccatcttgtccttggtggtgacatagtggctggccgggtagatggccacgtggttcagcacccggttcacgctgccggtgaccgggttgaagtcgctgatccggtcgatctcgtccccgaagaactccacccggatggcgtggtcccggtagtaggcggggtagatctccaccgtgtccccccggacccggaacatgttccgctcaaaggcgatgtcgttgcgctcgtagcggatctccaccaggcggcgcagcagctcatcccggtcccactcggcccccacccggagggacaccaccaggttggcaaaatcgtccggctcgcccaagccgtagatgcaggacacggaggatactacgatcacgtcccgccgctccagcagggcacaggtggcactgagccgcagccggtcgatctcgtcgttggtggaggcatccttggcgatataggtgtccgtatgggggatatacgcctccggctggtagtagtcgtagtaggagacgaagtactccaccgcgttgttggggaagaactccttgaactccgcgcacagctgggcggccagggtcttgttgtgggccagcaccagcgtgggccgctgcacctgctcgatgaccttggccatggtaaaggtcttgccggatccggtaacgcccagcagcacctgctccttcagcccgttctcgatgccctccgccagcgcggcaatggcctgcggctggtccccggagggttgatattcagatacgacttcaaatttcggcatagctcttctccgcaattttttcttgctatggtctccggggaccagccccggcccagagggccggcgccgcggccgcggcgcgcaagcgttttggcgcagtcaaaaccttggactgggcgggctttgcctgcccggtccatccgaatcacggggtccccgcaaaagtgccgcttttgcggggttccccggagggttgatattcagatacgacttcaaatttcggcatagcggcattccctccacccatcaaacagattttcagccacggccatcctatcacacccgtcatctttttgcaacatttgttcgacttttatcaaaggaaccatgccttgaaaaaagcgaaggggcaaaaaaggaggggggactaggggaacccctccggttttccccagttcgttcgccagcggcgaaggaagaacttgaagtcattttcgccgcggcgtgtacgtggcaaaataccccgacccaagcgccttgggcgcgttcgccagtccacagactggtggtgggggttctaaagggggagcctgctccctctttaccccagcaggtcgccgctgtccgccatggagacgaagtcccggtccgccaccacgatatggtccaccaggcggacgccgatggtccgcagggcctccgccacctggcgggtggcggcctcgtcgctggaggagggcaccgccacgccgctggggtggttgtgggccaggatcaccgcgctggcggaggtcagcagcgccatctccaccaccttgcggatgttcaggtccgcgctggccacgtccccctccgccagccgcttgcaggccaggagcctgcccttgcggtccagacacagcaggaagaccagctcccgccgctcgccggcaaagcgctccagcagataggcccccgcccgctcggaggagttgaggatggtctcctgggacgcgtccgctatgcgggccttccggctgagccgggagaccagggacagcaggatggccgcgctctccccgatgccctccaccttctccagatcctccaccggggcgttcagcacgccggagagggagtcgtaccgctccatcagagcgtgggcgatggggttggtgtcccgccgggggatggcgtagtacagcagcagctccagggcctcgtggtccgcaaagccctccagccccgtctccagaaaccgccggcgcatcttctcccggtgtccgtcgtgtatgcccatggagggcctcctctcgctgaaacgccccgtttcaggcacagatttggaacatcttattataccacaggccgtcctctatcacaagcgggattcccatttgtaaaatggagtgcagcggtatttgaggggcctgtaaaattgtggggagtttttttctgccgccttgacagggggcagaaattggcataatatgaagaaagagtttcggcaaaactgcataccgtccggtaggtaaggctaccacagggatacggatcgctgccgcggagtgatggagacatcatgagagggtttgaacaggtgctatcgaacacgaaggtatcatctaatgtgatttcaccgccttgtgaggctaaagcttgaacggccgcagggtccgctgatgcggcgtccctgttttcacaaggaaatttccgactgcaccggacaggagcggccgggtttttttgttttctcaacccccagcttcacggagaggaggacgcgcatgtttgagcaggaagagcagcgggacgagctgctggaaaagatcgaggatctgatctcccgaaaacgctatgccgagctgcgcgaccttctgctgcccctggaggcccaggacatcgcgggcctgttcatggaactggacgacaaggtgcctatggtgttccgcctgctgcccaaggagcaggcggccgaggtgttcgtggagctggattctgaggagcaggaggtgctcatccagagcttttccaacacggagctgaaggaagtgctggacgagctgtacctggacgacgcggtggacatcgtggaggagatgcccgccaacgtggtcaagcgcatcctgcgccacgcggacccggacgtccgcaagagcatcaacgaaatcctgaaataccccgacgactgcgccggcagcatcatgaccacggagtacgtggacctgaaggccaccatgaccgtggaggacgccctgaagcgcatccgccgcaccggcccggacaaggagaccatcaacatctgctacgtcattgacgagggccgccacctgctggggtatctctccatccgcaccattctgctgtcggaggaggacgacgtggtgggggacatcatggatacccatgtgatctccgccaacaccctggacgaccaggaggatgtggcccagaccctgaacaaatacgacttcctggccctgcccattgtggacacggagaaccgcctggtgggcatcgtcaccgtggacgacgccatggacgtcctgcaggaagaggtcaccgaggatatcgagaagatggccgccatcctgccgggcgacaagccgtatctcaagaccggcgtgtttgagacctggcgggcccggaccccctggctgatgatgctgatgttgtccgccaccttcacggggatgatcctgacccactttgagaattccctggcggcggtgcccattctgacctcctacatccccatgctctccggcaccggcggcaacagcggcacccaggcctccacggcggtgatccgcgccctgtcgctgggggaggtccgattcagcgatctgctgcgcgtggtgtggaaggagtgccgcgtggcgctgatctgcggcgtgtgcctggcggcggccaactttgtgaagatgatggtggtggactgctggctgctggccaaccccaccgtaacgcccgccgtggcggcggtggtgtgctgcaccctggtgggcacggtggcctgcgccaagctggtgggcgcctccctgcccattttggcggagaagatcgggttcgacccggcggtgatggcctcgcccttcatcagcaccatcgtggacgcgctgtctctgctgatctacttccggtttgcgacgtggattcttggtgtataaaaagaaacagaaagaggagccttacggctcctctttttcttctataatgcaatgctcggcaccatactctaagaaaattcctataatctcatttctggttcgtccagttttgctggcaatagaatctaatttgtccactgtctctctcttaattcgtatggaaaatgtatggtatccgtccggtttttttattttaatcttcttttccttgcgtcccacaattaaatcggacatgatatcacccgctttctagtgcttattttacacttgatttctcaaaaaatatatgctatataagatgtagcatatattttatagcataaattttataacatattttaggggatcaacaatggacaatcaaatttgcgcaaactgcgcacactactaccagcactacatccgaacgcaccgccgttttgtggagatccatgacggccattgcgtcgccgcgccccgcgccaggaatcggacgccggacacgcccgcctgtgacaaatttttacccaggccggaccgtacataacccggccgcgcctgcgcacactagagagcggcgaaagccacacactttttcacgcaggaggatcttttgttatgacgaataccaacaacggctgcgcctgcacccccaaccagagcatcaagtgcacggtcaccaactgcgcccaccactgccaggaccagaactactgcggtctgaacgccatcaccgtgggcacccatgagaccaaccccaccaaggtggagtgcaccgactgccagagcttccagatgaaataaaccaggtccgacgggcttcgggcgtccccttcggctcccgaagcccgccgcttacatccttgaggaaaggcgggatcacatggaacatcgctggccggcgcggatcgccggcactgcggcggggctggccaacggcctcttcggcggcgggggcggcatggtcttcctgcccatcctctcccgctggggcggcctctcccagcggaagctgtacgccacctgcgtgggcgtcatctttccggtgtgtctggtgtccgccgccgtgtacctgtttcggggggagctctccctcctggcggcgctgccctatctggcgggcggcctggtgggcggctggatcggcggcaagctgtacggcagagtctccgtcaagtggctcaaatggctgttcgccggttttctgttctacgcgggggtgaagtatctgctgtgacggactggatcattccctttctctgcggcctgggggccagcatcctctcggcctggggtgtgggcggcggcacgctgctgcttctggtcatgacgctctttctggatgtggaccagcggaccgctcagggcatcaatctgctgttcttcctgcccaccgccgcctccgccctggtctgccacgccaggggcggctatctggacaagcccaccctgaaaagcgccgtccccctggccgtggccgccgccctggccggggcctggatcgccaccaatctggacgtggcggtcctgcgcaagcccttcggcgtgtacctgctgctctccggtgtcagcctgctgtggccccagcgccggaagaaacagacatgacacaggccgcgggagaagtccttcagggcttttcccgcggcctcacaatgttttttccacactgccccgcagggcagacaccccgctcttccgccccgggccgggagcacttccggcaagcaagggcgcggcctgcggtgcaggccgcgccctcgttctttattccaccgggtcgttcagagtcagcgtcacttccatccgctccccgtcccgccagatttccatggtcacctgatcgcccacatacagctgccgccggatgcgcagcagctcctgactggtttccaccggcctgccgccggcggcgaggacgaagtccccctcccggatgcccgccaggtctgcggcggagccgggcgtgacctccagcacctgcaggccccagatgtcgtcctccagccgggtgcccgtctggagcaccgtcacgccgaaggagggctccggccggacctctccataggtcagcaggtcgttcaccagccgccggatggaggcggagggaatggcgaagcccagaccctccacattggagtaatcagagctcatcttgatggtgttgatgcccaccacctggccgcaggcgttgattagggggccgccggagttgccggagttcagggccgcgttggtctgaaccagcgtcatggtccggccgtccacctgtacatcccggttgatggcggagacgatgccgtctgtcagtgtgccgcggagctccacgcccagcgggttgccgatggcgtagaccttgtcgcccaccaccagctggtcgctgtcgccgaaggtggcggcgggaagccccgtcagttccaccttgaggaccgccagatcgttccgctcgtctccggccacgtactgggcctcataggtccggcccgtgtccatggcgacggtgcagtcccgtccccccgccagcacgtggtaattggtgaggatataaccgtccgcccggaagatgaccccggtgcccacggagacgctgtcgtccagctggaccatgaccgtcaccaccgacgggttcacccgctggtagatctcctgggccgtcagctcccggccgtggtccgtctccacctccagcacggcgccctccccgaacggataggtggggatggtaactgccccggacgcgtcctcttcctcctcccagccgtggtcgtaacggtactcaaagggatcggcactgctgccggccggcagcagataccaaatccaggagcccgccgccacacccagcaccaccgccaggcaggccaggaaaatccacagcccggtcctgcgccgccggcggggctgcccgggcgcggcaggccgtcccggcagggggcggctgtaccgctccaccacctccccgggcagcggctgtctgtatacctctacgatctctccggagagacggtcctctccggccaactgcttttcttcctccatgcacgcctcactctgtggccagtgagaaggagaacgcggtcacgccgtcctcgctggtcacactgatcttttccttatgctgctctaaaatcgtcttgacgatgtacagccccaggccgtaaccatccttgtcctcgctgcgggacttgtcgctcttgtggaaccgctcgaacagcagcggcagctcctctgccgggatggtgtccccctcgttccgcaccgtcacccgggccttgccgtcgatggtggtgacgcccagatagagagtggagccctcccgtgcgaacttggtggcattttccagcaggttgtaaatcacctgcgtaatcatgtccttgtcccccagcaccagaatgggctcctcggggatatccgcctccacatccagattccggtctgtgatcttccgctccatggagatcagcacccggcgcatactctcgcagatgtcgaagtgctttccctcccgcagggggtcgatggcctgcagctggctcacgtccagcatccgccgcaccagccggctcaggcggcggctctcgtcggagatgatctggagatactgccgctcgttctccggcgggatggtgccgtccagaatgccgtctgtatagccggcgatggtggtcatgggcgtcttcagctcatgggagatgttggtgatgaactcccgccgctggcgctccgtctgctgcaggttctccgccatgttgttgaaggaggccgccagctctcccaactcgtcatcccggccgtagtcgttcatgcggatgtcgaagtccccctccgcatagcggcgggtggccttggccatctcccggatgggctggatctgccgcatggtggtgatggaggacgccatgaaggagatcatcagcaccacgaacgccgtcatgaagaacagcccgatgaagccggaccacatggtgtccagcgaggtggtggaggacacggcatagaccatgccgacggggtcgggggtatcctcgcttatggccggaacgcccaccacgaaccgcttgttggagtacaggccgtccacgtccgtgcgcctggagctgatgccctcctccagcacctctgcggtcatctcctccggcatagtcaccaccagcccgctgagagacgcatccgtggacagcagcacgtggccctccacgtcgcagatcaggaagtccacctcggacaccgtggcagcgaaggaggccagacgctggaagtcctcctcgtgctgcagctcctccatgtccaggtaccgcccgttttccagatagctggcggagagctgccccaccacctgggcctgggcggccagctccccgttctcctggccccgggcgtagttgtagctcagggagaaaaacgaaactcccagcaaaaacagcgtcaggagcaccatgccgacggtgacgaacatctgccgccagtacaggcccctgaacttgttgtgcatccgttttgcaatacgcgcgatccgtaccttcatgagacctccctgcccggttttccacctgaaaaggcaaaggtcttttcaggcggttttgtcagctctcctttgccccgggggcgcctgccagctcgaacttgtaccccacgccccacaccgttttcagcgcccactggctgctgacgttttcgatcttctcccgcagccgcttgatgtggacatccactgtccggctgtcgccgaagtagtcaaagccccacacctcatccagcagctggttccgggtgtacacccggttgggggtggaggccaaatgatacagcagctccagctccttggggggcgtgtcgattttcttcccatccacgatcagctcgtaggagtccaggtcaatcaccagcttgtcgaacgtcagccgtttgctggtgtcgttggggatctccgtccgccgcaggactgcattgatccgagcgatgagctccttcatctcaaagggcttcaccacatagtcgtccgcccccatctccaggccctggatgcggtcgaacacctcgcccttggccgtcagcatgatgatgggcaccttgctggtctcccggattttggcgcacaccgaccagccgtccatcaccggcagcatgatgtccagcaggatcaggtccggaacctgcttctgaaactcctcaatggccttgccgccgtctccggcgatgcggacgtcgaacccctccttcaccaggtacatgtggatcaaatcacagatattgcggtcgtcttccacgaccaggatgttgcggcccatggcgctccctcccatttcgatatgtctctcttcgctggttctgccgcccgcggcgtccgcctgttcacagacacagccgattcttgatatcctctattatatccgctcccggggcggtatgttgaatattttgtaaatcttggcaggtcaggacaccgtctccgtcatggccagacagcggtcgtccgccgcctccgccgcagacaggaacgtcccaagccctgcggcgttggcgctgtcgcccagccagacagtgacctcgccgccccggctggtcacccgctggagcagcgtgtcggcggcgccggtgctgctgaggggatacgccgcccggtccagatccgggtccagcgggcagaagcccgccgcctccgccgcggagacagactcctccccggcgttttcaatccaagccagccgggtcttgacgctggcggcctgggagagcaggcggttccccgtctccagctgttccgtcaccgggcggtccgccgcggcgtccaccgccagcccgatggcctgccctgtggcggtcattcgccgcagcaggtcgccgccttcccgcagaaacgcctccgtacagtagaaagccgcgtgggcgtcatagcggtccagaatgtccagcagggacttcacccgcttcgggtccgcggcctccacacaaagataaatccgctgcccggtgacggtggagggctccgtttcctccggcgcgatgtcctcttccgcactctggttccgcaggtactggttgtactcgtagtccatccgggacttggcggcgtcggcaaagtaccgctcctccatatccatatccggattgcgcacccaaaccagatagccccggtccacctccacggtggagtagagcaggccgaagcaccgggcgatcagagagatgggcaggaagatcacgccaccccgctggatgggcttctggaaatacaggttgccctcgttgtcgatggcatagtccttgttcaggtcaaataccagggagctgtataccgtcttgtccacatacagcaacacggtctgccgggcaatattggggtagtaggacacgcccagatcccggcccacgccagtgaagatagtgctgggcacatacagatagccgccggaccagaagggcatggtgtcgtccgacagcgtcagcacgtttttgttgactgcggtgaaatacaccgtctccgccgcccccgacgggaccggcgacagctggaacaccagcagcaggcacagcagcagtgccgcgagctttcgtctcatcatgtcctcccttccgcagaagctcccctggaagattgtattttaccacatttccggcttttttgtaaagagtcaccccatggcggcagtagtatagggctccacggtgacgccggtataatagtgggtgaggatcgtccggtagtccgctccctccttggccatctggttggcgccgtactggctcatacccacgccgtggccgtagccagtgacgaagaacaccagcttgccgtccgccgcctcccactcgaagcaggcggaccgcagccccaggacgctccgtaaagtgctgcccttcatgctcacgccgcccacgtccaccgactccacgctgccggcggtgtccgtcacggcgttttgcagccagccgctgatgtcgccggacaggtccgcctccggataggaggccaggaccttctcccggaactcctccgccgtgaattccacacggctgtaatagttggggatgctgtccgcaggttccggcgaagacaccgcctggagatagggcaggtcgctgacccacacctggccggaggagcgggtctgcccggcggagcaggagtggaacaccgccaggatgggcacgccgccgtacaggatggtctctccgtcggtctcccggacggcggtctcgatcttttcctcataggcgtccgcgttctcgccccagttgttccgggcgttttcctccgagatatacgcctggcagcaggtggagtccgtgcagatgtccgcggtgtcgccgtggttgccgccggtctgcatcttgtacagggtgtacgtccgggctgtcactgcctgggccttcagagcctccggctcaaaggaggccggcatctccgcccggaccacccccaccagatactctcccagggtcatctcctccaccgcgtcccccgccaggaccttcagcaccatctctccgtccaggtcccctggctgaaaaggctcccgctccgactccacagcagtgggatcatcggagaaaagctctgtctgaaagggcactaccaccgccaggggcagggcaaacagcagcaccagcagcaccgcggagatggcggcgctctggtgcagatcagaatggcgtctcatggaaattcctcctcttttgttccccgtctgcgggcctgtcccttcactgtatgcgcccggagggcggaaaatgaggccggcatggacaaacagcctttcccgtggtatactggcttttgaaaatctgtcatgataaggagatcggctcctatgaagaaatacgtgctctggcccctgctggccgccattggcggtgtgggggcattcctgctgcggctgcttcagcgcagcactgggttcgaggtggacacaggcctccccatccccggcaatctgtacgccatcctgctggtggcctggttcgtggttctggcggcagtctgcctgctggcggcccggccccttctgcctgcggaccgagaggacccacccctctttcccacaggcttctccgtggcttcccccgggctgctcactccggcggtgatggggctcttcctgctggcagcctccggcgttctagacctgctcttcggcttctccggcgccagcgccctcaccggcagcggagagacggtgaccgtttttgtgaccgcccagggcagtcagctcttctccggcagggagcatctggtggtgggtctgctgtctcttctctcggcggccagcctgcttcccgctgtgcctgcctgccgcatccggccggagggcgagacgcgcaagccctttcagagtcctctgctgctggtgcccgtctgctgcctagtggtgcggctggtgctgacctaccgggtggtgtccgtagacccgtccctcacagattactacacggagctgctggcggtggtgttcctggctctggccttctaccggctgtcctccttcgccttccgggcggggcggacccgccgcttcgccgtctatgcggcgctggccatcgccttctgcctggccactctggcggatcggccggatccggcccggctgctgttctacctgggcggcgccgtgacgcttttcggcttcctgctccagcggacggcggtactggccgcgccctgggacaatacctgacagtttatcacaaaatccccgcggccgggagtgcccgccgcggggattttccgtttgttcacaaataccgggaaaatcgagaaacggaccagcctttcggctggtccgtttccctattttttggaagattggatgaaaagaagttttgtctcttgcaagtattaagatactagagagttgttaagcaaaccagcatcaattgttacaaaagtcttaaatcaaatctgagggtcgatttttttctccgccccggagcccggcaaaaaaatccgccagcacccggcggcagtcctctcccagaatgccgcccaccagggcgggccggttggggaagctctccataaacaggttggtcactccgccgcaggcaccgaaggcctcgtcccgggcgccgtaccaaacccggcggatacgggcattcaggatagccccagcgcacatggggcagggctccagcgtcacgtacagttcgcagtcatccagccgccaggtgccgaggtgctcgttggcctgggcaatggcctccatctccgcatgggaggcggtggcctgcttctcctcccgccggttgcggccccggcccacgatttccccgtcccggacgataacgcagcccacgggcacctcccccgccgccgcggcctccgccgccagcgccagagcctgggccatgaagttctcctgttctgttggcatgttcttcctgcctccttgtatgaaagctggcatatttgtccaaactccccgtaagaatatggataggagggacactgccatgaaacctgtttttgccaagaaagccgcccgccccgacccggagctgctgaccctgaaggccgagctgctggaggcccagggggacctggcccaggcctatcgccagttcgaccaagccctggacccggagctggtggagtcctgcgtctaccagatcagcgccgtgaaggcccggtgcaactatctgatccgcgccatcaaggagcggagtcccgaggcagcggctgctgccgggctggagggggcgtccacatggacctgagtcagaagatcatcgccgccatcctggcgggcttctttctcgtcgctctgatccgggtgttcagctcccccttccgcctggcgctgaaactactgctgaacaccctgttggggtttctagccctgggggccgtacggctgacggcgggcctcaccggcatcgccctggggctgaacctgtggaatgccctggtgatcgccgtcctgggcctgccgggatttgtgctgctgctgttggtccagtggatcttgtagcattacatattgttttcaaacgtcagggcagttcttcgccccgggcgtcaaaataccggtccaccaggcgccagcccatgtccccgcctgtaaaccgccagatggtcagggacggcggggcggggatggagacggattcgtccaggcctgcgtccacccgcagccggacctccgtcagtttttccgattcattcccgatgacgtaacaggcttccgtggccggaatagccctcatgggctgggtgtagacgccccgcaccgggtacgggccgtacatccacaccggatgcccatacgcttcatagtccccatcgacattctgcgggaaccggacgatgtaacgctcgtccggttttctctcgcccaaaaacatggcgaagcggtccggcccatcgtcccccaccgccggcagtcagatggggccggtgccccggtccgccatctcccagcagagatagcgagcgatctccccagggcttctgccatagcagcggcgcagagaatccgcataaggccggccgcgcagaagatccagcgcccccaggcgtttcggcgtacagggccttcccccgaaaaattcaaaatagaacgtgagaaatcaggagataataagaggtatcaagagaaattcagagatttatcccggttaaacgaaatccccgttgacattcccccgccgccgtggtataaatatccttactccgattgtaacccggagctcttgatttgtaaagcaaagcaaagaatttcaatatacggaggaaacaccatgtccacttttatggcaaacaaggccaacattgagcgtaagtggtacatcctggacgccgcgggcaagcccctgggcaagaccgctgtccgggctgccgacctgctgcgcggcaagaccaagcccactttcacccccaacgccgactgcggtgactatgtcatcatcatcaacgccggcaaggctgtgctgaccggcaagaagggcacccagaagatgtaccgtacccactccggctggattggcggcctgaaggagaccccctaccgcatcctgatgcaggagcagcccgagctggccatgaaggtggctgtccgcggtatgctgcccaagaacaccatcggcaaggaatccctgaagcggctgcacatctatgcggacgccaactacgagcagcaggctcagaagcccgtcgctctggacgcggaataaggaggagtttgaagtatgtatcagtccaagaagccctatctgtatggcactggtcgccggaagtcctctgtggcccgcgtccatctgttccccaacggcaccggctccatcaccgtcaacggccggagcattgatgagtatttcggtctggacaccctgaagatgctggtccgtcagcctctggaggccaccggcaacaccggcaagatggatgttgtggccactgtcaccggcggcggcgtgtccggccaggccggcgccctgcggcacggtatcgcccgcgccctgctgctggccagtgaggacaaccgtcccatcctgaagaaggccggtttcctgacccgcgatcctcgtatgaaggagcgtaagaagtacggtctgaaagcggcaagacgtgcgccccagttctccaagcgttaaaaagttgctttttccccggaaaacttcggttttccggggtttttcttttctaaaagttggtggcatggattccggtatgtctatttgtgccttgaactatgttgctatatatagtggtttagatgaattttagacacaatatttggggctactttgaggttacggacccgtttgaggttacaaatgaggttacggagattttcgattttcagaacttttcgaggcaatttgcgcacttctgctccagttacgaaaaggcttcaaaatgttatgaagaaattgaaatgtggaattccggttttttgagagatagaattgattatcaaaccgtttcatgttgtgttgtgatatcttttccacaaggtcaagtgataaaatctcgtgtgtttgaaccgaagtattggccgttatgtgtgaaaaagcaaacgcacttccgtgcaggctgtccgcctgttggaagtgcgtttgctcgatgaaaaacttgttctgctttcagcagctcatatttcaaaagatcgagggaggccctgcctgcatctgcccccaggccatagaccacttgcagcttaacggggtctttctccacccgcccgattgggagcgattctgcgagaaggactacgagcaactttttccttgcctttccatttcgatgatgtcccccacttgccggttgtagacctcccatagccggttgaaggagcgcagccaaggaatgggacgctactttcgataatccagaggcagggtaagcacaagaacgatatggcgctctaccattgctcgaagacaagatacagcaaatgtaaaggagattggctctggaacttttcactctcggcccgttgtccttgtgtcagtcaggtaatttatagtccggtacaaaccgcgaatttgaggctttgttgtgctatggggggtgaactttaccctctgttttctactgttataatgaggggcaattttctccaaagaaggatgtgaacaccatggaattatactcccgaagtgaggctgccgctatgctcggcattacagttcgaaagctggatgaactgcgcgccagaagattgataggatactatcaacgctgcccgggcgggaaagtacagttttctatggctcacttggaaaagtatctgcaacgcatcgagaagtcaccaagaccagttaccaagtcaagatgaagaactaagaatacaagtgttgttggaacggcgggatagtcacatcgattaagtgctgaattccacaatgcaaaacggcgcctgctcgatatttaattactgagccgacgcctctttgtagttcaatagagctcccaccagtagtcaaataccttacgatactggttccctttctttggtagacagcgatatttccggacttttcgattccctttccgcttcagatactgctgccggttgctggacttcatatactgaatgtgcagacccgagtgaagcaaggtcgttattctctcatagtcccctattatataacccatattcggcgcgtaaccgctgtgctgaatgagaaacagaaggtgatctgaatgcctgatactttgtgaacgtcggtattggcgaccggtacgacgcccgcagccattctccgctttagtcgattctaggatctcggcgatccgattgtttaactcttgctctgtcataggcctttctactctgaacgatccgggtgacaggattgactccgttccaagaccctcgctgttttgcgtgatattcccgtttggccttcttactgcgcttgtccaatggaatcaactgcttcacgggaattcgcctcctcttttctctgctgttggcattcgccccaaagcgcacggcatacatccaaatagtctatatagcccagcaacatcatctttttcggcaactcttccagagctgcctggaaccgcgcccgatcccgtttccgcacatggcagaagatcacacggtacggagagtcaccccgtacatattcctcgcagaagtgcacccgcacctgatgcttgatgaaaagctgatcagccagataagcatccgtgtccaggaatgcgaaatagttatagaacagagatagcctgtcaatgtactggtagaaaagtgtatctcccaatggtgctctcctttatgacaatctcattacaaatgcagaggatcgcttgctattccagagtatatcggttatattttaatattccgttgcggcggaaatcatcctactgaatggaggcgatccatatgtccgtgattcggtttcctgtgatcgatcctgtggctaccggagcaaatatctgccgacttcgaaaagaccgtggtctgacggttcgagatctccagcagtatttcggattcgaggagccacaggccatctacaaatggcagcgggggcagagcctgcccagtgtagataacctctatgcgctgagtgccttgctccaggtcccgatgaatgagatcatcatctccacttctcatattgttccgtttgagcagcaggcttccgcctgctgctcaggtcattttatgctgggattatttccggcacagtgggcgtggcagaatttcaaaaccgcttagacccttatccgcttgctctccacgggcttgccccggccccactggaccgctgcctacccagggatgagtcggcgacttgaaatatagattaggcggacagcttcatcaggcagaggttcgggaagttgtgagagtccacgtcaatcagtccgatgcggatatgcgtcacctcccgtcagtgagcggtaaacacggctttactgatgcttcccgtcttgaacaggcagaagcacaaaagcactgtgtagcccatgcagccccagatcgcgccggaaatgtcctccgccgtcccgatttcctgtatcagcaccgcatagatgccgacgacaaccataatcaggaacgcttggaagcccagcgccaaaagggatttcagatagttttggcccatgccgcgccactccgcgtttcccagcgtggcaagggggatcggtcccagcgcggtcacggcgtatatttcaatcattctcccgtaggtcacaaggaaaatgcagatggatagaatgttcatcgtcagccccacaacaagggtctggaaccataagcccagcaacggcccgatgtccattgcttcaaggcggctttccagatcggggagcagcgtgtcaaagtcaatgctggtttctccgatgattaccccggcgctctggttgacgacggcttgtgtggcgtcgaaaacgcccatgacgatattccatgtgttcgtcacaatgaggatggcgaaggcagatttgaacatccagcggaagaacatggagctgtcgaagtcgtgcatattgtttttctccacgatcatctcgatcagctcatagcacatgacaagggcaaggatggctgccgctactccagcccctccagcgccgcgcatcccgcgcgctgctccttcggcagggcattcaccgcctcgtcgaattttcgccgcaggtgcgcccagcagccaaccacccggatattttcaggcagccggtggtaaccggcgtagccatccgcatggagccaaccggagaaaccctccagaaaggcagccgcgttctccgccttccgggtaggccggtactcgtacaacacaatgggatgttccgcatccccacctgttcggtacagccacatatagcacttgctccgagccgtccggccctccaatttcagtacttgcagcgtggtttcatccgcatggagcacctgccgttggaggagccgcctgtgcagttcctcatataccggtttcaaccagtcctccgccacccgcagcacccagttgctcatggtctgccggctcaactgcacgcctgcccggttccactccttctcctgccggtacaatggtacgtgcatcacaaatttctgcaccatgatgtgggcaaccgcctccggagaggcatagctgtcggggatcagagcaggaagtctttccgccttgcggatcggcgtctctgttccttcctccttgcattttgggcaggcataggtgaaataaacgtcttcccggatcttcacctgggccgggatcatcaccaatgtgcgccggacgtcttttccaatctccatcatggttgtgccgcacacaggacagtccagctcgttctctgggatgcggtgttccaccacctcaaccggtacattgtctggcaggacctcctccagtctggaggaacgccgggtatgggcagccaccttcgtctccttggacctccgtttggacacccaggcctccgtctcgtcaaacatgaggctcaattggcccatcagctcttcttccagccgctccgaagacgaaccatagagtttcttcctgctcaggcgcacctgttccaggagccagtccaatttctggctcaactcgtctctttccgctttcagagactcatattccgcccgtgaaatggttaccatttccgaggtgcttgtctcatgaattctttcatttttcatgaataaattataccatatttgaactaaaaagtccagcatttccagtactttcagccgctttccccgcctaaatgatacgcagaccatctatcgggcgatgtgcctttggctgctccaccttcagcccctccatcagccagcggtactgctgcggtgtcaactgccgtacctcattttctgttcgcggccattggtacgcgccctgttccagccgcttatacagcaggatgaatccatcctgctcccagtagagtcccttgatgcggtcccgccgtcttccgcagaacagaaacagcgtgttggtgaatgggtctaactgaaactgctgctgcaccatagccgccaacccatcgatccctttccgcagatccgtataaccgcaggcgatatatactctgtctgctccggtgaaatcactcagcatgatttcagtacctggcagattgccctcactacagctgcatccgcacctgaatagatgtctgctttcccttttccgatctggatgctggctgccactccacccactgtctgtcgctcaggcagcgatgggagttctacaaaagttgctggtggctgcggtgccgaaactgcgggcacaagttccgcggctgccgacgaaaggatttccttttcccagcggtagtaggtctttgtcgatatattgtgttccgcgcaccatccccttacgctcatgccgctgctgcggcagtctatgatctgcatcttccaatgctctaactttgcctgccgttttaattcacacgcccccatctttcccggctcctccctaaatgagaattctcgagaagtcctgagacttctcgagaattagtatctcatatcttcttcagctttttaatccgccctcagccttgacgctgttatgaaatgacttttgtcaagtagaaaattcctgccaaaagcaaaatgtttgtccgagggcatgtgagaagagccaaggcaattagaattccggcattggccactctgttatacgtggattggctaccacaggtcaatggttcgtgcctggagctctaccgtcttacggcgtggatcacaaatattgtgccatcaaagcgtcaaatcgtagatagctgaaccttgtcattcgcttggctcctcacaaatgccctcgaatgtgggcaaactggtggtatccattccttgaataccacaaattgcggattgagactgggtcaagggcgaagccgcgtcagcggtgtgaaacacccttgacgcaggaatcaagtcgcaatatcatcttcaaaggaatagatgctacactgcccgggagatgtgattggtcatcattccccaaacgaaacatgatagctctctggcaatagctgttttggcaacattcttcttggatcgaattgcgattttatagaactttctatgtaaccgttcattcgctttgtcggcgtacgcaattatctcgggtgagttaccaccttgtttgtccttcattactttgctcttttttccaacaacccctcggctatagctgttcgcagactccaccaagagagtcctcagatgagaattccccgcttttgtaatgtttgtatggatcaccttttctccactggacgattctcctgggacaagtcccaagtaggcggaaaagtgttgagcagtccgaaaacggtggaaatcgccgacttcaacaagcagaggaagcgcagtatgggtagagacgcccttgaagcagcagagcttccgaacattctcttcataccgtttctgatgagccagttcctcaatccgggcatcatatacagcaatcttctcatccaacgtatagtagagagccaagtattcttgtaaggtttccttgtagagcgcattttcaaatacgagagagtcaagccacttgaaataggcctgagtccaacggctcttcccttcataatggaatccatggcgggtgcagaacgaaataatctgttgcttcgttcgcttcagatcagccttcacatcatcccgcattcgaatatactctttgatggcatcgtcctcggccgtcggaacatataccgggctgtacaggttgaaggccagacacttagcaatattttttgcatcgcgcttatcggtcttaatcgatttacccttttgctggggcatagtagacggagccaagataatgcatgctaccccgtgtttggcgagttggtgataaagggaatatccaaggcagcctgcctcgtaaccacaaataaaatcgcaatttccgccacgcgtcgaacgaacacgctccatgtattttagtatctcatggtagtctggcttcacatttacgacagcaaatgcgtcgtccgaatctacggtatagcaacaaagtgtgtaatttgtggtgtggacatccatcccgatatagattatacttgtcatgatgactcctccttgtatgtggtaagtctggttactttaggtgcgctcctaaagtatggcaggctaatccacgctttacaagtgcaggggtcatttcatattgtcttaccatttgagggtcccgccgcggggcgccggagcggaaagcccgtgggccacagcggtcccatgggctttctcgcgtccttccccgctgtccggcagcctgttcggaaatccagcgcctttggcatccgtgcggcaaggcaagccaggctggtctgccgcatcgggagccgcagagttagggaacgagaggtccccccccttttatggtcttcgccgcacatagtattctgtcggatctgcccgcgtcggccgcaattgcgggcacaccctccagcggctctgaacgctcagtcccgctgcgtcgagcggatacagattatgcggacaatttttcctatttggggaagcggctgtgcaaatcttctattttcctgatacactgatcttttgtaatcagccccataagcgtatccatatattcgttgcttataaacgaaaagatatctatctcacttgccgtcgggcaagctggcagggatgacctacgtgcattgtccaccaggtctgcttttatctggtgcctttgggcggcagatatcaaagtcttctgcactgtttcgctgtcatatgcagggaacagcagattctccgcagttagagacgcgccttgctctccgctcatgaaagacacgaacttccaagcagcctcagggtattttgtgtatcggtatatgcatatgggaataattatttttatattgttcccgctcttttcctccggccaaaacggctgcgaaacaacgccccagtcaaaatcaagctttccgtctttctgcttgtcaagcaataatggggcgtaactgctgctggtgatgaacatcccataattccctgtttcaaatacgttttgctgaaaattttgctcatagctttgtgcgaaggaaatcgtcgtcccttccgcaagcagttgttccatcaagtccagactatggccgaattgctgcatatccccacctatcagagaagacagaccggggatcgtcattctgagaagatcattcccgtcaggtaaaagaaggattgcctttttctcactcattccaagttcttttaatttttggttcatagcaaatcctatttcctgaaactcgtgccatgtaatattctgtgtcggataaggaatgcctgttatgtcgaaaacatctctgttgtaatacaaaaagtacttctccaccctgtagggcatagcataatgggtattgtcagtagtgctttttaaattttcatatcctatcagactctcaggagatatcccgctttgtgaaacaagaaaatctaaaggtttcagaacaccttcatcggccaaattccccaattgtgaaatctctttaatgaaaatgacatcaaccggttgttgcccgctcatgagtgcttccaaattagccgaatagacaggcgcaggaaacgatacggtctctattttaatatcgggatattgtttcataaactcttcaaagagcatttggtcatattccgcagctgcatcagcggcaacggcaaccctcaatgttgtagcaagttccgcctcttcagaatctttcgctccttttcggaaagcaaatgtaagcatcattgcgaataagcttaagccaatcaaggcaacccctataaaacgacgcttcatattccgtttctcctgtcagttgttacgctgattttgaattctttttcggtattccccaggagctattccacaaacgcgtttaaaaaggcgattaaaataaaactgatcgggataccctacggtctctgcgatggcagaaagcttttgggaagaattggccagcagacgtttggcttgctctattcgaacattcgtcaaatattcagaatagctcatgccgagatgtttgcgcatcagagagctcagataggaagggtcaagatgaacgcgcattgctatgtctgtaagcgacaatttcaaagaatagttttcatctatgatctcctttgccttgaaaacaacatcctgataatctttttttatttcatttcttacgtagttttgaagatcctcccgcaaattatctatccaagaaagtgcttgttcaacatttttaatcgtcaaaaattctgtgtatgttctccagctctgcaaaagtatatcatgcgttgacatactgtagtggtcaaacacctctcttacgcaagtaaacacttctatgagaataaacaatatcgtttcctttgaatgccctgactttaaaaggttctctttgattacttttaagctggaggctatctcatcttccctcaacacgcttaatgcatgttttaactgttgttttgcctcaattatttcgttgcaatctcccaaaatgaaccctttttgaatgggtattggacagtttcgccagtcaataatttcatcatttttcaaaaagtaatggctctttacagcttcgaccgcctgatggcaagcttttcgaatgccgtccagcgtagttttcccccggcctataccaaccgtgcagtccaagtttaggtattgccaaagcattttatgtagccgtcttgcagttaacgcaaccaattcttcctcttttccatttttcatatctttttgtgccgcaataataacatagaattccccggtttttccttctacgcagtaggcgtcaaagcaatcattggagatctctgtgatgacatttatgatgccataatttaaggtgtaatactcttcctctgtactctcttcaaaaatcaaaatgttattaattttgataaagaggcaatacattgagtctgtatcaaaatgaatgccgctttgctttaactgcttgatcatctcttcttccgtaaaaaaatagttagaaataatattgcgtattacctttgactgcaatgcggaaacacctccaacagtctcattttcacatgaggagtccgcagatgtgatcgtttttcgcacttcatccaggcaggacagcagcatatggacgtccaattccaatttcaagaagtagtcaacggccccaagtttcattgctcctttgactaattcaaagtcatcatagctgctcagaaccaaaaaagccacggaaaatccctcttcatttttcagcgttttgataagggttagtccgtccattacaggcattttcatgtccgtaataataatatgcggttgctctctatgcacgatctcaatggcttgctgtccattagctgcctcccctacaagcctgtaaccatattgctcccaggcaatgagagtcttcaatccaatgcgaaccgtagcatcatcatccacaatgagtatctttaacaaattcatcatgttgagtcctccttgtaatcaagagggagcaaaacggttgcacaagtccctccttccgcgcggttacttatagtgacaccatagcgacttccgcagcggagtcggattctttgtgcaacatttttaatgcccatgccattttcctggtgaaaaatcccggaagaatcattcagcatagcttgtatatatgccaggcggtctggttcaatccccacaccgtcatccaatatgcggatccgcagatccgttttatgtgtatcacagataattaaaatctctccgccctgaggaagatctgccaagccatggataatcgcattttcaaccaaaggctgcagcgtaaatttcaatattttctgctgtagcaaagattcatcctctatagaccactcgctccgtattttccccttgaatctaatattttggatatacaagtaactgtctaacaagtcaagctcttgctttagcggaatccattccgccgtaacggtttgatttgccctgatcagtttgcccaaagcatcgaccatagcagaaatattatacgcactctgcatcgaggccataattttaatagagttcaatgtgttatataaaaagtgcgggtttatttgcgcttgaaggacccgaacttccaaccgccgcttttcggtttctctttctttttgttcttgcagcagacgctgtatgtcttcactcatttttaatatatgccggtttaattctccaagttcgctattgtcatcaatctcttgcagatgagtaaaatcaccttttgaaattttattaacatttttcgtgatctgtttaattggatggttgagatttacggacaaaaatgtagaaagcatcgcagtaactccaaccacaatcgccaataatactatcgttgaagtagtaagtagatgaacctgattattgattaactgcttagaaacaagtcccctcagtgtaagtctgttcgcattgtcaattaccgtgagcggtaaatattcagaattttggtttttgctggataacattgtcagtacttttatctcgtcaccttcgcacccagctaaagccaaaatttgcccattttctgtaaagagcgcagcatagttgtcagaatcctccgtaaaatatttaaacgcatctaaaaaaaagttttcggaaaaaatgatcattaagtggccgatcgtctgccggctttccaaactgataatcggatggcaatacatgatgaccctcttattatcagtaagcggtgtgatattctccatcactccactccaatagtcttcggaaaaacggttaataaatgtttttaaatatgtgtaatcgatcaaagacgcctctgcgccatctcttatatccagcccattattcccaatgataaatagcgataacatgtccttagcaatcggacgatatgatgtttgcgagcgcaattccttgatggccagagctttatcttcactgtaggaggcagcttctgaagcagttagattcaacagctgctggatctgggtgttctgggaaacccaataaaagaacatatctacttgttggattttttcagaagtacgttcagaaatatccaatagggacaattggttttcgctgataatcgaggctttaaggtcgcgattatttcgataaaatgtaacccctgctgtcaaaagtgccgggatcaatgacaccagaataaagctaaccaccaattttttgagcaaggtctgccgtctcatctcatgcaccgctcctatatagtttactaataagggaatacagaatcgcgtttttacagcagagaagtacctctcagacaatgctgaatattcttctatcctgctccgtcctttgccttggtatctatcacacagatgttgcgacacttgcggtttacatgctttcgttcttttccgtactgtttgtcaaatcgtaataatactaaactaatatgtcccaattcatttcgtattcagggcgatgccaaaccttgtacttacaagggccgaaactgcgcaggaacacaaaacggaattgggaaactaatattaaaaacatcaggattttttgcagtatgcttcaaatctatagtttcaatatcacgagtctcttttatctaatattgactgtctcactattcaagtgatcagaactgtaaacaagggcgtataaaaacacatccggataacgcaggaattaaaatgggctctccgaaattttgtggtaactctttctcgcatcgccgggcacacaatatcgaatatatggtgctcgcccttcccggggattttgaggctgcccacgcagatgtgtacaagcctccgtatcccttctgccgcagggattttgcgggattttgaggtgcgcgtccgaagttcggatctcccgtaaatctacacagatatggataagtctcgacgcaaatggtgtaagaagcggtgtatggaaaatgtccggttttgatcctgtcacaggttggctgcgatctgatcaaaggcgtgcttgacggagttgtagtccgtgtgggtgtagacatccagggtgacgctggcgctggagtgtcccatgaggtactgcaaactcttgatgtcgatgcccgcccgctgcagattcgtacagaaggtatgccgcagcacatggggcgtgaccacgggaaagtcctcccccagggcccaccggtgtttccgctggagaagacgcatgtagttctccagatgcatggccacctttggcctgccgtccttatccaggaacaggaagccgctgcacccgtccaccaccatctctgtcttgggcggcgtccgatccttcagcacccgcttgagggccatgtagaccatgtccgtcatggggatggtgcggatcccactcttggttttggggctggtgatgaaatagggccggttggctgttcggcacagctggcgcctcacatagagacagcggcgggtaaaatccagatccgccttggtgaggccgtacagttcgctgacccgcagcccggtgcccagcaggatcacgatgtcgtcgtaatagctcccgccgccgtactcctggaaaaactggagatacaggtcctgctgctcccgggtgagggccgtccgcacaaaggcatccttggggatcacgtccgagagcttgaatttgaacgggttcttgcggatcatgtcatcgtccacagccatttcaaaggcggggcggaccacgcactgcaccgtgctgatggtgctctgtttgtacccccggtcgtggagggagacgaaccaggccttggcgtcggagggcttgatctgccggatctgcttttggctgaaggggtccttccgcatacggttgatgaccgtatcataggcgcgataggagttttccttcagggtgcgcttcagatccatataccgggtgacaagttcgagtactgtcatctccccggcggcatagtcgatcccgtccgccaggtccctctggatctcggcctccttccggcgcagctcctccagtgacctggcatagatgtatctgcgctgctttcgggtgtcggtatagcgaaacatatagagaccgtctttccggtggctctcgcctgttttcagaatacggcctctctgatcccggcgcttttcggacaagttttgatcctcctttctcgaaaagcgctcgataggctgtatcttattttaccatacaaccttggaatttaccacctatatggaataggcagtctccaaatatttctccagcgcttttcgtttgatcagccgtttacttccattccagagcacgaagggacagctttcctcgttggtcagatcccggagcttgttgatgccgatgccgaagtaggccgcggcctcctccagggtcaggttggccttctcccagactggaaccatctcagccatccccatcaccgccgctctctgatcccaatgacggtaatgacggtatttcctccgcgggggcggaatcgtcatcatcgtcatcaccgtcatgctcctcatcttcctcctcgtcctccgtgcgcaggaaggtgagctgccggctctccggtctccgggacttccagtattcgatgcccttctcctccttgagccggcgggtgagggcgttgagcttccgggtcagcgtgttggcccggtaagggagctccgggtccagccggcgcagccgctccagcagctccgtggctgtcccctgccaccccccgccgatcacttggtcgatgagatccagcagcggctcaggcggctccgcgatctccgcctcccggctcaccaccgtccacaggcagcgctgcgggtcaaagtccaggatcatccgctgtcccggcagatccttcccggtctggtccagaatcacacggcccttttcccggtacagcaggaaggccccgtccgccgcccccagcaggccgtttgtgccgctgatccggtcaaaggagttctcgctctccgtgttcttccgggtgtggtggaccaggatcggcgccacgtcgtggatgtcggtaaattccttgaaggggcggatctcctcatagtcgctctggtatccgtatgtatcctggcattggctttgctcctgacggcctgcggcccggcgccgtctgacagcgcagtctccaccggcgattccgccagcggagatcacgccttcgactatggcggtgacgtgacgctgcgcatcctctccggctcggagaaccaggagccggagggcatcctggatgacttcgcccgggaacggggcgtgaacatcgagatggagtaccagggctccctggatatcatgcggaccctccagggggaaacggtggactatgatgcggtgtggccggccagcagcctgtggctcaccgccggagacacccagtaccgggtaaagcacgcccagtccatttccatcaccccggtggtattcggaatccgccaggggttagccgaggagctgggtttcgtgggcacggaggtgtcggtcagcgacttgctctccgccatccaggcgggggagctggagttctgcatgacctccgccacccagtccaactccgggtgcagtgcctacatcggcttcctctacgccctgctgggcaatccggatgtgatcacgtcggagaacctccagaccccgggcctggcggagcagatcacccagctgctctccggcgtggatcgatcctccggaagctctgactggctgaaggacctgttcctcaccggtggctacgacgccatggtgaactatgagtgcctcgtcatcagcgccaaccaggagctggaggcgcggggggaggagacgctgtacgccgtctacccctacgacggtctgtccattgccgactcccctttaggctatgtggacaacggggacgccgagaaggaacaggcctttctggatttacaggagtatctcctgtccgacgaggtgcaaaacgagatccagcgcaccggccgccgcaccggttacgagggggtgtcggcggagaacgccgacgtgttccgcgccgactggggcgtccagccggaccgggtgctctcccccatccggatgccctccaccgatgtgctcatggagtgtctggatctgtaccagacgcagttccgcaagccctccctcacggtctactgtctggactactccggcagcatggaggggactggccgggaacagatggtggaggccatgagccagatcctgattcaggaaaacgcggagcaaaatctgctccaggcttcggaacacgaggtcaatatcctcatcccctttgagggctacccccgggacgtctacaccgccgttgggaacggagaggagctggaagccctctatactcaggtggaggcggaggaggccgtgggcggcaccgacatctattatgccgccatggagggcctgcggcagctgaaaaactacgacctgagccagtacacccctgccatcatcctgctgacggacggggtgtctgacgggagtttttccgacttccgggacggctacgaggccttcggggcggatgtgccggtgttctccatcatgttcggctccgccgatcccacccagctggaggagctggcggaactgacccacgcccgggtcttcgacgggcgggaggacctgatcggggccttccgcagcgtgaaggggtacaactgagatgaagaaaggacagctacggcaactggtgctgtcgctgggcgtgggaattgcagtctttttggttctggccctgggcctgcgctggaatttcctgttcagcgccgcgctgggggtgggaatttatctgggcctttggtttctgctgacccccagggcggaccccatcaccctctatttcgcccagcggccagacggcggcgagatgcaggccctgatggaggaggcggagcgggatctgaaggccatccggtcggccgccggccgcattacggacgtccggacccatgaggacgccctggccctcacggagacgggggatcgcctctactgctatcttcgggagcatccggagaagatttcgtcggccaaccgcttcctcatctactatctggacacggtgggccggatcctggggcagtatgtgaacttccaggatgccgggctggggacttccgaggtgcgggagtttcagcggaaggtgcgggccattttgccaaaactgaagaccggatttgaggaacagctcagccagctgatggcctcggagcggtttgacgcggaggcggacatgaaggtcatggagggcctgctgaacacggagggattccaatgggaagcaaatcaaaatggatcggtctgatcatcctgctggttgtcatcggggcggcggcggtctatctgctgctgggcggcggcccccggccggagccaaccgttctgcggggctatgtgggggggagagaagatcggcctgctggaggacgaggcggtacaggatgtcctggagcgggactacgggctcaccctggactatgccaaggcgggctccctggacatggtcacggcggaccatgagggccgggattttctctttccctccagccagaccgccctggagtactaccagcagctctacggcgcgccgggcaagagccagatcgtattcaacacccccatcgtcctctacacccaccgtcccattctggaggcgttccagaaacggggactggtgacggagcgggacggggtctactatatgcatatggccggtctggtggcggagatcgaggcgggtaccgcctgggcggatctggggctgccggagctctacggtacggtggcggtgagcaccaccgaccctgtgcgctccaactccgggaatatgttcgcggggctgctggccaatgtgctgtgcggcggggtggcggatgcggacagcgtggagactgtgctgccccgcctgaaggccatcttcgagaagctgggctatatggaggcgtcttcctccgacctgtttgaccagttcctcaaaaccggcatgggggccaagcctgtgatcgccggctatgagaaccagctgctggagttcgccgtggagaacccggaggactgggcgcagttgaaggatgacatcgtgctgatctaccccacccccaccgtctggtcctcccatatctacatcgcgctggacgaggcgggggaggcgggcatcgacgccctgctggacgaggaggtccagcgcctggcctgggaaaatcacggcttccgcaccgaggtatccggcacggacgccgacgaaaaccacttcggcgtccctcacctggccgcggagatcacccaggtggccgccatgcccagctacgccgccatggagaagatcatcgccgctctgtcgtaaacgtaaattttaccgcagggctggataaatgcgctgtgcaaagggaggcattttcacagatggatgggctcatcgtctatggcagcaaatacggcacgacccgccggtatgcggaggagctctcccggctcaccggcctgcccgccatcccctgtggggaattccacaggctggctgaggggagtatccttgtctatcttggggcgctctatgccggcggggtgctggggctcaagcaggcaatgaaaggactttccctcggggatggccagcggctgatcgtggccactgtgggtctggctgacccccaaattcctcagaaccgggcgcatatcctcgcatccctgaaacggcagatgtctccagaacttttctctcaggcagttttcttccacctccggggcggcattgactatgccgttttgtcccctcgccatcgggccatgatggccgccatgtgcttctctctgcggaggaaaccggcgcggcagaggtcctgtgaggaccaggcactgctggagacttacgggaaacagatggactttacggatctctctgcgctggctcccatcgccggtgaaatcctgcgcggataagatatgccgggaaagaagtgccttcgaccagagcggccgatgatcgtctgatcgcgtacaggggtcagtgatccaaacccgttagcagctatcctcaaaatggcgttgagtgattttcagatacttacagtctgaagaatttacggtgccgtcaagatttatgcgcaaaattgtttgcaggctccggctgaatgaagtcagccggcaatagaggcgtcgtccatgaccgcctccaagtgcttcatgttcatgtatttcttgctgccccactgagtacctgccacatggcgcagcctcgcgcagaccagcatcagggcggagttgccatcggggaatgtccccaccacgcgggtcctgcggcggatctcacggttcagccgctcgatcacgttgttggtgcggatgcgcgtccagtgctcgctgggaaaatcgcagtaggtcagcgtctcctcaatgccgtcctcgaccttcttggcagcctccttcagcttcatggcgcgcagctcggcgaccacagcctttgccttctcgcgggacgccttcttactctcctgggcgtggatcgccttgagcatttttgccacaattttggccttggattttggcacaacagagaaaacgttgcggtagaaatgcacc

SEQ ID NO: 4951 - DNA, 33151 bp, Unknown
  gut microbiota DNA sequence
ttttgcgctccgttctctgcatttcatgcccagaataccctgatttttcgcaaaaatcccctcagtttcacaacaaattgtaacgattcggaaacaaagaagcctcccccggcactgaaaaatgccggccgggcttccgccggccggcatctcttctcttttctcagacaaacaccgcctgtaccagcaccatgtacagcacagtgcccccggcgatggacagcagcacattccgcttccagaggtggagccccgccaccgccgcaatggcgatcagctccggcgccccgtggggcaccgacagccaggagacgctccgcaggcagtacaccaccagcaggcccatcatggcggacggaaggaccttccccaggtatatcaccacggcggggggctgtttcttctccggaaacagccaaaagggcagccatcgggtcagctgggttccggcggccaccgccaggatgatgcccagcgtctgcaaaggcgtcagcgtcacagggctccctcctctccgctgcggtccaggcggcaccgtgcactcagcagcaccgccagcaccagcaccatggcggggatcaccatgttgtccgctccgaacaccgccaggctggcggcggcgcagaggatccccatcaccccggcgggccggttctccggcttcttccactgctccaggaacagcaccacgaacagcgccgtcagagcaaagtccaggcccgtggtgtcaaaggtgaggaaactccccagcaggccgcccagggctgtgcccgtaatccagtagaggtagtccagcagggagatccagaagtagaagtccctccgggccacgccctccggcggctccagagtggacaccagggaaaacgtctcatcgcacagcacgtagatcagaaacggccgcaccttccccaggcccttgtacttgtccagcaggctcagcccgtagaacatgtgccgggcattgaccatgacggacagcagaaacgcctgcacagggtcaaaggccgtggtcagcagcgtgacggccacaaactgcatgctgcccccaaaggcgatggcgctcatgaggacggaccatcccggcccataccccttggactgcatcaaaaggccataggcagtccccaggcacagaaagcccgtcatcaccgggatggtggcgggaaacgccgcccggagggccatgctgctcccgccggcgcggcggctctcgtcgtctctcaggggcacagcagatcggcctcctccgggtgcttttcaaaccagattttggcataggaacaggtcgccctggcgcgctttccctccgcgcggatttggtcggccgcctcccggagcagctgccccgccacgccctggccccggagcgtatcatccacaaatgtgtggtcgatatccgccgccccatcccggtcgggaaatgtcacctccgcgatcacccggccttcttcctcggcgtagatacgccccggctctctctgaaattccatgggtcttcctcctgcatcctgtcccgccgtctttttacatcttctccggcgcgtccacgccgatgagcttcaagccgttccgcaggacgatccgggtgtcgtccgccagcttcagccgggcgtcccggaccgccggctcctcgcccttgatgcggcaggcggtgtagaaccggtggaagcaggctgccagctcctggagatagcggttgatgtggctgggatcgtaatcccgggccgccagcttgatctcctcgcagaactgggcgatctgcttcagcagggcccgttccgcctcaccggagagcagggacatgtccacgtccgcctgtttgggcacggagacgccctcctccgccagagcccgcagcagcgagcagatacgggcgtgggcgtattccacgtagtagatggggttctcgctgtcctcccggaccgccaggcccaggtcgaactccatctgggtgtccggcttggcgttgaagtaccaccgggctgcgtccacgctgacctcgtccagcagatccgagagggagatggccttgccggtgcgcttgctcatccgcaccacctcgccgtcccgcagcagcttcaccagctgcatcagcacgatgtccagccgctcactgccgttgaggcccagggcgtccagggcgcccttcagccgggccacgtggccgtggtggtcggcgccccagatgttgatgaccttgtcaaagccccggacggcgaacttgttccggtgataggcgatgtccgcggcgaagtaggtgtaaaacccgttggcccggcgcagtacgtcatccttcaggtccagcttctcgatgtccgcctctttcttcccctgcctgcggtagtggtcccgtaggatgtcggccgtgcggagccacagggcgccgtccttctcataggtccagccccgctccgccagcagatccactgtctccttcacatagccgctctcatggagagaggactcgtagaaccagttgtcatagtggatcttgtaccgctccagatcggtcttcatcttaggcaggttgatggacaacccgaactgggccagcgcctcctggcgctccgcctccggcacatccaacagcttatctccgtttttctcataataggcccgggccaggtccttgatgtcctcaccctggtatccgtcctccgggaagggcaccgcgtcctccccccggatgatctggagataccgggcttcaatggagtgggcgaacttatcgatctggtggcccgcgtcgttcacgtaaaactccctcgtcacgtcggcgccgcacgccgccagcacgctggccagggtgtctcccagcacgccgccccgggcattgcccatgtgcatggggcccgtggggttggcggagacgaattccaccatgatcttctgccccttcaggtggtcggcggtgccgtagccggcaccctcgctctccaccgcctcgcagacggcagcgtaccagctgtcgttgagacggaagttcagaaagcccggtcccgcaatctccgcggaggcaaagtagctccccgccaggtccatgtggtccagcagtgcctgggcgatattacggggcggctgccgcagcgccttggaggccgccagggcaaacgtggtggtgaagtcgccgttggcggtgtccttggggatctccaccggggcggtcttcacctccgcctggggcagcgtcccgtccgccactgccgcctgataggcggccatggccagcgccgccgcctggtccttcgcgttttgtaccatgttgatcatatcgttccctctttcgtgaatgaggaattcagaatgaggaattttggtgtccggcaaagccggacagattccaattgccacctgcggcggcaccgcaattcctaattcccaacccctgtttttcccgttttacccgggtcttaaagctgtttttccctgtcaccgtgcgcttcccacgggacagatcccgggggaccccttttctcggaatccccgggcgaaatgaattcgccctccgccaaagattttggctcctccaaaatacttggacgcgctgccgcacggtttgccggaacgctctcttactttcgctttacccggatcttgaagctgtttcttcctgtcaccgtatgctcgaccgcgatggagtacttgatctccagcaggccgccccgctcgctgaggttgtgccgcagggcgctggtctggatatccaccgacagctccccgtagggggtctcatacagggacgtgtgctgccgcccctcctcaaacaccatctgggagttcacactgcccacccggcgcaggatcacctggggcccgctgacctcaaaggtggtggtcgtcccctccatgccggtgagggctgtctcctgataggtcagcagcaggccctcctccgtcagctccagggtcccctccgtcgtcagctccgtggcatccgggtccacatcgtcaaaatactgctctccccggatgaagagcagcaccggcagcttcttctgccgcgtctcaatatcgctcaatgtcaatcctccgtgctgtatggcgcaggtcctcctgcagaaacagcgaggccgtccgctcaaaatcctccacccggtcactgacgtagaactccgtctcgccgcggcggcgctcgtccgcccgcagctcccgggccttcagcatccgtttcagctcaaaggcggactcctccccggcggacaccagctccacgcccggccccatcacgtccccgatcacatccgtcagtagcgggtaatgggtacagcccagaatcagggtgtccacccccgcattcttcaggggcgtcagatactcccgggccacggtctcgatcaccacgtctccccgccggatgcgcccggcctccgccaggggcacgaacagggggcaggcccggctgaacacggtcacctccgggtccagccgccggagagccgcctcgtaggcaccggagcggacggaggccgccgtggcaatgagccctacccgcttgttttgggtcatcagcaccgcccggcggcaagtgggctctaccacgcctaccatgggcaggtcgttttccgcctgcagcgccgccagcgaggtggtggtcaccgtcccgcaggcgatgaggatggccttcagatcgaaggagcgcaggaaacgcacatcctggcgggcgtatttcaaaatggcctcccgggaacggctgccatagggcacccgggcggtgtcgccgaagtagatcaggtcctcctccggcaggatgcgccagagggagtgcaccgccgtcagaccccccaggcctgaatcgaataccccgatgggacgctggtccatcccgctccgcctccttcttctcccgccgccggaccggcggccgcttcatgctcattttgcatctggattacatattatactatgcggcgccttctgccgcaagacagattttagtctttttgccctgttttttatgtggaattctgcgtatgtctctgctataatcgtgacagtatcatctatttgggaggtgtctgccccatgaagatcgaactgacggaacagcagttccggtatctgctggatctggtatacataggaaactgggtcatcaattccacccgggagaacgaccgcatccaggaatacgaccaggtggagagcctgattttctcccactgcctgcaccacaagatgagcaagctggtggagctgtaccggggggagctgatcccctcccgggcctttgcggacggcggcatccacgaggccatcgagcagtatgaggacgtggtgttctatgagatcctggcggaggagctggccctgcgggacatggatggggaacccctgacccgtgaaaactatggggagctgatggagcggatcgacgcttatctctccgagtttgacgagcacggcaccgacaacatctctgtggacctgccgtaaggcggaaggcacgccgccccggcaccggagaggtttctctccaggcttgtttcaaagaacagaaagagaaaaaggagcaacgagatcatggctgaaaaatccaaagtctactttgcggacttccgcgcccccagctggcgggagaacctgccccagaagctggcccggctgatgatgaccgccggcttcggcgatatcgatatggacggcaagtacgtggccatcaagatgcacttcggcgagccgggcaacctggcctacctccgccccaactgggcccgggccgtggtggacctggtgaagtcccacggcggcaagcccttcttgacggactgcaataccctgtatgtgggcggccggaaaaacgccctggaccacatcgaatcggcttatatcaacggcttcaccccctactccaccggctgccacatcctgatcgccgacggcctgaagggcaacgacgaggtggaggttcccgtggagggcggggagtatgtgaagtccgccaagatcggccgtgcggtgatggacgcggacgtgttcatctccctgacccacttcaagggccacgagcaggccggcatgggcggcgctctgaagaacatcggcatgggctgcggctcccgggccggcaagatggagcagcacaactccggcaagcccttcgtcaagcagaagaagtgcatcggctgccgggcctgcgccaggatctgcgcccacggcgcgccccagttcggtgccgacggcaaagccaccatcgacacggacaagtgcgtgggctgcgcccggtgtctggcggtgtgccccaaggatgccatccagtgcctgtatgacgaggcgcccgctattctgaataagaagatcgccgagtacaccaaggccgtggtagacggccgcccctgcttccacgtgtccctggtggtggatgtctcccccaactgcgactgccacgcggagaacgatgtccccatcgtcccggacgtgggcatgtttgcctccttcgacccggtggctctggaccaagcctgtgccgacgccgtgctggcccagactcccgcgcccaactccgccctgtttgacgagggctgcgactgctcctccggtgactacttccacgccgcccatccggacacggactgggccgtctgcctggagcacgcggagaagatcggcatcggcacccgggcatacgagctcatcaaaatctgatcggaacgaaacgaagcaggacttaaaaagtcctgcttcgttttccgcattgcgggaccccactcaggcgaacagggcgttgaactgctccaccaccgcgtccgcgccggtgtgcgccaccagcatcacaaagttgccattggagacaatccgggactcgttccgccacatctccgtgggcgcggggtaccaggcaccgccggggcttgtgccgtcccccacctgatagtcgattcgggcctggaagatgtccttcaccgcctggacatcgccgctgttctccacctctaccagggcaatctcgtcaccggaggcggagatcatggccatctgcaccagacactgctgggtggcgatggcggagagtcccgcatagaacgtatccagcgtctcaccctccacggccatcagggcgggccacgtctcctggtccccggtcacggaagcgcagaaatccgctagatccacgccggaagcagactccgctggaggggcaggggcgggctgggccggcgtctccggctccttgtccggctgctggggctttgtgtcctccaccggctggtatatcggcttctccgccgggtctgccggacggctccccgtctccggctccttcgccgggtccgcggggcgggagcccagatccggctcgtcctcctggagctgctgggaatcatccgccgtctcagggccctctatggtcacagggacgccgtcctccccatcggtttccgaagtctcttcctcctggggcggcgcagcttcctccatcttctggtcctgggcggcgtcctcctgcgcctccgttcctccacaggcacccagcgccagtatcagcgccagagccagcaatcctgcaagtcctctctttttcatgtttttctcctaacctctcacgggatttcacggcgctccgccgcggtctgagaggttagacgggctctacggaaaaaagttcccgctccggcgatttttctccgctgctccgcccatgaccgcctcggtgtgtataacattgacttttttcggaaattcaaatataattgtttcaagcataaacatcaaataaatacacaggccgcgcgtcgtccgcgcggccgctttgcccttattcagcggacatccgtccacctgcaaggcaagaggaggtctcctatgaagaaacaccttcaggacagcttggtcatcggtttcgccctgttctccatgtttttcggcgcaggtaatgtcatcttccccccttatctgggactggaatcgggtccggagtggctggccggctttttcagttactttatggccgacatcggactggccctgctggctatgtttgccattctccggcagggaagtcccgacgggatcaccgcccgcatcggcaggattccctccacagcgctcatgtgcgccattgtgctgtgcatcggtcccatgctggccattccccggactgccgccaccacctacgaaacctctctggccccgctggtgtccggcttcagtccggcgctcttctccatcctcttctttctgctgatcctgctgctgtgcgtgcgggaaacagcggtggtggacatcgtgggaaagatcctgacccccgctctgctgattggcctgttgatcctgatcgtggtgggtgtggtgaatcccatcgggccggtgggtgagcagccgctggtggagaatgtggccgccaccggcgtggaagccggctatcagaccatggacgtgctggcggccatcgtgttcggctatatcattctgaagagcgcccgggagaagggacacacgactcccggcgcccagctccgggtggtgtccggcgccagtctggtggcaggcatcggcctgctggcggtctatctggggctgacttatctgggcgccaccaccgcccgcttcttcgacatcaccgtggaccgcacgttcctggtggtgtccattgtccggaacctgctggggcaggcgggcatcatcctctttgccgtggtggtggctctggcctgcgtcaccaccgctgtggggctggtcagcgcatgcgccgattacttctccggcctctcggggggccgcgtttcctaccgcacgctggtgtgcgtcatctgcgtgttcagtgccgtggtatccaactttggtctcaatgagatcatcgccatcgcctcccccatcctcagcgtggtctatccccccacgctggtgctgatcgtgctggccctgttcggcagccgcatccgccgggactgggtgttccgcctggcggccctgggcgccctggcagtgagcctgctggaggtagtccgcacctacaccggcgtggagctggcctttctggacctgctgcccctggcgtctctggatttcggctgggtgttgcccgccgctgtctgcggcgcagtgggcgccctgatccccggcggccggactgccgcctcctgatgccatattttcatttttcacatactggaggactgattgtatgaaacagcactatcaaggtctcggccacattgccgtgtatacggcggatatggatgccagcatcgccttttacgagaagatcggcggcagcctgcatctccgggcccccgcctgctcgccggaacagcagcgggagctggcccttgtggagttcggcggcttcctggtggagttgatcgccgcccctgtgccggagggtgcgggctgcatccctcatttcgccgtctatgtggacgatgtggaccaagccgccgcggatctccgcgccgccggcgtggacaccttccagaccgcagagaagtgcgtgatgcccaacaccttcggcgggttggagaactggttcttcactggcccctccggggaacagatcgaacttttgaagatgctttgagtccgctttggctgcggagcagggagaccgtccattggacggtctccctgtttttctgtgcaaatacaccgcagatatggaaaatcgagctctctcctgtgtctgcggcggccgtcagcgcatggggatttacagtgtttcggcctgccctgccaggggcaggcacaccaccagctcgaacccgttgtcccggaccccggcgtccagggtgccgccatagcgctccgcgatttcccgcatcccggggatgccgaagccgtgggcggccttgtccgtcttggtagttgcaagatccggctgcaccgcgccgcccagggtgttctccacccgcagcatgaagagtcccttgtccgccttgcagcggatggtgattcgccgttccccggcgccccggctgccctcgatggcgttgtccagagcgttgcccagcagggcgcacagatccatatccgccacaggcaggtcccggggcaggaagacggcgaagtctgcggcgactccctcccgctccatggcctccgccttggcggtgaggacggcattggccgcctcgttttcacagagccgtctggttccccgcagggccggggaaccggctatctggtccagatagccgatggccccctgttcatctccctgctccagaaaaccccggaccgccgtcaggtgattccgcagatcgtggcggagacggcgcacctgggtctcctgctgccggaggccctgatagtagacctcccgcagacctgccaggcgatttgcctgctccagccgctcgtgatccgccagaatcaaaatggcgaacaacaggaccagagaggtcagaaatacaaagggcagcaccaccatgccctggtacatcgccacggtattgacctcgatagagtcataccgccggaaggtcagcagcaccacggcaatcagggcgcacaggggcatggccgctagacccagcaccagcttccacagccgccgggagagcaccaccggctcccggggcaggcggcggcgcagcaacagccacagcgggccgaacaccagcgggcgggccaggcgcaccagcacgtcatagagcgcattcctgttgatccgctccacataggtgtccagcagggcacacacggacatctccaggcagaagaggatgatgcacaccgccacccgccctatccggtcaccccgggtagagaggaggaacaaggcgaaaaacgccggcagcgtatagagcaggttggggtcgccgatccaaatcaccatgccggtggaccccgccagggtcagaaagagcagcaccctccagaagcgcccattccgggggcggacaaagggggcacagagcttgtagaggaaaaagccgctggccgccacggtcagaaaatagccgcagttgagccagatctgccagagaacatcccgcatcctcatccctccagctccgcccgggtaaaggccagcagggccgagggctggcaggaccggctgaccggcagccgccggccgtcccgcagcaccacctcgccgccctccatccggtccacagctcctgtccgaaccagataccgctggtggatgcggacaaagtccgcccccacctccgccgccaccgtgtccagcttgccgtaaaacgtgtactcccgtccggcggtgacacaggccacctgccgccggtccgagacgaaatacagaatgttggcaatggggatccggtagtgggtgtccccgctgcggcagatgtaggcccggtccaaatcccggaccagcgccgcctgtgcccggtccagcacctcctccagctgttccgccttcgggggctttaagagataccccagggcccccacggagtacccgtcaaagacgtgctctgcatacccggtgacgaacaccagctgcagtccggcgtccgccgcccggagccgccgggcggtctccatgccgtccagctcccccatctccatgtccagaaacaccaggtccagctccccggcgtggctctccagccagcggagcagtccctcgccagaggagaactcccggaactgcccttgaacgcgccgcttttccaggacccgctccagagcggcccgaagcaccagcctggcgtcgtagatatcgtcacagatgccgatccgcagcatccccatcacctcaaaccgaaaactgcccgccggggtccggcagggggcgcttttcgccctaaactacctgcccattctaccacaggaaccgccgtctgccaaaccaaacttgacggcaaatccgccaaacttgacatcccctcccctcccaacgcaaaacttgacatccaggccgccgcagatgacacccccgtttgcggcggctcttttttcgcggtacgctggtgtcaacaaggagggaaacaccatgacaaacgccactgccatctcccgctcccgtgtgtggagcgtgctcaccactcccgccgccatcccccagacggggccacggctgaaaaccaatctggacacggatctgctgaagctcatcgccatcgccgccatgctgatcgaccacatcggcggcgcctttttcccggaggtgggcgtgttccgctggatcggccgactggccttccctatcttctgctactgcctgacggtgggcctgctgtacacccacgacgtgcggaagtacctgacccggctgggcatcttcgccctcgtcagccagcccttttacatcctggccttccacccggtcggcgaattctgggccaacctcaccaactggaacatcttcttcaccctgttcctgagcctgctgggcatgtacggcctgaaggaacggaaatggtggctgttcgccctggcgctcttcaccgtcagctggtggaacttcgattactccggcaccggcatccagctgatgctgattttctacctctgccggaaccggccccgcctgggcgcggccctctacctcctcagttatcttccggccctgatgaacggctggccggaggatcccctgtgcctgacggtgggcggcctctgcatcgactggtccattttcgccgtgttcgccgcgcccctgatcttctgcgccacgcactcccgcatcaagatcaaccgctggttcttctacgccttctatcccgcccatctggcggccatcgccctggcggggaatatcctgtgagacagaaaggaagagttttatgttaacagtcaaagatctgcacaaatcctaccaagtgggcaagaccacctatgaagtcctcaagggcgtgtccctcacggtggagaagggggagttcgtggctgtcatgggcccctccggctctggcaagaccacgctcttaaactgcatctcctgctacatccccatcgacagtggggagatcatgctgggggatcggcagctggcaaatctcagcgaggacgctttggcaaaggtccgcaaccggcagctgggctttgtgttccaggacttcctgctgctggacggtctgacggtccgggagaacattctcctgcccgccatcatcggcggcgccgtcaccggccagacggaggcccgggcggaccagctgtgcgatgtattcggtatctccgccatccgggacaaatacccggcggagatctccggcggtgagaagcagcgtaccgccgtggcccgggcgctcatcaaccatcccctgctgatcctggcggacgaacccaccggcaacctggacagcaagtccagccgggcggtgattcgctcctttgaacaggccaaggaatccctggaggccaccatcttcatggtaacccacgactcctttgccgcctccttctgcgaccgggtggtcatcctccgggacggagtggtgtggcggaccctggaaaagggcgccacggaccgcaccgcctttcaggaccagctgttggacgccatccgggacatggggaaggagtgagaccatgcggcacttttccgacgcctacgcggccctgcgccgcaaaaacaggggccagtatgccttgctggcagggtgcagcttcttctccgtgctgctgatcactgcctatgtctgcatgatgcgctcccccaccatcctctccgtcttgccggagggcggcgacagccgcaagcaggtgatgatggtgttcgttctggcggtcatcggctgcgccgtgttcaccgcctatgccgccgggctgttcttccggcagaagtcccgggagaccggcgtgttcctggccctgggggccacccgccgccagctgcagcgggagatgggcaaggagctggcggtgatctccctgggctcctgcgccgccggggcggccttaggcggccctctggcttggggcgtgtggcagctgttccgcctgttcctggtggactcccaggagatggccctgtccttcgatccccggtcctatctgctgtccatggtctttgccgcctacgtggtggggatgctgttcttcctgggcggccggtccatccgccgcaccaacatcatcgacatcgtccaggagtcccacaagtccgagcctatccgcgaggtaaagcggtggtatggaagcgtgggcatcgtcctggtggtgatcggcgccctggcggggtatctgatgccgtcgttctttgtcacagttctccagtggtatcccccctctggggtggaggccgtcttttacctgccggcgctggtcggcatgtacatgatcctgctccacacggtggtgaacggctggcggaagcgccataagtaccgggacatcatcgccacgtccatgatgaagttccaaggccgccagacggtgcggaacatgctggtgatgacgctgctgatcgccggtgcctatttcgcctccttttacgcccccatgctgaataccagctccacctacagcttctccacccggccggtggacttcgagtaccactggcggaatgatcagaactggccggagcggggtgaggtggaatctctggcgtcgaagcatggtgttgacatcacctcctggacccaggtagacgccgccaccctgggctgtgacggcaccgtctccatcgagcagagcgccggagctctgggcaccacctacaccaaggaataccgggagatccaaggcggggccacctatttttccgagagcgcctggaacgccctcaccggccaagctgtggacctggcccccggcacctgtgccaatgtgctggatgatgaaggcggcagcgactacctctccggcggcgacgtgacgctggtcaccaatatggtcaccggggccagtctgtccgttaccccggcggagcctctgtgtttcaccatgctgctgggctgctacgtgctggatgacgccgactacgagatcctcaccgccggactcaccgacctctggcgggagacctgggtattcttcaacgtggcggactcggaggccagctatccctttgccgacgccctgttcaacgagatcgtggaccgctccggcgacgatgtgctgcagatggacgcctacgacctggtaagtgcggcgctggcggaggaggccggcgaggtctatgactacgaccgggcacatatcgccgcccatggcttcccggtgatagagcgggaggaccgggacacctcggagttccgcaactactggctctacatgccccagttccgggtgctggatcagaacgacttcgtcaccaccatggcggtgtttttggtgctgttcatctttatcgccctgatctgcttcgcggcggtcatcgtcattgcctttacccggtgcatgaccatcgccctcaccaacgcacgggtgtacgacgacctgcggcacctgggggcgccgaaccgctatctgttccggtccgtaaaggggcaggtgtccaaggtgtttcttgtgcccgtcatcgtgggcacggcagtcatctccgccttctacctcatgattatgtacttcaatgataaccgcttcacccccggcgagatggccggcatggccgtctgtgctgcggtgatcgccgtgctttcggcggtgctctatggggtataccgcatcacccgccgcagcgtctgccgcgcgctgggaatccaaggcaagtgaagcttccgcgctgccggaaatttggtccgggggcacagggatattccctgtgcccccggacctttttgtttattttccgccgctgccggcgatctttctccacaaggtgcttcggccgattccaagccgcttggccgcagcggactgattcatgttctcctcccgcagcacctgttcgatcactctccgctcgatgtcctccaaggtcccggagagatccaccgccggcggaagggcactcactttccgcatctcgttctgcaggaccacggccacctcagcggcagtgatataaaatcccgaggacgccgcgatcatctggcgcagcaccttttccagctgcaccagattcagcggccactcaaattccaccatcagctccatggcatccggctccatgcccacggtggatttggccagcgcggtattgtactggggaatcatcatattgacaaaggcgggaatatcctccttccgctgggccagagacggcacattgatggtgaatccgctgagctgcagatagagccggctggagaactgtccccgggccacctcggcagacaggtcgcagcagctggagctgattacccgatggcggtgggtcatcttggtatcctcaatataggtccccacctgctgctgcagatccttcggcagcgtatccacgttttccagatataccgtgtatcccgtggcgtgaatgggagacgcggcattattcaacagcatgtcccagtttttctccgtcaggtccctgcactgcaggcgcatcagcgtggtcccctccgtggcgcttttggtgtgaatgcgacgggccaccacgcccttgtgggtccccaccgccccctggatcagaacgggcagcgcggaactgccggcagtctggatgagcttgtccattgggcgcagatacagctcgctggaagccggcaggctctgcgcctggcggatgtcctccgggccctgggcgatggggaggcgatcgacggccatctggattttgtctccaagctggattatgaagtggagctggccgttgtcctgggcagggacgcgctccatgtccgggaggaagatgtgggcgactacatcttcggatacagcgtggccaacgacgtcagcgcccgggacgtccagtaccgccacaagcagaacttcctcggaaaaagcctggataccttttttgccatggggccggtcattgtcactgcggacgaattcccctgcccgcccgcgctatccatcagaagctttgtcaacggagagctgcggcagaacagcgtgacggaccaggtgttcttcaatatccgccacatcgtcagtgagctctcgcagggcatgacgctgccggcgggcaccatcctcatcaccggcacccccgccggagtggggatgggaatggatcccccctgcttcctcaagcgcggagatgtggtcacctgcgagatcgacgggatcggtcgcatctccaaccccatccgctagcgttctgttttgaaacgattcctgtccaatcccttcaaggggccccggaggttttgccattgtcctccggggccccgctcttttgattccacagctccgccggggtgcagcttcttctcgcccatcaggatccgggccgggcgtctctccagagcccgcctctgtccggatgccgccgtctacttgcctcctcttcgtatccgtcagccgatcctttagccgccgtgatgcccgaagcccatcccgcgggacgccgctcacagcgtcccgcaggccctcctgtccgcttgccggtggggcggcgctccggggaaacatattcctctgtttggggcgggcagctttggagacgcggttgccggtggccgttgtcccgcgctgcccggcaatttccccccaccgcagaaaaaaagcgccctccgcggcggcgggcgcttgacaggacggcaggactgccgcagatctccgcggcggtcctgttccgttggatttgattttcaggcaagtcagtccaccagcctgcgggacggcagccgccgtttccagatggaaggggcgaacagaagcagcatggggaagatctccagccgtcccaccagcatgtcgaaggacagcagcagcttggaccaaggggagaagctggagaagttacccatgggacctacaatctccagaccgggccccacgttgttgatgcaggcagccaccgctgtgaacgtggtcaccaggtccaactgctccagagacaccaacaggcaggacgccacgaagaccatcaggtacaccgccagaaacagatggacgccccggatgctccgctcgttcaggggcttgccctcgaactggatggcgggcaccgcattggggtggagcatccgccgcatctcgctgacagacaccttctgcaggatcaccacccgggccaccttgatgccgccagcggtggaaccggcgcagccgccgataaacatcagcgccaccagaatggcctttgaaaaggtgggccaggtgttgaaatccaccgtggcataaccggtggtggtgatgatggaggacacctggaaaaacgcgtgccgcaggctggtgcccaccgactcgtacatgtgcacgatatccagggtgatggcagccactgccgtcgccacaatgaggacataggcccacagctcctcggaccggaacacgtcccggaaccgccgcaccagcaggaagtaatacagattgaaattgatgccgaagagcagcatgaaaatgccgatcacaatttcaaaataggggttgttataagctcccacactgagattccggctgctgaagccgccggtgcccgcactgccgaaggagtggatgcaggcgtcaaacagcggcatcccgcccgccagcagtagcacgatctcaatgacagtcatcaccaggtagatgccgtagaggattttggcggtgtcgctcatgcggctcaccagctttcccaccgcgggtccaggcatctccgcccgcagcatgtgcatcccgtggccatccccgcccataggcagaatggccatgacgaacaccagaacacccatgccgcccacccagtgggtgaagctgcgccagaacagaatgccccggttcagcgactccacctccgtcaggatggtggcccccgtggtggtgaagccggagactgtctcaaagaagcaatctacaaagctctctatggagccggagatgtaaaagggcagcgcaccgaagagggacacggcaatccacgccagcgccactaccgccaggccgtcccgtgcgaacagagacgcctgccgcggctttttgaagctcagcaatcctccgcacagcaccagcagcgccgcagggagcagatacgggacaggggattccccatatcccagagccaccgccatgggaagcagcagcagcgccgcctccaccagcaggatacggccaatggcaaagccgatcattcgataattcacagaacttacctgccttctcactctgcaaggatatcccgaagatcctccagctgggtgtccgtggtcactacgatcacatcgtcgtggaggtgcaggacatcattgccggaggggatgacgatctgcccgttctgccgcacgatacctgccagtagcaggccccgcttcagattcagatcccgcaggggcacgccggcgaaggagatgtccggcgtcacgctgaactccagagcctccaccttctcatccacgatgcggtgcagcgttttcaccttggaggcggaggcgttcttcatggcccggatatactggaggatcagctctgtggtcaccgcaccggtggacaccacactgtcgatcaggctctcggtggagaccagctccagcagggacttgcggttgatcttcgccaccaccttacagcagtcgccggactgcttggcggcgctgagtgccatgaggatgttggcctcgtccaggcccgtgatggccacgaaggcgtccgtctggctgattccctcctcgctgaggagctcgctgtccgtcccgtctcccacgatcaccagcgcgcggggcagtttctcgctcatctccacgcaccgctgctcgttttggtcgatgatctttacggacatgcccatctccagcagctcagatgccagatagtagcacattttgctggcgcccacgatcatgaccgaagaggcccgggcccggaatacgcccagaagccggaagaacttctccagttcccggggtgcggcggtgagatagatcttgtctcccgcccgcaaggtgaaatcgccggagggaatgatcgtctccccctgccgggccacggcgcagatcagcacccggaccttgaaattccggtacagttccgaaagccgggtgccgtccagggccgtgtgctccgccacccggtactccaccagctccagccgccccttggagaaggactccagcttcatggcggtggggaaccgcagcacacgggcaatctcacgggccgttgccgcctccggattgatggccatggacagccccagctcactgcgcataaaccgcagctggcggccgtattccgggctgcggatacgggcgatggtgtgctgcacacccattttcttcgccacaaggcacgtgaggatattaatctcgtcgctggaggtagtggcgatcagcagatcggcctgctccacatccgcctccttctgcacatcgtagctggcgccgttgccgcatacgcccatcacatcatagatgttgatgatgttctcaaccagatgtggattttggtcgatcactgtgaccctgttctccacggccagatggcgcgtcagggccacgcccaccttgcccgcgcccacaatgacgatcttcatgcggtcctccatcctttcttccgccgggacaggttccgttggggatcctccggcgcaatcctcccacattatagcggatatatcggcaaaagcaaatatctttttcgtcaaatctccaaaaaataggacgccgtctttccccctgcctccccttgtggtatgctgttctgcggaatatgggccccgcccggagaataaggagacgatgaaatgagcacccctgtcaaactgcgcctgtactgttccatctgtgcccggaacgacttctacatggaccgcatccgggccgttgccgacggtctcggcctggactacactctggagaaaatcacagacgacgatgtgatcgaccggatggacctgctgatgccctgcctgtacgcctactgccccggctgccgggtgctgaacgaacaggtgacgagtgagcatccggagaccctctgcactcccgccctggagatcaatggaacactccggttctggggcgtccccgccagcgacgacgcgctgcggcaggcgctgtcttccttataattaaataaggtgcggctgccacgtcccggagaaggcgggcgttctccaaaattttacttgacaaaccggcataaaccgcataaaatcaacgtgaaattattttagttaaattattttaattaaaataatttcatcatttttcgacataaggagtaccaatatggaattcgagcaagtacgtgatatcatcgtggagaccctgggctgcgacgcggagcaggtcacaatggacgcctccctggctgacgatctgggtgctgattccctggcttccgtggaactggtgatggctctggaagaggccaccggcatctccattgaggatagcgccctggcggagatgaagaccgtcggcgacgtgatgaactacctgaacgcccacaagcagtaatccctgccccgccggcgggcccgcgccctccggcgggttcactttccgctgagaaaggaatgcgctatgaccaaccaagagttttttgagattgtcgcctgcttcgaccgcagcaccgctcagacgatgaagctgtccacgcaggagttcaccatagagctgacccgtggcggcgcgtctgcgcctgcggccagcgcacctgcggccgctccggctgccgccgctgctccggtgcctgcgccccagagcagctcctcctctattgacgcgcctctggtgggcacgttctacgcggcgcccgccccggaccaggccccctttgtcctgcccggcgaccgggtgtccaagggccagaccgtctgcctgatcgaggctatgaagatgatgagcgaagttcccgctccctgtgactgcgtcattgagagcgtgtgcaagagcaacggcgagctggtggccttcggcgagccgctgttccgttatcggccatgctgaggcgggtattgatcgccaaccggggagagatcgccctgcgggtcctgcgggcctgccgggagctggggatcgagacggtggccgtatactcccaggcggacgcggacgcgctccatgtccagctggcgggacaggcggtgtgcatcggccctgcccgggcggcagacagctatttgaatcaggatgctcttctgacagtggccaaagccaccgggtgcgacggcgtccatcccggctatggcttcctctctgaaaacgccgactttgcagacgcctgcgccgcagctggcctgaccttcatcggcccctccggcgacgccatccgcaaggccggctccaaatctgccgcgcgggacctgatgcgcgccgccggcgtgcccgtgacccccggctccgacggcccggtcgcctctgtggaggaggcgctgaccgcggcagagtccgtaggctatcctgtgctgctgaaggcgtccgccggcggcggcgggcggggcatccgccggtgcgaccggccggaggatctgtccgcggcctttgcggaggccaaggcagaggcccaggcctgcttcggcaatgacgagatgtatctggagaagctggtgctccggccccggcacatcgagttccaggtgctggcggaccgctacggcaacgtcatccatctgggggaccgggactgctcggtccagcggcggaaccagaagctcatcgaggaggcccctgcccggtgtttgacgccggagctgcgggagcggatgggcgccgccgccgtaaaggcggccaaagccgttggctatgagaatgccggcacagtggagttcctgctggacccggaccgggagcatttctatttcatggagatgaacacccgcatccaggtagagcacggcgtcaccgagctggtcaccggtgtggatctggtgcgccaacagctgcggattgcctccggcctggcgctgcgcctgcggcaggaggatgtgacgctccagggccatgccatcgagtgccgcatcaacgccgaagaccctgtgcaggggttccgcccctgccccggacgggtggatttcctccatttccccggcggccccggcgtgcgggtggactcctgcctgtacagcgggtgcgagctgtctccttactacgactctatggcagccaagatcctggcctacgcccccactcggatggagaccatccggcggatgcgccgctgcctggaggagttcactctggagggcttccccaccaatgcggagctctcctatcagattctgtaccatccggagttcattctgggagagtgcaccactgccttcctggatgaacacctgtcggagctgctggaattcagccgcaagctcagtgaaagcggggtggatgcatgagtgggatgaacggcgtcttcgccaagcgccgggcgcgcctgctggccatgaaggccatccgggacaatcacattcccggcgataaagccatcacctgtcccaagtgcgggcaggacagcgaccgcaaatccgtggcgcagaacctgtcggtctgccccaagtgcggctaccatttccccatcggcgcctactatcgactcagcacgattctggaccccggctccttccgggagctgtttgaaaagctgcctgcggcggacccgctctccttccccggctaccgggccaaggtggaggccgcccagcgcaagaccggcctgacggaggccgtggtcaccgccaccggcaccatcgggggccgcaaatgcgtagtgggtgtgctggacagccgcttcttcatgggctccatgagtgccgccgtgggtgagaagatcaccctggccattgagtacgccaccaagaaccgcctgcccctgatcctgttcgccgccagcggcggtgcccggatgcaggagggcatcctctccctgatgcagatggccaagaccagtgcggcgctggcccgcttctcggagaaagggcttttgtatatttccgtctttacggaccccaccactggtggggtcactgccagtttcgcctctctgggcgatatcatcctggcggagcccggcgctctgatcggctttgccggtccccgggtcatccagcagaccatcggccagaccctgccggagggcttccagcgggcggagttccaggaggagcacggctttgtggacgcggtggtgccgcgccttcagatgcgggacaccctgtcccagctgctgcggctccatgagaaagggggacgcacatgagcgaaccgctgaccgccgcccagcgggtggccattgcccgccacccccagcggcccaatatcacagattatattcaggcgctgttcacagacttctttgagcagaagggcgaccgcctctgcggcgaggatgccgcgatcttgggcggcgtggccctgtaccacggccgccctgtgaccgtcatcggcacccggaagggcaaaacgctggaggagaacctcaagtgcaacttcggcatgcccaatccggaagggtaccgcaaggctctgcggctgatgcgccaggcggagaagttccgccgccccatcctcacgtttatcgacacctccggcgcctatcctggcctggaggccgaggcccacggccagggcgaggccatcgcccggaatctctatgagatgagccgcctcaccgtccccgtcatcgccctcatcaccggcgagggcaacagcggcggcgcgctggcgttgggcgttgccaaccgggtgctgatgctggagaactctgtgtacgccatcctctctccggagggcttcgcctccattctgtggaaggactccgccagacatgaggaagcctgtgagctgatgaagctgacggcgccggacctgctggagctgggcgtcatcgacggcatcatccctgagccggagggcggcgcccatctggctcccgccgcccacatgcggcaggtggatcgggctctgagccgctgcctggcggagctctccaaagagagcggagccgctctggccgcaggccggtatcaaaaattcagacgcatgggcgcagcaccccagaaggaggaagcatgagcggaatcaaaatcagaggcaccggccggttcgcccctgcgaaaatcgtcaccaacgacgacctggcaaaaatcgtggataccagcgacgagtggatcaccacccgcaccggcatccagacccgccaccactgcaccacggagacccacacggatatgtgcgtgggcgccgcccggcaggcgctggaaaacgccgggatttccccggaggacatcggcgcctgcgtggtggccactttctcctccgactacctgtccccctctgccgcctgcatggtgcagcgggggctggggctgccccacgacgcggtgtgctttgacctgaatgccgcatgcagcggcttcctgttcgccatccacaccatggagtgcctgctggcccaggccccccggaagtacggcctggtgatcggcgcagagatgctctcccggttcatcaactgggaggaccggggcacctgcgtcctcttcggagacggcgccggcgctgtggtggtggagtggcgggaggactatccctccatccacgccgttctgggctgccacggcgacccggacatgctgggcgtcaccggcgcggagaagccggcgccggcccgcatcttcatgcacggccagcccaccttcaagttcgccgttaaggcagtgccctactgcatcgaccaggtgctggaaaaggccgtcatggccattgaggacgtggacttcttcgtcttccaccaggccaacgcccggatcatcgacctggcagccaaaaagtaccacatccccccggagaagtactacaagaacatccagaaatacggcaacacctccgccgccagcatccccctggtcatcagtgagctccatgacctgggaaaggtggggcccggctcccgggtcctggtggtgggcttcggcggcggcctcacctggggcggcgccctggtggagttcgcctgactccctgcacgtcaagcaggcgctctggacgcaagcctgttaccggcgaaaacttcagctttatttaggccgcgcacagcggcgaatgggagatttttatgaaaaagctcaatgaaatcctgggaaccaagtacccctttatccagggcggtatggccaacatcgccaccggcgagttcgccgccgcctgctccaacgccggggccctgggcatgatcgccaccggcggctgggacggcgaccgtctccgccaggagatccgccgggccaaggagctgacggacaagcccttcggcgtcaatctgatgctgatgagcccctatgccgacgacatcgcccagatcattctggaagagggcgtgaaagtggtcaccaccggcgccggcaatcccggcaagtacattcccgcctggaaggaaaagggcatcaaggtgatgcccgtagtggcggcggcggttctggccaagcggctggatcgctatggcgtggacgccatcatcgccgagggcacggagtccggcggccacgtgggcgagatgaccaccatggccctggtgccccaggtcatcgatgcggtaagcgttcccgtggtggcggccggcggcatcgcggacggccgtcaggcggctgcggcctttgccctgggtgcctgcggcatccaggtgggcacctgtttgcttgccagcgaggagtgccccatccaccccaattacaagcaggctgtgctgaaggccaaggacagtgatacggtggtcaccggccgctccatcggcggcccggtccgaatcctgaagaacaagatggcccgggagtatctggccctggagaagcgcggcgcctctctggaggagctggagaaggtcaccctgggcggcctgcgccgggccgtgctggagggcgatgtggaaatgggtagcgtcatgagcggccaggtggctggtatgctccacgagatccggcccgtggccgagattttccgtgatctgtatgagagcggtatcgcacgggcgaaggccaccgccgcagaatggagcgacgcagaatgaaactgggctttttgtacgccggtcagggcagccagcatgccggcatgggcgccgatctgtacgaggcgttttccgctttccgggctgtttacgaccatgcggaagtggattttgacctgaagaaggtcacctttgaggacccggacggcatcatcaaccagacccgctacacccagccctgcatggtggcctttgccgccggtatgacggcggtgctgcgggagaagggcatcacccccgctgtggcggcgggcctctccctgggtgagtactccgcccttcacgccgccggtgtgttcgacgccgccacagctatccgtctggtggctttccggggcaaggccatggaggaggcggctgccggccgggagagcgccatgatggccgtcctgaatctggaccgcagccccctgcaggatgcctgcgacgcggcctctgacctggggtgcgtggtaatcgccaactacaactgtcccggccagctggtcatcggcggtgagaaggccgctgtggagaaggccgccgccattgccaaggagaagggcgcccgccggtgcctgcccctgaaggtcagcggccccttccacacccccctgatggcccctgccgggaatgccctgcgggaatacttccagggcgtggcgtttgcggatccccagatccccgtgatcttcaactgcctgggggatgtgaaggatgacagcacccccatccaggagctgttggtgaagcaggtgcagagcagcgtgttcatggaggactccatccggaagatggccgacatgggcgtggacgccatcgtggagatcggcccgggcaaagccctcagcggttttgtgaaaaagaccgttcccggcataccggtctgcgcggtggagaccgcagcggatgtggagaacctgcccgacacgctggaacaactgataaaggagaaggcatgatgaattttgctggaaagaccgccgtggtcaccggcggcagccggggcatcggccgggccatctgcgaggagctggcccggggcggcgccaatgtggtgctgtgctacgccggccgggcggaagctgcccaggagaccgtgaccgcttgcgaggacctgggtgccaaggccctggccgtgcagtgcaacgtggcggacgaggcccaggtgaaggccctgatggatgccgctgtgaaggaattcggccggattgacattctggtgaacaatgccggcgtcacccgggacggccttgtgatgatgatgaaggaggccgacttcgacgcggtgatcgacaccaacctgaaaggcaccttcctgtgcatgaaggccgtgtcccgaatcatgatgaagcagcggtacggccggatcgtgaacctctccagcgtggtgggcctccggggcaacgccggccaggtgaactacgccgccagcaaggcgggtgtggtaggcatgaccaagtccctggccaaggagctggcctcccggggcgtgacggtcaacgccgtggcccccggcttcattgagacggacatgaccgctgccatgccccaggccgccaaggacgccatgatgcccaccatccctatgcagcggctgggtgcaccggaggatgtggcaaaggccgtggccttcctggccagcgacgaggccgcctatgtcaccggccaggtcctggccgtcgacgggggcatggcgatgtgaagcattcaagggggacagtgtcccccttggacgctccgccggtatgccaccggctccgctgaacccccatcaccagtctgcaccccaagggcacttctgcgccgctttcagcggcttgggtcaaagtattttcggcaggtacagaaggtgaattgccccgcaggggcaagagaagccgccctggggtgcgccctgccgaaaatgattggaatttcttgatctgcctctggcagatcaaccggggaaccccgaatggatttccccagcccccttccttttgcggggccttttggaacaccttttccgggtgctcccaactctatctacaggaggtatactatggaacgacggagagtcgtgatcaccggcctgggggccgtgacccccattggccttaccgcggcagagagctggcaggctgtgaaggacggtgtgtgcggcatcgctcccatcacccaattcgatcccaccgatctgaaggtccatctggccgcggaggtcaagggcttcgtgccggagaactacatgagcaagccagaggccaagcggatgggccgcttcacccagatggccgtcgtctccgccaaggaggcactggacggtgctggcttcacgttggatgaagcggaggcggatcgctgcggcgtcattgtctccagcggcatcggcggcctctccatcacggaggcagagcacgacaagggcaaggagaagggctgggaccgggtctctcccttctatatccccaccggcatctgcaacatggccgccggccagatcgccatccacaccggcttccggggcatgtgctcctgtccggtgaccgcctgtaccggcggcaccaatgccgtaggcgatgccttccactatatccgggacggttatgctgatgtgatgctctgcggcggcacggagtccgctgtgacacctctggccatcggcgccttcacctccatgaaggccctgacccagaatcccgatcccaagcgggcttccatcccctttgacgcggagcgcagcggcttcgtgctgggcgagggtgcggccatcctcctgctggaggagctggagcacgccaaggcccggggcgcccgaatccttgcggaggtcgtgggctacggcgccacctgcgacgcctatcacatgaccgctccccggcccgacggcagcggggccgccaaggccatggagatggcccttgcagacggcggcgccaagccggaggatgtggactatatcaacgcccacggcacctccacccccctgaacgacgccggcgagacggccgccgtcaagactgtgttcggtgaccacgcctacaagctggccatcagctccaccaagtccatgaccggccacatgctgggcgccgccggtgctgtggaggccatgttctgcgccatggcgctgcatgacggctatcttcccgccaccatcaactatcaggtgccggatcccgcctgcgacctggacgtggtgccgggtcacggccgcagcgccgatgtgcgctacgccatgtccaactctctgggattcggcggccacaacggcagcctgctgttcaaacgatgggaggcgtgagaccatggcaaacgaattgaattccaaccagatcgcgcagatcctaccccaccggttcccctttgctctggtggaccggatcaccgattacgagcccggccagtgggccaagggccgcaagtgcgtcagcgtcaatgagcagttcttctgcggccacttcccccaggagcacgtcatgcccggtgtgctgatcttggaggccatggcccaggtgggcgccgtggccatcctctccctgccggagaaccagggcaagatcgccctgttcggcggcgtgaaaaacgcccgcttccgccggaaggtgacccccggcgacgtgctggaaatggagtgcgttctcaccaagcgccgcgggccggtgggcatcggcgagtgcaaggccacggtcaacggcgaactggcctgtacggcggaactgaccttcgccatcggtgcggaatgacagccgacgctttcccgccatgcgggcaaggcgcgggaaagagggcttgcagccatgctgaaagacgctttttttaacgtgtacaccaagttcaagctgcacttttaccaggagatcttcagccgctttcaggatcgtgaggccagtctgacgacggtggagaccttctgcatggaggccattcaggctctgggcagtcccacggtgaatgaatttgccaccttcatgcggatctcccctcccaacgcggcatacaaggtcaacagcctcatcaagaaaggctacatccgcaaggtccagtcttccgacgaccggcgggaataccatctggagatcactcagaagtatatcgactactacaacatcagcacggcctacatgaccgccgtcatgaaccgcatcacgcagcggtttaccccggcggagtgcgccaagctggaggagatgctcaccatcatcagccgggagctgatggcagaagtggagattccagacgccctttcgggacaaagcaactaaagaagcggcacaggctgtcagcctgtgccgcttccttttcaaaacagtccctccggaatgcggatatccgctctggggaccttctcccaggcaaagtcctccagcaggctctccccgcttctgggttctgccgaggggttgaagcctgcgagatatgccagctttcccaggatttccggtgccgtataccgctctcccagcgtgtccagccctgcatccgcgttccgcttgctgagccgctgtccatcgcttcccagaagcagcgggaaatggtaaaacgccggtgcctccagtcccagcagccgatacagcagcagctgtctgggggtggacgccagcaggtccgccccccgcactacttctgtgacgcccatggccgcgtcatccaccaccaccgccagttgataggcaaatatgccgtccgaccgccgcagcagaaaatccccgcagtccgcaggcagccactccctgtactcccccatgtggccgtcggtgaaagtgatctcctcctccggcacccacagccgcagggcgggggcgcggcctgtgcgccgggcccgctctgccgcctgctccgcggtcagaccgcggcaggtccccgggtagaccacctgtccatcctcccggtggggagcactggcggcatggagctccgcccgggtacagaagcaggggtagaccagcccctgggcctccagtcgcctcagagcagcctgatacagcgccgtcctccggctctgctcataggggccgctggggccgccgatgacaggtccctcgtcccagtccagtcccagccactggatgtcccggcacatctgctccccatagcgccgcggacatcgcgcgatatccagatcctcgatccgcaggatcactctcccgcccttctgccgggcgctgagccaagccagcaggcagcacaaaatattccccaaatggatgcgcccgcttggcgacggcgcaaaccgtccggtcaccgccatggtctcctgccctccttgtccgttcatgccaccccattatagcgggatttctccgcttcttcaaggccgttcctcccgtttctccatggtgaaatgtatcagatgcaaaacatgcgcaatatcttcactctatttatgatataaccataacgacaggcaggtatatgccagaaaagcgtgaacatgacagttgaatccccccgcctcatcccatgcttcagcgttcagcgtgcatctcctgatcggcatttctcataaaagatcggcgtggacaagcaaaggagaaaatgaaacgccccgtctttcccgaccggtacagtaccccctgcagctccacacgctgtattcctgttacgctgtcaggcaaatctggaggtatacgggggcttcccgcatttatatcctcctggactgcacactggagttttgccgcgccatttaggcaccataccgttcttcacgcagcaacaagggccgccacttgatagcggcggcccttgtcatcgggaaacgcaatcagttcttgatgtggatggcgcgcttctggacgttcagagcgcactcccgcacggactcggaaaccgtgggatgagagtggatcgtggagatcagctcatccacggtggcctccagccgcagagccagagcaccctcggcaatcaggtccgtagcccggggcccgatgatgtgcatacccagcacttcctcgtacttggcgtcagcgatgatcttcaccagaccctcgccgccattgatgatgagggacttgccgttggccaccagcgggaacttgcccaccttgtagtcgatgcccttggccttgcactgctcctcggtcagaccgacagaggcagcctccggctccatatacacacaggtggggttggtcttttcgtcatacacggcagggatccccatgatgttctccgcagccacttcgcccatggcgctggcggtgtgggccagctgggccttgccgaagacacagtcgccgatggcgtacacgccgggcacgctggtctccatcttgtcgttgacgatgatccggccccg

SEQ ID NO: 4952 - DNA, 226 bp, Unknown
  gut microbiota DNA sequence
cccgttcagataccggccgggatctgcgatgaagtcatcccatttggccagagggtggaattcctcatgctctatgtccagataccacagctttttgtccctggggctccacagcagcagatagtcgctgtagttgtccatctgcaccatcagggagagcagcttcttccgtttccaggtcatctcctgcacatccatgaaggagtagagctccgcccacttcacc

SEQ ID NO: 4953 - DNA, 52712 bp, Unknown
  gut microbiota DNA sequence
atattccgccggggcgccgctctggttttttccaagtctgtgccggataccctccattccctgcggggtggcggcaagggaccagcctccgcacactggcggaggccggtgttgaagccgttatgtttcctcgtacagctcaatgatggcgtcatccagggtgatgaacgccagtcggaccgtatcgctgagggtctccggcccgaaaatcacctgctgggcctccttcagataggggtccatgttatccaccttgtaggccacgtggggctgtttggaaaggatctccgggaaccgggttccctcctcaaatttcaggtattcaatcttgtagtcgtaggcatccacgctctcattgacccagaagccgccccactcgttgtagaccatgttgggctttttgttcagcacggggatcccgatatgcatatactccgctgccatggaaaacctcctgtcagttatcctgggcggccaactcctgatagaactggaaggcctcccggtcagtaaatttctcgtgcacgatcttggccaccgcccggcacatggcggcgggatgctcactctggaagatgttgcggcccatgtccacgccccgggcgccgtcggagatggcccggtaggccatggtcagggcctcgtcctccggcagcttcttgccgccggcgatgacgatgggcacgggacaggcggccactaccttctcaaagtcatcgcagtagtaggtcttgacgaaggacgcccccagctctgccagcatccgggcggccagcaggaaatactgggtggtgcgggccatctccttgcccacggcggtgacgcccagaacagggatgccgtaccgttccccggcgtccacggcgcggcacagggtctccagggaccgggcctcgcccgccccgccgatgaagcactggatggccacggcggaggcattcatgcggatggcggcctccatatcggcacccacgccgttgccggtgctcatgtcgtcgatgagcacactggcgtcatgggtggcccggaggcagatggcattgtggaccgtgggggggatgcaggagcggatggccccccgggtggccatgagcacgtccgcgtaccggcacagaggggcgatggtcacgtccatgcgctccaggcccgcagtggcccccatgatatagccgtggtcaaaggccagcatcaccgtgttgccgctcttgggattgaacaggtgggagagccgattcttggctccccagtccccgtggcccaggcccttggcgaagaagccctgctccggggcaggcacgtccagatggtagtcgtgggcggtcttgtttccgattgcgtctggcatagcgcttactccttactgaacgccggggtgcggcagggggtgttccacagacggagcatctcctcgtcccacttggcgatgttcatctgaaagcctgcggcctcctggacggtgaggatctcacccaccatgctggccacgacctcgatgcccttggccttcaggaactccacagtgtccttgaacagcaccagcatctccatcatggtggtggcgccgcagccgttaatcatcacaaaggtcttgtccccgggcttcaggtccagggccttgcacagggcctcggccacggtggccacggtatccttggaggacatcatgggcacccggacgccgccgccctcgccgtgttggccggcgccgatctccatcaggtcggtctctcccaggtcgccgaaggacatgccgttctggggatgggtggcatcggtggacttgacggtgatggaggccatgttgtccgcgtaatgttgagcgatctccgctacctcctccagagtcttgccctcccgtgcggcggccgcggcgatgtggtacagcgccaccgcgccggccagcccccgcttgttgtcctcgccgttggggtcgtaccggatctcctcgccggtgaccacctgacgcacattgaggccggccttcctggccagcttcatggcctgcttgcccgccagctggtcgccggcgtagttcagggtcagcagcagcacgccgtggcccttgtccgccatcttcatggcatcaaacaccagctggccgttgggggcggcgaagatatcacccaccgcctggatgtccagcatacccttgcccacaaaaccggcctgggcgggctcatggccggagccgccgtaggtgacgatggtcacccggtcggcattggccagatccttactgatgaccaggtggccgtccacattcagaatgtccggataggccagacccaggcccaccagctcttcgtcggtgaccgtctccggcgcgttcatgaacttcttcattttcatacagcattcctccagtgatatttaagtggtgcattgccaatcccgctcctgcgggtggaacaacaggttattcccgggccagcccctggaagaaccaggacatggatacggcgcccgcgtccggggtgccgatggtcttggtcccgtaactcttggcccggccgaatttggagacatactgcttcgtagcctccgccccctgggcggcggcctgggccgcggcatcgaacagctcgtccgcgctgtctcctgtataggccgcgacggcttcgctggcggggatcagggcatccatcatagtcttgtcccccaccttggcgccggacatatcttccagctcctccagggccttggcgaagatggccttgaggcccgccacgtcgatctcctccccctctggggcctcctcctgcaagccgtccagccaggtgttccacagggggacggcgctgccgccgttcagggtcataacggccatggccgcgtcatccagcatggactggatccccccctcggcggcgtccactgcttcggagatagccccggcaatcttcgccatggtcaggccgtgatccgcgtccccaaatttggaatcgatctccgtcagctccgcctcagcggcggtcacagcggcgcaggcgtttttcaggcgcgccgcaaattcagctcttgtcatgtgatatcggccccctcttttgacaaaataaacaaattttggaagacatctttattctaacatagtcatttcgctttttcaaggcgcatcgcccctcttttctcccggccagcagggactctccgacggcctttccaccccgcccttcattgacggacagaattccctattttgtgtgttttgtatatggatttcccatggcgattcttgtaaaatacaattgttgaaaaatgcaacgataggagaatggtatgccgaatcggatcgagatgtttcgccgcctggagcgacagtattttcgggacaggcttggcaccctgggcctgcagcagctggacggcatgatcctgcacctgctggggcgggagggccacatgcggcaggaggacctggccgtccagctggcggtggacaagggggctgtggcccggagcctggcccgtctggaaaagcgcggcctggtggagcggcaggtgagcgcccggtgccgccgggagaagcatgtctctctgactcccgcgggggagggcgcatatcagggcgtccagcggattctggaggagtgggggcatgtcaaataccagggcttcacccctgaggagcgcgccctgaacgaggcgtttctgacccgcattgcggagaatgtgatcgaattttgtcgaggagagggaagtgaacatggttaagaatctgacggagggcagaccgctgaatctgctgtttttctttgccctgcccatggtggcgggcaatctgttccagcagctctacaatatggtggacaccgcggtggtgggaaaatttgtgggcgaagacgcagtggcggccgtgggctcctccttccccatcgtgtttttgtcggtggccgtggcctccggactgtccatgggctgtacggtggtggtgtcccagctgttcggtgccgggcgcatccatgagatgaagaccaccatctccaccgccatcatctctctgggcgtcctggggctcctcatcatgggcctgggaacgctgctggccggtcccctgctgcagctgctgggcacggacccggatatcatggccgactcccggacgtatctgcagatctatttcggcggcgcggtcttcctgttcctctacaacactctcaacggcatctataacgcccagggggacagcaagacgcccctgatcttcctgatgatctccagcctgacaaacatcgtgctggacctgctgttcgttatccgcttcggcatgggcgtggctggcgtggcgtgggccacgctgatcgcccagggcctctgcgccgtggcctccctgctggtgttgctccgccggatgcggcggatgccctgcgagccggaaaaacagggcgtgaagatgcccctcttccacatggtggcggtgaagcgtatcgcccagatcggcctgccctccatgctccagcagtctctggtgtccctctccatgatgatgatgcagggtctggtcaactccttcggcaaagtactggtggccggatacactgctgccacgaagatcgactccctggccatgctgcccaacatgaacatctccaacgccatgtccagcttcacggcccaaaacatcggtgcaggcaagtacgagcgggtcaaggagggcctgaaggcctgtctgctgatggtggcggtattctctctgctgatcaccgtcatcatcttcctcttcggaaaccagctgctgtccctgttcctggacccgggggacgcctcgggcgccatgggctacggtctggcctatatgcacacagtctccctcttctatatcctgatgggcctgctgttcgtccccaacgggatgctgcggggcgcgggtgacatggcagccttcaccttcagctccatggccaacctgttctcccgggtgggcatcgcctacgcactggtgtatctcaccccgctgggggccaacgccatctggtggtccatccccgccggctggctgatcggcgcggcggtctccctgctccgggtcaagagtggaaagtggatgcgcaaggctgtggccgaccgctgaccctcgcaggcggtctatttcaggaatcgcaggtgctgtggatatgaacaggaaacagaatctggaggtctttgcgaagacacccgtccgaaaggccgtgctgctgcagatagtcccggccgtggccagtcagatggtcacgctggtctacaatctggcggacacctactttgtggggatgttgaacgccccccatgaaaccgcggccgtcactgtggcctatccctcctttctgatgctgaccgccatttccaacctcttcggcgtgggcggggccagcgccatcgcccgggccctgggccgtcaggacgaggagggcgcccggcggatcgccgctgtctctctggccggcggcctgctgtccgccctgctcttctccgcggtgttccgactgctggccgatcccgtgctgcacctgtgcggcgccaccgaggctacctatgctgctgcctacggatacgccaaatgggtcgtcatactgggcggccccttcaccattctcaacaccctcctggcgaatctggtccgggcggagggcggcgccggagccgccgccttcggggtctccttcggcggcgtcctgaatatcctgctggacccgctgttcgtcctgccccagttcctgggcctgggcgcggtgggcgcgggcatggccacggccctctccaacggggcggcggtggcctgttttgccgtctatctggtccgccgccggggcgccacctatttgaacctgctgccggcgaatctgcggtatgccgcccagtacctgcgccccattctggccatcggcttcccctccgccctgcagtatgcgctgacagtggtggccaccgctgcccaggccgactttgtatcccaataccccacagaggcggtggcggccctgggcatcgtaaaaaaactggaccagctgcccctgtatttctccatcggtgtctccaacggacttctgccgctgctggcctataaccacgctgccgggaatcaccatcggcgtgcgcaggccttccggatagggagcctgatgtcctttggcttcgccgtgctgtgtctggtctgctatgaggcgtttgccacccccctggtctccctgttcattgccgatgctgcgacagtccgctatggggccgtgttcctgcggtgcatggtgacggcaatgcccatgatggccctgtgctatcccatgatcatccagttccaggccatgggcagggccagggagtccctggtctgctcgatcctgcgcaagggtgtactggacattccgctgctctatctcatggacgcgctctttcccctgtacggctgtatgtgggtgcagcccatcgtggacgccatctcgctggccgcagccctgtggttttaccgggccatccaaagggggagcgcggcgggcggaacggccccagccggggcctgaaaccggcgtgagcaaaacggaactgtaaggaggagaacgaatccgtggcaagcaaggagcacgatttttccgtcggcagcattccccgcaacatcatttcgctggcgctgcccatgacggctgcccagctcatcaacgtgctgtacagcgtggtggaccgcatctacctggggcggctccccgggcatctggctctgacgggcctggggctgacgctgcccatcatctccatcgtgatgggctttgccaacctgtgcggcacggggggcgcccccctgtgctccatctaccggggcaagggcgaggaggaagaggccgagcggatcatgggcaacgccttcacccttctgctgattttcggcgccgctgtcacaggggtgttcctgctgttccggcatcccctgctctacctgttcggcgccagtgacgccacctatccctatgccgaggcgtacatgaccatctatctgctggggaccgtctttgtcatgatcggcctggggatgaatcccttcatcacgtctcagggcttcggccgcaccgggatgatgaccgtgggcctgggggcggtggtcaacatcgtgctggatccggtcttcatcttcgccctggacatgggggtgcggggcgcggcgctggccaccgtaatcgcccagggctgctccgccgtgtgggtactgaaattcctcaccgggcggaaggccatcctgcggctccgcctgcggaatctggcgctgggcgccgggcgggtgaaatccatcgtggccctgggcctgtccggcttcttcatgaatctcaccaacagtctggtgcaggtggtgtgcaacgccacgctccaggcatacggcggcgacctgtacgtaggcgtgatgaccatcatcaactccctgcgggaggtgttcttcatgccggtgcaggggctcaccaacggcgcccagccggtcaccgggtacaactacggcgccggccgatacagccgcgtccggagctccatccgcttcagcgtggcggtgacggttggttacgccgctgtcttctgggccgccgccatgttgttccccgggcttttgatccgggtcttcaacagtgagccggaggtggtggctgccggcatccccgccctgcgcatttacttctgcctgtttatccccatgtccctccaaatggcggggcagggtgtgttcgtgagcctggggcgctccaagcaggcggttttcttctctctgctgcgcaaagccatcatcaatgcgccgctgacggtcgttctgcctatctggatgggcaccaccggcgtattcacagccgaggccatctcccagctggtaggcggcctggcctgcagcctcaccatgtatttcaccgtgtaccgtcccctgggccgcctgccggaccgcccgccggagaacatctgagacccggttgccgcgccgttgttccctctcttactcccacagactcgcaagaaaaagcggaggcgcttttggaggtttttccaaaagcgcctcctctgcctgttccggccccctgcgcgtcttgacaaacagttccggcccggctataatcttccccgcaagtcccggccgcccctctgcgggaggttggaagatcccgaacctgttaggagcaccgccatatcatgagagcatcctctgcatacagcctctttgatacagagagtgtctgggccatcctgatgcggatcgcgcctccggtcatgctggcccagctgatccaggccatgtacaacatcgtggacagctattttgtgggccagttctccagtgacggcctcaccgccctctccatcgtctaccctgttcaactgatcgtcaccgccatcgctgtcggcaccggcgtgggcgtcaataccctgatgtcccggtacgacggccaggggaaccaccacctagccgaccggaccgccggaacagggacggtcctggcgctgatcagttggctgatcttcgccgtattgagcggcctgctgatgcgcccctttgccgcgatctccacggagtcctcctccgtggcggaccttgccgtgacatacggtaccatcgtctgcgtgggcagtccgggtgtgtttctggagagtacctggagcaaggtccaccaagcccgcggcaacatgcgcctgcccatgttggcccagatcgccggcgccgcggccaatatcgtgctggacccgattctgatcttcggccttggcccggcaccggcgctgggagtggccggtgccgcctttgctacggtgtcaggccaggtgctggcggcgctcattgttgtctccggattccggaagccgccccccatccgggtgttccgctcctatgcggccaagatctaccggttgggatttccctccatcttcatgcagcttctgttcacggtctatatcatggccctgaacatgatcctggccggcttttccgatgacgccgtgacggtcctgggcctgtattacaaggtgcagtccttcttcttcatccccctctccggactccagacctgcatcgtccccctgctgagctatacatacgccaagggtgcctacggccgctgccgccgggtggtgaagaactccgtcctgctggccatgtccttcatgctggtggggatcgcctgcttcgagctgatcccggaacagctgctgcgcattttcaccgcggagcccgcggtcctggagatcggcgtccaagccttccacatcatcggcatcagctttctgcccgccgtgccctccctgatcctgccggtctttttccaggccatcggggcggcgctgcccagcgtcctgctctccctgaccaggcagatcttctgcctgattcccgtattctggctcttctccaggatcgatctggcctacacgtggctggcctttcccattgcggaagtcgtgaccggaacgctgggcctgtgcttctatctccaccgcatccacatctgggaccgctgcaagggcgcggccctgaaacccgaacgcaaaggagcgactgccatgaaactcatcaccgccatcgtcaacagacgggacaccagcgaggtctgcgccgccctgacagacgccggcttttacttcacccgcatggcctccaccggtggttttctcaccggcggcaactccacgctgctgatcggcacagaggaggaccgggtgccccaggccatcgccatcatccgccagaactgctcccgccggacggagaagatctcctccaacgtgcagctggccacgccctctgcggcctatcccacggaggtgaccgtaggcggtgccacgctgttcgtctccgatgtgacgcagtttgaaaagatctgagccgcccgccatatccggcggccgggcacaagcaggacgaagcgatccccctcagtgtgtgcactgagggggatcgctttttgcatcaagatcgatcaggcaggggcgaacgccgcgcccggagacgcggccacagtcccatcctcccgtacggccacatattcgatcatctcgccgctgtccctgcgcagccggtccaccagaacgccgccctcctcttcccccaggatgaaaaaggcagtggagagcaggtctgtgtaaacaggccgcgaggacaggatggagacgctcttcagtgtcagcggcatggggtacccggtccgcgggtccagcagatggtggtacacggtcccattcttctggaagctgtgctcataccaggaggatgtggcgatgcccgcgtcctggagctgcaccgtcccaaacaccgagccggtgttgtccgggtcccggatcgccaccttccacggccgggtcccgccctgcgcgtcctggtgcgcgccgatcacaaacaggttcccgccgtagtccagcacggcctgccggacgccgccctgccgcaggcggtccacggtcagacccagggcgaagcccttcccggctgcgcccggatccaaaccgattccagaaagatcaaacgtcacggtccgcgtattccggtccaggcggacgtgctgatagcccacccggtccagcaccgcccggatgcgctccgcagaggggatccggggcgtctgggacagaaaatcccacagctttaccaccggccccaccgtggggtcgaatgctccgctggacaggcggcagatctccaggttctgctccaggaaggtgtacagggtctcagagaccggcacagcctcgccgggccggatgtcccggcagagcctggaaagctctgagtcgggatcgaacatgctgagggtgcgctccagcccgtgggcctcctcctcgcactgctccagcagctgctccccgtcctccgggatttccgccgcgatgcggcagagggtgtcgtacgccaaaaatgcgcgggtatgctccataacggttttcctttccggttcttgtctttactggaaaacgccgtccttgcgcatctcctccaggacaaccttggccatccgcaggtagttgatgaacgcaggatacatcggccggttcttgggatccatatccagatgcgcatggtctgggttgggattgtcccagatcatgcccatatcccgtccggcggcgtggggcaggccggtcagatccagcatgttctgggtggcgcagaccttcaggttcaggttgtccatctgggtgcggaagcccaccaggaaggcgtggcggtcccagccggaggggaacggatcctcataggcggggcagtcgtatttggactggcggtagtactttttcagctcggggtggacgatgtcctcctcgttgtctgcgaagatctcgtcaaagcggcaggagcggatcctgccgttctccaccaccaccttcagccagccggtgaggccgtagccatagtcctcggaatagctgtacagcttcttggaggagggctcgtccagctccttgtccagcttggccgcgaaggtcagcagcttcttcacgctgccggaggcgctggccaccagatcgaagtctccgctcaggctctgtttctccagcatctgctgctccacgtactgcatacccatggtcagcacggagccggccttctgcatccggggcttcgtgtactgccagaagctgtagctggagcggcgcttggagatgccctggtacaggtggttgtaataggagggagccgtgatctcattgagctccacaaagatcagcttgccgtcggccttcaccgcctccacaatgcccaggtgacccggatcggcgggaaactccccctctacgccgggatagtagggcgggaaccgttcctcgatccgatagtagtcacccttcagcatccccttggggggctggacggaccagacgggcttctttcctgcgttatccatgttcgttcctccttacttcacggcaccgtccttgaccatctcgtcgtgaacgatcttggccaggcgcagatagttgttccacacgggagagcggggccgggtgacagaacgggcggtggcgtcgctgttggagacgagtgccacatcgtccttgtggggcttgtcccacaccacgcccatgtccgggccctccacgcagggcagtccggtgatatcgaacatatcctgtgtttcgcagaccttcttgttgatggcatcggactggtccttgaagcacaccagccaggcgtggcggtcccagccggaggggaacgggtcctcataggtagtggagaaatacttggactgacggtagaactgcttcaggtcgtcgtaaacaatatctttggtgtggtcggcgaagatctcatcgtagaagcacctgacgatcttgccgtcctccaccaccacctggagccagccggtgataccgtagccgtaatcctcggtgtagccgtagtaccgctgcttcttgtggttggagtccttccgctgagcggacacgtcgtccttcaggccgatcatgttcttcatggagaaggaggcaccggtcagtaggtcatagtcagcgtccaggtcctgcttttccaggatctggtcctccacatatttgaagccgttggccagcacccgcccataggccacgctgcggcgcttgtcatggaagtcctggaagaactggaactccgtgcggcgcttgctgacattctggaagtggcggacatagtagttgcccatggtagtctcgttgaactcggcgaaggcgatcttgccgtcgtcgtcaaacaccacgtccagctcgcccttgtggccggggtcgccccagcggccgctgtaccgcagctcggcgtgatagtaatcgcccttgaccaggcccttgtactggggctgcgccgtccagtcgatcagctcgctctcgttgtcctcatgccaggggcccagccccagccatctcgtcttgtcaatcatgtcaaattcctccttatgattctgtccgtcacttggacggggtttgctcttccagggcgccggcccggcagcaggcgcagaagtggccgctgccgaagtcccgcagcgccaggtcccggccggtgcagccctcccgggcgtacaggcagcgtttggcaaagcggcagcccggctccgggtcaatagggctttgaagttcgccgatgagcttcacccgctgcattttctgccggctgctggggatgggaatggcagacagcagagcctgggaatagggatgcagtggctggcggaacagctccgcggaatccgctgtctccaccaactggcccaggtacatcaccgcgatcttatcggagaagaacttcaccaccgacaagtcatgggtgataaagagataggtcaggtggaactccgcctgcagatccttcagcaggttcaggacctgggcctggatggacacgtccagcgaggacaccggctcgtcgcagacgatgaactggggctgcagggacagcgcccgggcgatgcccacccgctggcggcggccgccgtccagctcgtggggataggcgttgaacagccgggcggagaggcccaccacgtccatcagccgggagacctccttatccagctccgcacggctttgggcctttgcgtgaatccgcagcggttccccgatgatctccccaatggacatccgggggttcagggaggagaacgggtcctggaagatgatctgcagatccttgcgcaggtcgtgaagctgcttcttattcatcttgcagatgtcctgtccgttgaacaagatctcgccgctggtggactggtgcaggcccaagatcagccgtccgatggtggacttgccgcagccggactcccccaccaggcccagcgtctcgcctctccgaatggaaaagttgacgccgtccaccgcatgaagggtgccggtggggcttttgaaatacttcttcaggtcccggacttccaggatgatatccttatctgccatgtcgcacctcctccatcagttcgggggattcgaaaacgccctggtgggccaggcagcgcaccatctgggtgccgccgacgccggtcatctccggcttgcgggtacggcaggcccccgttgcgtaggggcaccggggtgcaaaggcgcagccctccggcagctccgtggggtccggcatctggccctggatgggcttgagcttctccgccgtctcatccagagacgggatggagccgaagaggccgatggtgtagggatgatgggggtggtcaaacacctccgcgatggtgccgctctctacgatctcaccggcatacatgatagccacccggtcgcagacctgggccacgacgcccaggtcgtgggtaatcagcagcagggaggtacggagcttttccttcagctcgttcatcagttccagcacctgggcctggatggtcacgtccagggcggtggtgggctcgtccgccagaatcagctccggcgagcaggcgatgctcatggcgatgaccacccgctgcttcatgccgccggaaaactggtggggatactcgtcatagcgggcccgggggatgcccaccatctccagcatatcgccggcctttctccggccctcctccttgctgcacttttcatgctggtggatgacctccgcgatctgatcgcccacggagtagaccgggttcaggctggtcatagggtcctggaaaatcaccgagatcttgctgccgcggatctcccgcagacgggcgggcttggcctggagcatatcctcgccctcgaaccagatctcgccgcccatgatctttcccggcgggtccgcgatgagccgcaggaccgacagggccgtggtggtcttgccggcgccggtctcgcccaccagacccaggctctcgccctttccgatggtcaggtccaggccgttgacggcgtagaccacgtcctcgtcggtgtggtactccacccgcaggccgcggatatccagcagggcctccggggcctgcgcggaggggatgggctccgtctctggcaaagcggtcttgtgctgcttgttctcttccatgtggcgtcctccctcctcagttcttcagcttggggtccagggcatcccgcaggccgtctcccagcaggttcagggagaggatggtcaacatgatggcaaagcccgggaacgcgcacacccaccaggccgcccggaaatactgccggccggtgctgaccatagaaccccactccggcgtgggcgggctgatgcccaggccgatgaagctgaggctggcgatagccaggatggacccggcgatagacagcgtggcctgcacaatgatgggggccatgcagttgggcaggatgtgcttgaggatgatgcgcttgtcgctggcgccgatggcgcgggccgcctcgatgtactcctcgttcttgatggtcagaacggcggagcggacgatccgggcaaagggcgggatgttggagatgctgatggccagcatcatattcgtgacgctggtgcccatggcggacaccagggcgatggacagcaggatgctggggatcgccaggaagatgtccatgacacgcatgatgacatcgtctacccggcggctgccgtaaccggcgatggcccccagcaggccgcccaccactgtggcaatggcgatggtggcaaaggccaccggcagggagatccgggcgccgtggacgatccgggccaggatgtcgcggcccacctcgtcggtgcccagccagtgctcgacggaggggggctggagcttcagggatgcgttctgctgaatcaccagcgtctcgtagtcaaaaaacacatcggcaaagacggcgaagaagatgatgacggccagaatgatgagtcccagaacggccatcttgtttttcttcaggcggcgccatactgcggcggcctgggactttttcttgttcttgtttttcactttcccagtcatccgcatcacctctttgccgttttgtactgggcccggattctagggtccaggaatgcgtacaggatatcaatgcacagattgatgatggtgaacatcgtggccagcaccaatacgcaggccaccaccacgggcgtgtccttcaggccgatgcagtccaccagcagccggccgatgccgggccaggagaacaccgtctccaccagcactgcgccgcccagagagaagccgaattgcagtcccactgtggtgacaatgggaatcatggcgttgcgcagagcgtggcggatggtgatgacgctctctttcaggccctttgcccgtgcggtgcggatgtagtcctgccggatcgtctccagcatggaggagcgggtcatgcgggtgatcatcgccagggagttggcgctgagggtgacggccggcagcaccagagcgccccaggtctcaaagttggaggatgggaaccaccccagccccgctgcgaagatcacgatcagcatcagccccagccagaagttcggcatggagacgccgaacagagcgcccaccatggaaatgttgtccaccgccgaatactgatgggtggcggagatcacgcccaggggaattccgatcagaatggcaaaaagcatggcgcaggccgacagcaggatggtattgggcagccgggcggcgatctccgccgccaccgggttgccggtgctgtatgaggtaccgaagtcaccgtggaccgcgttgatgataaaccggccgtactggaccaggaagggatcatccaggcccagctcctcctgcatggcggcgtaggattcctcggagtagttgtcgcccagcatcatctgcaccgggtcgccgggggtgaagctcaggatcgtataaacgatgaagctgacacccagcagcaccggaatcagcatgagcagccgtttgagaataaaacggtacatctgtcactctccttttccataacgcaaattcgcgcaagcggacggcggcttttgccgccgcccgctcactggaatgcctgaatgcgcttattcaaaataggtgccgttgatgtagtgggacttgcccggatacaggccgaatcccttcacattggactgcataccggcgttcaggtgctccaccgccatggggaccaggggcgcggcctccgccactttgctctggatctccgcatacagctccatggcgtgctcggtgtcggtggtggtgctggcctcatcgatcaaggcgtccacctcaggcgtggtccagaagcagcggttgccggagggccccagagcctccgtgtggtacatggaccgcagcatggagtcggggtcaatggaggtcttggacatgatgaacatatcatgggcgccgttgccggtctcagactggaactgtccgctctccagggtcttgacctcggcgttgatccccacctggcgcagctgctcctgaatgaccacggcggagtcccgcatcacctgggtatcggagcaccagagagtggtggagaagccgtcaggatagccggcctcggccagcagctccttggccttctccacgttgcaggagtagtcggagcagtcggagacgtagccgtccacactggggggcagcatggtgtagttggcgggtgtggcctcgccgctgaacaccaggtcgatgtagccctgggggtccagcgcgtaggcgacggcctgccggaccttctcgttgtcaaagggcgccttctgcacgttcatgcccacataccacacggtggtgctgggggaggtgagggtggtgacggacgcgttgtccgccaggctctccaggtcggtgatgcccaggtcataggccaggtccacctcgccggtctccaggccaatggtgcggttcagcgcctcgggaatcgtgcggaagatgacgcgcttgacggccggagcgccgccccagtagtcctcaaaggcctccaggaccacgtcgccgcccagctcccaggagacgaacttgaaggggccggtgcccacggggttcttgttgaactcctccgcgctggtgtccgcgctcttgcagatgatggaggccgcgtccaggctcaggcggtacagcagcgcgttgaagggcgcggaggtcttgatggtgacggtgtagtcgtcgtcacaggtgatgctctcgatgatgaggtagttgtaattcacgccggggtttgcgatgcagcgctccaggctgtacttgacatcctcggaggtcatctcctccccgttgtggaacttgacgccctggcgcagatggaacacggtggtggtatcgtcgataacctcccagctctccgccaggcccggcactaggttcatgtcgttgtccatcatcaccagacggtcaaacatctgggtggtgacacgataggtcccgatggaggcctgcaccatgggatccatgtaggtgggggactctgggatagcaacgatcagggtatccttggcgccatcgtcggaaccgtccgtggtcgtcgagctggaaccggtggggccacagccggccagcatcccgcagagcaggaacattgcggtgaacagtgcgaaaactctcttcttcatcgtactcctcctgacgtggtggtgatatatttctgaaaccgcccccggcggtcacattcctgattgtgtgctcagcgcaggccgtcggccgccagagcatcctccatccgcctcgccagctccagatagttgtcccattccttcgctcgcttgggctcctccgtgaaggggagcccggtcaggtcggtgaggctctgggtctccagcacccgggcgctgagcaggtcgaagatgctgttgaacccggccccgatggtggagatgtagtccgggcagtgatatttggactgccggtaatagggcttgagctccgggtcctcaatctcctcctgccggtcggcaaagatctcgtcgtaggcgcaggagatgatctttcccgcctccagcacgatctgcaagcgcccggtgacgccgggctccaccgcctgggacaggccgtaatacacctggccggagggcttgtccagccgccccgcgatctcctctgccagtgggagcatagaccgcttgatgctgttggaggcgccggtgagcaggtcaaactcgcctgtgaggcggttctccgccaccatctgctcttccagatgggtcaggccgtttaccagcaccacgccggacttggcggtccgctccttggtggcctgcagaaagccgtagtcggacagccgcttggaaacgccctggtaccgtctgatgtaataggtggggttgttaatctcgttaaactccaccatctgcagggttccgtcccgccggaccacttccagaatgccgtgataccccttgtcccccgggaaatgcggggcaaaccaattctcagcccggtaatagtctccctttaccagccccataggtggctgcaccgtccagaacagccggtccagcacgtcaacggacttttcgcgcttcttctcttccatgcctctcttcctttccctcattttgatccgcattccaccgccgggtgcggatcttgtattctttgaaaattggcgctataatgattgataaaatctgaacgcccctctgaccgggcgcctttgttttgcctgttacgattataacatgctcccctggctgtcggattataggggattttgttaagccttcgctatttgggattaggtccctccgccgttttgagaaagagagcgcgacatgaacacagaacacctcgtctatatcctggaggcgtacaagtgcggctccgtcaacaaagccgcccgaaactgctatatctcccagtcccatctcagcaccatcatcaagaacgtggaacaggagatcggctatcccctgtttcacaggacggccaacggcatcaccgctacgccggagggactgattttcatgagccacgctgagaagatcgtcaccgagcgcaataatatccagaagatcccgcaatccatgtccgagagcgacagcctctccatcatttgcgcccgctccgcctttgtgctccagtgtttctttgattacaaaaactgcttccccaacctgaacaggacccacgacaaatttctggaggccggcctccgggaaaatctgaaaaacgtcgtggcccagaactgcaggctgggcatcctggtgctgttcgagcaggtcatccccaagtacatggatctggcggaccagtacaatctggagatgacggtcctccagcgctccattcccgtcaccgcgctgatgtccaagtcccatccactggccaactcttcccgtgtctcgctcaaggatctcacagggtatccgttcatcgccgacgcgcacatcgatccggacgatacgctggacgtgctgggactccagagccacacagacctgctgtacatctgcgaccgcggcacgatcttcgacgcggtccgcaaaggcaattacatcgccatcggcatcagcattccggaggaggatgtccggcggatgaactgcgtctgctgtcccatcgcggacggcgctcccatggccgtggccctgctgcattcccggacatttacgctccgccccagagagaagcacttcattcgctatctgactgaccgcctgcacaagcgctattccggataaacggcgtgccgcctcccacagggcagtttgtccgcatcggcgtgtgtccctgttggtgcgatggctccaaacattgccgacagcgtgtgcaggaacgccttttgcacgcatcttgccgcaaagatttaaaacccccaggaactgctgcgcagcggtccctgggggttttaaatagcggctgacttcattctcgttatatccaatgccgtgggctcaattgggtaacttcccgtatgttttttcaatcagagtcctgcaaggggaataaaaggcatctgccaggaggcagccgccgcaatctgccgtcgcggaccgctgttccgcctgtttcaagggcttctgcggctgctggcaccgctgctgtgagcggtcctccgcagactcacggcttctttgtgcgcgggagcagagcgcctccctgccggtcacgggcccgggagccgtgcccgcggcagacggccgctcccggcctcagcctctccggctcgttttcaaaaaattcatgaaccgttcacgaggcaaacatagatgaggccatccgggagtagtatacttccaaaagtatagacgagatcgtctgtaaaatcctcaggcagtagccgccgcgggttgcaaacctgacggcgtgtgtccggtcccataccggcgcggaattggtcggacgtcaaaatggcctgtccgtccggacgttttcccgctgcccgcccgggtgtctccctggttccgggttttggcagggccgggggttttggatcaggcagaaggaggatatgcagcatgacgcagaaagagcgccaggaacgcagcagaaaagagatttatcaggccgccctggaggagttcgggacctacggctacgacaaggtcaacatggagcggatctgtgggaaccacgggatctccaagggcatgatgtaccactactactccaataaggacgagttgtttttactgtgcgtcgaacgcactttccaggagctcagggcccatgtggaacgggatatggcccatctgtcaggggaggatacggcagccgcagtcaaagatttcttcatgatccgggagtgctttttccagcttcatccccagcaaaagctcgtttttgaaagcgccatgctccgtccgcccaaacatctggccgcgcaaattcaggccctgcgcgcaccgatgcggcgcttgaatcaggaatttatcgaggggctcatagacaaaatgccgctgcggccggatttgaagcctgaaatggtgacccgctatttggaaaccatcgagtctcttttccagaatatgattgtgagttatcagggcggacatcccgcgcaggatttccatgccatgctggaaaccgcaggcgaactgctgaatatggtcctatttgggattcttcgccacgcagatccggcatgatctccggttcggtggataacgtgatctctgccgcggcactcccctacctctttggaatgcggctgctgtacccgggcttcagcaaacttgtcagctcctttaatctgaagcggccgggggggaccaggccggggccggtgcaccgccttggttcttctattggcagcgggcggacttttcccggtctgcgcccctctccgggctgtccgcacctcagcatcctcagcgggagcctgctgatctttcaggatgcggcctcgatcctgtgcgcctgcttctccggccggttctggcggcaaaacagcaattgatgataccacaaggaggatttatatgctgaaattacttcgtaacctacggcggcaggagtgggccatggccgccgtgtgcgcagtgctcatcctggggcagattaatttcgatctggcgctgcccgactacatgagcagcctgaccgttctgattaaaacgccggggagcaccctgtcggacatcctgcataccggcctggaaatgctgggctgcaccctggccagcgcggtgctgtgcgtcatctgcggctatctgaccgccaaggtggctgccgggttcagcttttccatccgggaggcggtgtttcataagatcgcagacttcggccaacaggagatgatgaccttctccgtccccagcctcatcaaccgcaccaccaacgacatcacccaggtgcagatgctgacggccatgggcctgcagatcctaatcaagtcccccgtcatggcagtgtgggccatcatcaaaatcgtgggcaagagttggaccctctccgctatcaccgccggatttgtggccgccctgctggtgatgatggcggtcatcatcggcgtggtggtgccccggttccgccgggtgcaaaagctcaccgaccatatcaacctggtggcccgggagaacttgaacggtatcaatgttgtccacgcctacaacgctgaggactaccagaacgccaagttctggaagggcaacgaggaactgatgcgcacgcagttgttcaaccagcgggcctttgccttcctgatgcccggcgtcaccctggccatgaacgcattgtctctggtgatctactgggtgggtgcctccatcgtgaacgccgtccctgccgcggacaccgccgcacggctggccgccttcagcgacatcgtggtgttcggcacctacgccacctacgtcatcatgtccattatgatgatggtcatgattatcatgatgctcccggcggcccaggtgtccgcccagcggatcaatgaggtgttggagacccggaacagcctgactcagggcgcccgcatcgatgccctggaaaccggtactgtggagttccgggacgtctccttccactatccctcctcggacaagaatgtcctggagcacatcaccttccaggccaagcggggggagaccgtggcctttatcggcgccaccggcagcggcaagaccactctggtcagcctggccgcccggttctatgatgccacggagggcactgtgctggtggacggggtggacgttcgggactacaccttcgacgccctgtatgaccgcatcggctatgtaactcagaaggccatcctgttctccggagacgtccgcggcaacgtgctgttcggcgccagccggggcaaggattccgatgcggacgttcaaaaggctctggagctggcccaggccagcgagtttgtggacaggatgcccggaggcatccatgcccccatcgccgagggaggcaccaacgtatccggcggccagaagcagcggctctccatcgcacgggccctggcgaggcgcccggagatcctggtgttcgacgactccttctccgccctggactaccggacggataccaggctccgtgccggcctggaccgggagctgaaggataccactcgactgatcgtggctcaacggatcggcaccatccggaacgcggacaagatcatcgttctggacgaggggaggatggtggggatgggtacccacgaggaactgatgcagacctgcccgatctaccaggagatcgcccggtcccagctctcccaggaagagctgggggcttaaggaggaaaccaagatgccaaagatgatgcagaacagaatgtgcgcgccgggaaagagcaggcgcggcatcggcggtgtgctcagagaactgttcacctattccaacaaattgaaagtgccctctgttgcggccttttgcttcgccgtggccggcgcagtgctgaccatcatcggccccagcctgctcagtcggatcacggacctcatctccgacgccctggacggggagatcgatctggccgccatcggccgcaccggcgtaatcttgctggtgatctacggcttcagtgccgtctttacctatgtggagcacttcatcatggctacggtcaccctggagctgtcccgggatatgcggcaggacctgtcccgaaaaatcaaccgggtgcccatgagctacttcagcaaggtgtcttatggtgacatcctcagccgcatcaccaacgacgtaagtactctgcagcaggccctggccaacagcctgccctccatgatcagcgcagcggcccaattcctcggctgtctggtgatgatgtttgtcactgagtggcgtatggcgctggcagccattgccgtcacggcactgggcttcctcatcatggctgcggtgatgctccggtcccagaagtacttcaccgcccggcaggagaacctgagcaccctgaacggctatattgaggagatgtactccggccacgacgtggtgcgcctctcccgggccaacgagcaggtaaaagagaccttcggcgggatgaatgccgttctgtacgacgcagagtggcgcagccagttcctctccggcatcatgcagcccctgatgacgatcatcggcaacctgggctatgtggcggtctgcgtcctgggttccgccctggccatgagcggagagatctccttcggcgtcattgttgcgttcatcctctatgtgcggctgttcacctctcccctgagcaccctggcccagggcatgacccagatgcagacggcggcagccgccggcgaccacgtcttcgactttctccacgagaaagagctgcccgatgagaccggcaagcgcgccgaactctctcctgtgcagggcgaagtcgaatttgaacacgtccgattcagctatccgaatcatccggataagatcatcatcaaggacttctctgcccatattcagccggggcagaaggtggctattgtgggtcccaccggagcgggcaagaccacgatggtcaatctgctgatgcgcttctttgagatcaacagcggaaacatcaaaatcgacggcgtgcccacctctgaaatgacccgggagggcgtccacgacctgttcagcatggtactccaggacacctggctgtttgagggtactgtccgggaaaatctggtctacaacaagaccggggtcacggaccagcagctggaggaggcctgccgggcctgcggcatctatcacttcatcgaaaccctgccccacggctttgataccgtgctggatgacagcattgccatttcctccgggcagaagcagctgctcaccatcgcccgggccatgattcagggcaatcccatgctgattctggacgaggccacctcctcggtggatacccgcacagagctcatcacccagcaggccatggaccggctgacggagcaccgcaccagctttgtcatcgcccaccggctgtccaccatcaaaaacgccgacctgattctggtgctgaaggacggcgatatcatcgagcaaggcacgcacaaggaactcctggccaaaggcggcttctacgctgacctgtacaacagccagtttgaaaaggcctcgtgatcccaggaagaggggggcggctgcgatttggacagtatggaaaatcagactccgccgtgctgaagcgaaaagaacagctcccgcttttcaagccattcctttgaaaagcgggagctgtttccctttccggagagcctggtttgctttggaggcagggctccttccacccgggccccccaatgatcggcattgcagcaggagcccccgtccatccctcccaggatttgtcaaatccgttccagcttcgcccggaaggatatctttcggggcgtctccatctcatcgaactgtaccacatgagcacccttgtccatgtccacatccagcaccgtaccggagccgaacagaatatgcttcacccgctgccccacggagaatgccatgttcccgtcggtctccggcagataggtctggctgtggccgatatagtcccgggccgcccggatcaagccctcctccggcggccgggtgaaggccaggagattgcggtcgatgtccagaagaaagcgggagggataccggggggtgccgtcgaagttccgtccgtctgcctcggagatgtacagtcccttctccgcccgtgtcagcgccacaaacgccagccgccgctcctcctccatggcctgctgcgtccgcaccttccgggaggggaagatcccctcattcatgccgcagaggaacacatagggaaattccaggcccttggcggcgtgaacggtcatcagcctcaccttgtctccctgctccgccgtgtcggcattggtgaacagagccacatgggccagatagtgctccagggtgacctcctccccgcaggtggtctcgtactcatataccgactgcttcagctccgccagattgtccagccgttcctggctgccctcggtgcggagcatcttctcgtagccgctctcattgaggagggccgaaagcacctcggacaccggtctccccccatatccggcggcaaaggactctatcaggccgacaaaccttccggcgcctgttcctttgaaaagtgggtcctccagattgtcctgcagcgcctgatacagggagcggccctgcctctctgcgtactcctgcaaaaatgccatccgccgcttcccaagattccgcttggggacgttgacgatccgccggaaggaaaggtcgtccttgtaggcaatcatccgcaagtacgagagggcgtccttgatttccatacggtcaaagaactggacgccgctgtaaatcgtataggggatcttctctcccagcaggacttcctccaccgcccgggtcacatagtgggcccggtagagcaccgtcatgtcccggtatggcgtgcccgcctcgtgaagctccttcatctcccccgctatccattcggcctccgcctcctgggtctgcgcgaagtggcagatgaccggactgccggagggcagcgtgggctgcaattcctttttgatacgagtccggttcttgtcgatcagggaattcgcggcagagagaatctccggcgcagagcggtagttctccatcattagaatcgtttttgtccccggaaacttcttgtcaaagtccagcaggtacttcacgtcggcgccccgccaggtgtagatggtctggtccgggtctcccacgatgaagaggttcttgtggtaaccacacagaacctccatcagctcgtactgaagctggtcgatatcctggaactcgtcgatcatgatgtactccagccgctgctgccacttgagccgaatgtcaggatgctgctggaaaatatacagggagaacttgatcaggtcgttataatccagtccgaaacacttcttctcctgatacagatagccgtagaaaatgatgtctgccggggtgtccgcctggtcatacttctccttcagcgtgtccagaggcatggcgatcatatccagatagtagtccggacgcttgaacagcttctgcatctcgaccatgtcccgggctgcggagaaggtcatatcccgcagcgtcaatccccgctcctcgtagatgatttggagcatagcgtcgatgtccgcgttgtccagcaccagaaagcttttgggatactggacggcgtagctgtcctcctggagcacggagacgcagaaaccgtggaaggtgttgatatagcccgtgtcattgtcgccggtgaggatgtggatgcgctggcgcatctcatttgcggatttgttggtgaaggtgacgcagaggatatttcccggcaggatgcccagctcgttcaccagaaaggcaaaacgatgggagagcgcccttgtcttgccggagccggctccggcaatgacacggacaaatccttcggtttcggtcacagcctggcgctgggcagcgttgaggccggagagcaaatcggtcatcgtggcgtcctccctgtcgaacatctgtttcttccattatatcagaacccgcagatgttctcaacctcttctgaaaaatccatcagatctcctatggctgaggtttggcatacgaagaacagggaagaaggatgcagacattcaaattaaccgcaggtatagggagtccttgtgccgcaaatcacacttatttcaggccaagttcacaaatcatatcttctgccttagaaaattcttttttggaccatatttcagtggcataacaggaatttgacctctatcatttcaatgttttgtactttgccggtagcataggtgcttaatacaagaaagtatgaaccccttgcaatgcaaggggttcatacttaaaataaccctgcctgacccaaaataacgccaagcattcgcccaaatcaggcagggtcattcattttggcgcagcgggagggattcgaaccctcgtgcgattgctcgcaaactgatttcgaaggataaacagaatcccataccgccacatcgagccgttctaggtcaattaaaatgtgttgttttgctcaaaagtcgcacctttttctctgatgcagaggaatattcatgtagcatcaaaacgagtgagggcaccatttgggcaccataagcatcaaccaaaaatcagccgttctagttgttgatatacttgggtatccggtgttattaatggtgtaattgtgtcacgaataattgcttcaccattatttccacacgctgtaagtccaagcaactttttgatgttggttactatatcgttgctagcagatttaatatcatccgtggcatttcctcgactaatgctagcatttatcgcctgttgctttattgtaagggcactattttccaactctgctttcccaactgtagcgcaccattttttgattatttcatcgtccagtaaataggattcaaggtgacgcctatccagcaccttaattcccttttcagaaagttcttctacttcattttcacttcgatcatctcgatcaataattcgaatgacattggtgttcgggacaatagcttgtgttagcccaattacctttagtttgtcttcctcgatgtcgttgcagcctcctaatgagtagaacacagtgctcgggtgagttgtgctgaaaatatttgcatagcactttgcatcaaagtctttccgtttcctgcccctagtagtcccttcgcagaacactactgtttccggggcaagtaaggtagagtaattttctaaagtcaaagatagaattctattccacaaattatgtgaaacgggagaaggcataatctgaactacatcatcaaaatcaaatccatcaaaatttaagaatgcaacacttcccggacattcggcttcaagttctttggctttatttagcataccaagtgaatgcgtagcaatccataactgaccatttgctccgatcagagtgtaaagttcacctaagagtttttcctgtaatgctgtatgcatatgggcctctggctcgtcgatacagaaaatggtgtctggatagtatttttgcttaatgaccaagtctaatatcaaatcaaacgccgctttttctcctccagagagatttttataggagtaatttttggaaacccctttgtcaaaaaggaagtcgccattttctgtgggatttcccacaccagaaagagttaagtcaccaaaaaggcgagttagagattctcgaatttttccgattaattcatcacgtagtgtggctaccgatttctcgttgtatgatgtatcatatacacattcaagcgtcttagaaatcaaacgatggtagtttttcgcaacctcctgatcgttctctatcatcatgtttttatttgcaattgctgtaggcgcttccaccgccgatatacctttgatagctagagaagggtcattccgatacgcggttcgaaaatagaaaatcgaatggtttttattggtatcctcaccatcataatcataaaatgataaatcaactaatttgtttgaattttcataaccatcttgccctactggagttttattgcagtagctttggtctgtggggaggccggtatatcctttccacaattgccaaaccttaaatgcatcaaaaacggaactcttaccacatccattcggtccaacaagtacaaccaatcgagcacttgagggaatagctgttatagtcaaatctgtgaaacgtttaaactttttcagatgaatttctttgagtttcatataaggatgccaacctttctacaggttttttcaaattatagcatattcttaaagaaacagcaaggaacgtgtcaccggacacgttcctcttttactttgattctggcgctttccaatatgtattccttgatagccagctttggaatacgccatacacggccattccgaaaccccttgagcttaccgctgtttaggagatcgtacatagcattgtagcccattctcagggcttcacaggcttcttctactgtcagaatatcaggatattcctctaacattcattccacctcctgcaccgaaagatgggcttcacagcggggacaagcgctcaaatcaagcgagcaggagtcacataaacaagtaggagccttgggcggcgacttgtggcgcttggggttcagcgtcctttggtagagatccattttctcaatttgctgcatgactgccggctctgatctgccaacagcaaaggcgatttcagaaatgccgtagccttcttcaaacatcatttttacagttcgcttttcatcgtcccgccaaaactcaccttcgtgatcgaagcgaatcgtgccgttacggtggcggcgaatcatttcacgttcaatttcaggactcatcatggtttttctctcctttttcagattgatttaccatgatgttcctttattacgcacaaaaatctcaaaaaatctgtggagcgaaagataaggacatttattgtccatgccgtgtgctattctctaatcagtctgatccgttgcgcaaccatcggcttattctcctgcctatgttgtcaacaggtccggttaggcggcggatgttcgtgattgtggcacgactccgccgctgtttttccttaatacactgaaaggaacagcctatgaatatattattatccctcaagaaattctcccacattggctattacatacatgaagcccgaacaaaagccaaagaaaggaaaaagcaccatcgagatcgcctgaacctgtcgaatgaccaaatcaagtatttggataaggtcgttattccggaagggtgctcctaccaagttaatgaccacactttttccagcatagacaaggctttagcttattgcaagcggctgtccattgaacgatgcaaaaagatatggggagccggaattcccatcagtattaccaacccgaatgcacccaagatatttgattgcgcctgtttgcctgctggactgcttgtaaaggactccaaggactttctatgtcggtatgctcctgtccgtatcatcataattgctgtagatctgagcgaggtttacacggaatattttgatttgtatgaaagcgatattttctccaatgaacacctctatgactacggacttctttacggcaattatcctgtctatcaggaaaccgagctttgcctaagcaaatttagcgagcagtacaccaagcagatcaacacgccttttgtcccagaacccgcctttggtgatccgtccaaagaatataccgggctgatggatgttcatatggcctacgattgctattccgtggaagtgctctctgacggcactgtctatgacgatgggaactacgcatttcctttgggggccattccagtatctacatttgtgaatatcggcagcgctggcgtgtattgcaagtgctggaatcttttttgggggtgctcccgctcctttgaggtcaatggcaaggaacattctcttttccgctctgcgctgttggcctgtaagcagtccgaattacctgttggaaaagagttctataccatcatcatgcaccagaaagaagcagacggcatcataccagcagattcactcccggtttccctgcgggacagctattcagttatgactccccacgcaaaaaagagggtgtttcatatttcgccccaatttgacgagatatattgggaaacatttgaactggcagattcgagcggaaatatccgcaacttttgctatgaccactggcttttagatcataactgtgaatggaacgtcggagatatctgtaagactacctattggggaaaatcccggtggggcaatccttgtatggatagaggtatcaaaattacatatctcccagatgctaaaaccccatactatggtagaggtgatttggaactttattgcaagatttctgtagggagcaacagtctaaacatccctctttccacactcattaagccatcttccacagaatgaaatagcaagtgagagtgacgagactttttgtgttctcgtcactctcacttgtttgattattctttgctcacttgttttttgtgtttaatggcacgtttagaatatttttcgactttggctgcttttgcgacaaagaagaatatagactcgccgaacaaaaataactgccaaaaagatactgcacctggaacgacgaatatacccaaaagtgtaatagccaaataaactattgctcttacaggtttattgagataaaaccattgtgcgcctacaagtcccagaaaaagggttagcagtccggccaccgccttgctctttggagccattgttttactctgagtttttttgatagcggaatttgacggagtttttttgtttgcagtattaccaacaaaagaggcgtttgttttagattgttgttcagcttccttggactgaactggttccgccttggcttcttccgctacattagtggtttgcgttttttcgcctgctttgggacatggggaaacatctgaaatttctaatggctttttatccattccaacagcagactgggcctcaattgaggctgggcctactgttcctatagacgtcgaagactttttttcatcagatgtttcttcagcctcggattgaaccttcatttgaatattttccgcagtagccttttcggcagccgttgccaatggaccagctacagtttttgcgttctcagataatccgtatgcaaaagcaatggttgaaaagtaatgtgacatactggggttctgtggaatatttagtgctttgctcccttctctatagtaattacctaatttgagcgccgcaaagggctccaatttttcggcggccatctttatcatttcgataccctgttcggagtcgttaattgcacacatccatctaccaatatctccaatcgctaaaatattaccggcatcggcaaatattttggcttcacggaagtatttactcttatcttctttgtgtcctacggattgccatctccaaggggtataatctaaaactgtgtgcataagaaaggcaactaagtattccgcaaatttattgccactgtttgcacgctgtatcaatgaagtcatcttttcacgaacggcatactgttctccacaagctggattagatagcttatagtagtagagttttaaggtaatcatggcctccaaatcatcacattcagccatatcccacagcagattttcctttcctgcgattatcatctcggcaagttctttctgctttcccttgatctgcttttccagtgcttgtgccttgctcgttctttcagcttctttttctatctctattgctttcttttccaaagctttgacataggtggctacattcaagtacggattatcccttgcgagcgtttcataactttctatctttttccggatttcctcaactgttttctctggttcggtctttattgagtcaacaatctttttgtctgcgctcagaagggataatttataatttctctcgttaccaaagaacttggccgcagaatgaatatccgatttcctcccggtaaaaagattatagaggtgaacgtaaagaatggtggaatatggcgcctgttgtatgcaatcgcataagatatctatagctttttcaacattttcagcggatgcctgtgatgcaattcttgcaatatagtttttagcccttgcatttgcggcagcttcatcgaaatcatattcatcaatgagatcattttcaatcagcagtttttctacacaataaaacacttttgtgctgaaatcgtaaacggtatcaaagaggcacgttgccactcttggatcaatagcaagctcctgtttcataccacttatctttgctttgtcgcttgctttcgtaagggtatccccgataccatgaaatgcccctgcaccaatgttgaatgctcctgcaacaattgcacctttgaccgctccggtgacaccaaacccgccaccttcccaatgacctctgcttgctttttttatatctctatagtctcccaaattttctgcatagcgctgaatttccccagcttttgcatatatgtatcccagagactctttgatgttgccactctggaccaccatgtttgccaacatggtgtcatcaatgtcatcaatgccgtattccataagaacgtcaacaccgaaacgaacggcagaggtgaccttttgaacaacctcggggatttcttcatcgaaaaggcccacaaatgtgtgctttcggctcttgtaaaacttgatatattcctcttcaagactttcggccttttcaaaaaaacgctttctcagtgtattgtactccaaaaaacgaggagaaaagaaaagttctcgaccaagtaattcaaactttacatctggttctactatatattctttggctttatcggcagtttcgtcagaatatcgtgttatatctgcgccacaataagggcaaagattgaagtcatcgtttaactcttttccgcaattatagcaaaacataatgcgatcccctttgcaagtttcttgtcagataagtatagcgtaatatcgtcataaattcaatgatttatgacgatatttgtaatctaacgattttgcgatgtgcagggtacaataataaaaacccctcgtgagggaggatgtgcctcgtgcttaaatttgatgtaacaaagcgaataaaggatctgtgcaatgcgtattcttggacgtattatcgattggccaaagaaagcgatattacctactccaccttgagcgctatgttgaacaaagggactattccgtctattcctactctcgaaaagatatgtaaaggctttaatatttctctatcgcaattttttgccgaggacgaatcagtagccctaatgacttttccgcaaaaagagtatttggcccggtgggagactttaacacaggaaaaccgaatgtgcgtagacaaatttattgattttttaaaagcaaagcagagcgaaacggatagatgaataattgaatgatatattatctccatgtataaagcccgaggcgaaacagcctcgggcaaattttgtttatggaggtaattgactatgaaaaccaaggaagtatgttcccattgtgggcatgaatttccccgaacagagctgacggagttcgatggcgagttcctttgtcccgcctgtctcgaaacggagacttcggtgtgcgaagactgcggaaggcgcatttggaacgacaacaatgagggcagcggcgatttgatcctctgcggcagctgttatgaaagaaactatgttcactgctcccgctgcggccgtctgcttcacgaaaacaacgctttctatttcggggacgatgatgagccgtactgtgagtcctgccatgatatgctggacagtcggatcatccacgagtacagctaccgccctgcacccaacttctacggcaatggcccccgctttttcggcgtggagcttgagatcgacgagggcggcgagtatgagtccaaagctaagaaactgttgaacgtagccaaccgggatactgagaatatctatatcaagcatgatggcagtctggatgaagggcttgaactcgtgacccatcctatgtcgcttgaatatcagctgacaaagatgccctgggtagaggtcatggcggaggccgtgcgacagggctaccgctcccatcaggccaacacctgtggtctgcatgtccatgtgagccgggaggccttcggtgcatttgcggtggagcaggacagcgccattgcacgtgtgttgttctttgtggagcgtcactggaatgagcttctgaaattcagccgccgtactcagcgccagttggagcgctgggccgcccggtacggctacaaggatcatcccaccgaaatgatggagcatgtcaagaaaggccggtgtaaccgctatacctgcgtcaatctgaccaatgaggataccattgagttccggatcttccggggcactctgaaatacaatacgctgatcgccacgctgcagatggtcaaccgaatctgcgacgtggcgatttgtatgtccgatgatgaactcagagccatgtcgtggagtgagtttgtgtccggtgttactgagccggagctgatccagtatctcaaggaacgccgcctgtacctcaatgaacctgttgctgtgtctgaggaggtctgatatgtgctgcttattcggacttttagattacggccactctctgactgctgctcagaaaaaccacattctggcggtgctttctaccgtctgtgaggcccgtggcaccgatgccaccggaatcgcctataacaccgataacggattgcagatctataagcgtccacttcctgctcaccaccttcgattgcgtattccaaaggacaccaattatgtcatgggccacacaagaatgaccacgcaaggctgtgagaaacacaaccacaataatcatccgttcagtggccgtgcaggtggggttcctttcgctctggcccacaacggcattctccacaatgaccatgaacttcggaggcagaggaaacttccttccacaaaaatcgaaaccgacagctatgtagctgtccagctgatcgagcgatccggagaactgtcctttgcaagcctgaaacagatggccgaagccgtggaaggaacctttacattcacggtaacggacaatacggacaacctgtatatcgtgaagggaaacaatcccctctgcctgtaccactggcccaagttagggctgtacctctacgcatccaccgaggacatcctgaaacgggccttacagggcatccggctcaagctgggtaaaccgcaggaggtcaatatcgactccggggagatcgtccgtattgaccgctttggccgtattacccggagcattttcgatacctcccatcttttccgcagccgcagttactttggctggccctaccgcttttccctctgggacaacgataccgcttatgacagctatgtgtccgaactgaaatcggtagccagagccttcggatatgctcccgacgatattgatgatctgctgaacgatgggtttaccccggaagaaatcgaagaatgcttttacacgatggaggtatgacatgaaaattctcatggtcgaacccggcaaggcaccgaaggaaaagaacatctccggcactctggattccatgcaggaagctgttggtgggacgattcaggccatctatccctttgacgaacctgtggctctgatttgcaacgatgatggcaaactgatgaatctgcccatgtgccgctctattcacgaaataggggatatcatcttcggcagcttctttgtctgcgccgccccacccgggcatcggaatttcacatctctatccaaggagcagatcgagcgatacaaggagcggttccgcttcccggaaacttttctgcgtatcggcggcgatgccatctttgtgctgagaaatttgtgattgttcgttaaattgtagaaatacgactaccaaaatccagtgttttcaaggctttcagcggattggccttaaaagttcgtatttcccaggacgataattcgtatttcagactggattggaggtgcaaaatgaacaagcgaaccgtggctctgaccacggagcaatacaaggaaatcatctcaaccatgaagcagggcttcaccggatgccgtccgaacccacgggcggcaacggcactcatgctggaagcaaacttgggtttgcgcatctcggacattgttcagcttcgcctgtgcgatattgtcaaggacggcaaccgctatcgtcttgccatcatagagcagaaaaccggaaaggcccgtgtgtttaccgttcctctggcgctgtatcagtttatccgatgctactgtctggataatggcattgggagcaatgatctcatattcccggtcacggaacggtcggtacagaagcatctgaaaaccgtctgcgactatttgggtttctccggtatcagcacacatagcttccgaaagtattacgcaacggagatttacaaaaacagcaactacaatattgcgttggtccagcagctcctgcagcacagcagcgctgccgtgacacagcgctacatcggcatccagcagaaggagttggaggatgccattgaaagccatttgaaattagacgtttgaaaggaggaacccgcagtgatttggttcttggttggatttgttatcaccatgatcgctttctgcttcaccgaagtctgcaccgcaaaatgattcccgctatcatcatggatgccataactctgttcctgaaaggtgccagtgccgctattgcagtgtatgtgtccatgctcaagaaacgggacaaatgatttgaggggttagggcgctggccctaaccccttttctatatgtcaacttttggtttgggggaggggaatggggcctcaacgccctgcgggcggctcggccttcccctcccccaagcctctttcccttctggcccaaacaatacctgctcaccaaactttactgtgtcaatgtgcttgtgtcagaactactctaaattttacgggtcaaaaagcataattacggcggattcacagtcgatgattcaagctgcttttgacactgacacatcggcacaataatttatcaatcctgttccgtatgcgtgaaagcaaggtctgacaacgattgtaactttgtagccctgttattttgtacaaacgaactgctttcgtcaataaacccaccatctcttaaaaatcgcaacacaaaaagcttttcctctggtgtacctcttgtaatcgcaaggaaacatttcaacaaatcaaggtctttgtacccaagtttctcgagcgtaaagattgtttcaagtatatgatatggatccttttctgttattctttcgcatctgttgctcttgatatcggtacggcgctcctttgcgaaggcttcatccccaatcttttgaaaaagtctttgtatcaaaggaatgccaaataatgcatttttaatcacttcatgccgcttgtctttggcatcacagattcgtaagaaaacctgcatcaactcacgatcctctttggaagccaatacaccatctttataaagggccattaccgcttcatccgcataaatcagcgctggcggtcttggtgtgctattagcgcaactgagtgcaaacattataggctctgtaattgtcggcaaaaacttttctactggaaactcccccgtatagtccaatgggttatctgttttcccaacaaggtacagcggagatacatcatagattaaagcaaacagcttaagatatgttctgtcaatagatgcccttggcctgagggcattctcataaccaacaattgaaacatgggacaagttaagtagatttcctacagatgtttcagtcaatccaattctttcccgacattcacgcaattttgttgcataatacgagactgttttggggtcaatcagctccgcgtccttgagtttgctgatagctatctcggtttgcgttacatgagcaggaaattgggtctcaatttttccacaggtcttgagtacttcttttttcttgcgaggcatggtttctctcctttgtaactttctcttgttgaaaaaaggttgtttatgttgcgaattctcgactttcagttttcgtggcaggatgaaatagtcaaatgacaccaaaatcagcaaaggagagtttgccatggaaaagaaacattccaacccgtaccttgagcacattggttcacagcaaaaactattcgaacccatgatacctacacgaccaattagggacgtaaataaccactcaaaagttatttacatagacgaaaccagagaacgcatccccgatccgccgaatccgagaaatctgttaatccctatggactttcatgaaccggatgcaatcgatatgagcaacaaagagatcctcaagatgaagggccttgtttcggaaccggcgatgtacagaaatacttccatacccacgtcaacacctgtgtaccgtcagatacaagttccttcaaaggatgagcagcccacagtgcaggaattgcttccgaaagtcaaagtatcaaaagctaccgacgctgagagcgctccctctacctcagaagacaaaatgtcaccgtatgatactgcgcagtatttacttacacgcttccacatgaagtcaataagtaatgtactgcacatatttgatggtcagtgttaccggccatatccaacagatacagcgttacgctttattgttgataagtgtcgctcacaagccaaggccgccggtacccccagttttcctaaatcggtatatgattgtcttcgcaacgaacctcgcattgaatgcaaagtgggagaaaacagtactgaacgctatcgctttgtaacttttgagaatggaaccctcgaccttaaaacaggccagctacatccccattcaccccaatattttacaacatactgccttaaatgtcagtataacccgagcttcgctaatctgtctacgccctattttgataccttcctccatcagatgagtggtggtgataggttgttagaggccagggtgttggaattcattggctactgtcttgttccggatcttgatgggcgagtaattttcttgcttcaaggttactctggcgcaggcaaatctttaatttcgaattttctccgcagtctttatcccgacgaagtcgtttcatcgttgaatgtccatgaacttggtgacaagttcgctgtgtccgagttgagtcgcaaggtcatatgtttgtcgcctgaccttcccgccggagtgctcgatgataagtcagtcagtgctctgaaaaaactcagtggccacgacaaagtatcctccgatgtaaaattccaatctcgggtggaatttgagtgcgaggcaacatttgttttagcaacaaatcacatgttatgcaccaaaaggagagatgaggcattgattgaccgtatcgttgtaattccctttgccttccccgtggcaaaggaggcccgcatgccgtcgttaatcgataacctaaaggaggaaacggatcgtatagctaatcgggcactacaggcatatttttgtctccgcagtaagcattacatcttttctggcaactacgagatcaatgcggttactgaggcaacatcaatcagtagcgacctcgaatcatgtatggcagcatttgtacaagactggattattcccgatcccaatggaggtgtccataattgcgaagcctgcgaacttttttgcagcatttataatcttagtataaacgataacgctttttcccggttatttactcggtttgtttctcaaaaacatcctattgaacatggtcgggtgagattgcccggtggtggaaatcccaaaaattacataaaaggaatacgacttaaggatggagggcaagtgaaatgagaatttatgcggttttcggagataatgctgttatgattgagtattcctatgagcacgcaaggtattgcctgcacaagtacttccgtggtgcacattacaccaaagcattcggcagcattgccgaggcaacagccgaagcaaccgaccatctgtgggaaattgccccgctgaaccgggctataccggagttcctcaaacccgggaagatttactttgccaataagcttcccctgaatacccaaggagaatagccatggccaagaaaatgaaatctgacccgcctgaactgctcccgatgctgatgccggccagtatgatggcaaaggtttccgggatcggcgaggcaactctgcgaaccttgatggcacagggggaaatcgaatacctgcagatcggcaaccaccgcttactcagcgtcaatgccatctgggcctattacgaaacccataagacaccttctaagcctgctattaaggcgaggtttgacgctatccagaaaatgaatgcggagagcgcataatcaaatctgtcccggaaggcacacgccttccgggactctgatccaactataaggaggcaaaaatggctattacagaaagaaccgttcaaaataagcgtaacagtgtcggggaattaaccgggaaacccggtatagtttacgacgtgaacatcaagcacaaagtcaacggacagcagaaaacacattccaagaaaggttttgccacaaaaaaagaggccttgcagtacgaagcagccatgaaaaacaagctttcaaatccgtcctatgttgcacctacagctgcccaacggaaaatgactgtggaggaatatttggaggaatgggtcgagcggcacggaaatgctaatctccgtcccagtacaaaggccagctacaggtctcatatccgtaatcacgtgattccgtatatcggaagcgttccgcttgggcaggtaactcctgccatgctggatgatatgttccggcagttgtacgagaaaggtctctcccatagctcagtgaaatatgcccatcgcgttgtaggggttgctttcgaacacgcacggaagtaccattacatcgaaaacaaccctgcaagggacgttatcactaagttcggcaagcagggcaagactcctgacccttatacgaccgagcaaatgagcacactatttgccaatgtggctggttccaagtgggaactgatcgtggttctcggaggcctttatgggcttcggttgtctgaaattcttggtcttcgatggagaaatattgatcttgaatccaagacgtttgctgtggttgagcagctgccgttcggaataccggcgggaacagtgaccattgatgaaatggctcctgtaaaatccagtgatcgtgtcctgccgatcacagaccttactctgccatactttcagcgccagctggcattacaggccgaacagagaactttgctgaccggagcgggacaagcctgctatgacaatgatttggttatcgccaagcccaacggggcaccggagcgccgggagcgggtatcctcgaattttggtcagcttctgaggcacactgggatgcctcatatgcgttttcatgacttgagacattcggcagcaaccaacatgcatcagcttacaggcgatttttataccgtaggtatgatcctggggcacagcttgaagggcatcggtatccagctcggaatctccaataaccttgagtctgtcaccgctcagtatgtagatgtgcgtctggatcggaaacaggtggtgcttgatacataccatagagctgtgttgagtggcaccaatgtttaaataataaggccagcgttgaatttcagcgctggccttattctcaacgtatatcttttagtaacactcttatctaactatcggaataaacttccctagatattcgcgcaaagcatcatcgcaaacatatacataggttcctaatattccgcgagtcagcagaactgcgtaagtgttgagaatatagttttttaattcatcatctgctacagaccgtttcactttattgtcaaaaaagtgttttcgattaactctaacttctctgctttcagtatcataatacaaatccgggccaataactaccgcagcatagttcagatcaagcccaggcaatgaatatatgctgcccatctcctgctttgcgttcgggtttctaagccatccgccagtctggcgattccaccatacatcaactccatcgatagatatgtccggtctatcaggagagtctttcgcaatccacttccaagcataccctccacacaatctacacaagccaacagacttttctttcatatcaagagtctcaatcatatcgctaaaggagcaaaaaatcttgaattcatagtttttgaaatttaaagcggagagctgtttttgattcaatacggcatgaatatagggaacgtagtcgtttccggcgcgaatacgcatctgatcctgtagttctaccggacggataccacaatgtgaaatatcaaggcgttgatgaaaaacatcgtaaggaatatcagaaggacacgcaatttgctttctatcgtagagcaacacaagacaatcggagtttttcacaagccagtctaattcgtcatgcgtatcatccaaccccagcctagtgttgccgcttcggaaattagtaatatacatacccagatttttgtttcttcgtaatctgtgcgcctcgtcacaaatgataatgtcataatgcttttttgtaacatcaattgggctaataatctctttatcatagcccccaggcagacgcttaaatgcagatcttagttcacttcgtgtggcagaattggaaaataccaaaccgacttgctttccgttgaaatcagggttcgtcttaaggtgatagaacaaagaggatgcaatgaccgtctttccggttcctgcatcaccttccagaagtatgggcctagccttttttgcctttcgttgttttgtgatgcgctggtatgtatggcatttacaatatttgtcaaggtggcaatctgtttatctgtaaggctcgtttgaggagaatacttaaactccgttttattcaggatggcttgaaactctttgtgctttaccaatccacgctctaccagctgtggccatagcctgtcaaagcccagttcaaactcgttttttcgccgataaaatgtgcgttcaccctcactgcgattgatgacatgaaatctgcgatcaatacgcattaatttaatcaaaagtttttcaaaatgctttgccggagtttcttcaatgtcctcgcctgttattacgtggattctcttaaaatgaaaacggtaacaccaatcatccttacgatgatgctccttgcttcgttcaataatatcatttgtctcaccgacatacgcatctctgccattctctaagatatacacatagtgaaaatcatgagggaatgtccatttgccgtagtcaggggaggcatagtcatatgtcgtaatttcaaaactaactgttgtaaccatttccatcacctttgcatttaatcaggctacattgattatacaaataaaatcatacaaacacaaccgaaaatccctgttatcatatcgtcttatacgtttccgtatgatgcgtggtaaccctcaaaagctatatgagttctgcatatgatattctgaagttttatacgtttctaccgcccctctgggcaccatttgggctccacagcattcattttcgccgaatggtattcagtgcttgggcaccacaaacagggcaccatgggcaccattttggtttttgccgcaatcgaaacttaatatcaagcaaagagaaaacccttggaaactcagcatttccaagggtttttggcggaggcggtgggattcgaacccacggacgggattaaccgtcaaacgatttcgaggggaataatgcataaaatatttgctcatatttgtgcataacgttttattttgccatggaaagtagctatataaaagaaaaattccatttttcttcacactggtgaatttctgacttcatatcatcacagatcggcaaaagcaccatttcggcaccacgctaagcaatcatcctccctggggtaacgtcagagacatcgcggcttaagccgcgtcaaatgaaggccgtgcaaccccctggccggacgggggttgtaggccttcatttgacgccttcccgacagggcgccgaaggccaaaattttgacgatgtgggagcggaggtcgtagacttgtcttaaacctctatactttctatcaagtcagagctgtaagtcccttttctttcaggaacgcatcggaactattgatagccaaatcaatgtcgacctggttaattcgattgacctcggtagtggagccactggagagaacgagctggactttgcacatctggaagaggagagctaccagttggacagtgttctctgtcataagcttctccgaatcggtaaattcgttccagtcagtttttccggtaagaatcaccaagttgcccagttgggcgagatgtcgcatatacacattgttagtagcagacagagctttttcgaaccgttcttctgtcatgtgcaaagattcaagataggcacagattcggtcaatttctgtcttggcttttttcatctgttccatagcctcgtccgctttggctgagagcttgtttccggtaaagttgaagataatgccgcctaccaggagacccatgcccagagtggtggcaccaagaatggtggttccaagagctataccgccgccaccggcagccagtgcaccaccacccagggcagccagcgtggcgttagtggcagctgcaccactaagcgaggcgatggcagtgcctgtggaggcagtacccaaagccataacggcagcagtagtagcaccagcagcagcaaacccaccggcagttcccaaagctgctccactcagccctcccagtagaacaccagcaccgaccgacacctttttcagatcctctggactgtatgttggaatcgtgacgtcaccgtgcttgaaagcgcggaactccggcttattctggatgcgctcaaaaatgtctgagaacttctgaaaactctgcagaatctccagctccagctttcccagacgatccatggcagcagtgcaacgttcattccttatctcaaaccgcctgacattggctgtatgtgcctcttgagtttgcttcatggtgtcattggcttttttcattttaactccaccatgaattgcactcccaacaccagctgctccggcaactgctgctgcagctcctaaaattaaaggtaatggcatcgtaaattcctcctatttttctaaattctttagtctttggcaggcctcgcggttcaggcgataatatgtatcgataggcatcacttccttgaagaatttctggtagctctcgtctactctgcacagcaatggacgtttctcataaatgctgcacagatttccagacagatatttgcaggtgccatcgccccgatccagctctgcatacagcttagatatatccaggtgccgacagcaggctccacaacgatcacactcaaacatagcgattgctcattcgtaaatcagatgccggctcttatccctcataaaagtgtcaaaatcaccttcccagggaatcgaaatgccaagctccaccatgttctttttcaaaaagaaattgaggctcttttcatcttcgatgcagtcaatataactttcaagcggttggtattgggcggtttctttttggaatgcagccaaatcaattcttttgagttgctccatatatgtttgcagtgatgcggtaattttcttataggcatccaactgcttttgcagaggtgcttgaataccagccctgaggcaaatttcctttagcaccagcaccgtgaaacgtccccatgcgatgatgttcatacgagtaaaaaacattagccaatttccaccagaacggaccaatgcgtctgccccatccatcaaacataatgtaccatgtccgaaaaggagcattatgcgcaagtcggtatgtgactgggtggggatgcactcctttaatggcttcttgaaatagaatcgctgctttatcatccagataaaacggaccaatagctcacaaagtagtacaggaagcgacatggctatgccaaaccgggcgtcgtacccctcttgaaaggctcgaacagccaatgtggccaaatcttgtttatcctgtccaatgttgaactttccgaagttgcaaaattggaagagttcaaaaaatggaatcgccacacctgatcctcttccaatgttaccgcgactaccagaacttcccgcaacatcggacatgatgtgtccaaaccaatttacaatgccgcagaaaactttagagacaaggttattgccttgcaattcaaaggattctgttttgatagtaaccagttttcccccgctcacaaacgaagatgtagatgtaaattgatttaagactgagaaaaacaatccgatgatatcgggcgaatgtgacagagatttgatgtggtggtttttggtactcatattgaatgcaccgcccacatccgctgaatatctctggtcgtagttgactttatattgtctttccagataaccaattgcactagcaacgttgccttcttttccaggtcgtggagaccatccacttttttctgcaaatttttttacagcttcatctacttgcgcatccgtccattttccaatgacgctttggctcggtgcacctactagaaaaatatcaactaaaccagagactgccccacaggccactgcaattaaatagtcggatgaatcgcaggcgtgtttctgtagcagttcaccatcttttttttcaattaaatcctccattattgcatcccctttccttgctcattcgttttttgtgggcagtctttccaaattacacggtccccctggcttcttagccacatttcaatgcccttgccaaagacctccgcgcggatctcataacatccgtcgtgctcactgagtatctccgccgtggagagccggtccagtaccgcctccacggatggccctttatagataaaacgcaccgtttccagtttcccgccgtacatgaactggacccgcttccggaactccccctcagagaaacggcggctgtatggcacctggaagtgctcgtccagcacctggagcttctcgatcctgtccacccggtagatcgtggggaagggatcatcggcattctcaaagtgctctgcccggtcgatgccctcaataaaagcggtcagatagaaatagaactccgaaaacagcaggcccacaggctggagccgtcggctcttccgctctccctgctgggtgcgatagactgcctcgaccacggaatggctccaaatcgcctgtcccagtgtccaaagctggttcgagagccgtttcccatgatatggctccacatagtagaaccgctcgttcgccaggatctggcccaggagcttccggctctgcggggaggcacaccggctcaggagcttatccagaatcggctccatctcatccttcggcatggagcggctgtccagcaggattttgcacaccgccagcagctccccgcaggagagaaagctcccggcggcggaggtcagctcataccgctgctccttcgccttgtataggatctcctgcggcggctcctgactggcaaaaaaattacgcaggcagtcgatgtccctctggatgctgcgctcgttgacaccaaagcgagcagcggcttcttttttctgcaatccctctccgtggaccagcatttcatagagatacagcaggcggctgttcttgtctgtctccacgccaccacctcctgtctctatcatagcagcggacatagacactttttgtccatgtaaaaaattgcgctgaaagttcaacgtcattataccctaaaagttatatccattcaaccccacaagttcatttatagataaaactctccgggttaaactgatgaaaaacggaggggcgctatggactgggtatcaatcggcgggagaattcgcaggcagcgggaatttctgggctacacacgggagcagttcgcggagctgctggacgtgacgccgaaattctgctcggatattgagctgggtgtcaaggggatgtccgtccagaccctgtgccggatctctgaggtcctgcgcctgtccacggatttcatcctttttggcagggagaacaccgagagttccagccccatcacgcagctgctccgtagctgttcctcctctgagcaggcctatgcggaacagcttctgaaaacctttatcatggcaatgaatgcaaaaaaagaatcgctttgacaagcgattctttttttgcgtccactcccgatggggaatggattagatctcaccgctgtaaaacaggtcttccagctcttcagcggtgaagccttgggcggccagcaggtcaatatcctccggagaatacccaaaggccagcgccacggttttcagttcatccaaatgggtcgtgtctttttccgcatgggggaaactgcggcagtatggatcgttcatcaggaaccgggggtatctgaaccggaacagcttgctgtcatcaaaggtctcccggtcgagccgcccagtctggttaatccgcagaatctctccgcactggacaggaaccttccggctctttccaagcggtacttgaagcttccggagcgcctgacgaaggatttcttccgttgaggcatagagatagagaccgcagtccgggaagaaatacaggcagaaggggttgtctcccttgacgatgtagaaacttccgtcatctcccagcaccgtgatcgtgaaggagccttccagcagctccgccatataccggaggctgtcaaagttcagaatgcccttctgcacaatcagctggacggcgatgtagctgtccgtctcaatcctggttctggaaagatgcaggctcttccgcaggctgatgtcattgtctaaaacgccattgtgggccagggcaaaggtcccagtctgcatgatcccccggaacgggtggttgttatagttctttctggcactgccctgggtcgtcatgcgggtgtggcccatggcgaagcgggagttgtcgcggacgtagaagttcagcttgtggccgggaatgggcttcttatagatatggagattcctgccggagtcataggccacaccggtggcgtccgttcccctggcctcactggcagatgccagcgcatggagcatcttggatttttccttcccggtaaagcgcagctccgtgtcgatcaatccaaacagacagcacattgtcacacctccacttccgccatgaccggctcgttgacatacagacgccgctctttcagataccgcaccagctccggagcctgacagccggagacaaaggaagtccaggacagggctttcagctcgtcgtcagacagatagatcgccacgtcacagatccggtcaacgagctgcaacgtggcgatcagggtattgtatttgagtgttccccggaacatccggaattcgatggtgtcccggttggtgaggtttacgcaggtatagcgcccgccgtgataccccttcttggcgtgatccaggatctccatgggctgctccttatagccgtaacgggatgcccactgatccagctggtgctgggtgcggcggctgaatttcagcagctcttcccagtgcttctcgaaaaagtagaggacacgggcaatggcggtgtcctgttgttcctcagtctctccaaaagccagacgactcacatggacatggaggccacaggtcccggcctgatggctggtgtagcccagatccacagctcctttgcagatttgctcccagggtatctgctggagctggtagctcagggacatggggtgcgtgacgatctcaaatccctcttccagggagccatcatgcttgcagtagatccgttcctcttcttcgttggcgatccgcaggagttttttggcgttggagccgtactccccggctccatcgatttctagctccacgccaaagaacctggggccgtctccatagaaaatcggctccggtttgtagcagtagtcctgaatggcccggtcgccggcggtccgggtatagcaggcatggcagagcggttcttcctcgtccgggtcatcccggtcatagtaggcttcgtcgttgtgaagcagctccccgcagcggacgcagttggtgtaatagcggtcatagcaacgctcgcagagcggcgtgtcactgttcccggcattatcgtcggtccagatccgttctccacagacatgacaggtcacggtctcctctgcaaaacagcgggggcaaaggaattgcccgtcgaactcttcccgctgggagataaggtattcacgtccgcagatcgcgcagacataggtttcctctttcatcactcattcctccttcatcacttggtcgatgatcgtacataagatagcagcggcggcagccaggatgatccccaggacatttttcctggaatcagttttcaccccagggtgcagaccttgcggagcagctggtctaccagctccaccagaatagcgcggatcacggaaagcagtgtgttcagcatggttttcctcctttttcctttcaaaatgaaaaagcggcggcgattgctgaatgccaaagg

SEQ ID NO: 4954 - DNA, 1838 bp, Unknown
  gut microbiota DNA sequence
aaacatcttcaaacgatcagacggccgctggaacggcgtggtctggtactcggatgagcagagttcaaagaaacgcaaatccttctgcgggaccagcaaacaagaggtcaaagataaaatcactgcctaccttgccgacttcgaccgccagctcacggcctcagatgagtccaaggcaaagtttgaggaaagcatgggcaagtggctccgggtattcaaatttccctctgtggagcgcggcacctacgaccggctggagtgcaccgccaagtatcagatctacccgatcctcggcggcaaggtggtgggtgacatcacctcggcagatatcaaagccctgctgaatcactggatgaatgagggctacgcctacaccacagtcaagaaggtctacaacatccttaccgactacttccgctacctgactcaacaggagtacatcccgaagaacccaatggctgcggctcccatgatcaagaagtcaaacttcatggctagccagggcaaggaggatctgccaaccttcgaaactgtgaccatcttcaccccggaggagatcacaaagttcaaggcggaggctgtcaggacctgggaaaacgggacgcccatctatcagcaggcggccgcctatacgctgatgctgaacaccggactccgcacaggcgaagccctcggactgctgaacagcgacatcgatctggagaaccgcgtcatccacctccagcggggcgtgaaagaggttttcaggcgggaaggcaccgaatccaccagcggccgggaggtgaagatcggcaagctgaagagcacctccagcaaacgggatgtgcccctcaatcaggcggcagtggacgccatcctgactctgagagcggagcgatacttcggagaggacagccctctcatctcggatgaacacggaggttatacccggccggtaaacttccggaaacgatactaccgcattctggaggcggctggactggagcagcggggactccatgccctccgacacaccttcgccaccaatctggtcaacggagtcaaacagccgaatggaaccatccgcgcgctctctccccggcaggtggccgacctcctcggccactccacctcagagatcacagaactctactacgtgaaaaaggatacctcccggctggcaggaatcacggcaggattcgatctctaaagcaccctccaaaaaacgcgcccctgaccagaaaccaactggccaggggcgcaaaactttgatgctaaaatgatgctgtagcagacggaaacagtaaaaacggatgacgccagataccacattcagggcatcatttgagcgtcacccgcggtctcccgaaaatcattccctcgaaaaagtaacaaaaaaccccgataaatcggggttttcggaataaacaatggcaggggcagaaggattcgaaccctcggcacgcggttttggagaccgctgctctaccagctgagctatacccctatctcgcttgcggcactcccgtcaggcgatcaaccattctggtgggccttcagggattcgaacccgggaccggccggttatgagccagctgctctaaccaactgagctaaaggcccgtatcggcatttccttcaagagaagtattgccgccacgccgagtggcggcaatacttggctcccccagttggactcgaaccaacgacaccgcggttaacagccgcgtgctctaccgactgagctatggaggaatgtggcaggcccttgttaaaaacaagagcctgtgttggcgctacctatcttcccgggccgtcaccagccaagtattgtcagcaggaacgagcttaactgccgt

SEQ ID NO: 4955 - DNA, 3528 bp, Unknown
  gut microbiota DNA sequence
cacctgccgcagctgctccgccgcctcgttggccatggtgccgtagccctgcatgatccaggcggggatctcctcgtacccctcccaggcggtgtcctgcaccaccacgccgtgcttggtctcggcggcctccgccgcggccatgcggacgcagtcgtcgtagttgacttcctcgatggtgacctgggcgccctccttggcgatattctcataccgggcctggctggagcccttgggcatgtggaccactgccttctggcccagcttgtgagccgcccaggccacgccccggccgtggttgccgtccgtggcggtgaagaaggtggcgtggccgaactcctggcggaatgcctcgctggtcaggtagtcgtaggtcatctcgctgacgtccctgcccatctccttggcgatgtaccgggccatggcgaaggagccgcccagcaccttgaaggcgttgaggccgaagcggaaggactcatccttcacgaacaggccgcccaggcccaggtacttggccatgccgtccagccgggccagaggcgtgatggaatactggggaaagctgctgtggaagaatcgagccttggccacgttccccagggacatgatggaaagctgccggtcgtcgctcttgggcatccgattggcgacccatttgatcgaatctctcataatcctcaccatacaaaattttttagtttcacaaattttttgttagatttcatattcatcataccatagttcccccggttgtcaaggggttttccggattccacggcattttttcacagccgaaaattcccctcttgacaaataccccccaggggtatatagtaggtctcagaaagaatacccccggagggtatctctccggcagattggaggttcctatgcgagaagaaaaatacgacatctccgggatgcactgcgccgcgtgcagcgcgtccgtggagcgggtcacccggaagctgcccggcgtggcgcgcagcgaggtgaatctcaccaccggtatcatgaccattgcatacgatgaaagtcaatgcacccaggagcagatcgtggccaaggtggagaaggcaggcttcggcgccgccctgcacctggagcacccggcccccgccacggtccagaatgctgaggatgcagagaccgccgccctgaagcggcggaagatcgagctgatcgcggcggcggtgttctccgcggtgctgctgtatgtgtccatggggcagatgctgcccttcgggctgccagctctgcccctgccggacctcttctccatgcacacccatcccacgaatttcgcggtgctgcagctgatcctggccgtgccggtgctgtactgcggccggaacttcttccaagggggcttcaagtccctcttccacggcaaccccaacatggactccctggtggccatcggctccggctgctcctttgcgtacagcctggtgatgacctttctgatctccgacgatcccagctacgtccacaatctctattatgagtccgccgccgtggtgctgactctggtgtccctgggcaagttcctggagagccggaatatgcagaagaccaaaggcgccatcaccgccctgatgcagctgtccccggacaccgccatcctggcggacacgggccgggaggtgcccaccagccaactgaaggtgggcgacgtggtgctggtgaagcccggcgcccgggtcccggcggacggcaccgtcacccagggcgagagcagcgtcaatgaggccatgctcaccggcgagagcctgccggtggagaaggccgtgggcagcgaggtcatcggcggcagcgtcaatgggaacggcgtgctgtacgtccaggtgacccgtaccggcgacgactccaccctctcccgcatcatccggttcgtggaggacgcccagggccggaaagccccgatctccaagaccgccgacaaagtggccggtgtgttcgtgccggtggtcatgggcatcgcgctgctggccgccgtcatctgggccatcgccgggcagcccttctcctttgtgctgcgggtgttcacatcggtgctggtcatcgcctgcccctgtgccctggggttggcaactcccaccgccatcatggtaggcacgggcctgggggccaagcatggtatcctgatccgctccggcgagattctggagatcacccacagcgtggacacggtggtgctggacaagaccggcaccgtcaccgagggcacccccgccgtgacagaggtcctaccccatcggtgtgaggcatccgacctgctgtccgccgcggcggcggtggaggcggtgtccgcccatcccctggcaaccgccatcaccgcctacgcccaagagcatggctacggcggcaccgcccggccggagagctttgagaacctgtctggccggggcctgaaggccgtgctgggcggcgagaccgtcctggccggcaaccgccgattgctggaggagcacggcgtggacgtctcctctctggtatctgatgcggagcgcctctccgcccagggccagacccccatgtacttcgccaagggcggcaccctgctgggcctgatctctgtggccgatccggtgaaagagaccagcgccgccgccatccagaaaatgcgcgggcagggcatccggaccgtgctgctgaccggcgacaaccgggcggcggcggagcacatcggttccctggtgggtgtggacgaagtcatcgccgaggtgctgccagaggagaaggccggcgtggtggagcggctccagtctcagggccgcaaggtgatgatggtgggcgacggcatcaacgacgccccggccctcaccgccgccaccgtgggctgcgccatcggcagcggcagcgacatcgccatcgagtccgcggacattgtgctgatgcgctcggacctgcaggatgtgccccgggccatccggctctcccggctgaccctgcgggacatcaagcagaatctcttctgggccttctgctacaacaccatcggtatccccatcgcggcgggcctgctgttcgccttcggcggccctctgctgtcccccatgttcgcgggggcggccatgagcctcagctccgtctgcgtggtaggcaacgcattgcggctgggccgggccaaactgtgatttgacgggaaacgggaaaaaggagtattctatatggaagatcagactttgcaggcagtccccgccgccgaggcaccggcggaggagacagcggcaggctgtccctgccgccacaagcaccgggaggccccggagtacgactccctgatccggcggctgaaccggatcgaaggccaggtccgaggcgtccggggcatggtggaaaaagagtgctactgcacggacatcctcacccaggtctccgccatccagtcggcgctgaacgccttttcccgggagctgctcagcaaccatattcactcctgcgtggtgcaggacatccaaaacggacatctggaggtcgtggacgaccttctggtcaccattcaaaaactgatgaaatgaaaag

SEQ ID NO: 4956 - DNA, 49288 bp, Unknown
  gut microbiota DNA sequence
ccaccagtaagaccacatattctcggaaaaacagggaccacgcctttggaaagatcgttcccaaacgtgccttgaaatgccgctctccggagactcgagaagaaaacgcgtgcatattgataccgatcagggaataaggaccggcctgctcgaaaactgttcccaaaattctctggagaaaaagcgcacgattggcaaagccttcattcagtatgctggatagcagcatttctgcggagtcatgctggtggctaagcctgattgcctgttcgatggtaagctcctttaccaaaacgcctgccacgagatcgtagatctccccagggaccgcatcaaaagcggtatggtattccagcacggaaagatacccgatggtcagagagttggagatcagaggacatattcgcctccgatggggcccccagtcatcaaagatttgaaagggcagcggagttccccgcatactctccaccccatggagcatagccgcatattcaaaaagacagtatcctcgcttctttccggcagtccacacctcatcctgaacatcagtggtatcagaatatgataccgtgtagtagttcttgtcaaacactgcaatgggatttttcagcacctccgctgcccgatctaccagcagatccatattgttgtaatgaaatgaaaagctcagaaattcttggatcgtctcatagtcaattttgcacattttgcacagtttcacctttcctctgtagaatgggtttattctatgagtacaaatccagccatcaaattgataccattgtaacattgagtcccttttttcgcaatgctaaattatttacagaggatactaatttgagaggtcctaacaaaaccagccatcaaaaaatgacattaagagggagggattttttcaaatgcggacaattcgcatcggttctggcgcaggcttcagcaatgatcgggtagaacccggaattgaattgcttgagaagggacagctggactatttctgcttggagtgtctggcagaacggaccatagccattgcacaaaaggagaaaaatctagaccccaacattggttacaatccttatctcgcatatcgtatgaagaagatcctgcctatcgccgcggaaaaacatgtgaaagtcattaccaacatgggtggcgcaaatgttcagaaagctgttgaaaaaaccgcagagattgccagaagtgcaggaatctccggcctaaaaattgtaggtgtgctgggagatgacatttttgaccgtttggaccggtacgcggactaccccatttttgaaactggtgagcggcttggcgatttgaagaacaaagtggccgccaacgcctatctgggctgcgccggcatcgtgcaggctcttaaggacggtgcagatatcgtcatcacaggccgctgctccgatcccgcgctgtttctcgggccgctggtatacgagttcaactggcccatggataactatgatctgatgggcaaggggactgttgtgggacatcttctggagtgctccggacaggtcagcggcggtaacttctgcgtgcccggatataaggatgtagaagatctgtggcatctggggtttccctatgcggatgtcagtgaggacggcaccatcgagatctccaagttggaggggaccggcggacgcgtagacgtgcagacctgctcagagcaactgatttacgagatccacgatccctccagctactatacgccagactgtgtggcggacttctcccaagtcgcctttgaacaggtcggaaaggaccgtgttcgggtaacaggcgctaccggccgcccccggaccgacacgctgaaagtcagtgtgggatacaaagacgggtacatcgggagctgcggactgagcttcggaggccccaagtgttttgaacggatggtactggctgttcagaccatggagaagatcattgagacctactaccatcctgcagagcaccgggtggatattatcggctacaactccctgtatccccgggacctgtcggaggggttccccggcggagccgagccgctggagctgcggatgcgggttgccgtacgcgatgccgaaaaagagatgctcaccatgatcttcaatgaggtggatgcctttactattgacggccccgccaactgcggcggtatggaacgccatatcacggagctggtcgcggtgttgtctgtcctggtgcctcgtgaagatatcgagatctcttatgtggaggaggttttgtaagatgaagctgctggaaatcgcacactcccgaaccggcgataaaggcgatatctccaatatttctgtcatcgcctacgatatgaaggattacgagttcatcaaagaaaaagtcacggttgagctggtagccaaggtatttgccggatactgccgcgggacagtcacccggtatgagctacccaagatcggcgcgctgaatttcgtcctgaccaaaaccctgggtggcggtgtgacccgcagcctgcggctggatacccacgggaagtgcctttgctcctatttgctggatgtggaactggataacgtgtgaatggagggccagctatgaacaaaccaacctataccatcaaaccgctgtacctgggcgagatgaccaggtatgaaaaatccatgcacacattcacctttgactatggtgtcaagatgcactctccctatctggcctttttggtacagggtgatgggaagaacattctggtggacaccggccccaaaaatctggaggtcattaaaagatatcacagccatgtggaggcagacgtgcccccagaggttcacctgctcaaggtcttggaaaagcacggactgaaaccggaagatattgacttcatcatctgcacgcatctgcattgggaccactgccagaacaatgactgcttccccagcaaaaaagtctatacccagaagcgggaagtcctgtatgccatcaatcctgtggaactacactggtatacctacgagtctccgcagtgcggattgacacctgtctgggcttctgccggcacgaagctggttgtcctggacggcgatgaagagattattcccggcatcgaagtgttcttgactcccggacacactcccggttctcagtgcgtacgtgtcaacacagaggatggctattatctcattgccggcgacacagtcaatatttatgaaaactgggaaggcaatgccaaataccaccatgtgcctgcaggtatccatgtagacctgagagagtatgaagagaccttcaaaaagatggataagatcgatttcaaggtcatccttccaggtcatgatatgaaggtgctggagcacagcgtatatccctactgaggaggagaaccatatgcttacaacctacaagatttttcccatatatctgggggaaattccagtacatgataagtccagctttacttatatggtggatcccggcgtcaaaatgacttgtccattcatctcctttttgcttctgggcagcaacggtagaaaaatcctggtggacaccggcccctgcgatgccgaatggggtgccaagtatcatatgcccctaaatattccggacgggtgtgagatcgtggaggttctgaggagagactttgaccttgcgccgggggatttggactatatcatcaacacccatctccactgggaccacagctgcggcaaccacaagtttcctggcaaaaagatctatgtacaggcatcggaattggaatatgcactggatccactgcccatccaccgtgccacctacgaatctccgcaatacggtgtggtgtctagctggatgcgagctagggatcagctggtcaccgtggacggagatactgagattgatgacggcatccgcctgattttgctacccggtcattctgacggtatccagggtgtactggtctccacggagaacggcccgtatctgctggcaggcgactgcatcaacctgtatcagaactgggagggcaacggaaagctccggcacatcatcggcgggctgcattccgatgtaaaagcatatttcaagacctatgagaaaatagaggcgctggaacagacagaacatatcaagatcatccctggtcacgatgtacacgtactggatcacaaagtctatcctgtatccgtcgaggagggttctgaatgaatatcctgtttttattattggccattgcactgttcattgcgctggttctgaaaaatgttcccatcgtcatcgccacgatcctgtcctctatctttctcttgctgacacagcagatggacttgtatgatggaattaccgccacatacatgacaggctttggagactacgtaagagatttcttcctattatttatgctgggtgcactctttggaaagctggtggagatcagcggcgcggccaacagcatctctacatttatcttccgagcctttggagatcgctttgcaatcatcggcctgatcatcatgggcattatcttaacattgggcggggtcaacctgtttgtggccatgtttaccatgtaccccctggccatggctatgttccgcagggcagacatcccccgcaagttctttgctgccgcttattttgtgggctgtgtcggtgcgacgatgaccgcgcccttcacaccgtctatccagaacgcgacacccactgtctatcttggcaccacagtggccgccgccgctgttccgggcatgatctctactgtgttgaagctggtgttttgcactgcttatgtgatgtgggtcgtcaaacgggccaagaatcgcggggaacactttgaagagctggagggagaggctcccgccactgaggtgggtaaggaaagctctggcccctccgtgctggcatctgtgctgcccatgctggtgatcctgctggtgctgaatgtggccaagcagcccattgtcacctccttgctggctggtattgtggcagcatttgtgttctacttcaagcatatgccccacagcctgaaggagatcagcgccgaggtgcaggacagtgtgttctctgggctgaagacgatttccattactgccgccgcagcgggctacggtgctgtggtcgccgcgacaccggctttccaggaaattacagactttgtcctcaatctggacggcaatcccctgctgatcgccggcattgccaccatgctgatggcgggagttatgaactcctcctccggcagtatggccattgtctgtcccatcctgggtgagaggttcctggccatgggtgtcaacgccgaggcgctgcaccgggtgatcgtggttgcatccagcactctggattccactccgcaaagcggctttgtgtgcaatatcctcaaccacagccacaccactcatcgacagggctactggcacgtctgcgtggtgtccgtcattgcgcctattgttgaaacattgctgctgatccctctatgtgcaatgttcggcctggcataacaaaaaattgcggcctggaatatccaggccgcaacacatatcacaagaggtacaatatgataagaaaagaaatcattggtgtttacggaacgggtaccattggctccggtcaggctaccttgactacaggtaatgggtatgcagttgtggtagttggacactccgccagaggaatcagccgctgcaaacgcgcaattgagcataactgggatgatcttattgccgagggtctagcgtccgaagaaaataaggcggcagcaatgaatctgctgatcttttccgatgaattggaggcgctgaaggactgcacctttattctggaagcggtatcggaagacccggatgtcaagcgggaggtctatgctaagattgcctccatctgcaggccggatactatttttgcatcgtgtacgtcttccatggacgcggaccaactcgcagctgatattcccaatcccgaccgctttctgattgcccacccatttcagccggttcatctgcagccgctggtggaattggtgggatgcaaggcaacgagcccctctacgctgcggcgggccaaggcgttgatggactctctgcaccggcagacaataatcctcaaccacagcgttcccgggttcatagtcaatcggctggctcaggctctgtatagggaatgcattgacctcattgagcggggagttgcggaaccagccgatatcgacagagctgtacgttacgccgtgggtatgcggtatgcatccattggcctgctggaatatttcgatgccgtcggatatgaattggaggcagccatcgccggaaatatctatcccacattgtgcaatgcgagatctgtgcagcaacttgtggcagatggaattgctttcggaaaaactgggcaaaaagcccgacagggtctgtacatctggtcggagtctgatctggaagattttcgtgatcgcctgcaacgcccgtttttcacccaggtaagagaatgggagctcccaactggcacttctgaccagtaaatcgtacagtgtcatacgaagaccactatccggaaaacacccggagtcattgtgttgcaacggctctgggtatttttggaaatttggcaattttcctaaaaaatggccaaaacccacaaaatacctagggcccaacgacttcctgcttgatcgcttgataaccccatctctgtaggctattgacccaaatttggctaagcgtaccaaaaccgccgaaagcaatttgctttcggcggtttttacgttatagaagtttcatattttgcggtagggcgttggtacttctacagccctctattccgccggaggaaacctccacggctccgccacatactggtacagaaccgcaccgcagttccggcagatcacatacttcagccggttgcccaggagtccgttccgccggaaggtcacgatggcctcattttgctgccagccgatccccaggtcatacgatccgcaccaggcgcaatggttgacgggaatctgcggctgtttttcctctctgtagatcattatatctccaacccctcctgcagcacctgactggctgcctttttgttcttatcgaaagcgtgtgtatagatgtccagcgtggtggacggctgactgtggcccagcaggcccgctacggtggccacgtcggccccgccggcgatcagcagactggcgttggtgtggcgcagggagtggacattcagggcagagggcagaccatgcttcttcagaatcagcttgaaccgccaggtgaaagtggagggcgtcatggggagccgctctccatggcggcggaagatgtagtctgaagtctccaattccctcccatcatacgtctccgtttcccaggcacactcccgctggaactctttcagcagggactccatctccagtgagaagtacacgtatcggtccccggccacagtctttgtttccttgacgataatgtcctcgccggtgacctttaccacattccgctggatgtggatggaccgctcgtgccagttgatgtcaccccactgcaggccacagcactcgccacgacgcatcccggttgcgatgatgagtttgaagtaggtctcgtacttgagactctcttcctccagggcggagatgatcctttgcagggtttccagatctgcgatcttcttttccgttttcctccccgcatagcggtatgtccgccaggcggggttgtgattcagaaagccgccctccatggcatcggagaggatcgtacacagcgttgcgtgtacgccctccacggtatgctcggagagcggccttccagtttcaaggctgatgacctttcgcagatccgcatagaagttacggaagtgctcggggcggagttctgccaacttgtagtgccccagaatcggcaggaagcggtcaatgtcctgccggtcacgggccagggtggacttggccaacttgccgggggcgatctcccggagccacagctccgtgtacttcgccagtgtgatgctccgatccacttcctcctggggaagtgacctgcactcccgctcgaacaggaccgcctgctccttcaaccatttttcccgctgttttggggtcagaccctccggtggatgaacggttttctgcttgggcctgatgcgattgccctcgtagtcatagcccatagagaccaccagcaggtagctgctgccccgttttcggatacttgccatgttgtgttgacctctctttcgctggcctcactccagttgaggccggttttgcaaacacaacataccgcaagtggggaagtaaagctattgaaacttcctggaaagaacattttctacgaaagcaacaatcaggcgctgcgggatttggcgggacacgcggcggccagattgaacaggacttcgccctccgggcggagcatggcgcgcatggccccggcggcctgctctttctgctcctgctgcggatggcagtaggtgcgctccagaaagcccgtgtccgcgtgccctaccagatccgccactgtctgcttgtccacgccggagtggagcagggaggtcacatagtaatggcgaagcgtgtgcaggtgatattcctttggaaatccaatggactcatagattttccgcagccgtttggtgaaggtatccgggtgaatgagctgcccgagggcatccgtgaagagatagggaccaagttcccgatgcgccagccgggcttccagctgtttccgccggcggtagctcaaaaagattcctcggatatcagatgagagaacgatctcacggttgcggccgttcttagtagagccttccacgacaccttttccagggacaacgctgcgggagcggctgatggtcaggagcagaccgcctctgctgaacttgaaatcctcccacttgagggcgcacagctccccccggcggcagccggtacacatggagagcagatagaacatccggtagtgccgaggctcctttgccagagcatccagcagtttctgaatctccacgggggagggaatgtactgtgtagtgcggcgtgttagaggcagatcgatcatccgggccgggttcttctggatgatctcattccgcttggcgtcgctaaggacagcggagaccacagtcaggtatttctgcaccgtggcctccccaatgggcttgccacggtatttccgcttccgcagttctaccagcatattctccagagcaatcggccgtagccggttcaactggatggccccgataaagggatacacccttccaagcatccgccgatagctctccaacgtgctgggggcataccggacctgccgggctagccaccgttcggcgtactcctgaaagggcagattcccgtcctcgctgtaaccagatttgaactgccgttacagttcttccgcctcgtgagccacatactgccggatatcgcgcttgggaatgctctccggcacccggatagtcttggccctgcagatgtagataatcttctctcggattcggaactcacgttccatgatctctttcgtgtatttcaattcgtggagccggtcgtcccggcacttcatgccctggggtgtggtgtaggtaatggacttccgagtggccgaccatcgaacttgatacccctcgctctccatcagggagatgaagtcttccctggtagatgcgaaccgcatacattggtcgatggcattcatgagtcggaatttccagctctcgcccttggcggcagagcgatactcccgggtgtccatccacttctgctggacctgcttctgcggaggtggaaggatcgacagatggtgggcggcgcagatctcatcgttggccagccgatgggcctgcaggtcggcggcactctggtggagcttgcggccgttctggaagctgacactgtttacgatcaggtggctgtacagaatgtcggtgtcgatgtgagtcgccaccagcacctcgaagtctggaaacttccgctgggccaactccaagccaatagcatgtgcctcctggggcgtcaggccatccgttgccgcaaagaattggacgaagtggtagtactgccagccatctgttttaacgaaccgctccttggtgagctgtatctcctgccacgccgtcggggcagtacagttccagcctgacaccagccgatgtccttcccacagcgttttttcgtcctgtcggatgtactgaagcactccggcgagcgcgccccggccaccgccccggttcttgatggtggtgaaggtagccatctcagttcacctcccgcagcagatggcagagctgcccacagatcgcttcgtacttgtccgctaaggcgtcgccgcgcagaatcgtgaccttgcccatgttggccagggtggtgagctggttcaggttccgcccctgagccttcagctcggagagcaccttgtccagcccctccacctgcacgatctccttacccaggccgcagaggcacaggcaatcggtgacggttttgtttacgcttttcgcacgcgcctggatgacggcctttgtccgggggcgtcactcggagcgtgatgatttccgttttcttttctctcggcattcgtactcctttcaaactttcgccccaaccaaacgaaagtccagcgaagcgggtttcgtttggagaggagacacagcggaatgaatgcgccctgccgctcgcggcggggcaaatgatatggagcttgtgtcgacgaaggggctgggggcggggcagggccccgaaactgcggccggtgtatagccccggacgcgatgcttgccctcccatatgggaggtttttccctgccggagctgtgaacaccacacccagcaaattattcatatgggtcgatggtgacgatcttttcggtagcgagatcatcgacaccatcgacacttttcaggcagatgagtctgcctctgctccacctgcgaaatgacacgacgatgccactgttccttagagccccaatgtttttccaaatttgatgggagaggctgttgcgtgttagcccttcgaggtcggcaggatcaatcttttccagcagcgccttggcagagacacagatctccgattgttcccatagcaaggcggagagaagaaagacaatccgactattggacggttccgcttccgctcagttgtccctgagcagattccagatgtgacttttaccatcgaactccaggaatagctcccggtagatgatgtcccggccggtacagtagagggtggcggcgttctctccccgcctgcgcttgcggagcacgaagttggagcctgtggcgccactcaagcctgtgatgccggagatcatgtccatagggtcgtcatcattcagcttccgcaggtgatggatcaacaagacggcaatgtagtgccggtctgccagatctttgaggacaccgatgtcctggtagtagggatttgttttgttcccagccgcgcgaatgcgctggagggtatcgatgactaccagaccaatagccggatgcactttgagaaactacgcgatctgttccaccagtccgctgtggagctgctccgccatcatggcgaagtgcagcgacggaggcgtgagatcaaagagcaagctctggatacgctggaagctgtcttccaggtagaggtagagacttcgcacgggtatatagcgaagctccagagcgatttgccctgtgcggcacagagacatatctacagggccagccgggacttgccgatcttcggtgctcctgccagcaggtggagcctctggggcggcaggtctcctccacgacgaaccagaggggcatggggaatgatctgctgggtatctgcattagtggtattcaattttttcatccgaaaatctccctttccccaaaataaaggcgcggatcgacggccatcgatccacgccctctacaccagagaaaatgtcttgagtctgaacaaccctgggaatatccccctgggagaattgatagcagaggcactgaacatctctccggaggagtaccatgagctgcagcagatgctggatagggcaatgacagcatggaccgctatgaggaagatcactggatacgggattggttcgatgccaacgaggagatgatcctgctccatgacgccctgtgctgccgccagatatttcgactgatccaagagaaggatgagatcctatcagaagcgagaacattcccggagcagaattctcttttcccagaagaagatctggaactcggagaacgggacagagagggcctggccgcaatcggagcatataaagactacttggagtacccagaggactatggtggggaagatcacatcgtctatcaatttggcgatgagtattatacttcgtctgttcctcgaacgccgataccgccagagtcaccggaaaagacgagggcgctgttggttgcctatgggccgctgaacgtgaagtgggccgcctataaaaaatattgtatgaactacaaaagactcctggaagacatcgcgtcggtctgtcagacacttcgggcgttcgttcgtatggaattctcgtcgctggaaaagctgacgcccaataactatgtggcatcactgcatgaatttttgtttcatgagcgagcccataagtgggttacaaatcccgcggaagggaccggattttacacctacatggatgacgtgcggattcatcttcgcccccaggaaacggctcctggctccggcgcattcaaagtctacgagtactagttggcagaccgcctccagaccatgatgaagctggatttttataaggcactggaggccgggcacctaatccgcaggtgtgagaacggtggacggtattttctgctgtaaaaaggttaccacatcagatattgcgacctgcccaactccaccaaccccaagtacacctgcgcccagctgggctaccggatcagaggcgtcaaggaggaggcggaggacagttcgctgtcccaggctctttaccactgctatcagcggatcgacaagggttggtcccgaggtgccattacagcggaggagcgaaagctgctgcgagagaaagcacaggagatttaccgcgtagcaagaacaaaaccgagtatgttctatgaggcatttaacacatctctgtctaataagaaactgtatccgctctgtgccgttcagtgaaaaagcagatccagaggaagaaaaagagcgttgatctttcatcttggaaggaagtgggcggtggcctgtgacaaacgaggaactgtatcagaaatgtcggagcggtgactccaccgcctttgaatagctccacagacaggtggaaaacttcatccgaagcattgctctggatgcggctaggcattttgaatgtacagacactgcagcgacattgctgatagaagctctatgtgccgaaggaaacctggagttgtgggattggattcaggtcggcagccatgatgagcatgcgggaaattaaccacctatctcaaccccttttgcggggaagaatgtactgctatctgaagactaatttgggcgtcatagctttgagcaaggatgagatggaacgtgtacgactaccccagaaactctgccatgcggagggaaagaccatcgacgagatcgcgacactgttatatatctccgggatgtcagccgcaagactggtcggataccatatccatttcctatctgtatttgatttgtagagggaaggcgaggagggtgatccatttgagtaactagaggagcatgagcaaggaacgtctgtggagcagatcgtctaccaaaaggtgcacctggaactgctggagctactgctctgcttgctaagcgtcaaaaaccgctctattctgggccacaccttcgggggtatacggctatgaacagctatctgctgatgaaaactgggcctgcaggagatgctctcctccgataacatgacaaaggcgagaaagacagtcttggggcacctgcgccaacgctgtcccggaagtgatctccaccgctggcgcagggccttccggctgatgaggaatgcgagggcaggagattccactgcctgtctatcctatccggtgtggtgggggaaataatccatccgtgaagatgattcggaaaccttcttgccgactcccacagccgtccgcatcggtcttgggattgaagttactgttgccgtcgtagacacacaggtagggatactgacaataagggagaggtggagccacgcggctccgcatccttttatatttagctttttttgttaagcaccatctgattttgttgtagatcggccatccggagaagcagggcatgacgttccatgggctggccatctggatgaactacaacggccccagtggagtggaaagggcattcaagcgtgttatcccaaaactgaaacaacacgtccacggcggagtgtggccggacatccagagacctctccagaaggcacagcaggagttctgttactgcacgccacaagagacatggatcaaataacagtggaatctcgatataagagtcaaggtctagttgttttgcacggaagtcaatcctagagactgccttggtacatttgtggaaaaactttgagccgagcaggcattggcagagagacgttggcgccattggtattgtgtattatataggacggttgcgctctgctccatgtaatttgtccggtgttttatggctgtgggacaggtgcttcatcatcttcaggcgatcctatttttttgcgggggtgtaaacaagaactctacatggttatcagaataggcagcataggtgtggtcctgcttggggagcccttgcagcattgtcatttattgtaaacaatggattgtaaaatttgtgcgttgatgttaaaatataactaacacattggtgagaacaatacactttttgttcaaatatgcaacggctggcgatatttctttgcggtcagtagatgaatcaagtgttttgctgtggagcaccaaagtgaaactacaggccaatttggcatgggattatcagaaaggagagaaaacggaatggagtccatgaatgaggagaaagaactgttggaacacgtgatgaagctgatggcagagcatttcgggaaaaattgcgagatcgtgcttcatgattttatggcgcctgacaaccatacaatcatcggaattgaaaatggggaggtaacgggccgggagattggcggatgcgttacgaatctgggcttggagatcctcaacggaaaaccggcggaggatgcattcaattatgccacctatgctgaaaatgggcatcttctgcggtcttcctccatctattttcacaacagcgctggacagcccatcggttccctgtgcatcaacacggatattacggataccacgtattttgaaaagatgctgcgggaatacaacaatacccacgactatgaaaacagggaagatgcttctccgaaggaggtcttcatgccggacgtccatgagctgctgaatcgcctgatcgaccagtgcatccaaaaatatggaaagcctccgaagctcctgaccaaagaggaaaaaattcagtttatcgcggatctggatatgaagggggcctttgtgatcacgaaggccagcgatcgcgtctactcgctgcttgggatttcccgatacacattctatacatatctggagcaggggaggaaaatgcgtggggaaagccggactcctgtagaataaaatgtttgtctaaaagacacattttttgtcttgacatagaacggattattgtgttaaaatacaatcaaacttaaaacgcagaaataagaacaacggtagagacgaatccgatcatgttttcctctcaaaattgagagtttatttctgcgaatttttttaccctttgacaaaacagaatgtctgcataaaaaacataaagtatgtctgctatcagaggccaacttctgaagcatataaaaactgacagggggaaaaacgatgaaaaaatggtttgctctcgctcttgcggcaatgatgatgctcgcaacactgactggatgcggcggtaccgaaagcggaggcacccagcagacccaggaaacagaccagggtcaaagctcctctgagaccgacaccgtagtttacccggagattcctgcgaagaccggcagtctgaccattggtatttcgacaaacgcgctctccaatatccacaaccggcatatgtttgagggactgagagaagaggcggaggggcgcggccatactgtcgtcacggcaaacgccaatggtgaccccacgcaacaggccaacgacattgaaaatctggtgcaggccggatgcgatgtcatcgtcgttcagaacgcggacaacttctctctgaagaatgcggttcaggaggccagaatggcaggcatccgcgtgatctgcgaagacaccggctggattgacggcatcgacgccatgttcctgctgaacagcattgctgtccaggcagacattaacatgatcctggcggctgaggtgggctttagcggcaagatcatcacaacggggcatcaggacaactttgctttgagggctggctcctacatccatgacgcatttgtagaagaatatggatttgatgttgtagctcatgtacagacaaccttccctggtacgaccgaagtgacttataacggcgtagactctgcgctgacagccaaccccgatgtggttgcgatcttcacatctcaggatctggaggccatgggtgcgatccaggctttgaaggagcacgatctctatcctcaggtaaagtgcataggcgttgacggcgaggtagacatcctcaatgatatcaaggccgacggctcctgcattgccacggtggtgtccgatctggacagcgccaatgtcaatgtcgtagatgcctgtgaggcgttgatggccggcgaggatgtggcgaagtaccacgaaatcccgtacgccgtcgtcacaaaagaaaatgtggatgagttcctggagaaggctactgccgaggctgagaagtacgcggaataaggctgatatagagaacattgggccgccctgcgctccggaatggggcggcccgatgccatctatgaaatatttttagaaaatgaaggggaactgaccaatgagcgtgtatgagaatttgaaagaacatgggatcgagctgcccaagcagctggctgcggccggactctataagcctgtgaatcaggccgggaatctggtgttcatctccggccagggcagcatggtggatgatacgaagatcaccggccgtgtgggcgctgacctgagcgtggaagagggcgccgcagctgcgcggatctgcgcgatcaacacactggccgcgctggaggcctatctgggggatctgaacagggtgaagcggtgcgtgaaaatcctgggtttcgtggccagcacagatgatttccatgagcaggcgcaggtcatcaacagcgcgtctcaggtctttatagacgcctttggagaagaggggcggcacgccagatccgccatcggctccaacgccctgccgctgggcttggccgtggaagtggaatccatctttgagatcgaggaggcctgaacaatgctgggaagggatgttagccctgtagagatcgcggacattttcgcggcagaatggagactccggaaagtctttccgccctctccgctgctgaacatggaattcctgaaccagcagctgggtgcgcaagtctggttgaaagcggagaaccttctgccgtcgggggcctataaataccgcggcgccatgaacaagatcacttctctgatcgagcggtacggcaaggagcttcggatcgtcacagcttcctccggaaatcatggcatggcttgcgcactggccgcccggaatctgggggtccaagcaaatgtcgtggttcccgtgtccacgccccaggtcaaaaaggacagcatccgcgcactgggggccaatttggtggaagtcggcgcgacatatgacgagtccttcgtctctgcctgtgagctggcagaaaaagagcatctgtactatgtgcaccccacctctgaccggtatactgtgggcggccaggggaccatttccctggagattctggaccagtgcccccaagtagagcagatcgtggtgcccatcgggggcggcggcctcatcacggggatcgctctgaccatgaagacgctgaagccctccgtcaagatctatggtgtgatgccggtagggtcggctgtctatgtggaatcccgtcggcagggccagctggtgacgctggatcactgttcctctatggcggatgcagttgtacggaaaaccggagaggaatacctgtatccttacattgaaaaatatgtggatgacatctttacagtcacggaggacagcatccggcaggcggtcagaacagcgtgcttgtatggaaagctgacgctggagggctccggtgccctggccttggcggcgttgctggagaaaaagtgtccgctcagtcccggaacggttctgatctgctccggtggaaatatcgacaaagctgttttggacctgtgtatgcaggcttgagaggaaatgatggctatgatgaccgtgaatggccagcggctccaagcacatcttgaggccctggcggatattgcccgaaccccggacgggatttgccgactctcctattctgacagcttttggaagtccaacgcctatgtggcgcagctgatgcgggaggctggcatgagcgtcaccaccaatccagttggaaatgtggtgggcacttatcctggcaggtctccgagaaagattaccataggctctcacatcgattctgtagtaaatggcgggatctttgacggctgcctgggcgttctcgcggggatcgaagcggtccacaccttatctgaaaaggggatcgtccccgaacacagcatcgacgtggtgtcctttgccgaggaggagggcattgtgatcaccggactgatcggcagccgtgcttactgtgggttgccgcccacagagccggtgctagagaagatgggggagttcggatttacccttcaggacttggcagaggcgaaatacacgggagacatcgattactcccttgagctgcatattgagcagggcggtgtgctggagtcccagaagaaggatatcggcgtggtccgctcgatcattgccctccggcgctatatcgtggagtttgcgggcgtggccaatcacgccggcacgacgcccatgacgctgcggaatgacgcgttggtcaaggcggccaggttcatcatgcgggtccgccaggtggtcatggagaccgacccccacatggtgggtacggtagggcatctggaggtgcagcccaacgccatgaacgtggttccgggccgtgtggctttgacgctggagctacggggactgcgggaggatctgctggagtccgtttatcagatgctgatggaggagttccggaaggacatcgtctcctgccggctgacgatggaacagccctgcttccatatgtcggaaaccgtgcagcagagcgtccggaacgcggcccagaagctgggacttgcggcgatgactatggacagcggagccggtcacgacagcatgagcctctcgcaggtgacgagggtcggcatgatttttgtcccaagcgtcaagggaatcagccacagcaaagaggagttcacgacgtgggacgatgtgaccaatggagcaaatgtcctcttgcacgccctgtgtgacatcgatcgccttgaaacacccgggaggtgaattttttgagcgagaaaaacgactatatcattgagatgcacggcatccagaagagctttggcggcgtcaaggcgctgcgtaacattgatctgcaggtgaagcgcggaagctgccacgcccttctgggcgagaacggcgctggcaaatcgaccttgatgaaggtcctgaccggtatcattgcaaaagacagcggaaagatcctgctcaatggggaggaggtccagatccagagcctccgccatgcagaggagctgggcatcgccatcgttccgcaggagctgtcctttatcagctattttacggtggcggaaaacatcttctatggcgaagagcctacacgtcctctgcctctgctgatcgactggaaaaagctgtataccgcctgtgatgagaagctcaaagagctgaaaatcgatctgcccagcaaaatgcaggccggaaagctgaatgtctccgatcaacagatgatggtcatcgctcgcgtactggcaaagaatgccaacatcattatcatggatgaaccgacggcgcgccttggtcatggagaagtgacgaagctgctgaaatatattcaatatctgaaaacctgcgggaagaccattatttacatctcccatcgtctggaggaaattttcgagatctgcgataccatcacagtcctgcgcgacggcgagacgattcagaccgctcccacctcccagatggacagcgacaagctgatcaacctgatggtcaaccggcagatcaaagtcaacaccacccggacccggaagagcagcatcggcgagaccgtcctctctgtaaagggactttcgaaaaagggtgtgctgcgggacgtctcgtttgaagtccacaagggtgagattttggggatgttcggcctggtgggcgccggtcggacagaagcggtccgcgccatgctgggggttgaccggtatgacacggcggaaatccggttggacagtaagcccgtcgtattcaaaaacatcggacaggccctagccgctggcgtcgcgcttgtgccggaggagcggcggaagcaggggatccttcccaacacgccgatttacaagaatgtgtccatctgcaatctgaaggcgctgtcgcgtctgggcctgatcgacaagaagaaggaactggaatacgccaagcactgcacggagatactgggcgtcgcctgctcctccgtattccagaatgtgggaaatctcagtggcggtaatcagcagaaggtagtcatttccaagtatattgaccgcaatatccgcgtgctgatcctcgacgaacccacccgcggcattgatgtcggtgcgaaagatcagatttatgaaatcattgagggcctggcacagcagggaatggcagtgatcgtgatctcttctgagataccggagctgcagctgatgtgcgaccgcatctgcgtcatgagccaggggaaagtgacgaccgtgatcgatcgttctgaatttgcggattccgataatattctgcggaatgcaatcggaatatgaggatagggaggagttcattgatgaacgccaaattaaatgtttccagaattgcccggaattacgggacgcttttcgcttatatcatcatgctgctggtgttctcgatcctggcgccgagtgctttcccgacgctttccaacgtgatcagcatcctgcggcagatcgccatgctggccaccatcagcctgggcctgaccttcgtcctgatcaccaagcgctcggatctgtccatcggctacagcacaagcttcctcgggatcgtagtggctgcgctcctggtcagggctggaatgaacatatggcttgctgcattgatcacggtccttctcggcgcactgattggactgatcaacggcgttgtgatcgcctatctaggagttccggactttattgcatctttgggagtcggttacgtggtggctggcatcaatcaggcctataccaaaggccaccccatctccaatctcccggcggactttgagatctttggcgctcagcgactgggcggtgtgatcccgaacgcggttatcatcatgctgattgtactggtcgtgtctagcattatcctcaaccagacaaagttgggacgatacatatatggcgtgggtgataacgaagaggcatctctgatgtccggcgtcaatacgcgctccaccattgtgtgggcctatgttttctgcggcattgcctgcggcgtcacggccgtgatgctgacttccagactgggctctgcgcatcctcaggctgcggaggattacttgctggatgctattgcggccgtatggctgggcggcaccgctttcaaagacggtgagccgaatctggctggtacactgctgggcgctctgattatcggaacaatggccaacggcctcacgatcctcaatgtctcctactactatcaggatattgcgactggcctgattattctcgccgccgttattatcacctcggttcagaagagccacaagaattaacgaaggattggagaatacttgtatgagaacactggtaaaaaacgggaccattgtcacagcagagagtgagtacaaagcagatattctcattgtcgatgaaaagatcacgtcaatcggcaccaatctagaaggcccctttgatagaatcctggatgcagagggcaaatatgtgctccccggcggtgtggacaaccacgcccactttgaggcgctcaatacggacggcatcaccacaaacgagccctatgccactacctgggtggccctgcagggaggaacgactaccattgtggacttctgcaccaatgaacccggcatgaacctggtggattccgtcaactaccgcctgaatgtccgcgccaaaggcaaggtggctcccgacatcgccattcacgcctgctgcaacgatttcacggatgagaccgtcggtgagatcaaaaagctggtggagatgggtgttcccaccatgaaactgttcctggcctataagggcacctccctctacatggatgacagcaagctgctggcctgcctggaggaggctggcaagcagggcatgacgatgatggtccatgcggagaatccggacgttctggataagtgccgcaatgatgcggccgctaccggacactatgagccaaaataccactacatgacccgccccccctacggcgaggcggaagccgtctcccgtgccatccggtttgcggatgccatgcactgtcccatgtgcattgtccatgtcagctgcatcgaggctggcgaggagatccgcaaggctcgtgcggagggcaaggcggtgatcggcgagacctgtccccactatctggtgctggacaagcacaagatggaccatccggactggcacatcgccgcccggtggatctgctctccggccctgcgggacaaggaggaccaggattacctatggaaggcgctgaataaggattggctgtccatctgcggctctgacaattccggcatcccccaggcacagaagaactggggctgggacgaggagcatcagcgctgcgacttccggatggtccctaacggttgccccggcgccggcgaccgcatgaatgccctgtggacctatggcgttgccgccggccgcatgacacggcagaagtttgtggatgtgtgctgcaccacgccggccaagctgaacggcatctatccccgcaaggggaccatccaggtgggcgctgacgcggacctggtgctgttcgacccggactacaaggggacgatcacgctggagaccaaccccactggcgtggagtacaacgtgttcgagggcctggagcaaatcggccgcgctgatacggtgttgctgcgcggcagcgtcgtggtggaaaacggcaggtatctgggtgaagttacagaagttgtggctgacggcattacctatcagggatgcaccagcgccaacggcaagtttattcccggcaaaccctatggtttgggatatgacctcttgaaaagatcataagaagaggattgcaatcgggatgaactccttgaactttcacggatgtataagagacgatgttgatcaatttcctatcaatgctgtaacagggcgccgagtacatactcggcgccttctgtcatcatccagtttgcatatgcgaactacctttattacatagggaacgttgtaagtgtaaaacgattataagaatatgaggctatcccgccgaaaggccgatcttaacttatatcgtctgtatctcagaaaatatttcctgttggcttgacaaagagggcgtgcccattttgaagaaattgacgaaaccattatctgcttagtacgatgactggaatgttaatatcatcaatctgctggagacctacgaccgtctgattgcgtttggtcaaaagaacctcagcaccccctttgtgcaggagggcatccagagcatcagcaccagaaatcgcatcctgcgtgagctctgctcccaaaacccgcccatctccaaagtgttccgggagattgggctggcggacgaacagggatccgggatggggaatacttataagtacacaaagctctactccggcgggagcccggaatttattgagggtgacgtgttccacacagtcatgccgcttgctccaattacggctgaaatggttggaccgcaggacgtcacccatgtgaccctacatgataccctgcttgagcgtatccttgttttttgaacggaactgcgctctaaagcgaggattatgcaacactgtggttttcaggatttcaaacatttcacgcagaagtatcttaaacttttgctgaaccttgggatgctgaagatgacccttcccgataaacctcagagccacagccagaaatatatgacggtgcaaggggctgtacctaaaaattgaacacaatttggaataaagaattgaaggcatgatcttgggtaataaaagactatattgtggcgaaaagctttgataagttaggctgccttgcatacctctgtaagacgtctaatgaggcttggtacctttcaggtatactagaggttctgcaggctgtcggcgtccagatcgtgatcctggatggtcctgagatttattcggagtgtgtccctacacgtatgtggaggacatggagaatatcattgatcgggggggacagttggacaggggtttataatgcagaagattacccggagatactgaggaagaattccatgccgcttacgataaagaggtccagaatgagcccgtcgggaagattaggccttgtttgaaaaataaaagttacacaagaaaccaagttatgcgaagctatgagcatgaaacgatatgaattaacaaaagaacaatgggaacggatcaagtcgctgctgccaccagaagaaatgggaaagcgggggcgcccccggaaggataacccgattatgctcaacggaatgctctggatcgtccggagcggtgcgcagtggcgtgaactgccggagacttatggcccttggcagtctatatacgcccaattcgctaaatggggggatgacggcactctggaagtggtattccacacactgtctacggacgcggatatggagaacctgaacatggactccacctgcgtaagggtgcatgaaagcgcaaatggcgaggaaaaaacggcagataaggcggttggccgtaccaaaagcggatggaacacaagactccacgctgttgtagacggtctgggaaacccgctggagttccggatctccgctggaaatggccacgattcggttcacgctgttgaactgccgcaaaaggtcagaatcggcaggagtgccgtgccgccagaccgggcctatggtgcccggacgattcgggaatatatctcagcgcacagggccagctatgtgatcccgccgcaaagcaatgtttccgatccctggccggttgactggcatctgtataaagagcgccatctggtgaagtgtttttcccagaaaatcaagtggtttcgcagaatcgccacccgatatgacaagccggatgcttccctcttggcctttgtgtattttgccgccatcgctattttgttactttagcacaatctccgccttttttcgaataagccctagtaagcgaccccatcctttttacggataaccggttgggaaatggagaagcaaggatactgccgatatccggtgatttgcgcgtgagggaagaatatccgggcagaaagccgttgccgggtgaaagcgcctaacctgttgggcacacactgctgttaccgtcatcctcacaaccgtttctgaaaattgcccgccacggaaacatcctcatccatgataataaaggaattgggatcttcttcccgcaggattttccgcaggtggagcgcctccttcttagaaactactgtcagcagcaagtcggacggctcgttgctgtaagctccgacgccagtccacttcgtcacgccgcggccggcatatcggaacaccaactgctccatggcctcagatttggtgatgatcagcatggtgaccattacattctgcaagtgcatccggtccagagtcaggtaggtggtgcagccgaagatgatgctgtaaaccaccacgtcctgttcaaacaggaggaggccgatcccgtatacgaacacattcaggatcatggcgattcgccccacgctgaaatccggctttttctggacgcacagcaaccccaggatctcctcgccgccgccggagcatcccgctgtcagcgtcatgcccgccccgacgccgcataccagcccgccgatgacgcaggccgcgattgtctcgtcaaacaatccttccgccgggatcgggattagggccaaaaaggcactgtaacagacgatgcaaagggcggtctttgcaaagaaaaagtgcccgaaccggaaccaggaaatcagcagtagaggaatattcagcagaaaataaagaatgcccgccaagtcgccgatctgctggatggcagggaagaaatgcagcagcagcattcgcagcagctgcgcgattcccaggaatcccccgctgtacatatcatgcggcagaatgatccagttcatggaggcggaaaacagcagggaacccaggatgatttgagcggcttcctgcaccggatgtcccttgtacagctccagtgccgtggggctgtcatgcgtttgctccatttctcatctctccttttcgctctgtggagaagccctggcacaatctgtgccagggcttctccacaacttgatcttactcagtcgccaggccgtgttccaccaggaactggtgggccacctcctgggcgctcatgccgtccacgtccacttgggcgttcatggcagccatggtcgcctcgtcgatggcaccgtccagtctggacagtatctcggccagttcggggtcggactccaggagctcggcatccacaaagttcacagcgtagtaaggcgggaagaagctcagatcgtcctccagcatggtgaggcccagcttggacagcagagcatcggtggcaaaggcgtccaccacgtccacctcgtcgttctcaatggcggtatagcgcaggctggcgtccaggcccttcacgtcctggaaagcggtgccgtacttgctctccagcaggggcaggcagtcctcgcggtccataaactccaccgtgcagccgagacgcagctccggggacttctcaatcaggtcagacagagaggtcaggccatatttctccgcagtctcgggcttgacgctcatcacataggtgttgttatagcccagggggttggaggtctggatcccgtgctcctccagcatcagatcgtggacggtctgccacacccggtccttatcggtgtccataggctgggccagcaggttcagcagcgccgttccagtatactccacaaacatatcgatgctgccctgctccagggcgtcaaagcacatggccgcgccggacaggccgaaacgctgttccacctcataatcggtatttgcctcgatcagctccgtgtagatctcacccagaatgttgacctcggtgaagttggaggtgcccactacgatggtcttctgatcgccgctgccagcttcagacccgctgccgcccgcatcagagggggtcccgccgcaggcggccagagagagggccatggcggcggccatcgccatacaggtgaatcgtttcaagtgtttcatacaaatagactccttttcagaatggggtgttgatatggttgagatatcgaatctgcctcacagaggactcatgcgatgatagaggcgtaggatgccacagaaaccaccagcagggctccgcacagcgcggcggccatcgccttccggcgggaccggaccgacaggctcaggtttttgatctggtcctgaggcagcagtccctcgctggtgaaggcccgctccacgcggcccaggaggaaatccagagtcagtgccatcagcgcggcggccacggctcccatgatcgtcatggggtaattcagggagttcatgcccagctggatgaaggagcccaggccgttggcaccggcgaaggcggcgatggtcatggtgcccacagagctcaccgcggcgatgcggatgccggacatgatgtacggcatggccatgggcagctccacccggcgcagctgctgcatccgggtcaggccgatgccccgggccacttccatggaaacgggggaaatgccggagatgccggtatatgtatttttcaaaatgggaaggaacgcatagacgaataccatgaaaatggccagcgtctcacccacgcccagaaagggaatgcccatggcgagcagcgccatacaggggatggactgcatcacgttggcgattccgatcaccacattggataccgctttgttccgggtgatgaagatgccgaggggaacggcgatgatcagggccagcaccacggagaagctggtcatggccaggtgccggagaaactcctccagcagactgtcccactcctccacataaatggagaaataatccatcaaagtgtagcgggacatatcactccgctcctttctccggcggtatgttccggaacgaactgcttgctcatggtggccagaatgatgctcttcgtcaaatagccgagcagcttccggtcatgctggatcacgggaataatgccggacacatcgtaatcaatggtggcgatgatctctttcagggaagtttccccctccacggcgatgtaatcatcggatatgtagtattctatggggtcggcctcccgctttccgatcagctcctccagccagatgacacccaggagcgtctgccccttatccagcaccagcaggctgtccacgctgttgtgcctcatgatctgcagggcctggatgacggtgcgcccctttgaaatagtgaagggacggcggcgcatgatgtccgctgcgcggatatattccgggttggcccacagccggttggcgccgatgaactctgtgacgtactggttcgcagggtgctttagaatgttttccggggtgtcacactgggcgacttttccatcctgaatgatgcagatgcggtcggccagcttgatggcttcgtccatgtcgtgcgtgacgaagaccaccgttttttgcgccttggtctgcagatcatggatttcgttctgcagctccgcccgggtcatgggatccagggcggagaaaggttcatccatcaggacgatgggcggattggcggcaaaagcccgggcgatgcccacccgctgctgctgaccgccggagagctgggatgggtactggccccggtagatttccgggtccagattgaccatcttcagcatcttatcgacccggtcccggatggcctctttggaaaaacgggcgatctgcatggtgagggcgatgttttcttccaccgtcaggtgggggaacaggccgcccgactgtaccacatatccaacctttttgggaaggtcctggaccttgatctgttctacgggaatgccgtcgatggaaagcgagcctccccgcaggggaagcagcttgttgatgctcttcagcagggtggtcttgccgcatccgctggaaccgatcaaaacgaaaaattcgcggtcatggattgtcagcgaaacaccgtccaacacaggcttatctttgtaggcgatgcgaacgtcttcaaattcgatcatgtctcctccatcttcacatcgtaattgaatcgagcgctggtttgcccatattatgggctgtgatttattaaaatgggattaagttctgctcagcgggcattaagattccatttcattgcgtgtgaggtgggggcggagcttctgaatgggctccagaaaggaaatgcgaaagctgggatatacgccgcctacacgcctcttaatccaatcttaatgctgtgggcgaaatacttatataattatggtatcctgcatgataggataaggctgttgaattccgatccagaatcatgggagatgaagatatatggaaaaaacagagaacagcactccctattccccccggtacggagaggcggagaccggaggcaccggaagactgaagatctttttcgggtacgcggcaggcgtgggcaagacctacgctatgctggaggcagcccatcaggcgcagaaagaaggcgtcgacgtggtggtcggctatgtggagccccacgccaggccggatacactggcgctgctggaagggctggaggtcctctcatgcagggaggtggactaccgggggatccggctgcgggagtttgacctggacggagccctggcgcgcagaccacagttgatcctggtggatgaactggctcacagcaacgccccgggctgccgccacaccaagcggtatcaggatgtggaggagctgctgcaggcggggatcaatgtctataccacagtaaacgtgcagcacctggaatctctgaacgatcttgtcacctccatcacagggatcgtggtgaacgaacggatcccggatcacgtgtttgaccgcgccaaccaggtggaactggtggacattgcgcccgctgacctggaaaagcggctggaggaggggaagatttaccggcagcgccaggcgaagcaggcgctggagaatttttttactgccgagaatctgacggccctgcgggagatcgccatgcgccggacagcggaccagctcaaccgcacggcggtccaggagaaaaaggggaaggccgcgcgggcgggagaccatattctgatctgcctgtcctcagccccctccaacgccaaggtgatccgcacggccgcccggatggccgaggcgttccacagcggcttcacggcgctctttgtccagacaccggagaccaaggagctgtccggagagaatatcaaacgcctgcggagcaacctgcgcctggcggaacagctgggcgcacagatcgccaccgtctatggcgcggacccggcggaacagatcgcggagtacgcccgggtcagcggtatcacgaaaatcgtcatggggcgcgtgaatcaccggcagcacccctggatcgggcagaaaagtctggccgaccggttgatcgagcggacggacttggatgtgtatatcattccggaccgccagccgctctataaaaagccccttggaaagctccggaagtccagagtccgcttttcctggcgagacgccgtggtcacgctgctgtgcctggcgatctccacagcggtggggtttgcctttgattgggcgggcttcagcgaatccaacatcatcacgatctacattctgggcgtattggtgacagcagtcagcaccagcgggcatctgtatggagcggccaactccctgctgagcgtgctggcgttcaacttcttttttaccgagccgcgcttcaccctccaggctgacgggcccagctatcccgtcacgttcctgattatgctctcatccagcatcatcgccagctctctggccagccgcgtgaaggagcaggcccgcatggcggcggaaaagagctactatacggagctgctgctgggaagcagccaaaagctgcagaccatccggacggagtgggactgtctgcgcctgacggcggagcagctcagccgcatgtttgaccggccggtcatttatgccctgaacgacgccgacaaggagctggacttccggatcgagccggcggacgaacacacgcttctggaaaagctgagcacggaagagatcggcgtcgccaaatgggtgcagaaaaacaacaagcacgccggcgccaccacgaatacgcttccggactcaaaatggctgtttctttccgtgcggggcacccgcggcgtgatggggatcgtaggagttcccattgccggttatgtggtcccggacgcttttgaaaaaaacctgatggtggcactcctgggagagtgcggcctcagccaggagcgtattcgtctggaggaggagcggaaccagatcgcgctccagacccagcgggagagccttcaggccaatctgctccgggcggtctcacacgatctgcgcacaccgctcaccaatatcaacggcagtgtgggcatcctgatggggaaggatcagacgctcaagccggaagtgcgcgagcagctgtataccgcgattgacgatgacacgaactggctcatcaacatgacggaaaatctgctggcggccacacagctggaaactgacaggaccaagctgaaaaccgctcccgaactgctggaggatctgtttcaaagtgctgtccggcagttggaccggcgggcaagggaccaccacatctcagttgatctggaggaccagacgctcatggcgtccatgaacgcggggatgattcagagggtcatcatcaacatgatgaacaatgcgatccaatatacgcccaaggactcccatatcattctgagcgggacccgcaggaaggactgggtggagatcagcgtctctgatgatggccccgggatcccggatgaggcaaaaaagcacctgttcgatctgttttataccgcggagcagggaaagcctgacagcaagcggggactggggctgggactacatctctgccagtctatcgtcaatgcccacggggggacgatcaccgtctccgaccacgcgccatcggggacaaccttccggttcaccctgcccgcagttcggacagacggcgtgaaatgagcgtccaggacggcggtttttcattaatgttttgttaataccgccagaaatttcttaatccccttttataacgcgctgcgctattctagaaaacgcgaacgggagaatagggggcatctgtgcctgctacccggagcgaaaggagaatcttatgaaggagtatctgctgattcaagtggccgccgctgctgccattgggatcgccgcgtggcggactcttccggagacgatgatgtgtgcagcctgcgggcagctccaaagaagaaaggagttttcaagatgatggatgtattgatggtaggcaccctggcggtcagcttcggcctggtatggctgctgatccgctggtgtcagaaacagctggacgacccggagtcgtaagcgcagaaaggagatcataaccatgattgcacttggaattatcgttctgctgctgggcgcttatctcgtttacgcgctggtgcatccggagcgtttctgagatgcctgataccgcagaaaataggaggaatacgatatgttgcagctggcgctgacaatcatcatctttctgatcattgtcattccggttggacggtatatgtatcatatcgccacatggaaccacacactggccgacccggtctttgaccgtctggacggcgtcatttacaaaatcggcggcgtgaatccccatcagggtatgaactggagacagtacgctctggctctggtgggaaccaacgcggtcatggtggccatcggctacctgatcctgcgcattcagagcgtcgggatcttcaaccccaacagcatcggcaacatggagccgaccctggcgttcaacaccatcatcagcttcatgaccaacacgaacctgcagcattactccggtgagtccggactgagctacttaagccagatgctggtcatcatcttcatgatgttcgtctctgccgccagtggctacgctgcctgcatcgcgttcatccgcgggctgaccggcaagaccaaggacgacgtgggcaacttcttcgccgacctgacccgcatcaccacccgcctgctgctgccgttctccatcgtgggcggcctgctgctggtgtggcagggcgtgccccagaacttcgacgccaacatcgtggtgaatacgctggagggcaccttccagaccatcgccatgggtcccatcgccgcacttgagatcatcaagcacctgggcaccaacggcggcggcttcctgggcgcaaactccaccaccccgctggagaaccccacgatcatctctgacatgatcgagctgtactccatgatgctcttccccggcgcctgcgtcatcaccttcggcaagatggtgcgcggccgcaagaagaaggatgccgccggcgacaaggcgctggccggcagcgaatccgccggccagctgtctgcgggcggagctgagcagggcccccgcctgaaggaccacagcctgacggcgtccatctacggctgggagggccgcacgatcttcctggccatgggtatcatcttcctggtcggcctgggcgtgtgctactggtcggagctccagggcaacccggctctggcaaagatcggcctggatcagtccatgggcagcatggagggcaaggaggtccggttcggcatcgcccagtcggccatgttcaccaccaccacgacctctttcaccaccggcaccgtcaacaacatgcacgataccctgacgcctctgggcggcatgatccccttgctgcacatgatgctgaacgtggtcttcggcggcaagggcgtcggcctgatgaacatgattatgtacgccatcctggcagtgttcatctgcggcctgatgattggccgtacgcccgaatacctgggcaagaagatcgagggccgggagatgaagctcaccgcgctgtgcatcatcatccatcccttcctgatcctgttcttctccgcgctggcggtctccacctccggcggcctggagggaatcaccaacccgggtttccacggcctgagccaggtgctgtatgagtacgcctcttccgcggccaacaacggctccggctttgagggtctggcagacaacagctacttctggaacatcaccgcaggcctggccatgttcttcggccggtacctgtccatcgtgatccagctggccatcgccggttccctgatgcgcaagcggtttgtcaacgagaccgtgggcaccctgcgcacggacaccctgtccttcgctgtgatcttggtgttcgtagtctacatcttcgcagcgctgaccttcttccccgcgctggcgcttggccccatcgcagagcatctgaccctgtgggcctaaggagggcgttttcatatgagtaagaaacaaaataagaaatttatcaccccggagatcctccggggggcggtgaagggcgcgttcgtcaagctcaatccccgctatatgatgcgtaaccccgtgatgtttgtggtggagatcggctgcttcatcaccctgctgctctccttcttccccggcctgttcggggacgtggacgcaggctccctgcggatctacgacatcatcgtatgcgtgatcctgttcatcacggtgctgttcgccaacttcgccgaggctgtggcggaaggccggggcaaggcccaggccgccagcctgaaaaagacacagaaggacacggaagcccacctgctccatgaggacggcagcgagaccatcgtccgttccagtgagctgaaaaagggcgacatcgttctggtggtggctggcgaggtcatccccggcgacggcgaggtcattgagggcatcgcctccgtggatgagtccgccatcaccggcgagtccgcccccgtggtccgcgagagcggcggcgacttctgctccgtcaccggcggcaccacgctggtgtctgactggctgaagatccgcatcacctccgagccgggcaacagcttcctggaccggatgatcgccctggtggagggcgccagccgcaaaaagacccccaatgagatcgcactgaacaccctgctggtgtccctgaccatcatcttcctgatcgtggtggtgaccatgtatcccttcgccgtatacagcggcgtacagatccccgtctccaccctgatcgccctgctggtctgcttgatccccaccaccatcggcggcctgctgtccgccatcggcatcgcgggcatggaccgtgtcacccgcttcaacgtcattgccatgagcggcaaggcagtggaggcctgcggcgacgtggataccatgatcctggataagaccggcaccatcaccttcggcaaccgcttggccgccgacttcttcccggtggagggcgccagccgcagcgatctgatccgctgcgcggccctcaccagtctccacgatgacaccccggagggcaagtccactctggagctggcccgccgcctcggcgataacagcgtggagcccgcgggttccagcttcctggagttcacggcccagacccgcatgagcggcgtggacctgcctgacggcaccaaggtgcgcaagggcgccagcgacgccattgagcagtatgtgaaggaaaacggcggcaaggtccccgcggatctccgcacccatgtggaggaggtctcctccctgggcggcacgcctctggtggtgtgcgagaacaacaaggtcctgggcgtcatctacctgaaggatacggtgaagcccggcatggtggagcggttcgagcgcctgcgggccatcggcatcaagaccatcatgtgcaccggcgacaaccccctgaccgcggccaccatcgccaaggaagccggcgtggacggctttgtggcagagtgcaagcctgaggacaagatcgccctgatcaagaaggagcaggccgagggcaagatcgtcgccatgaccggcgacggaaccaacgacgcccccgccctggcacaggccaacgtgggcctggccatgaactccggcaccactgccgccaaggaagcggccaacatggtggacctggattccgaccccaccaagatcctggaagtggtggagatcggcaagcaactgctgatcacccgcggctccctgaccaccttctccatcgcgaacgacgtggccaagtacttcgccatcatcccggccatgttcaagctggctgttcctgagctgaacgtgctgaacatcatggggctggcgacctcttacagcgccatcctgtccgcgctgatcttcaacgccattatcatcccctgcctgatccccctggccatgaagggcgtcaagtaccgccccatgtcctccgggaagatgctgggccggaacatgatgatctacggcctgggcggcatcatcgcccccttcgtgggcatcaagatcattgacctgatcatcgccccggtgctggctgccctcggctttggtatgtaaggaggaacctgaatgatgaacgagaagaaacatggcattggccacaatatccggcaggccgttctggtcaccgtggtattgctggtgctgtgcggcctggtatttccggtgctgctcagcggcctctctgctgtgattttccccagccaggccaagggctctctggtgacggcagacggcatcgccgtgggcgccaagaacgtgggtcaggacttcaccgaggattactttatgtggtgccgtccctccgcgtacaattacaatacttactatgaagaggacaccgacggcgacggccaggtggagcagtactacaacgacggttctgaattcgccggcctgagctccggctccaacaactacgccccctccaaccccgccctgacggagcgggtggaagcggacatcgaggaattcctggagaagaatcccggtgtcagccgggaggatatccccactgacctgatgactgcctccggctccggcttggatccccacatctctcccgcctctgcggaggtgcagattccccgcattgtggaggcctccggcctcagtgaggatgaggtgcgccagatcatcgccgacaacaccaagggcaagaccctgggcgtgttcggagaggagaccgtcaacgtgctgggcgtgaatctggacatcgccctggccatgggcctggtgggcgagatctccaagtaatcacgggccccggatgccttcttgggcagaggacactggtatgcagtttcattttgagaaaacgctggaaaagcggtatgagccgcaggtcactgttacgaacgagaccccggcgtggctgatgatttgcctggcggagtccataaaggactggatcggccagagtcccagaatcttttgcaaaagtgaggagccgtacctgcagttcggctatgaggtgctgacgttcccggttgcggagtttgcacagattttcggcccgctgatctatgcgatcaatcaggcatggcctgtgcaggtatttggaatgggaagccaggatgagctggtcgagctgtccttcacaaaggaggggacagcccccactatccagcagaagaacgtctccgggattccatgtgcggaattgagagacctgtacttctgcgtgaagttcccggatcctctggcggcggactgtatgttccgtttgctggacgcggtggagaaaaagtctgctgccgtggccctggagtgggagtacgccgattttctggaacagcagcggctggcaagaattgaccggacactctcctattgctatgtctcacttgaagaagaggagagcgcggacccggtcggatggctttccggactgacgcttcagcagaaatgcgaactgtggcggatgtttttgggaaagcggctatttctgccggaattcgaatggctcagagatgcaatgctccagggagctgttccaaactggatcgagtggcatttagcgctctatcgtgttctggaggaagagaacattcgctttttctgtaaggacggacaatttgagctgctggacaaggaaggacaccgcatctatttcggtgtagaccattccgaggcggcagagcaggtgctgatgaaagtcctgttcccgctcaaccaatgaccgagagattctgaaataaggctgaaaggcggaccggtacatccggttcgcctttcagcctcttatgattccttaatacgggaaacgctttctttttcccgatttaagctgaaaagcagtatgataaggtcaaaggaagggatgattatgatgacctggaaaacgaggctcctgcattttgagcgcatgtgtgatgggctcgtggagcatttcctgcttcaacacaagatccttggatttctattgatttttatcgggatgcctctggtgacgctgtcggcggtatgtatttgctccaccgttcttgtactgccgctggccttggcgtttgggtacctgtgaagagggccttaatacaattttaatacgagcccttaaaaattaatgcccctttaagacgaaaagtggataatgtgattaagactccataaagacatattaaggggtggggcttacgcagcggccttttcataaaagctggtcgtctccgtttcggatcatcatattcggatttctcttggtgattctgctggggagcttcctgctgatgcttccggttgccacaaaagaaggtgttgtcacgccgttttcggatgctctgtttactgccacgtcggcggtatgcgtgacaggcctggttgttcacgacactgctacttactggtcgaatttcggacagttcatcatcgtattgcttatccagatcgggggccttggggtggtaaccgtggccggtgctttcggtatcctctccgggcgccggatcggcctgatgcagcgcagcacgatgcaggaggccatcgctgcgccgaatgtgggcggggtcgtgcgcctgacaggttttatcctgaaaactgccttggtggtagagctgttgggggctgccgcgctgttccccgttttctggcaggaattcggcttgataaagggactttggtatgccctgtttcactctatttccgccttttgcaatgcgggattcgacttgatggggatcaaggagcccttttcgtctcttgtggattacgcggacaacccggtggtctccgttgcgatcccgctgctaattatcatcggcggcattggattcttgacttgggatgacatccgtacgaaccgcctgcacataaccagataccggatgcagagcaaggtgattctggtggtcaccggcagtctgattctgcttcccggcatctatttcttcctgttcgagtttgcgcgggagcctgtggggaagcgactcctcttatcctttttccaggcggtcacgccccgaactgcgggttttaatacggcggatttgaccgctatgagcgaaagcgggcagacgattatcaccatgctgatgctcataggtggttcgccaggctccactgcgggcggcatgaaaacgacaacgctggcggttcttctggcgaacgcgctggcggtttttcggcgcaatgagtatccgcatttctttaaccgccggatctccaaagagaccatctcccaagcggcgacaatttttgcgatgtatctggggctgtttctggccggaggactggtaatcagccgaatggaggggcagcctattctggacagcctgtttgaaacggcttcggccatcggaactgtgggcctgtccttgggactgacgccgcagctgcatacggtctcacgcctgattttgatcggcctgatgttctttggacgggtaggggggctgacgctgatattcgctgccctttccagcacccagaattccagcgcccgactgccgcaggagcggattacggtagggtgaatctgtaaataaagaggatgaaatacatgaagacaattttgctgatcggtttaggccgcttcggccgccatgtggccatgaagctccacgaattgaaccatcaggtgatggcggtggatcaggacgaggaaaaagtcaaccggattttgccctatgtgaccagcgcccagatcggagacagcacaaacgaggaatttttggcctctttgggggtgcgaaactttgatgtatgtatcgtcgctatcggcgataatttccagagttctctggagacggcttccctgctgaaggaggcgggggcgaaaaaggtggtggcccgggccgcacgggacattcaggccaaattcctgctgcgaaacggggcggacgaggtcgtctacccagagcggcagatcgcggtctggaccgccatccgatacagctcggataatatttcggactatatcgcgctgggggacgatcatgccatctttgagattcaggttccggataactgggtcggcaagaccatcggccagctggatgtcaggaaacggcatcatgtgagcatactggccatcaagcagaacggacacttcgccatgacggtcattacgccggagacctgtctcccggccaacagcaccatgctggttttgggaacaaaccagaacgttcaaaaatgcttccacatctagcggctgcggctccaggcatggaaaggacaggttgggatggagtatatgattttgcttggcggccttctcgtgtttgcgctggtcggtttctggatgatgggaagggttgacaggtttctgaatgcggcgcgggcagagcaggaggggcggcagcatgccgagtgcttgaagatcgcggcatcggacccctgtgtgatgcagcctgtttttaaaactgtgtcggcgcttaaggagcagcacccggacttgtggtgtgagctgtccttcggaagagaagcggaggttttgggatgtctcagcacaggcaatgtggacgttgcgattctccccggtgagacagggggcggagcggcgtttgaaagcagagactttctgttttcgccggtttctttccgggcggtggaggattgcacgaccttgtcatctatcgacacaagcgtgcggcggcaaaggatattgctgaaacagaatacatctgcttccctggctgcggaatttgttcagagaatttgtgaacagaaaccgtagaaacgtgctataatagagccgtttgaagggaggcggtaatatggagacttctgcgcaggtcggacggggagagcggaggcggaaaggatcccttacgatttttgccggttatttctccggcacgggaaagacctaccggatgctggaggctgccggccgcgccgtgcgggctggagaggatgttgccgtcggcctgctctcctgcagccaatggccgcagacgcagatcttggcggatggctttgagacgctgccgctcaaagcgttttcggaggcggggaagaccgtttatgagcttgacgtggatgcctgtctgaagcgcggcccaaggcttctcttgatcgacgagctctctcatgaaaacgcgggcggctcccgccacagaaaacgctgccaggatattgaagaactgctgcaggcagggattgatatctatacgacgctggatgtacagcacattgagagtattcaggacaccgtttccgaaattttgggcgctccggccgaggagcggattccggacagggtgttcgatcaggccgcgcgcgtggaattcgtggactgtgaaccggaagacctgcgggaacgcctgatccggcaggaccggacggatctgctgtctgaatattcacagcccaaattgagcgcgcttcgggagcttgcccttcgccgctgcgcggaccggacggctctggatacacaaaagagccggggcggagagaggtaccggacccgggagcatgtcctggtctgcctttccgcagcaccttccaatgaacgtgtcatccgaacggctgcccggatggccgacgcgttccgctgcggctttacggcgctgtttgttgagacaaaaaattttcagtccataccgcagccggatcggaaccgtctgagggccaatctgcgtttggctcaacaactgggtgcatccgtcgagacggtatatggcgatgacgtggcctaccagatcgccgaattttccaggctgtccggcgtgaccaagattgtgctgggccgtggagagacttccaaccgcatcctgttttggaagccctcgctgacggaacggctggttgagctcacaccggaactggacatccacatcattcctgacactggaacagcaaggcggtttgcctcccattacaaaaaagagctgtatgcacccgcggtccccctcctggatttgctgaaaagcactctgctcctggtgctgtctacgctggtgggccttatcttctattatctgggcttgagcgaggccaatatcatcacagtctatatcctgggggtgatgctgacctctatcttcacaaagagcgcggtttgcagctttctgaactcggttgtgggcgtcttggcgtttaacttcttttttacggagccaagattttcactgcatatctacgccagcgactatatggtcacatttttggtcatgtttctggcatcccttcttacaggctctctggccgccaagctgaaatctctggcgaagcactcagcccagctggcatggcggaccaagcttttgtttgaaacgaatcaggaattgcagaaggccggaacccaggacgagatcctttctgtcaccgcacggcagctgctgaagatttttcagcgcgatattgtcacctatcggtcagatcagggacagctggacgcgccgaagatctttccggttgatgatgcgttttccgaaagcaaatactccgccgcatcggagcatcaggcggcccagtgggttctgaccaacaacaagcgggcgggcgccgggacggagacgttttcggatgcgtgctgcacatatctggccgtccggaccgcagaacaggtatatggggtcataggcgtcgcggcctctggcgaggagatggattcctttgaaggcggactgctcctctcgatcctgggggagtgcgccctcgctatggaaaaccagaaaaacctggaggagaaagaggcggctgcggtcctggccaagaacgagcagctgcgggccaatctgctccgctcgatttcccacgacctgcgcacaccgctcacctccatctccggaaatgccagcaaccttctctccaacggagatatgtttgacgcaaagaccaagcatcagatgtatgtggatatttatgacgacgccatgtggctcatcaatctggtggagaatctattatccgtcagccgcctggagggagggcagatgaatctgcacctgtccacagagctgataggtgaagtggtggctgaggcgctgcggcacatcaaccgcagaagcgcggagcaccatctgcatatccagagcggcgacgagtacctgctggcgcagatggacgcgcatttgatcgtgcaggtcatcatcaatatcgtggacaatgcgatcaagtacacgccgcctggctctgacattgagattagctgggagcggcaggggcggttcgccgcactgtcggttgctgacaacggcccgggcattcctgactcggcaaaaccccgcgtttttgacatgttctacagcgcctcgaaccggattgccgacagccgtcgcagcatggggctggggctggcgctgtgcaagtctatcatcacggcccatggcggggagatcacggtggctgaccacgcgccccatgggacagtttttacgtttaccataccaattgaggaggttgaattgcatgaataaacccttgattttggtcgtggaggacgatgcgcctgtccgcagtctgatcacaacgactctgcgggcgcacgattaccgttttctctctgcggccaacggggaatccgctattctggaagccagttcgcacaatccggacatcatgctgttggatttgggactgccggatctggatggcgtagaggtgattcaccgtgtccgcacctggtcgaatctgccgattattgtgattagcgcccgcagcgaggacacggataagattgaggcgctggatgccggggcagatgactatctgaccaagccgttctccgtggaggaactgttggcccgtctgcgggtaacccagcgcaggctggctaccctgcaggccggagtggtgaacgaaggcgctgtattcaccaacggcaggctgaaggtggattatgctgcggggtgcgcgtttctgggcgaagaggaactgcatctgacgcccagtgagtacaagctgctatgcctgctgtgcaagaatgtgggcaaagtgttgacgcacaccttcatcgcccagcagatctggggcaggagttgggaaaacgatgtggcatctctccgggtctatatggccaccctgcgcaagaagttggaacgggatccggattctccgcaatatattcagacgcacattggagtagggtaccggatgctaaaggtggagtaacagcggatgcattccaatttcagtgaaaagatcgttttattcttcatgtgatgtgtgatgcattttgcggcacttgaaatactggattccatgggcataaatgagtcgagattgaaaaaaattgcctggacgactgtttgacacctatttgtaaataacccggagctgttgcggtgcaacggttccgggtacttctcctcaatgtgccgaaatttgtgcaactccacggaaccccttgtgctccaatgagtttctctttgacggactgagaactccaactttgcagaccattgcctcgaatgcagctgggcgcaccaaggaccgccgaaaattaaaaattttcggcggtccttgtctgcggctatgaaaaacggcccactgacaaattggagctgcgggggatgtcccatccgacagtgtgacaaaggcgaaagagacagccccggcgttcatgaggcagaggcgtcccggcagcggtctttaccgcaggtacagggcattccggctgatgagaaacgtaagagcggttgtttctgctgcctgtctggcctatccggcgtgatggggaaattggggttccaagtttttaagagccgacaaatcaactgggaggcgtatgcgcagaaactggaggctctgtgagaaggaggaagcctgtcccgaaaggggcaggcttcctttgctgtgagatggatactattgagagcggttaaagaggataaaaataaagtttatacggggccccatggtacaaccaagtaaaaaggcggccaaaacacgatgaagggactgtatgaactgttgtcatactgccggccctatcaaaggaccgcatacttgcgtggagtgattggcacggtattcccgcggtgtcataccagagagaacattgagctgcttatggaagtaaattgcgctgtccaacccgcagcttgaaaagaaccacacatgtgtctattcagaaggaaaaaccattcaacgttatgatgccaatatggaataaatttgcccagctacaaattgttgaatataaccttgattagctgcgcagggaaaagccgcagtaccgcgcggagcggttttttcgcaataggcacctagcgatattgtgtgttcgatgattattgatcgtcttcctgcagaaaaacaaggagagcagtctgggggttatctgttcttaaaaatgcttcctgccgtatctgcagtcaagagcgcatctgcaatttctgctttcggtgcgtttttgggtaccgactgaacaatcgtgcagaagggaatcagcttgccgtggagaattctgtgcagctcaggaataagggcatagcatttccggatgctgtgagtcaccgctagaatgccgcgctcaaaaccgacgccggatggatgggtgctgacctcaatgatgttgtccgtggcagatgtgcagatcttgcgttctcctgcgaatgttgccgcatagccgttctccggcagagggtggccaaccatatatccgcgatggccggaggccccccgacgcggctgttgcttctcgagtgcaggcaagccccggtttcaaaccatgtcaccattgcgtcacccattcctgcgacctaaaatcttgcgggaggagggcagatcatgcagggatctaccataacaatatcagggcttgcatctaaaaacagataggcgtcaaacacaccccggtcatcatacatcgcgctgagagaagagcggggagtctgctgagcacacctgaaatctggcatcttcggaaagccagagcaggcagaaaacggaaagtctttctgcctgttctgaatactggagttacttcttgtagtaggtgggtcggcccttctcgtcgtggtccttgtcgaaggtgggataggcgccgccgttgaagccgttgtagcccaggggattgcggaagcccagggggttcttgcccacaggatgggtctccagcagctccttgatcagctcactgtagccctccacaacggcctccaccagcagcttgtcgcccttctccttggtggccttggtggggttgccgatgacgccgtaatccaggtcgtccttctccagcagcgcgaaggtgccctcagcgccgtagaactgccagcggtgagaggcctcgccgggagccatcttccacttggggtccaccaggggcgtgccgccgccgtcgatggccaggtccatgtggaccaggtcgccgtacagggacagcgccatggaggtctccgcctcgtcggcgtgccacatgaagtcctccagcacgttcttgttgtcccgcaggaagtcataccaggtggaagccagaacgaagtagccctccgctgagcgacggttctgcagtctggcagggccgttgcccgcgaggcggcggacctgctgtccattcagtattatgtccgggacatcgaagaagagatagccaagcgcatgaagcagccggtcaaggagatcagcgaggtggaaaaggatgctgagagccgcttcgatgtcttcggcaacattctggcccaggtgttggcactgagtcctctccataagggggtattggagtgcccgcccgatttggcagagcgactccgaaggcgttcctctctggagatggtcacgacatcactttgccaacaaggggccggacacagactgcgcggtgctgctataaacgattggttatcccaaagcacagccctgtccaccaatttgggtggacagggctgtgccgtgcatgaaatggcaggttcagaattgaaaagtcgctgtgtctcttgattggcctccgccgcggcaatgaactcccggaatacaagggggcctgcctacggtaggaacaggggcaggggcctattggctccacatcgggctggatgtccgggtccggcagttctgcttccggtgccgggtgggcttttccattcagaacccgatgtacgcataaaaggcccgggccggttgttgcccgcctctgatgacaaatactgccccgtgccgccagggggccctggtgcccaaggccggggccagacatgggccagacttctggagggcgacattcaccccgccaccggcagccgacccggggaggccgccgcaattcccgcccccgggccgaatactgtgctgcggatcagacggagaacaacaggtcggagtaggtggggaaaggccagcggtcagagctggtgagggtctccagctgatcggcagcccgccgggcggtatccatatcggggatcaacacatcatggctgtatcgcatagcttccgcagcgtccgcgggaattgcagacaggtccgtctccagcttgtcggaggcggccatcagggcatccgtcaagctgccgatctggcaggcagtgctgacctcatactggcagcaggcacccaggtcctttttggtaccggcccggctgcacaggtccccggcaaaggcggagacggcgggtaggatttggcggcggatcatgtccgtcatggtccgtgcctcgatacagatgaccgtagagtagttctcaatgtggatctccgcccgggcctcgatctcctccttggtgtagatgccgtgcttgacaaacagatccacgtttttgggagcggtgtacatgggcagagcatcagcggtggaggtcaggttggagaggccacgcttcccggcctcctccagccaggcctcgtcatagccgttgccgttgaagatgatccgctgatgctcggtgaatacccggcggatcagcttctccaggtcggcctggaagtcccgggatacctccagctcgtccgcaaactgttccagttcctcggccatgatggtgttcagggtgatgtttggaccggagatggactgggaggagcccagcatccggaactcgaacttgttgccggtaaaggccatgggggaggtgcggttccgatccgtgttatcctgggggatagcgggcagggagtccacgtcgatcttcagcgtccgcttgccggtgctctggaaatccgtgtcgttgatgatggagtccaccacagcggagagctcgtctcccaggaagatggagagcacggcgggc

SEQ ID NO: 4957 - DNA, 135299 bp, Unknown
  gut microbiota DNA sequence
accggtggtcgttgccggggaaggccaccgtggcccggagaaagtcctggtagtcgtccacacctttgacgaaggccgccaaaaacagcaggaactgggcattctgccggggggtggagccgggcttgaacaggttcttgcccgtgtcggtggagagggaccagttgtcatgcttgccggagccgttgacgcccgcgaagggcttctcatggagcaggcacaccagtccgtggcggtcggccaccttcttcatcatttccatggccagctggttctggtcgcaggcggagttggcatcggagaacaccggcgccatctcatgctgagcaggggctacctcgttgtgcttggtcttagacaggacgccgagagcccagagcgtctcatccagatccttcatatacgcggccactctggggcggatggcaccgaagtaatggtcctccagctcctgccccctggggggctttgcgccgaacagggtccggccgcacattcgcaagtcctcccgcttctcatagagggccttgtcaatcagaaaatactcctgctccggccctacctgggcagtgacccgcttcgtctctgtgtcgccgaagagccggaggatgcggaccgcctggcggctgacctcgtccatggaccgcagaagaggcgtcttcttgtccagggcttcgccggagtaggagcagaagacggtggggatgcacaggctgccctccttgatgaaggcaaaggaggtgggatcccaggcggtgtagccccgggcctcaaaggtggcccgcagaccgccggaggggaaggaggaggcatccggttcaccccggatcagctccttgccggagaattccatcatgatctttccgccgcccacaggggcgatgaagctgtcgtgcttctccgccgtgacgccggtcatgggctggaaccagtgggtgaaatgggtggcgcctttttccacggcccactgcttcatggcctcagcgatctcattggcggtggagaggtccaggggcgtcccctccgtcacgcacttcttccaggcgctgtaagacgccgaggagagacgctccttcatagtgccttcgttaaataccagactcccaaacagctccggcaatttcttcgtctcacacatcacacaaaacctcctgtctcaaattcgttctgtatcaaaaaggaatgcggagagctttctcacattccgctctgaccgtagttggagaggacccgggcggagggatcgtccacgtcgcagccctcccaggaccggttgggcatccagaagtcccggatcatccgggcctggccggggtaacactgctcaaagatctcccggtacagcaggctctccttggtgaagggcggacagtagtcatactgtttgcgtcgggtctcaaactcagaatccgtgtacttctcctccgcgtaagccttcaggtcgtccaccatggagtggcccactgcgtcggagaaggcggccttctgccgccagaggatgctgtccggcagcaggcggtccttttcaaacgcgtggcgcagcaggtacttgcccatgccataggtgttcattttcagcgccggatccaccgccatgacgtatttcacgaagtccaggtcgccgaaggggacccgggcctccagagagttgacggagatgcaccggtccgcccgcagcacatcgtacatgtgcagctcatccacccgctttttggactcctgctggaaggctccggcgctgggggcaaagtctgtgtacttgtagccgaacagctcatcgctgatctcgccggtcagcagcacccggatgtccgtcttttcgtggatggccttgcagcagagatacatgcccatgctggcccggatggtggtgatgtcccaggtgcccagggcggcgatgacgacgggcagggccgccagaacctccttccgggtcatatagacctccgtgtgatcggcgccgatgaactccgccgcctcccgggcgtacttcaggtcgatggcatccgtgtccatgccgatggcgaaggtacggatcttcttccccagaattacggagctgatggcgcacaccagggaggagtccagcccgccggagagcaggaagcccaggggagcgtccgcgtccagccgtttatccaccgccgcgatcagcttgttgcggatgttgcggcagacggtctccaagtcatcgggggagtactgcgtgacggtggtgagatccgcatagcggacaaattttccgtccgcgtaatagtgtcccggcgggaaggggcggatccccttacacaaccccaccaggtttttcggttcgctggcaaagacgatggcgccggagcggtcatagccgtagtacaggggccggatgccgatgggatcccgggctgcgatgagctcatcccgcttggaatcgtagatgatgagggcgaactccgcgtccagcttggcgaacatctccaggccgtactcccggtacagaggaagcaggatctcacagtcgctgccgctgcggaaggagtagcctttttccgtcagctgccgcttcagggggcggaagccgtagatctcgccgttgcagaccacatagtccccgtccagctcaaagggctgcatccccgcctccgtcaggcccatgatggccagccggtgaaagcacagccagccggacggcgtctcgaggatctgagacatgtccggtccccgggaccgggttcggtcaaagaagggcagaagttcctccttggtgtaggtctttttggaaaaacccataattgcgcacatagatagaagcacctccgaaataaaaaagatcgcagctccgtcctgaaatttcaggacgaatagctgcgatccgcggtgccacctgacttgccccctgatcggggacctctttgactaggctccaacaagcccgcgtgaggtaacggtcacgactcgtttcacttactggcggtctcccgcgttcagatcacagctacggagtgttcttcccgcggattctttggtacggggttctcaccatcccccgctcactggcccggaacatccgcggtacttttctccatcaacgcctttgctgatgttaaaattatggtctaaagattaccactggggatatccgctgtcaatgtgggaatatcccaaaacccagctgaaaatttcctgaaatttctccatccttgtgtcagggggatgtcccatctacccaatggagcgtaccagattcgtgtagccggtcagataccggtccacctccgcagcggcggagcgcccttcggcgatggcccacaccaccagggattggccccggcgcatatcgccagcggcgaacaccttgtccgcattggcagcatagctccccggcgctgtgcggaccgtcctgtccgcctccacaccgaaggcctcgcacacgccccgctcacacccggcaaagccggtggcgccgatcaacagctggcagggcagggtatccccctccgtggtgaccacaccggtcagggaaccgctttcccccgccaccaggctctggacctggacgccgaaccgccggggatcctggcccgtaacggccagcgcctcttcgtgggcgtaatccagcggcaggcttcccgcagcgtccaggtaatccgtccggggacggcgcaccagctgggtcacggagcggcagccttgccgcagggcggtggccacacagtcgctggcggtatcgccagtgccgatgataaccacatccagcccggaggcggagggaaccgccgcctccgccttgccgaactgagcccgctccacagcagccttcaggtactcggtgccgtagcatacgccggagatgccggtggtgtccagtcccaagggccggggtgctccggccccgcagcagaggatcaccgcgtcgtactccgccagcagccgctttgccacggcaccctctgaggcgtccacaccgcagacgaaggtgacgccctcctcggtcatcaggtcgatgcgccgccggaccacagatttgggcagcttcatattagggatgccgtacatcagcagaccgccggggtgctccgcccgctcgatgacggtgaccatgtggccccggcggttcagctggtccgctgccgccaggcccgccgggcccgagcctaccacgcagaccttcttccccgaccactggggcggccggcgtgggcggagcttcccggcgccaaaggccgcttcgatgatgctcaactcattgtcccggaccgtaatggggtccccatagatgccgcagatgcaggcgttttcgcagggggcggggcacacgcggccggtgaactccggaaagctgttggccttcagcagccggctgagggcgtggccccagttgccggagaggatcatgtcgttccactcggggatcgggttgtgcaggggacagccaaaggcctttccctcatatatcatccccgcctggcagaaggggacgccgcagttcatgcaccgggcgccctgctggcgccggatctcctccggcagggggaggtggaactcctcccagtcccggacccgctccgccgcgggccggcggccatcctcccggcgggtatattccaaaaagccggtgggttttcccatgtcgtccagcctcctctcaagctctggtattggcgtagaacgcctcgatctccgcctgctgacgggtcatgcctttctcctcgtactgggcgatggaccggagcatccggtcgtagtcccggggcatgaccttcttgaagcaggggacgtaggagtggaaggccgccaggatcttcttcccccggggggagccggtggcggccacatgggcctcaatgagggagcggagctcggcgatgtcgtgaggctccgtcagggtgtccgtcatcacctggtccttgttgaggcgcatatagaggtcgtgcttttcgtccagcacataggcgatgccgccggacatcccggctgcgaagttctttcccgtggggccgaggatcacgcagcggccgccggtcatgtactcgcagccatggtcccccacgccctccaccacggcgatggcgccggagttgcggacgcagaaccgctcgccggccatcccgttgatgaacgcctggccggaggtggcgccgtacagagccacgttgcccacgatgatgttctcgccggggtcgaaggtgctgtccttgggtggatagagtaccagcttgccgccggagaggcccttgcccagcccatcgttgcagtcgccctccagctccagggtcagtcctttggggatgaaggcgccgaaggactggcctccgccgccatggcaggtgatgacataactgtcatccggcagggagtccccgcactgccgggtgatctcggcgccgaacagcgtgccgaaggcccggtccgtggaggagacggtgagctccaaccggccggtccgcttccccttcagcgtcttgcccagtttggccagcagcacgctctcatccagggtccgctccagatgaaagtcgtaaacatctccgggattgaagtgggacggcccgccgctccagggattttccagcaggctgcggaggtccagggtctccgcccggtgggtcaccagcttctcccggacccgcagtaggtcactgcggcccaccagttcatccacggtgcggatgcccagggccgccatatactcccgcagctcctgggccacgaattccatgaagttcaccacgtactccggcttgccggagaagcgggaccggagctggggattctgggtggcaatgcccgccgggcaggtgtccaggttgcacacccgcatcatgcagcagcctagggccaccaggggcgcggtggcaaagccgaattcctccgcccccagcatacaggcgatggccacatcccgcccggtcatcagcttgccgtcggcctccagggccacctggctccgcagaccgttggcgatcagggcttggtgggcctccgccacgcccagctcccagggcaggcccgccccgtggatggagctgcggggcgcggcgccggtgccgccgtcatggccggagatcagcaccacctgggcaccggccttggccacgccggcggcgatggtgccaacccccgcctcgctgaccagcttcacgctgatccgggcccggcggttggcgtttttcaggtcatagatcagctgggccaggtcctcgatagagtagatgtcgtggtgaggcggcggagagatcagtgtcacgccgggggtggagcaccgggtcctggcaatccagggatagacctttttcccgggcagatggccgccctcgccgggcttggcaccctgagccatcttgatctggatctcctgggcgctggtgaggtaggcgctggtaacgccgaaccggccggaggctacctgcttgatggcggagcaccgctcatcgcgcaggcgcgccgcgtcctcgccgccctcgccggagttggacttgccgccgatgcggttcatggcgatggccaggcactcgtgggcctcctgggagatggagccgtagctcatggcgccggttttgaatcgcttgacaatggacgccacagactccacctcgtcgatggagatgccgccgctctcatcgaactggaagtccagcagcccccgcagggtatggggcttggcaggctcgtccaccagggcggaatactccttgaaggtctcgtagctgccctcccggacggccttctgcagcagcaggatggtccgggggttgtacatgtggtcctccttgtccgggccggaccgcagcttgtggatgccggtggagtccagcgtggagtcgtagcccaggcccaggggatcgaaggcctggctgtggttccactccacgccctcctcgatctctgccaggccgataccctccacccggctgactgtgttggtgaagtacttgtccaccacgtcccggttgatgcccaggcactcgaagatctgggcggactggtaggactggatggtggagatgcccattttggaggcgatcttcacgatgccgtggaggatggcgctgttgtagtcgttgacggccgcagtgggatccttatccagcatccccagggtcaccagctcctctacgcactcctgggccagataggggttgatggcctgggcgccgtagcccaggagggtggcgaagtggtggacgtcccggggctcggcgctctccaggatcatggagactgcggtgcgctttttcgtccgcaccagatactgctccaaggcggacaccgccagcagggaggggatggctacatggttctcgtccaccccccggtctgacaggatcaggatgttggtgccattcttgtaggcccggtccacgttgacgaacagccggtccagggcattggccaagggagagcccttgtagtacagcagggagatggtctccacatggaagccaggccggtccatgtagcggatcttcatcagatccacggaggtgaggatggggttgtggatctggaggactgtgcagttctccgctctttcctccagcagattgccgccggagcccacatacaccgtggtgtcggtgacgatctcctcgcggatggcgtccatgggcgggttggtcacctgggcgaagagctgcttgaagtagctgaacaggggctggtgcttttccgacagcaccgccagcggtgtgtccacgcccatggcggaggtgggctccgccccatcccgggccatggggaggatagcgtccttcacctcctcataggtgtagccgaaggccttgtacagccggtcccgccgctcctgggaggaccgctccacacgccggttggggatgggaagatcccgcaggtataccaagtgggcatcgagccactcgccgtagggctgctggcgggcgtaccgctccttgacctcggcgtcgtccaccagtcgaccggcagtcaggtctgccagcagcatccgccccggctggagccgggacttcttcacaatcttctccggcgggatgtccagcacccccacctcggaggagagaatcagctgcttgtcggtagtgagataccaccggcaggggcgcaggccgttccggtccagcaccgcgcccaccgtgtccccatcggagaacacgatggccgccgggccgtcccagggctccatcatggtggcatagtagtggtagaagtcccgcttctcccggctcattttccggtcgttggcccagggttccgggatgcacatcatcaccgcctggggcagtgggatgccgttcatcatcagaaattccagggtgttgtccagcatggcggagtcggagccgctctggtctaccaccggcaggatcttgtccatgtccgcctccagtacggccgagtgcatagtctcctccctggccagcatccggtccacgttgccccggatggtgttgatttcaccgttatggaggatgtagcggttgggatgggcccgctcccagctgggggtggtgttggtggagaaccgggagtggaccagggcgatggcgctctcacaatccggctccgtcaggtccgtgtagaacttccgcagctgccccaccaggaacatgcccttgtacacgatggtccggctggagaaggagcaaatgtaggtgttcacattggattgctcgaactcccggcggaccacatacagcttccggtcaaagtccaggccacgggcgcagtctacaggccgggccacaaagcactggcagatgcagggcatacagtccagggccttccggcccagcacctccggatgggtgggcacatcccgccagcccaggaagtccagcccctccttggacgcgatgatctccagcatcttctgggcctgggcccgcttcagcgcgtctgcggggaagaagaacatgcccacgccataatcccgggggccgcccagggcgatgccctcggcggaggccgccttcaccatcagcttgtgtggcacctgaatcatcagccccacgccgtcaccggtctcgccggtggcgtctttacctgcccggtgctccagcttttccacgatcttcagggcactgtccactgtggcgtgggacggcgtgcccttcaaattcaccacggcgccgatgccgcaggcgtcgtgctcccacaggggatcatagatattgtgtatgttctgcgctggtccactcattgggactgcctcccttgtcgtttcatcgtcaggcttcagcctgttgtgtaccgctccaggatcagccgggcggtctctgcaagccgcagccccgtgtccatgctgtacttctgcagaaagcggtgggcctccgcctcgctcatgaggtttacctccatcagcaccgccttggcccggcagatcagccgctcctcctcggcacttcgctggatatgaagccgggaagccggggcgccgcctgcaaggactccctgggccagatccagcgaggcgaagaactccgcccgggaggaggggaccgctaacttgatgaggttcctgtccccgcacagctccagattcccgggagaggagatgaccagcaccggggcgatgcccgtgaggtccacggccagcatctccgcagtcatgtcccgcagccggaaaccgcagatgacgacggctccgcccagcttccgggcggctcggatggtttccgcgccgctgaagcaggagatggacggcgcgaggccgccggagcccagaatgcgggtgatctgggcgtgggctttctcagaggcaaacgccaatatgatcctgtccatggaatttgcccccctcctctctctgcggccctgtcagaagggccggcaggtcagtacgccaccagatactgttccagctcccactgggacacctgggcggcgtacgaccggcactcccgacgctttccggccagatactgctccgtcacgtgggcacctagcgcgtccgtaatgacgctgtctgcctccagggcccggacggcctcctccagagagccggggagccgctggatgccggaggcgtctcccacctcgtaaaggttgccggtgaggggggcggggggcgtcatctgctgctcgatcccgtccagtcccgcggcaaggcacgccgccagggccagataggggttgcaggcgggatcagggctccgcagctccacccgggtgctgtttccccgcggtgttggaatgcggaccaaggcggagcggttgccggtggaccaggccagatggcagggggcttcgtagccgggcaccagccgcttgtagctgttcaccagtggattggtgacggcacagcatccccgtacgtgtcccagcagtcccgcgatgaactgataggccagcggggacaggtgccggggatccgcctcgtcatagaaggcatttttcccatcccgaaacagggacatatttacgtgcatgccgctgccggcggcgccgctgacgggcttgggcatgaaggtggcgtggaggccgttcttctgggccagagtcttcaccgccagcttgaaggtcatgatgttgtccgcagcccgcagggcgtcggtgtactggaggtcgatctcgtgctggccggctgccacctcgtggtggctggcctccaccgccacgcccatctgctccagattcaggcagatctcccggcgggtcccctccccatggtccagagggcccaggtcaaaatagctggcctcgtcggaagtccggatggtgggctgaccgtcttcatcggtctggaacagaaagaactccagttccgctcccacattgcaggtgaagcccagggcgtcggcacggcggagcacccgcttcagcacacctcggggatcaccggcgaaggcggtaccatcggggttgtggacgtcgcagatcagccgggccaccttgccgtactggggccgccagggcaggatggcaaaggtgtccaggtccggccagagatactggtctgattcttcaatgcggacgaatcccgcgatggagctgccatccatcataatctggttgtccagcgcccgcccgatctgagaggcggtgatggctacgtttttcagctggccgaaaatgtctgtgaactgcatacggatgaactgggcatcctcctcccggaccagccggatgatgtcctccttggtgtagtgacgcatgagcctgactcctttccgatggtgaccgtgtatggacgcggagcgcccctccgtgaaaaattttaaaaagaaaaaagagcaaaggataccgccaaagggcgcctttgctctcagtgctattattatacgaactctaaggcggtgttgtcaagacacttgggggcccggaatccccacagacggaaaatttgtgggaccgcctaaaatcgttccgccgtccccaggagctttggcgaaatcgacaaaaaatggaggaatgcgttgacagctccgacaaagctgactgcgcgcccgccatcaaacaaaggtactttggcccaccatcccacagcgccttgtttgatacacgcaacgagacatatcccactcaatggcgggggcatttcttttggcaaaagaatatgaccgacacatcagcggttatgaagatcgtaagcacaccatcttgcaggacggcgattaccccgcaggccccggatgcccggtcccctgaccacgccggacgaaaagggccgttgcccgcaggctgctctggaacggcccttccggggaaatcttccattggcagcagttatcccatgacttaggatgcccgctgccgtgcagctgggaccgcgtttcccccggcgggaaggaaacacaaaacgcgcccggaccgggaatcccggtccgggcgcggcgcgtggagacagcgcggatttacggctgccgctggtggatctggcaggagggcagatcgtagaagggctctgccgccgtaggggtcaggccggatacggccccggtctggtacaggacggaggaggacttaaagcacaagggcagaataggcgcttgctgctgaagataggcacacaggtccgacagagctgcggcccggtcctccgctgcggcgcaggcggccaggagctgctccgtctggggatccgcccagccgccgtagttcagactgccgccggtgcccaccagggcggaaaggtcccaattcgcaggcagccgcacttcgccatagtacaggtcgaagttcccggcggccagggcggcggcatactcctcccagggcagggcctccacttggatctgaaggtcgaaatccgacagggcctgggcgatatgctccgcagcggagaccttgaaagtgttctcctgattcaccagcagggtcactgtgcgggtccggccggtgttcagtcccgctgcctccatcgctgcggcgaaatcgtcataggagtatagggactccagctccgccgggtagagcggggagacaggggagaccgggaactgggccgcccgggcgtgtccggacagcacggcgctcaccagcgtctcccggttgatgcccaggcccagggcccggcgggcggcgctgtcctgaaagggggcgcgggcggtgttgaagcccaggaactgaagcactgtggtatccgcatcctcatagctgatgttgccggtggcggtgatgggctccgtgccgatcaggtcggcagtaatcaactgcacctcgtgggaggagaactggtacagtatggcctcccggtccctggcggcggagagggcgatccgctccgcggggcgggactctccccgccaccagccgctgtgggacgccagacaggcacccgcttcatcggtggtgaaatagtaggggccggtgcccacaggggtgaggctttcctcggttccggacttgacgatggggatgtccagcagggccgggaggctggagtccgggcgggacagggttacgattaccaccccgtccccggcggagacagcggccacatgggccagccgggcgctgtaccgctgggaactcttggcccgccgcagggtggccgccgcgtccgccgccgtcaggggggacccgtcggaaaaggtgacgccgctgcggagggtgaacgtgtaggtgagggaggcggcgtcataggtgtagctctggcacagccacggctggggttccagctggcggtccaggcggaagagtccctcgtagatgagggagcccgccacctgctgcataccgtcggcacaggtcaccgggtccagcgtctggtccgggtcatagggaagggtgaacgccgcagggaggatcacctcctcctgctggtcggcgggctcctggtcccccagcaggccgttggcggactccacgggggcttccgtccagcagccggacagcagcagggtcactgcccccagcaggcacaggatctggatgcgcttggtcttggtcatggcacaggccctccggcaaagagtgtttcaaaggcagatcacggccacctgtgcgccccgggcctcgcccatcttccggtgggaccagaagaggtcggggcggcaggcggtacacaggccgcagatgtcgatatgctccggcgcgacaccggcgtggagcagccactgacggttcagacccgccaaatctacatggtatttgggccctcgacgctccagatacggccccgcctccggccccagggcagaggcccgcatggcctccggtacgtcgccgtcggtctcaaagcagcatttcccaatgcagggccccacggcagccaggatgcgttccggtctggcgcccagcaggcggaccatctcccggacggtcttctccacgattccagcggcacagccccgccatccggcgtggaccgctcccacgcacccggcgtccgggtcatggagcagaaggatgccgcagtcggcggagaacaccaccaggggcagtcctttttcagcggtgatgagggcgtcggcgtcgtagtcccggtcccggatcagacccttcccggcgtcggcggcggtgcagagccgcacatcatcccgatggacctgccgggagaggacggggtacgccgagtccatatccagggcggcgaaaaagcggcggtagttctcctccacgttctccggcgcgtccccgcgtccggggcccaggttcagggtatcccacggcgccggagacaccccgccccgccgggtggagaatccgtggcgcaccccgcccagcaggggagaggcgagccagaccagactctgttgttcatgggtgacaaatgacatggcggcctcctttgattgagcatgaaaagggacgtcaggagcgttcctggggatcgttcaccgggtccgcaaggcggcgggaaccccaccaccagatggtaccagtcagaaacagcagggcgctgacgaggaacagggctgtaaaaaggttggtgccttcggcgaataggtatccaaaggccagcagccccagagcagataccatcagacctatgccgatcagcatatttcgaatcgtgtgcagcaggcggatgctctcctgattttcacccacggaagcagctcccttctgtgaaaagaccgccccctgccctccggcaggagagaacagggagcggaagagataaaaatgaaaagacaaaggataaaagatagagtggagagtgaggagatgctcccaaaaggaaaggggctaggggaaacccatccgggtttccccagttgatctgccgaaggcagatcaagaaattccaatcattttcgccgcggcgtgtacgtggcgaaaatactttgacctaagcgccttgggcgcgttcaccagtccgcagactggtggtgggggaggtcgagggggagcctgctccccctcgaaatcagttgtcgtggtactccttgcaggtgcacttcttccacttcaggccgctgccgcaggggcaggggtcgttgcggccgatcttgttgaccttgacaggctgcttcttgggggcggtgccgtcgccgcccacgttttccaccatgcccttggccacccgctcccgcttgacctcctcgtccttcttcagccggacggagaacatgcggcggaccgtctcggtctggatggcggagaccatctcttcgaacatggtcagggactcctgcttgtaggcgatgaccgggtcggtgttggcataggcccgcaggcggatgccctgcttcaggtcgtccatggcgtcgatgtggtccatccagtactcgtccaccacgcgcagcatgatgacccgctccagctcccgcatgaggggcgtaccgatctccgcctccttggcctcgtaggtcttttctgcggcctccaggaagaggtcggtgaagtcctgctgggtcttgtcggcggcgtcgtcctccgtgaactggaaggtatccttggggaagtacagcccctccaggccgcgcagcatctcccggcagccggcggcgtccagggcctgggcctcgccgaaggccatagccacgtggtcggcgatggcgttgcgggtcatggacaggatggtgtccttcaggtccttgccgtccagaacctcccggcgctgctggtagatgatctcccgctgcttgttcatgacgtcgtcgtactccagcacggacttgcgggactggaagttccgggactccacggtggtctgggcgttctcgatggccttggtcagcatcttgttctcgatgggggtgtcctcgtccaggtcgaacttctccatcatgttctggatccgctcgccgccgaagaggcgcatcaggtcgtcctccagggagatatagaaccgggtctcgccggggtcgccctggcggccggcgcggccgcggagctggttgtcgatccggcgggattcgtggcgctctgtgccgatgatgaagaggccgccggcggcgcggaccttctccgcctcctccgcgatcaccgccttgtgctgggccatcttctcggcaaacagcttccgggcggccagaatctcctcgttgtctgtttcggcgtagccggtggcgtcggcaatgacctcatcggagtagccggccttcaccaggtctgcccgggccaggtactcggcgttgccgcccagcatgatatcggtgccgcggccggccatgttggtggccacggtgacggcgccgaacttgcccgcctgggccacgatctccgcttccttctcatggttcttggcgttcagcaggttgtgctggatgccctcccgggccagcaggccgctgagcagctcgttcttctcaatggacacggtacccaccagcacgggctggcccttggcgtggcagtccttgatctgctggatgaccgctcggtacttgcctgcctcggtcttgtacaccacgtcgtggtggtcgtggcgctggttgggccggttggtggggatctccacaatgtccagctcgtagatggtgccgaactcctcctgctccgtcatggcggtgccggtcatgccggacagcttgtcgtacaggcggaagtagttctggaaggtgatggtggccaaggtcttgttctcgctggccacggtgacgtgctccttagcctcgatggcctggtgcaggccgttggagtagcgccggccgaacatcagacggccggtgaactcgtccacgatgataacctcgccgtccttcaccacatagtcgatgtcccgcttcatcacgccgtgggccttgatggcctggttgatgtggtgggagagggtagcgttctccgggtcggacagattctccacgtggaagaactcctccgccttggcgatgccccgggcggtgagcatggcggtcttggccttctcatccacgatgtagtccgcgtccgcctcggcgggatcctcttcctccttgttgtccacctggacgaccgcctgcttcttcaggcgggagacgaacatctctgccatgtcatagagctgggtggacttctccccctggccggagatgatgaggggtgtccgggcctcgtcgatcaggatggagtccacctcgtccacgatggcgaaggcatgaccccgctgcaccagctccgtggagtagatgcacatgttgtcccgcagatagtcgaagcccatctcgttgttggtgccataggtgatgtccgcggcgtaagcggcctgccgctccttggtggtcaggccgtggacgatcaggcccaccttcaggcccaggaagcggtggaccttgcccatccactcactgtcgcgcttggccaggtagtcgttcaccgtgacgatgtggacgccccggccggtcagggcgttcagataggcgggcagagtggctaccagggtcttgccctcgccggtcttcatctcggcgatccggccctggtgcagcacgatgccgcccaccagctgcacccggtagggccgcatgcccagcacccggtccgcggcctcccgcacggtggcaaaagcctccggcaggatatcgtccagggtctcgccattctgcaggcgctccttgaactccgtggtcttggcccgcagggcctcgtcgctcatggccttgtattcgtcggccatggactcgatcttgtccacgatggggtagatggatttcagctcccgggagctgtaatcgccaaaaatctttttcatcagacccatgattgtgatacttcctttccgggccggtccctccggcccgccggaatggcggagcgctggagaaaggcccgttgatccatattatttataaaaggtggggcagtccccacgaaaaagcagaaatagcataccacaatcgcaggtggaatgcaaagaaaaaacaacttttgtaaaaaaagttcataaatagcggcccatgtccggcagaagccatgatttttcgacaggacgcagcggggaaatcagcgaaaagaaacaaacgcttcccgaccgggcaatcgattgcccagtcataggagctccggatccagctcctcgtccagcagcatccggatgcggctgaggaccgtgccctcgccggtggaggcgtcgtagtccacgcttaccagccgggcgcccggcagcttgcgctggagggcggcgtactgccccttgccgaagatgtggcccggcaggcaggcgaagggctggacgcagagaatttttcggtatcccagccgggcccagcccacggcctcggcagcgatcagccacccatccgccaccgtcacccgcaggggagcatacccctccgcctgccgcttcagctccggcagcggcggcagggcatgatagcccgcctgattcaaaatcgacagcatatcccgctggatctccgccaggtacgacgccagcagccgatacacccgccgggcaggggcggagcctttcagggcgtggccgtccatgtagtacagggcgtaccaggtgatgccgcccacgccgatctcgcagtgctccgccgccagataccgctccaaattccagttgcccaggtggcagtatttcgtgtagatctcccccacgatagccaccttctggacttcacggggcacccgctccaccgcccggaattcggccgccatctcccggcagcggcgcaggatctcccggcgggtgagtcctcgattccccgccagatcctgtcccaggtcctccgtccagcggcgccagagtgcctccgccgtgccggggactgcctcgtatggccgggtctggttccgcagcagggccagcgtgtccccccacacggcagcggccagacagcggcggaccatggcggcggtgatgggcagcccggtgccccggtcgatgccccggacattgagactcagggtctccacccggccgtagcccagccggtccagcacccgccgcagcaggcggatgccgcaggagccccggcactcgtcccccgcctggccgaacagcaccccgcaccgggccgggtcgtaccgcccggaccgcagggcggacagcacctgccccgccaccaggaacaccggatagcacagctcattgtggaaatatttcagccccagctccgccagatggggatcgtcctccgtcagcagcaccggctcccattcctccgacgtaaaggcgtactgcagcagggggaaccaatcgtccagcagggaggggatcagcagcgtcttccgctctgccatcccggccacctccttttatcccagcataccggtccgcgcgggggaaagcaaggcaaaagtggttacaaaatccgccggaatccccgccgccccttgccccgcccgctcctttgtgttaaactgacaaaaaagccccacccgccgccgcggcggggaggagcaaaaaaggaggttcccccatgaagctcagcttttacggcgccgaccagtgcgtcaccggcagctgccactgtctggaggtcaacggcaggcgcatcctggtggactgcggattgcagcaggggcgggacgaggtgtccaacgacgcttttccctttgccgcgaacgacatcgacttcgtcctggtgacccacgcccacatcgaccacaccggccggatccccatgctggtgaagcagggcttccagggccggatcgtcgccacccggctgacggcggatctcatggacatcatgctccaggactccgcccacatccaggagtccgacgcggagtggaagaaccgcaaggcggagcggtccggcgccccccgggtggagcccctttacaccatcgaggacgcccagcgggtgagccagtacatgaccacctgcgagtacaaccagcccctggacctgtgcgagggcgtccgggtggagttcgtggacgcgggccatctgctgggctccgcctccatcctcgtcaccgccacggagggcggcatcaccaaacagatcgtcttttccggcgacatcggcaatgtggaccagcccatcatccgggaccccacctacctcaccggcgcggactacgtggtgatggagtccacctacggcgaccgcaaccacacggaggtgtggagctacaccgacgatctggcgaagatcatcgacgagaccatcgccaagggcggcaacgtggtgatcccctccttcgccgtgggccgcacccaggagctgctgtacttcatccgggagatcaaggacaaggggatggtgaagagcgacccggacttccccgtgtacatcgactcccccctggccaagaaggccaccaccatcttcaccggcgacctgcggggctatctggatgaggcggcgctggagctggtgcaggacggcacccacatgttcaacttcaccaacctgcgcatgacggagaccagcgaggagtccaagatgctgaacatggaccccacccccaaggtcatcatctccgcctccggcatgtgcgacgcgggccgcatccgccaccacctgaagcacaacctctggcggccggagtgcaccgtggtgttcgtgggctaccagggggagggcaccctgggccgcgccctgctggagggtgtgaagagcgtgaagctcttcggcgaggagatcgccgtccatgcgcagatcgtgaacttccagggtctctcctcccacgcggaccggaaccacctgctctcctggatccaggccatccaggcccccaagccccagcacgtgttcgtggtccacggggaccgggaggtggcgcccttcttcgccaagaccatccagggcctgggcttcaccgcccacgcgccccagtacacggaggtgtacgacctgatcgccgacaaggtgaccgagcccggctacctgcctgagcggaaggccaggaccaccggcggtatgcgggccagcgcggcctacgagcggctggtggccgtgggcaacatgcttatggagagcatcaagcgcagccgcgggcgggacaacaagtccctggcccggttcgcggaccagctgcggcagctgctggagaagtgggagagctaaggcagctcccttgccagagagaaggcggcctggaacgcggcctccagctccatgctgtggagctgcgccgccgcatcctcgtatttttcgacggtgttccagctgtcgtccggaagcaggtcccggagccgcagggacaggcgggcggtcaggcgggagacttcccggtactccggggaggggagataggaggggaggagctcctccttggcataggcatataaaatttccattgcatccgacatagcgatcaccatagcacccattttgtacatatcattatatacacccatattgtgcgtgtcaagggatttgagagtttttatgataaaatttgcggagagactgcgcgaactgcggagagaaaagaaagtgacccagtcaaagatggccgatttcctcggtatcaagctgaggtcttaccagaactatgagggcggctctcgccggccggattacgagggactggtggccctggcggattacttcgacgtgaccacagattatctgctggggcggagcgacgtgcgggggtaacatgggatgggccgccgtccggcggccacgggggattctgctcccgcagggggctggtccagcgggatgcaccccccattgtcgtcgtcgcaaagtccgctcagctccgtttccgcctgcggcgaaaactgcgcctgctcccttgctcctcctctccccaccgcgcggggcgcggcgggggcccctttcggtcttgccaaaagagaaacgggccgtgcacggtccaaaagaaaagaccgcttagacgcgctccggcgcgttcgtgcctccgcgcgacgggggtcggcggatcggtgcaagcgccgattttggcctgccttcgggcacgctatcatcttctgcgatttctgggactgccgtcccgtggcggatggtgcggaggtcgtcggggtggttatcgcattgtctctgcttctcttttcgctgccgctggccgtcccgcgcgggaactggtgcaacgggcggatgtggacatccgcccgaaagcataaacccctacgaccacccgggtagcgcgtagcgaagcggaacgcgcggaaagaggagccggtcaaatgcgtccttgcaccccgacccaagacgcacccgcgccgcgggaatccgccatcaagcctgtaccgcaccccgccgcgcccgtcggggagccatcgcagacccgcaggcaccatctcacgccgacccccgtacagcaactttgcaccagaggtgcaaagttgcggccaaagcgcctttttctcttacaccgggcgcggcgcgttctctttttgggtaagaccaaaaagagaatggggggcgcatctgcctagccatcagcatggctgaaattccagcgtccaatgggacgcaccccccggaggtatctatggatcgacttcatgaaaaccgcatctacaccggcacggtggaatcctactccagcgagggtttgggcatcgtccgcctggacggcgccgtggtgttcgtccctcaggccgtccggggggaaaccatcgacctgaaaatcaccaaggtgatgaagaccgccgccgcaggggagatcgtgaagatccacaagccctctcccgaccgggcccagcccgagtgccccgattacggccggtgcggcgggtgcgacttccagcacctgacgtaccccgaggagctgtgggccaagcgccagcgggtccaggacgccctgacccgcctggggggcgcagacatccgggtggaggagatcctgggggcgaagaaccccctccactaccgcaacaagagccagtaccccgtgggcgcggacggcgccatcggcttctaccgggcccggtcccatcaggtggtgccggtgaagcggtgcttgatccagcccgaggcggcggacaaaaccgccgcggcggtgggggagtggatgcggcgctacaaggtccccgcctacgacgaggccaccggaaagggactggtgcgccacgtgtacgtccgggtgaaccggaagggcgagagcctttgctgtgtggtaatcaacggcaggcaggccccccgggagccggagctggccgcctatgtctgcgccgccgtgccccacaccgcgggagtgctggtgaacagcaacacgaagcggggcaacgtgattctgggggagaggtaccgcaccctctgggggcgggactatctgatggacaccctctgcggcctggagttcaagctgtcggtgccctccttttaccaggtgaaccgggatcaggcggaagcgttgtacggcaaggccctggattatgccggcctgacggggcgggagacggtgctggacctgtactgcggcatcggcaccattacactgtgcctggcgaagcgggccggacgggtcatcggcgcggagatcgtgccggcggccatccgggacgccaaagagaacgccgcccggaaccacattgaaaacgcggaattcttctgcggcgacgcggctgagacagccgcacggctggaggcggagggcctgcggccggacgtcatcaccgtggacccgccccggaaagggctggcgccggaggtgatcggctccatcgcggccatggggccggagcgggtggtgtatgtctcctgcgaccccgccacgctgggccgggacgtgaagcggttcggagagctgggttaccgggccgtccgggcctgtgcagtggacatgtttcccgccacacggcatgttgagagcgtggtgctgctggagaggagttgaccaaaatggcagtttcaaaattccggatttatgactactggaaagacaaagccatcacgaaaaaatttgaaatcaagccggtgtccgcgtgcacgaaggaggacgacgcactttccataacagaatttcctgatgagattttttgctgggcttgtcagatgccgccgtatcaacaggggacacatcggacactcagcggactttggaatggagacacacttttacagcggtcccatattttggaaaagtccctgaatggagaggataaacccgagaattattttctgctgtgtccgcaatgtcacgcggaatctccggatacgacggacgcgaagctctttttcgcgtgggtccggtataagcggacgcatgagaactattccatggtgcttcggagggatatgaaaaaggcggcggagattctgggagtggaccagaaccttgtggaggagcgatttgccgcgctgcggctgacccggctggaagaggatgcgtatattcgagactatattgtcaaaaactgtgcgatgcatggcagctttcttgcgccgctctcccgcatgatgatcctgcaaaaatggattctggacccggaggaacagaaaaagtttgccgcctggcggaggacgctgcctgaagaagagactggtgagaaggagccaacataaatatctcaaaagagatcattccgcaaggactgaagaataaaacagttgtcaaacacagtttgagggtgtatgataaatcacaaatcagggcggtcactgccagagaaccgaaacaggaggagtattatgaacaaaacggcaagcatggtcttgaagatcatcggcgccagcctggcattcgcagcggttatctgcctgctgatcggcggctggcatgacctcagcgtgggatacagcggtatgaagaagcggctggcccggaaattcggctccgagtacgacgactacgccgacgaagagctctacgagtaatccagagcataaaaaggaccccatccagatggatggggcccttttctgcgttttttccgccacagggcaacaaaaaacggctggaagaaatccccaaccgcaacgaaattccccttgacagaggaaaaaaaccatggtaaaataagacgcttatatgatggcagaggatattccgccattttttatcgttgagataacgatagcatatttcccagaacaatgcaagagcgggatgcaggaattttaacaacgataccgtgcgtatcattcctggccgcgccacccgaaaaaccacgcgcccggcaggacagggcggggcgcacagaagaaaggtgaatgagaagatggccaaagacaagtactacggaaagacccttcgtaagaacttcgccaggcacgaggaagtcatgcccatgcccaaccttctggagatccagaagaagtcttaccaggagtttttggacaccggcctccgggaggtgttcaacgacgtgggcgcgatcacggactatcagggcaacctggagctgaccttcatcgactacaagatggatgaggcgcccaagtacgacgtggaggagtgcaaggcccgggatgccacctacgccgcgccgctgaaggtgaaggtccgccttcggaacaaggagaccgaggagatcaaggagcaggagatcttcatgggcgacttcccgctgatgacccactccggcacctttgttatcaacggcgccgagcgcgtcgtggtttcccagatcgtccggtcccccggtgtgtactacggcaaggagacggacatcaagaccgacctgcccatcctcacctccactgtcatccccaaccggggcgcctggctggagtatgagaccgacgccaacgaggtcttctgggtccgcatcgacaagaaccgcaagctccccatcacctgcctgatccgggccctgggcctgaagacggaccaggagatcctggaccagttcggcgacgatccccgcatcgtcaccaccctggagaaggacccctgcaagaactacgaggacgccatgctggagatctaccggcgcctgcgtcccggcgagccccccacggtggaggccagcgagaccctgatccacaacctgttcttcgacccccggcgctacgacctgtccaccgtgggccggtacaagttcaacaagaagctgtccctgtggcagcgcatccccggctacaagctggtctatcccgtggcagatcctgccaccggtgagctcctgtttgatgagggccatctgctgaccaaggacgatgcccgcctgctggatacggtcggcgtgggagaggtcaccatcgacgtggagggagcgcccctgcgggtcatgtccaataagatgtgcgacctgagccattatgtggacttcgatcccctggccgagtgcggtatcaaggagcgggtgcgcttcgacgtgctgcaggagctgctgggccagtacagcggcgaggagctgaaggaccagatccgcctgcaccgggccgatctggtgcccaagcatatcatcattgatgatatcctcacctccatcaactatatgaacggcctggcccggggcatctccgtgaaggatgacatcgaccacctgggcaaccgccgcctgcgctgcgtgggcgagctgctgcagaaccagttccgcatcggcttttcccggatggagcgggtaatccgggagcgcatgaccatccaggacctggatgtggtcaccccccagagcctcatcaacatccgccccgtcactgccgccatcaaggagttcttcggctccagccccctgagccagttcatggatcagaccaaccccctggcggagctgacccacaagcggcgtctttccgccctgggccccggcggcctctcccgcgagcgtgccagcatggaggtccgcgacgtccattacagccattacggccgcatgtgccccatcgagacccctgaaggtcccaacatcggcctgatctcttatctcgccacctatgcccggatcaatgagtacggctttattgaggcgccctaccgggcggtggacaaggagaccttccacgtctccgacgagattgtctatatgaccgccgacgaggaggacaactacatcgtcggccaggctgctgagcctctggacgagaacggctgcctcatcaacgcccgtatcacggcccggcaccgggacgagatcgtggaggtggacaaggagcgggtggactacatcgatgtgtccccccggatgatggtctccatcgcgacggccatgatccccttcctgcccaacgacgacgccaaccgcgccctgatgggcgccaacatgcagcgtcaggccgtgcctctgctgcgtccccacgcgcccattgtgggcaccggcatggagcacaagatctgcatcgactctgagatcgctgtcctggcggagggcgacggcgtggtgacctctgtggacgcccgccacatcaccgtcaagtacgacagcggcgaggtcaaggactacaagctgaccaagttcctccggtccaaccacggcacctgcatcaaccagcggcccatcgtggaggtgggcgagcgggttcacggctggggcaccgacgagaacggccagaccgtggatcccaccgtcctggcggacggccccgccactgagcagggcgagatcgccctgggccagaacatcctggttggcttcatgacctgggagggctacaactacgaggacgccgtgctgctgaacgagcgtctggtgcgggaggacctgtatacctccatccacatcgaagagtacgagatcgacgcccgggacaccaagctgggcccggaggagatcacaagagacatccccaatgtgggcgaggacgccctgaaggatctggacgagaacggcatcatccgcatcggcgcagaggtccgttccggcgacatcctggtgggcaaggtcacgcccaagggcgagaccgacctcaccgccgaggagcggctgctgcgggccatcttcggtgagaaggcccgggaggtccgggacacctctctgaaggtcccccacggcgagagcggcatcatcgtggacgccaaggtcttcacccgggagaacggcgacgagctggggcccggcgtgaacatggtagtgcgggtgtatatcgcccagcgccggaagatccaggtgggcgacaagatggcaggccgccacggcaacaagggtgtcgtgtcccgggtcctgccgcaggaggatatgcccttcctgcccgacggcacgccgctggacatcgtgctgaaccccctgggcgtgcccagccgtatgaacatcggccaggtgctggaggtccatctgggctacgccgcccagaagctgggctggaaggtggccacccccatcttcgacggcgcgtcttacagcgacattcaggagctgctgcagcaggcgggcctggatcctgagggcaagagcgtgctgtacgatggccgcaccggtgagcccttcgacaacaaggtcaccgtgggctacgtgtacttcctgaaactgcaccatctggtggacgacaagatccacgcccgctccaccggcccgtactccctggttactcagcagccgctgggcggcaaggcccagttcggcggccagcgcttcggcgaaatggaagtctgggccctggaggcctatggcgcggcctataccctgcaggagatcctgacggtgaagtctgacgacgtcaccggccgcgtccggacctacgaggccatcgtcaagggccacaacgtgccccagcccggtgtgccggagtccttcaaggtgctggtgaaggagctgcagtccctgtgcctggacattcaggtgctggacaaggacggcaacgtcatcgaactgaaggaagacgaggacgctatggacaccttcaacctggcccggatggacgccgacgatgaccggcaccgcgccttctccgaagaggcggagttccaggattccggctttgacatcgaggacgccccggaggatgccggcgcggacatcgacgtggacttcgacgacgaatgatccaggatcgtattgttcgtcaactcaacaattctggatcatgtaaggaggaaatcgcaagatgatcgacaacaacactggcaacaacattgcctttgacgcgattaagatcggcatggcctctccggagcagatccgcgcctggtcctatggcgaggtgaaaaagccggagaccatcaactaccgcaccctgaagccggagcgggacggcctgttctgcgagcgcatcttcggacccaccaaggactgggagtgccactgcggcaagtacaagaagatccgctacaagggcaagatctgcgaccgctgcggcgtcgaagtcacccgggccaaggtccgccgggagcgcatgggccacatcgagctggccacccccgtctcccacatctggtatttcaagggcatcccctcccggatgggtctgctgctggacatcagcccccggatcctggaaaaggtgctgtatttcgccaactatatcgtcaccgaccccggtgagactccgctgaccaagaatcagatcctctccgagaaggagtaccgggattaccgtgagaagtatgaggacgacttccaggccggcatgggcgccgaagccgtgaagaagctgctccaggacgtggacctggaggccctctccgcccagctccacgcagagctgaaggatgcctccggccagaagaaggcccggatcgtcaagcggctggaggtggtggacgccttccgtctgtccggcaacaagccggagtggatggtcatcgacgtgctgcctgttatcccgccggagctgcgccccatggtgcagctggacggcggccggttcgccacgtccgacctgaacgacctgtaccgccgggtcatcaaccggaacaaccgactgaagcggctgatccagctgaacgccccagatatcatcgtccgcaatgagaagcggatgctccaggaggctgtggacgccctgatcgacaacggccgccggggccgcgccgtcaccggcgccaacaaccgggcgctgaagtccctcagcgatctgttaaagggcaagcaggggcggttccgccagaacctgctgggcaagcgcgtggactactccggccgttccgttatcgtggtcggccccgagctgaaaatctatcagtgcggcgtgcccaaggagatggccgtggagctgttccgtcccttcatcatgaaaaagctggtggaggacggcactgccaacaacatcaagtccgccaagaagatggtggacaagggcgtcaccgaggtgtgggacgctctggatgtcatcatcaaggaccaccccgtcatgctgaaccgcgctccgacgctgcaccgtctgggcatccaggccttcgagccggtgctggtggacggccgggccttgaagctgcaccccctgaactgcaccgccttcaacgcggacttcgacggcgaccagatggccattcacgtgcccctgtcggccgaggcccaggcggaggcccgcatcctgatgctctccgccaacaacctgctgcgtccccaggacggcggccctgtcaccgtgcctacccaggacatggtgctgggctcctactacctgaccatggaccgcatgggcaaggcggagaagggcgccgagaccatctggtgcgaggatgccggcgacaccaacctcaccgctcactccatcgtggacgcggatgactttgtggccgccaacgacgccctggagaaggggcagaagaaggccgcctaccgccctctccacttctacgccagcgaggaagaggccctcatggcctacaacgaccatgtgattgggccccactgccccatcggcgtgcgccgcaccatgaccgtggacggcgtcagccacaccgctgtggtagagtccacccccggccgtatcatcttcaaccagaacatccctcaggacctgggctttgtggaccggaccgatcccgcccacgtctgcgactatgaggtgaccttcacctgcggcaagaagcagctgggccagatcgtagaccgcaccatcaacaagcacggcttcaccgtggccgctgaggtgctggacgccatcaaggccaccggctacaagcactccaccctggcggccatcacggtctccatcgcggatatgaccgtgccccccaagaagtacgagctggtggcggcctccgagcagaaggtgctggacattgagaaccagtacaagatgggcttcatgaccgagcacgagcgctacaagcaggtggtgcaggtgtgggagaagaccaccaacgatgtctctgacgccctgcagaagaacctggaccgctataaccccattttcatgatggcggactccggcgcccgcggttctatgaagcagatccgccagctggctggtatgcgtggcctgatcgccaacaccgccggtcgcaccatcgagatccccatcaaggcgaactaccgcgagggcctgaccgccctggagtacttcatctcctccagaggcgcccggaagggcctggccgacacggctctgcgtaccgcagactccggttacctgacccgccgcatggtggacgtctcccaggatgtcatcatccgggaggaggactgccacgtgacccacggcatcaaggtctccgagatcagcgagaacggccaggtgatcgagaagttctccgaccggctccggggccgtttcctggtgggcgatgtggtggacgccgataccggcgaggtgctgctgtccagcaccaagatgatggacgagaacgacgccaagatcctggagacccacaagtgggtccaggccaactaccgcgacggcgaccgctgcaccttcgacccggcggttgacgagcaccccaccgtcatgatccgcaccgtgctgacctgcaaggcccacagcggcgtgtgcgccaagtgctacggcatgaacctggccacccagcagcctgtgggtccgggcgaggcagtcggcatcattgccgcccagtccatcggcgaacccggcacccagctgaccatgcgtaccttccacaccggcggtctggccggcggcgacatcacccagggtcttccccgtgtcgaagaactgtttgaggcccgtaagcccaagcggatggctactctggcagagatcggcggcacggtcaagttcgaagagaccagcaagggcagcctggtgaacatcgtcatcaccgcacctgacggggacacccgcacctacgcggtgcctcacaccggcctgctggtgaaggatggcgacgtgatcgaggccggccaccagctgacctacggtgcgttgaatccccacgaggtgctgcgcattcgcggcgctgacgccgtgtacaactacctgatccaggaggtcctgcgggtgtaccgccagcagggcgtggatatcaacgataagcatatcgagatcatcgtccgccagatgatgcgcaaggtccgtctggaggacgccggcgacaccaagctgctggacggctctatggtggacgtcctggagctggacgacgccaacgaggagatcgaccgccgcaacgccgccggtgagcggcaggagaacggcgagcctctgcgccacgccgtaggcacccagctgctgatgggcatcacgaaggcatctctcgccacggactccttcctgtccgccgcctccttccaggagaccaccaaggtcctgacggaggccgccatcaagggcaaggccgaccatctggtgggcctgaaggagaatgtcatcatcggcaagctgatccctgccggcacgggcctgacggcctaccacacctttgctgaggagttggttcccggcccggcgcctgttgaggccgccccggagcccattcccgcagagctgtgattcgccggacatcccgcagacacaagaccgggagagagcctgaccgcttgcggtcaggctctcttttcagatgccgggcatcgagaggcggggtgaaggagacgccccgcagcccggggctgaaacggttctgctgagaagcggatgaccaacgcccccctttatttaaaatatcaaagctcccttgttcccaggcgcactgcgccgtatccggacggcggccagaaacggcccggaaacagggagaagttctcctaagatgtctccaggtatccggcacgcccgggagatggggaaaacgtccaaaagtctgcggatcatggaaaatttttaccgaaaaatgtcttgacggatatgtttccccatggtataatccaaaaatgcgcggatattaggattctgcggattttgccatgcgtttcaggaggaatttcccgtgatctcggagcttgcttcccaggagaaggtcatcggcgtgaagcagtcccgcaaggcgatccgggaaggccgggccaagcgggtctatctcgcctgtgacgccgatcccgccatcaccgagccggtggccgccagctgtgcggaggccggcatccccgtagagacggactacacactgtcccagctgggccaggcgtgccggatcagcgtgggcgcgtccgtggtggccgtcctctccgcataaagaaatggtttttttcggaatagcttcaccgcgttccgtaaaaaataagggctgtcgtggttacacggcagcgaaattatgaaagaaaggagaaatacaccgaatgcctacttttaaccagctggtccgtaaaggaagagaacaggctacctacaagtccacttctcccgctctgcagtttggtctgaacaccctgaagaacaagaccaccgatctgccttctccccagaagagaggcgtgtgcaccgccgtgagaaccgcgacccccaagaagcccaactccgccctgcgtaagatcgcccgtgtgcgtctgaccaacggctacgaagtcaccgcttacattcccggcgtgggccactccctgcaggagcactccgtcgtgatgatccgcggtggccgtgtcaaggatctccccggtgtccgttaccacatcatccgcggtacgctggatacccagggcgtctccggccgtatgcaggctcgttccaaatacggtgccaagcggcccaagcagaagtaagtctgcgaactgagagctttgccgaataggtttatatagatggcggcctccgggccgctgggacgacctctttggcaggcatccacggaaggctgcaatacgccttttgagtacctatgagatcatagaattattatgaaggagggaagcatagtgcccagaagaggtaatgttcccaagagagagatcctgccggatcccgtttacggctccgtcctggtcacccggctgatcaatagtgtcatgctggatggcaagaagggcgtggcccagaaggtggtctacggtgccttcgaccagatcaaggagaagaccgagaaagaccccatcgaagtgttcaaccaggccatggagaatatcatgcccagcctggaagtcaaggcccgccgtgtgggcggcgccacctatcaggtccccatggaggtccgtcccgcccgccgcacgaccctgggtctgcgctggctgacggcctacgcccgttcccgcagcgagcgcaccatggctgagcgcctggccggcgaactcatggacgccgccaacaacaccggcagcgccgtgaagaagcgcgaggaagtccacaaggcagccgaggccaacaaggcgttcgcccatttccgctggtaagttaggagaaacagtatgccgagaaaaacacctcttgaaaatacccgtaatatcggcattatggctcacatcgatgcaggcaagacgacgactaccgagcgtatcctgttctacaccggcgtgaactataagatcggtgagacccatgatggcaccgccaccatggactggatggcccaggagcaggagcgcggcatcaccatcacgtccgccgccaccacctgctactggtccggttccaagaaccagttcaagcccacccggattaacatcatcgacactccgggccacgtggacttcaccgtggaggtggagcgctccctgcgcgtgctggacggctctgtcaccgtgctgtgcgccaagggcggcgtggagccccagtctgagactgtgtggcgccaggccgataactacaaggtcccccggatgatctatgtcaacaagatggacatcatgggcgccgacttctacaacgtgctccgcatgattgaggagcgcctgaagtgcaacgccgtgcccatccagctccccatcggcagcgaggatacctttaaaggcatcatcgacctgatcgagatggacgcggacatctactatgacgatctgggcaaggatatgcgcgtggagcccatccccgcggacatggtggacctggcaaacgagtaccgggagaagctgatggacgccgtgtccatggtggacgagtctatcatggaggcatatctggctggcgaggaagttcccacggccaagatccgtgcggccatccgcaaggccacgatcgccaatgagatggtgcccgtcacctgcggcacgtcttaccgcaacaagggcgtgcagaagctgctggatgccatcgtggactatatgccctctcccctggacattccgcccatcaagggcgtgaaccccaagactgatgaggaggacgagcgtcctgcggacgacaacgcccccttctccgccctggcgttcaagatcatgaccgacccctatgtgggccgcctgagcttcttccgcgtctattccggccatctgaccaccggttcctccgtgctgaacagcaccaagaacgtcaaggagcgtatcggccggatcctgcagatgcacgccaaccaccgggaggatatcgaggaggtcttctccggcgatatcgaggctgccgtgggtctgaagaacaccaccaccggcgacaccctgtgcgatgaaaaggcacccatcatcctggagtccatggagttccccgagcccgtcatccgcgtggccatcgagcccaagaccaaggccggccaggagaagatgaccatgggcctcatcaagctggccgaggaggatcccaccttcaagacctacacggatgaggagaccggccagaccatcatcgccggcatgggcgagctgcacctggagatcatcgtggaccgcctgctgcgcgagttcaaggtggaggccaacgtgggcgcacctcaggtcgcctacaaggagaccatcaagaaggccgtggaccaggacaccaagtatgcccgccagtccggcggcaagggccagtacggccatgtcaagatccacgtggagcccaacgagtccggcaagggctacgagtttgtcaacgccatcgtgggcggcgccgttcccaaggagtatatcccggctgtcgacgccggtatccagggcgccatgaacgccggcgtggtggccggcttccccgtggtggatgtgaaggtcaccctgtacgacggctcctatcatgaggtggactcctctgaaatggcgttcaagatcgccggctccatggccttcaaggaggcctgccgcaaggccgatcccacgctgctggagcccatcatgaaggtcagtgtcatcgtgcccgatgagtatatgggcgatgtcatcggtgacctgaacagccgccgcggccagatcatccagctggaggcccgtcccggcgcccagcagatcgacgcctacgtgcccctggccgagatgttcggctatgccaccgacctgcggtcccgcacccagggccgcggccagtacaccatggagcccagccactacgtggagatcccgaagaatatccgggataagatcgtggagacccgcaataagccccaggcgtaaggaaaaagggattgattttccctccattatacggtaaaataagcaatgctgagaaaaaccgcattgcacccaacagattttgaaaattgacaggaggattttcaaatggctaagcagaaatttgaaagaaccaagccccatgttaacatcggcaccattggtcacgtcgaccatggcaagaccacgctgaccgccgccattaccaagtggctgtctctgcagggcaaggctcagttcgaggcttatgactccatcgacaaggcccccgaggagaaggagcgcggcattaccatcaacaccgctcacgtggagtatgagaccgagaagcgtcactatgcccacgtggactgcccgggccacgccgactatatcaagaacatgattaccggcgctgcccagatggacggtgctatcctggttatcgccgcttccgacggccccatggctcagactcgtgagcacatcctgctggcccgtcaggtgggcgtgcccgccatcgtcgtgttcctgaacaagtgcgatcaggtcgacgaccccgagctgctggagctggtggagatggaggtccgtgagctgctctccaagtatgagttccccggcgacgacatccccatcatcaagggttccgctctgaacgctctgatttccgagtccagcgatcccgccgctcccgagtatgcctgcatcaaggagctgatggatgctgttgacgactatatccccacccccgaccgcaaggaggatatgcctttcctgatgcccgtcgaggacgtgttcaccatctccggccgcggcaccgtggctaccggccgtgtggagcgtggtgtcctgaagctgagcgaggaagtcgagattgttggcctgaccgacgagaagaagaagaccgtcgtcaccggcatcgagatgttccacaagctgctggactacgctgaggccggcgacaacatcggcgccctgctgcgtggcgtggaccgcaacggcatcgagcgcggccaggttctggcgaagcccggttccattcatccccacaccaagttcaagggccaggtttacgtcctgaccaaggacgagggcggccgtcacacccccttcttcaacaactatcgtcctcagttctacttccgcaccaccgacgtgaccggcgtcatcaccctgcccgagggcactgagatgtgcatgcccggcgataacgtcgagatgagcgtggagctgattacccccatcgccattgagaagggcctgcgtttcgctatccgtgagggtggccgcactgtgggttccggcgctgttaccgagatcaccgaggcctgatttttcagccaagaaaaagaactgccgcattgcggcagttctttttttgcccgcaggccattccgaacgggctcagtcctgctccggatagaccagtgtgtcctggaatccgtctgccccggcgcagaggatatctccggccaccggctgcccctcgcagacatagaggttggcctggacaccctccggccgtccgggatagttggtgacggtgtaggtgtaccgggccacttgcttgccgcagcacgcagaaaggtcgaagccctgggaatcctgcagctcgttgtaggtgaggtagggctcctccagtttctccggcagcagaaactgcagcgtctccaccggttcctcctccacctgccagcccatggactccagataggcgatgcggtcggcattgccggtcagctgccaagctgccgcgtcctgaccgccaccggagcggcccaccagcagcaggacggcggccgccaggatgccggccaggatcacagccacaacggcctttgtcttcttggaaacccgcgcggtccaaatcagcatatcgatccctcctgcatcttcctattcatttttttccggatttatgataagatgaagcagaacaagccgtcggaagagaagcggtaaaaagaggcagaggtcagcaaggaggaggccggcatggagaaagcgcgtctggacaagatcatcgccggggaggggacatactcccggcgggaagtgaggctcctggtccgccagggccgggtgctggtggacggtgtgcctgcccggtctccggaggacaaggtggtgccggaagcagtggagattatggtggacgggaccgtgctgcactgccgccgctacacctggatcatgcttcataagcctgcgggggtcctctccgccacggaggacggccggggggccacagtgctggacttgctgccgccggagctccggcggcggggactgtttccggtgggtcggctggacaaggatacggagggattgctgctgctgaccaacgaaggaggactggcccacgacatcctctctcccaagcatcatgtggacaaggtctactatgcccgcactgccggctgtctgacgaaggaggactgcagggcgtttgcggcaggcatgaccctggggggcggcctggaatgcctgccggcggggctggaaatcctctccgccgggccggagggcagcgaggggctggtcaccctgcgggaggggaagttccatcaggtgaagcggatgctggcggctcggggaaagccggtcctctatctgaagcgggtccgcatgggcaatttgccactagatccggccctggaaccgggcacataccgatatttgacggaagatgaggtagagagcctgcgaaatttctaacggccacatcagaaaattcaaatcttgcccaaaaaagaagccgtttttttgttgaaaaaagaaaatatatcttgcattttgacaaattcaacgatataatatatccattgacaatttgcacaacgcccccacgtgtgattttagaggaggaggacgaccatgtctggaagaatttttcaaaatgtggtgctgcagctgaaggaaaatacggaccggacggttggcgtcattgacggtgagggcatcgtcatcgcctgcagcgaactggcgatgatcggccagcggtgggcggagcatgtgcctgccatcaatgctgccggcggcgccatcgtcacgtcggagggaaagacattcaaggccctgaacggctggggaacccagtttgactatgcagccttcgcctttggcgacaacgagatcagcaagaccgtttgcgccatggccacggtggcgctgaatgcagccaaatcctactacgaggagaaacatgaccgggggtccttcatcaaggacatcatctccgataacatcatgctgggggatatctatgtgcgggccaaggagctgcgggtcacggcggacgtgccccggggcgtattcgtggtccgcaccctgaagaagggggagtctgtccccacggacgtgatccagtccctgttcccggaccggcaaaacgatttcgtcctcagcatcggcgagggcgacgtggtcctcatccgccagatgccggagggctccggcatcaaggagctgaacaagatcgcctcctctattgaggaggccctccgcgccggcggggagcccacggtggtggtgggcatcggcaccgtggccacccacctgcgggacttggccaagagctataaggaggcacagatcgccattgaggtgggcaaggtctttgacacggagaagtacgtcatcaactatgagaatttgggcatcggccggttgatctatcagctgcccaccaccctgtgcgagatgttcctccaggaggtgttcaaaaagaaccccatcgacgcactggacaaggagacgctcttcaccatccacaagttctttgagaacaacctgaacgtgtccgagaccgcccggaagctgttcgtccaccggaacactctggtgtaccggctggagaagatcaagaagctgacgggcctggacctgcgggagttcgacgacgccattaccttcaaggtggctctgatggtcaagaaatatctgacctcccggggcatcgactcctgagcctggatggatcacacaagcgccccggccggaattccggccggggtttttcgcgcccggcggagacggaccgccggggaggaaaacggaatcggaagatttgaaaaaggcggttgcattgcggcggaaaaccagatataatgaaaaaagctcttacattatgtcgactggcggggaacctttcggccgcgcccggcgtgtataaaatagggaacacgaggtacagacatgattcgattaaaagacgtggagatggagtacgacaacggcacccgggccatcaagggcattaccctgacgatcgaggacggggaattcgtgtttctggtgggcccttcggggtccggcaagtccaccatcatcaagctgctgaccggcgaggtggaaccctgcgccggacgcattatgatcaacggtttttccgtcagcaacatctcagaaaagcagatccccctgatgcgccgcactctgggagtgatttttcaggatttccggctgatcgagaagaagactgtctatgacaacctggcctttgtcatgcgggcagtgggcgccagccccaaggagatccgcaagcgcatcccctatgtgctggagctggtgggcctggggaaaaaggcggacagctatcccacggagctctccggcggcgagcagcagcgggtagccattgcccgggccctggtgaacaaccccaacaccatcatcgccgacgagcccaccggaaacctggacccggagcggtccctggagctgatgagcctgctggtgaagatcaacgagctgggcaccaccgtggtggtggtgacccacgagaaggacctggtggaccgcttcggcaagcgggtggtcaccatcgattccggccatgtcgtcaacgacagcgtgggcggctatgtgggggggcatatccatggctaaacgtcacgatttcagctattttttccacgagggactgagcaatatgttcagccacggcttcatgtcctttgccgccatcggcatcacggtggcctgcctgctgattatgggtacctttaccctggtggcggtaaacgccaatgagctgctgaccaccctggaacaggagaatgagatcctggcctatgtggatgacagctacaccgagacccaggcccgggccctcaagtcccggctggaggccattcccaatgtggcctccgtcaccttcatttccagggatgaggccatggaggacttcaaggcccagtacccggatgaggagctgttccaggacctggacccggagattctggaggaccgctacgccatcaagctggtggatctggaggcgcagagcgagaccgtggaggcggtgcaggccctcaccggcatctccgatgtcagccactacgaggagatcgccggtggttttgtcactgtgcggaacgtagccacggtggtatgcgtggcactgatcgccatcttgttcgtagtgtcggtgttcatcatctccaacaccatcaagctcaccacctttgaccggcgggaggagatcgccatcatgcggatggtgggcgccaccaacggcttcatccgctggccctttgtgtatgagggcttcatgctgggcctgctgggcgcggtgatcgccttcttcctccagtgggcgctgtatgcggcagtggcccggggtgtggatagcaacgacacgctgcagctgatccaggtgatgcccttctcggagctctgggcgccagtggcggcggtgttcgctctagcgggcattgtgatcggcgtgggaggcagcctctccgctatccggaaatttttgcaggtgtgaggtgacgggcatgaagaaagctggcaggcgattccaccgcatcttccgcgccgtgttcgtagcggcgctggccttggctatcaccggcgccaatctggctccggcggcggccgtcacctgggcggacgtgaatgaattgaaggatgaggccaacggcctggacgcggagaaaaaggagctccaggccaagctggatgccctggcggacgacaagagccaggctgtggcccggaaagagctgctggaccagcagatcgccaatacggaggcacagatcgccaatacgcaggcccagatcgaccggtatgccgccctcatcacccagacggaggcggagctggtagaggctgaggaaaaagaggcggcccagtacgagctgttctgcagccgggtccgagagatggagaagcaggacgaggtcagctactgggcggtgctgttccgggccagcagctttaccgacctgttgggccggctggacgccatcaacgagatcatgaagtacgaccagggcgtcatcgacgacctcaaggcccttcaggcggagatcgaggagaagaaggccacgctggagagcagcaaggctgagaccgaggctgccaaggcggagctggtcagcaaggagaatgagctgaacacccagcgcagccaggccaacgccgtcatccagcagctgtccgccaacgagaacgagacggaggccgcactggcagatctggaggcggagcaggacgccctgtgggcggaggcccagcgcctcagcgaccagctggtggcccagcaggccgccaacggccagtccacagagtccaatccaggcggctacatctggccggtgaacagccggtacatcacctccaccatgggcggacggaactctcccggcggtatcggctccaccaaccacaagggtacggacatcggccgggtgggttacaccagctccatctacgcagccaagtccggcacggtcatcgtgtcccagtacagcagctcctacggcaactatgtggtcatctcccacggcagcggcaataccacactgtatgcccacatgtccagccggaaggtgtctgtgggccagtatgtgaaccagggagacgtgatcggcatcaccggctccaccggcaactccaccggaccgcacctgcactttgaggtgacggagaacggcgtccgggtgaatccactgaacgacggcgcagagcccaagatgggatatctcaccggctataccctttcaaaaagtgcataaacaccgctcccgccccgtaggatggggcgggagtgattttatgatcggtatgatgacttggacgccccctgcgggcggcgtccggcaaaagagcgtggttctggagacgcgggccctgctccacctgcgggtggcctgggcgtcggtggccaggggcccccggacaccggaggccctggtgcggcggcgggtgctgacggccgccaagcggctgcggaaggccggtgtcacccgtctggtggtgccggaggcgtttgcctatggggaacagctggagaaggtcggtgtggcgccggtgtccacgctgcctctgcggcgggcgctggcggcggatctggcacgggcggtcatggcagggcggaacctctccggcggcagcgcacggctggcggtggcgggagaccagctctccggcgagctggtgcggaccgtgacggagctggcgctgggaaaccgttacgtgctgctggatgtgccctacggcggcgacaccctggccaatcagctgcggcgggagtacggcgtttccctgctgctgtcccccacccggcagcagatggaagaggcggatgtgctggtgctgttcgcggcccggacggacctgcgacggcgggacccggcagtgctgcggctgtatgatgaggcggcgcctctgccgccgctgctgctgccgccggtgctggagggccagatgcccccgggcctctgccgccctcagctgctggccgtactggtggagagcggcgtcctgcggccggggcagatcaccgtgggcacggcggagagctgacaccgcagagaattttgcaaaaccgcaggcggcatcgcttgacattctcaaatccacacactataatactactctatgataatatagcatcattatgtgcaggggcggccgcatcggccgccctgccaaaggataggagagatacggtccacatggaaagagagtacaagatgagcgcggcccgcgcccaggaactgcaggaagagctgaactatttgaagaccacccggtctgacgaggtggcggagcagatcaaggtggcccggggcttcggcgatttgagcgagaacagcgagtacgacgaggcaaagaacgagcagggcaagctgtattcccgcatcgcagagctggaggagatcctgcagcacgtggtgatcgtggacgagagcaacgcccccaccaacgtggtgaccatcggctgcaaggtgacggtggcggacaagaacggcaacaccatgcccgcctaccgcatcgtgggctctcaggagtccgaccccatgaacggcatcatttccgaggagtctcccttcggcaaggccctggtcggagccaaggagggggacaccgttacggtggaggcccccagcggcgccatcgtctacacggtgcagaagatcgagcggtaaaggagagcggacatgtctgaacagaagacaacccagcagccggagcaggagctgagtgagcagcgccgcgtccggcgggagaagctggcggcccttcaggccgcaggcgaggatcccttccagcagacccggttcgactgggacgccacctctgcacagatcaaggagcactttgaccagatggagggcagggccgtgaaggtggccggccgcctgatgagcaagcggggcatgggcaaggtcagcttctgtgacctgcaggaccgggacggccgcatccagctgtacgcccgccaggacgagatggatgaggcggtctataagaagttcaagaagttcgacatcggtgacatcgtgggcgtcgagggtgaggtgttccgcacccagcggggcgagatgagtgtccgggccaagaacatcacgctgttgagcaaggcgctgctgcccctgccggagaagttccacggcctgacagatctggagctccggtaccgccagcggtatgtggatttgatcgtgaacccggaggtgaagcgaaacttcgtcatccggtccaagttcatcaagcacgtccgggacttcctggatgaacggggctatatggaggtagagacgccggtgctgaacaccatttccggcggcgccactgcccggcccttcatcacccaccacaacactctggacatcgatatgtatatgcgtatcgccacagagctgcccctgaagcggctgattgtgggcggcctggaccgggtgtatgagatcggccgcatcttccgcaacgagggtatggaccccaagcacaacccggagtttaccactgtggagctgtatcaggcctacacggacttcaacggcatgatggatctgtttgaggacctgctgtcctctgccgcccagaagatcctgggcacctatcaggtggagtggcagggcgagcagatcgacctgacccccggctggccccggctgaccatgcatgaggccgtgaaacagtacaccggcatcgacttcatggctatctcatctgatgaggaggcggtggccgctgccaaggccatcggcgtggagctgccggagacggcggaccccacctggggcaatgccctgtatgagaccttcgatcagaaggtggaggagaagctggtacagcccaccttcatcactatgcacccagtggatgtgagccctctggccaagcgttccccgcaggatccccggctgacggagcggttcgagctgttcatctgccgcagcgagatgggcaacgccttctccgagctgaatgaccctatcgaccagaagcagcggttccagaagcaggtggagctgcgggccaagggcgacagcgaggctggcatgatggacgaggactatatcaacgccctggagtacggcctgccccccaccggcggccttggaatcggcatcgaccgctgcgtcatgctgctgaccaactccgacaccattcgggaagtcattctcttccccacgatgaagccgctggaatgagcgcatccggccggagagcctgtgctggcaaacgtccggctaaggccggatttgcggagagctgcaaatggagaagttgacccggcggggcctttgccccggcggaaagagggggagtacgccgctggccggcgtactcctccgtctgctgtcaaggcaaaaaccgccggcagaaaaacggaatcctctccggatatgcgcaccggctctggatttagagcggaatgtgtacggcaccggggcggtcgaacagtggacttgagaagcagaggcacctgcgccgcagggggaggagagagattccggaggcgataaatgggagagcacgaaggcggcacccttccggagaaggccggatccggagctcccacctgggctccgggctgttgaatctgtaacggccgggctgcagcggccggtgtttttttatttataaggtatgaaattccagggtgctgtgaaaaaaatcgttgacttgaatcacagaagagcttatgctatacttgcttttgtataaatccccacagcggtttccatgaaattccatggactgcggcggccaagggctgccgaatgggacctttcgcgctctatgtcccaccgggcatagagcgcatccccgtctccggacagcacctggaacggatggacgcacggggagcagaatgaccggaaaaggaggcgcgccctatggagatcatcaccagccggaccaatccgctgtgcacccatctccgcaagctggcgtcctccgtttcttatcgccgggactgcggggagttcctttgcgacagccccaagttgctggaggaggctttgctgtggagagcgggcctgcggacagtggtctgcacggaccccgccgccctgcctgccctgcccgatactgtccgccgcgtccaggtacccggggatttgatgaaatccatctctcccgcacagacgccccagggcgtcctctccgtgtgcggcctgccgggccggacgcttccggaacagttgaccggccgccggtacgtggtcctggacggggttcaggatccggggaatgtggggacgatcctccggacggcggacgcctttcacgccgacggattgtttttggtgaacgcctgcgcggacctatacaatcccaagaccgttcgggcctccatgggtgcggtgttccgctgcccggtgtggacctgcgggctggaagagctgcgggcgctgctgacgaagagcggcctgcccttgtatggcgcggcccttcggagcgatacggtggacgtgcggcgggcggacttctctcactgcgccgtggccgttggcagcgaggggaagggcctctcggcggacgcgctggcggcttgtgacctgacggtgaggatcccgatgagcggtcactgcgagtccctgaacgctgctgctgcggcggccgtgctgctgtgggaggcggcgagagacgactgaggagggaagtccatgtccgcgctgaaatactggctgtggctgacggagctgccggggctgacgaaccagacccggctggcgctgctgcagcatttccccacgccggaggacgtgtactacgcggaggcggaggaggtgctgctgaccgagggcatcacccgggagcaggcgatcctgctggagaacaagaactgcgccgctgcggaccggattttggcggactgccagcggctgaatgtgaacatcctcaccctccaggacgcggggtatcccaaccggctacggaatatttacgacccgccctgtctgctgtatgtccggggccgcctgccggcttttgacgatgaggcggcggtggctgtggtgggcaccagggactgcacgccctacggcgtctcctgtgcggagaagctgggccatggcttggccgccggcggagccgtggtggtcagcggcttggcccgaggcatcgactccgcggcgctgcggggcgccctgcgggccggcggcacggtggcggcggtgctgggcaacggcacggatgtgatttacccaccggaaaatcaatacctatatgaggatgttgcggcggctggcgcgctggtcagcgagtacccgccgggcacgccgccggatggacggcatttcccggtgcgcaaccgcatcctatccggcctctctctggcagccctggtggtggaggcgccggagcgcagcggtgcgctcatcacggcgggcaccgccctggagcaggggcgggacgtgttcgctgtccccggacccattgatgctccggccagcgtgggctgcaaccgcctgatccgcgacggcgccgggctggcgtccgacgcctgggacatcctgcgggaatacgaggcccggttcccggacaagctgcgccgggaggggacgcaggacgcgccccctgtgctgggctatcaggcccgacagaagacggagcccaagccggtggctccgtcggtgagcctgtcccacaataatctgagtctgaccgacgaccagatctgcctgctccggacgctgacggaggagcccatgctggcagacgacctgatcgagctgacgggcatccccactcggcgggtgctgtcggccctgaccgtgctggagatcgagcatctggtgacacagcacagcgggaagcggtacgcccgcgcggtgaatttgacggaataaacacgcgcccgatcctgggcgcttggaggtaactatggcaaaacacagcctggtcatcgtggagtctcccgcgaaggccaaaaccatcggaaaatacctgggcaaggagtttgaggtgaaggcctgcatgggccatctgcgggacctgcccaagagcaccctgggcgtggacctggagcacgactttgagccggtctacaagcccatcaagggcaaggaggacatcatcgccgacctgaagaagtccgccaagagtgcggagatggtctaccttgccaccgacccggaccgggagggagaggccatctcctggcacctgaagcagctgctgaacctgccggacgagaagacccggcgggtcacctttaatgagattaccaagaacgtggtgcaggagagcatccgggagccccgggacatcgaccagaagctggtggacgcccagcaggcccgccgcatcctggaccggatcgtgggctatgagctgagccccctgctgtggaagaagatccgccggggcctctccgccgggcgggtccagtccgtggccacccgcatggtggacgaccgggaccgggagatcgaggagttcaaacctgaggagtactggaccctggatgccaacctgttcggcgacgacgcgaaaaagctccccttcgccgcccgctaccacgggaaggacggcaagaaggcggagctgaagtcggcggaggacgtggatgctgtggtccatgagacggagcacgcccccttcaccgtcaagaccgtgaagcgcacagacaagcagcgcagcccctctccgcccttcaccacctccaccatgcagcaggaggcgtcccgcaagctctccatgacgccccggcggaccatggccatcgcccagcagctgtacgagggcgtggatatcgagggcgagggcaccgtgggcctcatcacctatatgcgtaccgactccctgcggatcagtgaggaggccctggcctccgccaagaccttcattacgggccgctacggcgaacattacgcccagacccaccgctacaaggccaaggcgggcgcccaggacgcccacgaggccatccgccccagcaacgtcaactggacgccggagcagctgaaaaaggacctgaccggcgagcagtaccgcctctaccgcttggtgtggagccgctttctggccagccagatggccaacgccgtgtacgacagcgtggccgtggaggtcgaggcggcgggacacagcttccgggccagctcctccagcctgaaattctccggctacaccgccgtgtatgaggagggcaaggacgaggagaaagaggagaaggaatcccccttgcccgccctgcgggagggcgaacctctgaccctgaaggactttgaccgggagcagcacttcacccagcccccggcccactatacagacgccacgctgatccgggccatggaggagcagggcatcggccgcccctccacttacgctcccactgtgtccaccatcctggaccgggagtacgtggtgaaggagggcaagtacctccgcatcaccaacctgggccgtgtggtgaccgccctgatgaaagagcggttctccgacatcgcggatctgaaattcaccgccaatatggaacagcggctggactccgtggaggagggaaagaccgcctggaaggacgtgctgcgggagttctacggggactttgagcaggacctggagaacgccgaaaaggctctggacggcgcccgcatcaaggtgcccgacgaggtcagcgaggagatctgcccggagtgcgggcggaatctggtggtaaagtccggccggttcggccgcttcctggcctgtcccggctaccccgagtgcacgttcaccatgccgctggtggtggagatgccgggccgctgccctaagtgcggcgggcggctgatgaagcgcaccggcaacagcaagaagaccggcaagcagtatacctactactgctgtgagcatgtgaacagcaaggacgagacggcgaagtgcgacttcatgacctgggacgtgccggtgaaggacgactgcccggtctgcggccacaccatgttcaagaaggcgggccggggattcaagaagcccttctgcatcaatccggaatgcagcaacttcctgccggaggagaagcggggctatcccaggaagaaggccgcggacagcgccgagggcgaggagcctgccgctgcggcggaggagacagcggagaagaagcccgccaggcggacagccgcagcgaagaaggcggacaccgccaagaccgccgcgaaaaagagcgccgccaagaaaccggcagccgccaagactgccgcaaagaagcctgcggccaagaaggagacggcctccaaagcggcggccaagaccacatccaccagaaagaccgcggccaaaaagacggtcgcgtcaaaggcgaagaagcccgccgggaaggagtgacagctcccgggccaggcggaagccggagcggaagaggaagcgctcctcctgctccgtgcagcgccaggcggcggcctgataggactccagcagttcgatctgctccggggtcagggaggccagcagagcattctccaggcggctctcccgctggtagagcggccagcaggtgccggggaggttttcgtccaggtgctccaggaggttctcgaagagaatgtccagagggtcagtcatgatgaatcatctccaaaatcgtagtttaatttcgtgtttacaatatacacgaaattaaactgcaagtcaaggggtggggcatggaaaattttgcacaacgggtcagacaactgcgcaaggagtctggcaagacacagacacagatggctgctgtttttgaaatcagtgctcgccaataccaaaattatgagggcggcgggcattatccggatgtgccgggattgatgaaaatggcggactacttcggcgttactaccgactatctgctgggacgcagcgaccagaggagctaaggtgatacgggccgccgtccggcggccacggggacttctgctcccgcagggggctggtccagcgggatgcaccccccattttcttttccctcttgtggaaaagaaaacgggccgtgcacggtccaaaagaaaagaccgcttagacgcgctccggcgcgttcgcgcctccgcgcgacgggggtcggcggatcggtgcaagcgccgattttggcctgccttcgggcacgcttttcccttctgcaagtttgtaactgccgtcccgtggcggatggtgcggagatcgtcggggtggtcatcgcattgaggtgcttctcttttcgctgccgctggcttggcggttgacgggagctggtgcaagctcccacgaccgccggggcagcgcgtagcgaagcggaacgcgcggaaagagaatctggtcaaatgcgtccttgcaccccgatttttgtcggaaccgcgccgcgggagtcagtgttcaagtctgcaccgtactccgccgcgcccgtcgggaagccctcgcaaccccgcaggcaccatcttacgccgacccccgtacagcaactttgcacgcacgtgcaaagttgcgaccaaaagcgattttttctcttccaccgggcgcggcgcattctctttttgtcaagaacaaaaagagaatggggggcgcatcccccgtggaaacggccccctggcgggagccagattccccgtcccatgggacgcaccatcaaccaacgatagataaaggatccaaactatgaatgtaacagttatcggcgccggcctggccggctcggaggctgcctggcagctggcccagcggggtatcgacgtcaccctccgggagatgaagccggaaaaaaagacccccgcccatgagacggaatacttcgcggagctgtgctgctccaactccctgcggagcgaccagctggaaaacgctgtgggccttttgaaagaggagctgcggcggctgggctccctgatcctccagtgcgccgacgccacccgggtggaggccggcggcgcattggcggtggaccgccacggcttcgcccgcatggtgacggagcagatccgcagccacccccatatcaccgtggtgcccggcgaggtgaccgagatcccggagggggaggtggtcatcgcctccggccccctgacctccgacgccctggcggagcggctccagtccctgttgggggcggacaccgccctccacttctacgacgcggcggcccccctggtcaccgccgagagcgtggacatggacaaggcctggttcggctcccggtatgaccggggaacggcggactatgtcaactgccccatgaccgaggaggagtacgacgccttctggaaggagctgaccacggcccaggaggccccggtccacggctttgaggacaagatggtatttgagggctgtatgcccgtggaggtcatggcccgccggggccacgataccctctgctacggccccctgaagccccgggggctgaaggatccccgcacgggaaaggagccctacgccgtggtgcagctgcggcgagacaacgccgacggcacggtgtacaacctggtgggcttccagacccacctgaaattcccggagcagcggcgggtgttctccatgatccccgccctccacgacgcagagtttttgcgctacggcgtcatgcaccggaatacctttttgaactctccccggctgctggaccggtactaccggctgaaagcggagccccggctctcctttgccggccagatgaccggcgtggagggatatgtggagtccgccgcctccggctttctggtgggggtggagaccgctcggcgcctgaccggcaggccgcccgtcgatttcccccgggagaccgccatcggcgctctggggctgtatgtgtccaatccctccgtcacgatgttccagcccatgaatatcaacttcggcatcatgccgcccctggaccatcgggtgaaggggaagcggaataagaacgcggagctgtcggcccgttcactggccatcatcgaccaaatcaagcaggaggtgcgggaagcatgaagatcattgtagacgcaatgggcggagacaacgcgccgctggaaatcgtccggggcgcgctggacgccaaccggaaccatggggtggagatcattctggtgggccggacggcggaggtgctgaaggccgtggaggcctgcggccagaagagcctgcccgcaggggtggagatcaaggacgccaaagaggtggtggagatcgcggatgaccccgccatggccttcaagcagaagccagactcctccctgaccgtgggattgaacctgctgaaggacggcgcgggagacgcctttgtctccgccgggtccaccggggcgctgctctccggggccacgctggtggtcaagcgcattcggggcatccgccgggccgccatggggccccagattcccaccgccgggggacgggcggtcctctgcgactgcggcgccaacgccgagtgcacgccggagtacctgctccagtttgcgtacctgggcagctactacgcccagcgggtcatgggcatcgaaaagccccgggtgggccttctgaacatcggtgcggaggaggagaagggcgacaccctgcgccatgagacctacgccctgctgaaagaggctggggaggccggccgcatccacttcatcggcaatgtggaggccaacgaggccatgatgggcaccgccgatgtgatcgttaccgacggcttcaccggcaatgtgatgctgaaaaccatggagggcgtaggcaagttcctgctcaagtccctgaaggagatgttcctctccagcaccaagaccaagctggccgccggtctggtgaaaggggatctggggcagatgaaaaagctgctggatcccagcgaggtgggcggcacacccttcctggggatccaaaagccggtgatcaaggcccatggcggttccaacgccagggccatcgaaaatgcggtgctgcgggccaaggagtatgcggaaagcggtttcatcgcggacattcaggccaacatcgaacacatgcgggtccagcccggcatggaaaaaaattgatttcctattgacaccgccgtagagattgccgtatgattaccccagcaaggcacagaaccatttttccttgaggggtgaacgacatgtcgaatgaggaaatttttcagaccatgaaggatttggtgtccgagcagtttggtatggagctggacgaggtgacgctggagacctcctttgaagacgacctgggcgccgactctgtggacctggtggagttggtgatggccatggaagaggagttcgagctgggacagacggcggaggacgaggtcaaggccatcaagaccgtgggcgacgcggtgaattacgtggcaggcaagctgaacggataacttgcaggaacgccccgcgcagagcggggcttccttttgggagtggacgatatgcgggatctggagaaaaaactgaattacaccttccgcaaccaggctcttctcgaggaggcgctgaaccacagctcctacgccaacgagcaccgggccggtgggctgcgcagcaatgagcggctggagttcctgggggactccgtgctgggctttgtgacggcggagtttctcttctgccagcacccggaccttccggagggggacctgacccgcatccgggcggccctggtgtgtgagcagagcctgtatgaagtggcgcagaagctgggcctgggccagtatctgaagctgggccggggcgaggaggctggcggcggccgggagcggatctccatcctggcagacgccacggaggcggtgtttgccgctgtgtacctggacggggggatcgaggcggcctccgccctgatccaccgctgcctgctggacgcagagaaggaagaggtagtggaggagcgccgccgggactacaagacggctctgcaggaactggtccagcgccaggcggatcaggtgctcacctaccacatgaccggcgaggcggggccggaccacgacaagaccttccaggcggaggtgcagctcaacggactgcccatcggcgccggttccggccacagcaagaaagaggccgaacaggcggcggccaaggccgcgctggagacgctggaggagacgtgaactgccttcggccgctgcatacaaatgagcagaccggtcctgaacggccggtctgttttttgcttttctccgggctatccggaaatatgactggaattttcagcctggccgtgatatactcaagcatgtatgtgcgattttaaatgactgggggattgaatccattgtctttgctgtcatccatcctgctgggcctgatccagggcctggcggagttcctgcccatctccagttccggccatctggccattgcggagcacttcctgggccaggcgggcgttccggcgacgccggacttttttgacgtgctgctgcacctgggaaccctggtggcagtgttcgcggcctactggcaggatatccgggacatgatcgtggagctgatcgacggcgtccgcgatctggttcgcggcaccacacccaaccccatcccgccggcacggcggatgatcctgctgattatcgtgggcacgctgcccctgtttgtggtgctgccggtgaaggatctggtggagggcctgtccggcaatatctatttcgtggcgggggctctgatcgtgacgggctttctgctgtttgccagtgaccgggtaaaaaaaggacgcaagacggagcggagcgccaagctgctggatgtgctgctggtgggcattgcccaggccatcgctacctgccccggcatctcccgctccggcaccactatcaccgccggctgctttgtgggctttgaccggaagtttgcggtgcgcttttcctttctgctgtccatccctgccgtcctgggggccaacatcctgaccttgaaggatgccattcaggagaattccatcatcgtatcggacattcccgtgtatctggtgggagtggcggtggccgccgtggtgggctatatctgtatccgcctgctgaagatgatcgccgataaaggcaagttcggctggttcgcgtattactgctgggcagtgggcctgatcgtgctggcgctgacacttgtgctgaagtaacttgcctttggtgcgcagagcacgtccgcggcggaagcggggcaagcgtctggcggagagccggaccttggagcgggcaggctcggcctaaccgcttaggaaagagaagagcctctgcaaaaccgaagattttatggcataaccccgttgcgccgcatcggcggtaaacaaaggagattggaacctcgaaggagagaagcatggcatcctcaacgcagaagaagacgacaacgaaaaagagcggcagccgctccggctcacgcacggccaagggtaagcagcctcagaagcgtcccatccgccgggaggtggggggcgtgatactgctggtgctggcgctgtgtgtgctggtgagctactgcggcgtgcaggcgatcctcatcgacctgctggccaagctcctgaagggactgttcggctacggctactggctggccggccctgctatgctgctggcaggagggatcctgctgctgcaccggggccgcccggtcaccctgcggaccacctgcgccctgctgctgccgctgctggcaggagcgctgttccacaccattttcgcagggggagactatgcgctgaacggctggggcgttttgaagaatctctggacggcgggccttgccctgaaggcgggcggcgccgtttccggcctgctggcggaggcggcggtgctggcggtctccaaggtggtgtctctcttcctcttcggcttgctgctggcggttctgctgctggcggccctgcatgtgacgccctccgccgttctggagatggtacggaaccggccggagtacgaggaggagccggagcctacgcccgccgtccacatcgctcctgcggagccgccccggcggcggggagagcgccagagcaggcccgccatcgacattcccctggacggcgagaagccgcccgcacagccggaggaagagtccggccggtttaccggcttcttccggcataagtccgacaagatgaagacgccggaccaggtgctctccgacaaggaggcggagcaggcggcgctggaacctgcgccgtctccggcccgcgccaaggccgctcccaccccggagcccgtggcggaagaggtgtccgttccggagcccgcccccgcagcgcctgccgccccgcctgccccggcggcggggaagaaggccgtggcccaggaggtagccgccgctacggcagcggtgaccgcggagattgagcagaagctgacggaggatgcggacacctatcagttcccccccattaccctgctgcaggagagccgggaggaaaactatgccgagaccggcgcagagctgcggaacaactcccgccgcctggcggagaccctcaccagcttcggtgtggacgccactgccggagacgtggtccacggcccctccgtcacccggtatgagttcgtgctggaccagggcgtgaagctcagcaagatcaccaacctgtcggatgatatcgccctggccctgggggcctccggcgtgcggatcgcccccattccggacaagatctccgtggtgggcatcgaggtgcccaacaagcaggtgacgccggtgctgatccgggacgtgatcgagtcccgggagttcacagagcacaagtccaaagtggctttcgccctgggaagggatatcggcggccggaacatcgtgggggatatcgagcgtctgccccacgtgctgatcgccggcaccaccggctccggcaagtccgtgtgcaccaactccctgattgtgtcgctgctgtacaagtccaccccggatgaggtccgctttatcatggtggatcccaagatggtggagctggccccctacaacggcattccccacctgctgatcccggtggtgacggatcccaaaaaggccgctggtgccctccagtgggcggtgttcgagatgatgaagcgatacaagaccttctctgagcatggcgtgaagaagctggaggagttcaaccgcctggcccgggccagtgaggacctggagacgctgcccagcgtggtggtggtcattgatgagctggccgacctgatgttggtggctgctaaggaggtggaggagtccatctgccgggtggcccagatgggccgcgccgccggcgtccatctggtgatcgccacccagcggccctccgcagatgtgatcaccggcctcatgaaggccaacattcccagccgcatcgcctttgctgtggcatcctctctggagtccagaatcatcctggacaacaccggcgcggagaagctggtgggcaagggcgatatgctctacgctcccctgggccagggcaagcccacccgcgtccagggctgcttcatctccccggaggagatcgaacgggtggtggagttcgtgaagcagtccggtgaggcgcattactccgatgaggtcatggccaagatcgaggagtccatgcaggagaaggagaaaggcggcaagggcgccgcggccgcggcgccggaggccggagaggacgagggggacgagctgctccccgccgccgtggaggtggtgctggagaccgggcaggcctctgtctccatgctccagcgccggctgaagctgggctactcccgggccgcccgcctggtggaccagatggaggaacggggcatcgtggggcccttcgagggctccaagcccaggcagctgctgatcacccgtgcccagtggcaggagatgcagatgggcggcgcgcccgccccggaggcggacgagcctcccttcccgacggaagaggagacctgacggatgcaggccttcagcggagatttctgaaaacctctgcttgacaaatccccgcaaagacgtataatgggactatcataaacgcgatgacagagccagccctgcgaaaccggcttagaagcgagggggagacggtgcaagcccccagcccacgccgcacggcagccactctggagcagtccgcgaggagcggaacggcccatccccgttaccggatgacatgagatgcctcccattcggaggcagatcagggtggtaccgcggaatggaatgttcgcccctgacagagatgtcaggggcgttttttattgccggccgccgtaaatgagattacaaaatccgaccaaggaggtcttttttatgaaattttccagcaagattcagcggtgtgagctctctcccatgcggaagtttctgccctatgagctggcggcagaggccaagggccgcaagatctatcatctgaatatcggccagccggacattgagacgcccaaggccttctttgacgcggtgaagaatttccaggacccagtgctggcctatgcggcggcccccggcgtgtctgagtttctgacggcggtgcagggctactacgccaacctgggcatccacctggagcaatcggacatctacgccactgccggcggcagcgaggcgctgcagatggccctgacctgcattctggacgagggagacgagatcctgatcccggagcccttctatcccaattacaacacctttgtcagtgtcaccggcggcgtgatccggcctatccccacaactccggaggagggctaccgctacgccgaccgggcgcgaatcgagcccctgatcaacgagcacacacgggccatcctggtgaccaaccccggcaaccccaccggcgtggtcctctccccggaggagatgcgcctgatggcggacatcgccaaagagcacggcctgttccttatcagcgacgaggtgtaccgggagttcgtctacggcggcgagcctctggcctccatggcccagtttgacgatgcggccgagaacgtggtggtggtggactccatctccaagcggttctccgcctgcggcgcccgggtgggcatcctggtgtcccggaaccgggaactgatggcccaggccctgaagatctgccagggacgcctgtgcgcggccacgctggaccagctgggcgctgccgccctgtacggcgtaggctccgactacttctccgccgtgcgggaggagtaccacaggcggcgggatacctgcatggagggcctatctcagatccccggcgtggtgtgcgagtgccccaagggcgctttctacctcatggccaagctgccggtggatgacaccgacaagttccagacctggctgctggaggagttccaggacaacggggagaccgtcatgttcgcacccggcgagggcttctacggcacccccggcaagggccgggacgaggtccggctggcttatatcctgaagcaggcggatctgcggcgggccatggaggtcctggcccacggcattgaggcatacaacagccggaagctgtgagaaacgagcagaggagagcggcttttgccgctctcctcatgtttttatgattccggtgtccagaggcactgttccagatccaccgtgccgtccaggcgaaaggccacaccctccgcctccagcagggcccgctgggtgccgggggcaaaggtgtcgaaggccgccttggtgccgccgaagcggtccaccacccggtggcagggcacggttgggtcctgacaggacgccatggcatatcccaccagccgggcgctccgtggcatcccggccagccgcgccacctggccgtaggtggacacacttccggcggggatccgccggaccacgtcatagaatgcgccgaagactgtgccgctcacttctcccgcacctcatacagatccgtcctccgggcggagaggatgggcagctgggcccgtaccgcctccagccgttccacgtccaggtccgcgtacagggttgtctcctccgccccggcccggcagagcacggcgccccagggatccacggcgatggagttgccgtaggccacgtaggagccctgttcgtcccgggcgggggagacccccacggtgaagcactggttgtccactgcccgctggcggaagagaagttcccagtgggcggggccggtagtcatgttgaaggccgccggcacgaagatcacctttgccccccgcaggcacatgcaccgggccagctcctcgaaccgcaggtcgaagcagacgcacagccccatggtgccgaaggccgtctcgaaggtggtgatggcatttcccggggagagggtgtccgactcccggaaccgctgtcccccctggacgtcgatatcaaacaggtgggccttccggtgcttggccagctggcggccgtcggggccgtagacgtagctggtgttgtagatccgaccctccgacagctccggcacagtcccgcccacgaggtagagccccagctccgctgccaggcgggacagggccgtctgggcctcgccgccctccggttcgccgtaggcgccgaagcagctgttgtcgtaggggcagcagaacatctccggcagcacggcgaagtccgctccattcttggccgcctcccggattttgccgcaggcggtctggatgtttttccctttgtccggaagcaccggcatctggatcagcgcaatgcgcataggcgcacctcctcaatcattccgtcatttcccgcagcaccagatctgtggcgcccccgtcgggggagcggagcaggcgcttcacctgcgggtggtgcccgtattccacctggagaaagtcccgcagggccgtgccctgatgacagccatggatcaggcggagccggtacgtcccggccccggcccggcggagcagggcatccaccgtgaccttggcctgataggtgttcctgccgtggaggtccacggtgacaattccgcactccatgggcggctgcctcctctctcccgccggagggcggggaatgctcttctcccattgtaacatgggcggaactgtgttacaatgcaaaaaacagaggaggcatggaagatggcagtttacacggagaaaaagacataccacaccaaggcccacatgggcatgatcgacgtgacggaggactttcagcacgcagtggaggaggcatgccggcagcacggcatctctgccgggacggtcaccggcttcaccaccggcggcgtggcgggcctgacgaccctggagttcgagccgggcattgtgaaccacgacctgaaggcggcgctggatgtgttctccccctatctggatgagaaggggcgggtggtgccttactggcatcatgagacctggcatgacgacaatggatcctcccacatcaaggcggcgctgctgtcccccttcatcacggtgccttttgtgaacggcaaaatcaccgtagggccctggcagaacctgaccctcatcgagtgcgacacccgggaccgggtgcgggacattgtgttccaagtgatgggagagtgagtgcagcgtgggtgccgagcgtccggcattcaagtgttccggcggagccgggaccttggcgcgggcgggctctgcctgcccgcaccagtgagatgcagggcccccggccgcgccaagcggctgggggatgcgacacccgggaccggatgcgggacattgtgttccaagtaatgggagagcaagcagctcggcgcttacaaaaaagatcacagcatgaccaaagaaacacgccccggaatgggggcgttttttttgcatactgctgtcgaaaagcgcagaaaatagattgcaatttgtgcagagttgtggtatccttcttctactgccctttaaagggatgccacaggaaagctttaaatagagaaaggggagagccatggaaaagcggtacggcctgcccacggccatctgcatggtagtgggaatcgtcattggctccggtgtgtttttcaaggcggaaaaggtgctccaggccaccaagggcaacatgcctctggggatcctggcgtggggaatcgtgggcgccatcatgattatttgctcctatgtgttcgccaccatggccacccggtatgaaaaggtcagcggcctggtggactacgccgaggccaccgtggggcggcggtacgcctactacgtgggctggttcatggcagtgctgtacacgccctgcctggtgtccgccctggcctggatctccgcccggtacttctgtgtactgctgggctgggacatcaccggcggcgcctgcatgaccatcgccggggcgatgctgtgcctggaccacgtgctcaacgccctggcacccaggcaggcaggcaggttccaggtgtccaccactgttatcaagatgatccccctggcgctgatggccgcctgcggcgcggcggtgggcatgatgaacggccgcatggcggagaacttcgccaccatgagtaccggcgccatctccaccggcgaggggctgatggcctctaccgtggcggtagctttcgcctatgaggggtggatcttggctacctccatcaacgcggagctgcgggatgccaagcggaccctgccccgagccctggtggtgggctcttttatcgtggtgctcacctatattctctactacatcggtctcaccggcgcagtgacgacggaggagctgatggccagcggcgaggcagcggccaagatggccttccagcgggtgttcggggagacggcgggcacagtggtgttcgtgctgatcgtcatctcctgcctggggaccctgaacggcttaacgctctcctgctgtcgggggatgtacgctctggcggtccggaacgaaggaccgatgccggagctgttccgccaggtggacccggtgaccaatatggcgggcaactccgccctggttagcctgggcctctccgcactgtggttggtgtacttctatggcgccaatgtgggcggaccctggttcggcgccttcagcttcgactcctcggagctgccgatcatcaccctgtacggcatgtatgtgcccatgttcattcaattcatgcggaagagcacggacctgaaccctttccggcggttcgtcatgccggctctggccctgtgcgcctgtgcttttatggtgtatgccgcctttgccgggtatggagtgaccgtgctgtactatctggtggtgtacgccgcggtcatgggcatcggctggctgtttgaccggcggaaaaaatgaaaatagtggaagattagggattgacaatgtggggaaaatggagtatagtgccttcagtaccaaaagggagtagctggcacatttgattgtgtacccaacggcgtcagtacgggcttcggccccgcttcgggttgaaacggcgagacttttgtatcaatgcagaggcattgacgcaaaagtctcgtcttttttgcgtcttgccggaaagaaggagttttatgaaaacggaaaagactatctggcagaagagccgggaagagctgtttcaggagttgagcagcaccccggagggcctgactggcgcggaggccgcccgccgcctggagcattatggccccaatgagctgcaggagggcgggaggaagagcgtcctgcggatttttctggagcagttcgcggactttctggtaatcattctgatcttagccgccgtcgtctccgccatcctgggggatgtggagagcatggcggtcatcctggcggtcatcaccatgaacgccatattgggcacggtgcagacggtgaaggccaccgcgtccctggacagcttgaagcagatgtccgcccccaccgccaaggtggtgcgggacggtcaggtggtccagctccccggccgggaggtcaccgtgggcgacgtggtggtgctggaggccggcgactccatctgcgccgacggccggttgctggagtgcgccagcctgaagtgcgcggagagcgccctcaccggcgaaagcctgccggtagagaaggacttggcggacatcgacggcgacgtgccgctgggagaccgcaagaacatggtgttctccggctgcttcgtcacctacggccgggcccggttcctggtgacatccaccggtatgcacacagagatgggcaggatcgccgccctgctgaagagcacggaggagaaaaagacccctcttcaggtgagcctggaccagttcggccgcaagctctccatcggcattttggtcatctgcgccctcctctttgccgtcagtgtgttcctgcggggcgagaatgtgatgaacgccttcctctttgccgtggccctggcagtggccgccattccggaggccctcagctccatcgtcaccatcgtactgtccttcggcacccagaagatggccagggagcacgccatcatccgcaagctccaggcggtggagggcctgggcagcgtgtccgtcatctgctccgacaagaccggtaccctgactcagaacaagatgactgtgaagaagctctgcaccgggggccagatcatcccggcggacggggcggacttctctcgcccggaacagcgggagctgctgcgtgccgccctgttatgcagcgacgccacggtgaacgaatccggagaggtgggagaccccacagagaccgccctggtgcgcctgggcgagagctacggcttcgacgaggcggaggcgcggggcaagtatccccgtctggcggagctgccctttgactccgaccggaagctgatgagcacagtccaccagttgccggacggcctgaccatgctgaccaagggggccgtggacgtgatgctgggccgcactcgcctctctccggaggagaaggcggagatcgagcggatgaacgaggagctgtcccagcagggcctgcgggtgctggccttcggcaagcggatgctgaccgcccccgccatcggcctggaggatgagaacgacctccagttcctgggcctcatcgccatgatggacccgccccgggaggagtccaaggcggccgtcggtgagtgcatcgccgccggtatccggcccatcatgattaccggcgaccacaaggtcaccgcctccgccatcgccaaggagatcggcatcctcacccccggcaccgaggccgtggagggtgccgttattgagtccatgagcgatgaggaactgcgggagttcgtacccagggtcagcgtgtatgcccgggtgtccccggagcacaagatccgcatcgtccgggcctggcaggagcggggcaatctggtggccatgaccggcgacggcgtcaacgacgccccggccctgaagcaggcggacatcggcgtggccatgggcatcaccggcaccgaggtggccaaggacgctgccggtatggtgctgacggatgacaacttcgccaccatcgtccaggccgtcaagaacggccggaatgtttataccaacatcaagaaggccatccagttcctgctctccggcaacacagcaggcattctgacggtactgtatgcctctctcgcggggctgccggtgccctttgcagcggtacacctgctgttcatcaatctcctgacggactccctgcccgccatcgccctgggcctggagccccacagtgacgcggtgatgcaggaaaagccccgtccccgcagcgagggtatcctgacaaagcccttcctgttgagcgtgggcacggagggcctggtgatcgccctggccaccatcattgccttccacatcggcctggccagcggcggcgctgccgtggccagcaccatggcctttgccaccctatgcctgagccgcctgttccacggcgtcaactgcaagtccggccatccggtgctcttcacccgggccttctggaacaacaagttcctgctgggcgccttcgccgtcggcgcgctgctgctggcggccgtgctgctgatcccaccgctggagcctctgttccaggtggcggagctgtctatcggactggtgggctgcattgtggggctggccttcggctccatggtggtcattcaggtcttaaaagccatccgcagcatgggcaagaagtaaatccactccaaatcaaagcggcagggccgccccttatggggcggccctgtttccttacgcgccggtgtaggtccggacggcatcccgcagaaaggcggcgcagccggggacttcccggtcatagtaggcggtgaaccggggatcggacacatacagctctgcaaggcccacatgggcctggggcgtgtaggactcccaggagtaggacagccaccgccgatggagcgccgcaatccgctggccctccggcccggcggggtccgcccctgctttcacggctgtgacgagagcggtgtggatctcaccccccagggacttccactgggcatactcctcctgggtcagcgccaggacgcaggcgttggcccggtccatctcctcatctccgtatttctcccggatctcctgcccgaaggcggtctcattggcctctaccgtgcggcgcttgaaggcttcaaatttctcctgatcggtcatcttcgttcctcccttgatgtcgttaatcgttcgctggacagtcaggatcagatcgtccagtcgggcccgacgggcctccagctctgccaggtggctctgcagcgccgcctggcggtcaaaggccgggtcgtccagaatggtccggatcgaggccaggtccagtcccagctcccggtagaacaggatgtcctgcaggcgatccagttgcgctgggccgtagaggcggtatccggcctccgtggtccgcagaggtttcagcagtccaatccgatcataccagcgcagagtcctgggcgtgacgccggccagatcggccagcgccttgacggtgtattccatagagatccctcctgtcgattggcagtataacagttgacgctgcggcaaggtcaagggggttcacgaaaaaaaccaggctttctttttccatggcaatgaactataataggataacaccatttcaaggatcacggaaggggggatggcagatgatcaattccaccctctgctatctggagcggggcgacgcttacctgatgctccaccgggtgaaaaagaagggcgatctgaaccatgacaaatggatcggcgtgggcggcaaattcgaagatggggagagccccgaggactgcatcctccgggagacctgggaggagacgggcctgacgctgacggactaccgctaccggggcctggtgacctttgtgtccgatgaggcacccaccgagtatatgcacctcttcaccgccactggctggaccggcacgccccacccctgcgatgagggagagctggcctggattaaaaaagcggagctgcggggccttcccatgtgggagggggacaaaattttcctccgcctgctggaggagaacgtccccttcttctccctgaagctccaataccagggagaccggctggacagggcggtgctgaatgggaggcggattgtatgatacccgctctgacactggagccgctgtcctgggacgatctcccagaggcggcggttctgtgggccgacccggcggtgatccgatggaccaatattgctgccccctgcacggaggcgggggcggcagaccggctggaacacctgctggactgccagcgggggttgccgttctccacggtctttgccctccgggaggggacggcattccggggactggccggctgcccgccggtggatacggccgccgggatctatgggctgttctaccagctgctgcccgcctgctggggccggggcttgggacttgcggctgcggcggaggcactgcggcgcctggaacggctggcaccggccctggtgctggcagacacggtggcagagaataccgccagcgtccgaattctggagcggctgggctttgtccgcaccgccgtccaccacagggctttctgccgggaggggcggatgctggatatctgggactacgcccgccgctgggctggtccggcggagaccgtctgaccgggacggccccgtgcaacatgaagaaatgaggaatgttcatgagcagaaaactgctgctgttcggctttgaggaactgcccaccattctggctgccgcggccgccgccgggcccttcggggcggaggtggtgccggtggcccggcaggactacaacaagcccctggcggtgctggcggggctggatgatgaccccggcacggtactgccgttcaacggcggccctctgggtgggcggatggtggtgctgtgcggcctggaggaccaggtggactgccttctgccggcgctgcgtcaggcggggatcgggcgggactgcctgaaggcggtgctgacgccccacaaccggacctggaccgctgtgaagctctatcaggagctgctgcgggagcaccaggccatgaacgggcggtgagaagatgcggatcctaatctctgcctgtctgctgggggcccgctgtcggtacgacggggtctccaagctccagccctggatctctgatctggcggagcggcacatcctggtccccgtctgtccggagcagctggggggtctgcccacaccccgtccgccggcggagcggcggggagaccgggtgatgacccgggacggtggcgatgtcaccgcccaataccgccggggcgcggaagaggccttgcgtctctgccgcctgctgggatgcgaggcggcgctgctgaaagagcggagtccctcctgcggcagcgggatggtctacgacggcacctttaccggcgtgctgacggcgggagagggtgtcacggcggagctgctgcgcgcccagggcattccggtgtacggagagtcccgggtggcggagttggcggaccccatctgaacaggccagacagccacggacggcgcagcgcccggagaacggggcggcgccgttcttttcctccccggcacggtttacaaccaggggaaaacgtggtagactcgaagccatgaatatgggagaggagagagaaacatgagccgacaggatgtcctggccctgctgcgggaacaggagggggcgttcgtctccggcgaggagatcagccaccggctgggactgagccgcgcggccatctggaaggcggtggatgcgctgcggagggagggctacactgtggaggcccgcaccggccggggctaccgtctgctggatgcgccggacgtgctgacggagccggagatccgccgctttctgggggagacggcccgggtgggccggaccttggtgtgtctggcagaggtggactccaccaatctccgggccagacagctggcagcggagggcgcagcggacggcactgtggtggtggcggaccgccagacggctggccggggccgactgggccggagctttcagtcccccggcggccaggggatctacctgacggccctgctgcggccggatctgccgccggagcggctgtcgccggtgacggccatggctggagtagcggtgtgtcgggccgtagagcggctgtgcggcgtcagccccggcctgaaatggcccaacgatccggtgctggatgggaaaaagctctgcggtattttgaccgagctctccctggagggggagacggcccgcgtgcaggagctggtgctgggcatcggaatcaatgtctcccagcggccggaggatttcacgcccgaggtgcgggagatcgccacctccctggtccaggccctgggccacgctgtgtccaggcccgccctggcggcggagatcatccgggaggtggaccgcctctgcgcagccctggcggcaggagagactggtccttatctggccgagtaccggcggcggtgcgtgaatctgggccggaccgtgcggctgctgcgcccggacggaggcggcgagacggcggaggcattggacatcgatgaggaattcggcctggtggtgcggaggccggacggcgcggtgaagaccgtgcggtccggcgaggtgtccgtccggggcctgtacggatatacagagtgagagacagggggagatagggttgaaagagctttggacattgttttggaccttcgcgaagatgggggtcatgaccttcggcggcggcatggcgatgctgccgattctccagcgggaagtggtggagaacaagcactgggccacagaggaggaactgacggactactatgccatcgggcagtgcacgccggggatcatcgctgtcaacacggccacgttcatcggccagaaatacaagggcatcgccgggggcattgtggccaccctgggggtggtgttcccgtctctggtcattatctccatcctggcggggctcatcaacaacttcgcggacctggcctgggtccagaacgcctttgcgggcattcaggtgtgcgtgtgcgtcctgattttcaacgccacggtgaagctgctgaagaagtccgtggtggataagcccacggcagcgattttcctggcagtgctggtgggcagcgcggtgatggatgtgtccccggtgtggttcatcctcgcggccgcagtgctgggtatcctgctgaagaactgggaggtgaagggggcatgatctatctgcgcctgttctgggagtttttcaagaccggactctttgccatcggcggcggtatggccacgctgcccttcctccacgacatcggggaggccaccggctggttcacccaggcccagctcatgaacatgctggcggtgtccgagtccacccccggccccatcggcatcaacatggccacctatgtgggcttcaccgttgccggtgtccccggcgcggtgatcgccacattgggagaggtgacgccctccatcatcgtgatcctgattattgccgccctgctgcggaacttccgggagaaccgatatgtggaccgggccttctacggactgcggcctgcctctacgggcctgatcggcgcggcctgcgtgtccgtggtacttgaggtgctcaccaacatcgtggtggcgtcgccggagacggggctgttcaaccagttccagctgggggacggcggcctggcgggcctcatcagctggccgggcctgatcctggcggcggtgctgctggcactgaccaattgggtgaaacccacgaagaatctccatcccatcgtgttcatcgccgcctctgccgtggtgggcgtggtgttccgcttcgcgggggtatgaggatagaccgccaggacctgtatgccctgttgcgggcgcggaatatcccctatgaggagacggcgcacccggcggtatggagcatggaggagctccacgcactctgtctgccgggggaggagcggatcttgaaaaacctcttcctgcaggacgacaagaagcggcggtactatctggtggccatagacggcggccggacggcagacctgaaggccctgcgccggacactggacagccgtcctctgagatttgcggacgccgcagacctggagcggcttctgggcctgctgccgggacaggtgacgccgctgggggccctccgggcgcctgccggcacggtcaccgtggtgttggatgcgtctttgcggggccggaccgtgggcgtccatccgctggagaacaccgctaccacgtttttgaatctggacgatctggccgcgctgctggaggaccatggtgtaccggtgatctggtgtccgctgtaatacgcacaagccgcccgccggagaatcccggcgggcggcttgtgcccatctggcagcgggccgtcacttcccatcgatgtggtgctggatccgctgcatgatcatgtccagggccaccaggttgtggccgccctccagcaccacgatgtccgcgtacttccgggagggctccacatactgctcatgcatgggcttcacagtggtgagatactgggagaccacggactggagcgtccggccccgctcctccacatcccgcagggcccggcggaggatccgctcgtccgcgtccgtctccacaaagatcttgatgtcgaacatatcccgcagagtggggttctggaagatcagaatgccctccacaatgatgaccttggcgggctggatctccacggtttggtcggtgcggttgtgctccacaaaggagtagacggggcactggatggagcgtccggccttcagctcctgcaggtggcggatcagcaggtccgtgtcaaaggcgttggggtggtcatagttcaccttggcccgctcctcataggtcctgcccacctggcgcttgtaatagctgtcatggccgatgacggtcacgtctttgccgaagtgttccttcaaatgccgggtcagagtggtctttccggagccggtgcctcccgcaatcccgatcaggatggtgttcatgttcccgattccccctaaaatctcccagttctgtgaaacaaaaccgcgttcttttgcgtccattatagaagaggcgctccccaaaagcaagcggaaccgcggaaaaagcgtaaatttcccagggaatcgacgcttccggtcttgacggcactgggaaaagccgatattatgtaaattatgaaaagctgttacgcgggaggatgacccatggccatgaaacgctgccccatctgcggggaaaagtattccgatacatacaagagctgccccttctgcgaggaggaagaggcgctgcagagcggtgcacagatccgcaggaccgcccccggacggggcggcaaacggacggccgcccgcggccgccagcccaatctgctgagtcccattctgattgtgctgatcgtcattatggcggcgctgctggtctacctgctcttcggcgaccggatcgcccagcgcctctccggcggagaggagacccaggacacttccacagaggatgtgacgccccagccgccggaccctgatacggcggacccggaggggggagacggcgtgaccatgccggagagcggcggcaccggcgagatggaagacccgaatgacggcggcaccaccacacccgcccagacggatccctccaccctgccggagacactgaccatcgcctacctgggttccccccggacggagttcaccatgtccgtgggagatgagcccattcccctgactgtctccggcggcagcggcacttatacctggagcagcagcgatgacggcattgcctccgtggattccaccggccgggtgacggccatctcctccggacaggccaccctgacggtgacggacggctccggcaagggcacctgcctggtgcgggtccggggcggcagcaccggcacatctacgtctgccagcggcggcagcaccgcgtccggcagcacgctgacagcggggaccgcggtggtggtcaacgccgggaacggcgtgcgggtccgcgcgcaggccaacaccagcagtgagattctggcgaccctctccaacggcgactccgtccgggtggtgcagagcgccgggaacggctggtatcagatcagctttgtggcctccggcggcgtaaccaccaccggctatatgatgggcgagtatttgtccaattcctgaaaaaacaacatggcgatatccccggatgttggatgacattcggggatatttcattgcgcgcgggggaaaagtgtgctatcattttttagatatgaattgataaagaaaaaggagagtaccatgacgacccgacagtttcaggagagctccgccctgcggatcttcctgtcctacttcaagccccaccggaagctgtttttcctggatatgtgctgcgccctgatgatcgccgtgatcgatctggcgtttccctacgtctcccggtggtgcatgtaccagctgctgcctgagagcgcctaccggaccttcttcgccgtgatggcggtggtgttctgcgcatacatcctgcggtccgtgttcacctatatcatctgctattacggccacaccttcggcatcctggtggaggcggacatccgccgggacctgttccgccacatgcaggagctgagcttcgactactacgaccgcaaccgcaccggacagctgatgagccgcctgacggcggacctgttcgacatcacggagctggcccaccacggaccggaggacatcttcatctccggcgttaccattgtgggcgcgctggccatcatgttcaccatccagtggcagctggctctggtgatcgcctgcatcatccctgtgttcttcctggtggtgtggaagtgccgcaagtccatgcaggacgcctcgatcaaggtgaagcagcggacggccaccatcaacgccgacatcgagtcgggcctctcgggcatcaagaccgccaaggcctttgccaatgaggaggcggagctggagaagttcgacgtgtccaacgacagcttcaagacctccaagcgggcgttccaccgggccatgggccggttcaacgcggtgatggagttcttcctgtgcatcctctccgtggcggtgatctccgtgggcggcttcctcatcatgcagggccggatggacacggtggacctcatcaccttcagcctgtatatcacgaccttcgtgaacccggtgcgcaagctctccacctttgcggagctgtttgccaacggcaccgccggctttgcccggtttgtggagctgatgcgggaggagcctgccatgcaggatgcccccgatgccaccactctttcccgggtggaggggcgcatcgacgtggaccatgtgtccttcgcctatcaggatgacatggcggtgctccacgacgtggacctccacattcgccccggcgagaccatcgccgtggtggggccctccggcggtggtaaatctactctgtgccagctgatcccccggttctacgatgtgacggacggcgcggtccgcatcgacggccacgacgtccggcaggtgacccaggagtccctgcggcagaatgtgggcgtggtgcagcaggatgtattcctcttcgccgccagcattctggagaacatccgctacggcaagcccggcgcctcggaggaggaggtggcccgggcggcgaagctggcggagatctatgacgacatcgtggccctgccggaggggttcaacacctatgtgggggaacggggcaccctgctctccggcggacagaagcagcgcatctccatcgcccggatcttcctgaaggacccgccggtgctgattctggacgaggccacctccgccctggacagcgtgacggaggccaagctccaggagacctttgagaagctggcccacggccgcaccaccatcatcattgcccaccggctttccaccgtccgcaatgcggaccggatcgccgtcattgaggacggccgcatcacggagctgggcagccacgaccagctgatggcgaaaaatggcgcttatgcggagctggtgcggacgcaggagctgatcggccatggaaaagagtaagttgctggaccgctgcggggccgagggggaggaccggctgctgctggccaaggtcctggaccgggctgcccaggcggaggagcgcaatattcccgcctgtacggactttctctccccacagcagcagatgatggccggggacctgctgcgtcttgcgggcatcccggagaccgcttggctccgtcagggaggctaccagggagcggagcggaacatcctgcttttcctgccggactggatggagccggagacggcggagcccccgctccgatgtctgcggggggccttccggccggacgaccggctgaaccaccgggacatcctgggcagcctcatgggtatgggcatcgtccgggagaaggtaggggacattctggtgtccccggagagtgcggacctgatcgtgctggacacggtggcggatttcctgctctccagctggaacagcgccggccgggcgaagctgacggtgacggagatccccgccgcccacctccacatcccggaggtgcggtgcgaggaggtgcgggacacggtcagttccctgcggctggatgcggtgtgttccaccggttttcggatggcgagagggaaggcggtggatatgatctcttccggccacgtccaggtgaactggcggccctgtacgaaggcggacaagctgcttacagagggggacacggtctccgcccggggatttggaaaatttcagttggcggcggtgggcggcgtcacgaaaaagggccgcaccgccattgtggtgaagcgatatatttgagagaggagggtgcagcgtgctggaatacgagtttgaagaggtatcctgcggcgaggtctacgggttttacttgcgggagaccgctgctcatcgggaggtcatcgtccgccgggcggcggatggctggcgatatgtgggatgcatccccaaaagccagcgccggccttacggctttatcgagagcatcgacctggtattcgagcgccagcggcctgagacctgacaggaggagcgaaacatggagcaaaagcagatcgaccgcatcaacgagctggcccggaaggccaagacaccggagggcctgacggagtgggagcggatggagcaggcggcattgcggcgggagtacatcgactccgtgctggggaacctgaagagccagctggaccacacctatgtggtggatgaccagggcaacaagcggaaactgaagcagaaggaggactgagtgccgtggccggaaagaaacagaagcaggaaggcgttggcgcttggatagccatcgtaatcctcttcgccgtcggcctgtggcccatcgccctggtgatgctgctggtcaaactcttcggaaacgacgggcagaagcggaggcaggccccgcccccgctgcagacggcggcgccggagccggcggccgccgcatccgccgggactgccggcaggaccaaaaaggccgtgcgcagcgccatgaagtccccggcggtgaagaagtctaacgccaagtggctgaagatcattggcgcggtgctggcggtctgcggcctggcggcctgctggtccaccatcgagatgatgatttggctgggcggcgtggagccttggtatatcgaagagctgctgtgggccttagccattgctgctgccggtggggctatgttctgcagcggggtctccatcggccgcagtctgaagcggtacaacaagtatctggccgtggttgggaattacgaggctatggcagtggaacagctgtgccgcaccctgggctattccagggaccgggtggagaaggacctgcagaagatgatcgataaaggctacttcggggatgaggcgtatctgaacatggagctggggtatctcttccgcagcggccaggcggacgcggacctgaaacagaagcgccggcaggaggaggcggccgcggcgccgccccccaaggagacggaggagggctgctccggaatcctgcggaggatccgccgggccaacgacgccatcgcggacccgggactctctgccaagatcgaccggctggagaccatcaccgccaagatcttccgggcggtggaggaggacccgaagaagcgagaccggatcgataccttcctgaactactacctgcctactacccagaagctgttggactcctacgcggagtttgaggctgccggggtggagggggagaacctccgccaggccaaagcccggatcgagtccaccatggacctgattatcaagggctttgagcaccagctggacgagctgtacaaggccgacgccatggatgtggacagcgacatccgggtaatggagaccatgctggagcgggatactgccagtgtggaaaaggactttggcctgggagagttcgcagcggaacagaagccggaagagacggaataaaaagggacccggcgcggaaatccgcgccgggtttctttgcgtcggggacttacttgccccaaacgtccgctaccagatttttgtacatctctacatagaacagggagtccatgcccaaggtaacgctgtcaaagccctcggcaaaccgctggcggctggctgccgcactgccggtaaagatgatggagagcttgccgctgcgcttgcaggccgcctggacccgcaggatggcgtcatggaccaccggtgcgttgaactcgccggggtggcccagggcaatggacaggtcaaagggccccacaaagatgccgtctacaccgtccatagcggtgatctcctcaatgtgctccaggcagcccacagtttcgcactggggcagcagcagcgtctcccggttgctggtctccatatagccggaaatggagaccgcatgggcggcgtggccccagccgccgtcccgggtggggcagaagccccggttccccagaggcgcgaacttggcataccggaccagctcccggacttcctccacggtctccacgcaggggaccaccacaccctgggcacccacgtccagcagccgcagcactgccgtgcgggagatctcattggcccgggccagggccgtcaggcctgcgccctgggcggcggcgatctgggccgcagcggattcgatcccggcgggggagtgctccgtgtccacgatcacatagtccagtccggtataacgcaggctctccaccgccagggggctgccgatggcggagaaggttcccaggctctggcggccctggtgaaatttttctaaaacagtattttccatagcatccgatcctcctgaaaatcattgattctattataccccccggaggatgcctgtcaattccggagtagcgggcaaaaccctccaaaaatcatgccaaaaacagcaaaagggttggcccaaaggccaaccccttcgtactgatatggagagtgcggaaggactgcttacagctcgcagagcttgaggagctcctcccagtttttgtccacttccttctggacctcttcgatcatccactcgttgccgggcttgaacatgtgggcaaagcggccctgcatcttcaggtactcctccaccggcagcttgttcttgggcttgtagctgaggatgtatttgccctcaaccacctcgtacagcggccacacgcaggtctccaccgccatcttggtgacctccatcagcttctcgctgggataccgccagccgcgggggcagggcgccatcacgttcaagaacgccgcgccgggggtgtagatggccttgtgggccttctccgtgatgtccttgaagtttccgatgaacgtggtctgggccacataggggatgccgtgggccaccatgatcttcgtcaggttcttcttctgctgcatcttgccggggatcaccgtgccctgaggcgtggtggtggtgtcggcaaagtggggggtggaggaggaacgctggatgccggtgttcatgtacgcctcgttgtcgtagcagacatacaccatgtcgtggccgcgctccatggcgccggacaggctctggaagccgatgtcgtaggtgccgccgtcgccgccgaaggcgatgaacttgtacgtatcatccagcttgccccgcttcttcatcgcccggtatgccgtctccacgccggagatcgtggccgccgcattttcaaaggcgttgtggatgaagctgtccttccacgccgtgtaggggtacatgaaggtggagacctccaggcagctggtggcggagcacaccaccgccttgtcctccgggttcagggcacgcagcaccgtccgcaccgcgatgggagagccgcagcccgcgcacattctgtggccgccggacaggcggtcctctttcatcaggttttctttcagactatatgccatgactgttttccctccttattcccggacgtccaggtagcgataggtctcgcccacctcgccggtggccgcgatcttctccagctccgcgaacacgtgctgaatgctctccacccgcacgtcgcggccgcccaggccgtagatgtagttgatgcccttggggccgctgatgcccgccgcgtacaggctggccgtgacctccgcgaacatggggccgcagtgggcgttgaagctgtcgtccttgtccatcacggcgaaggccttcacgttcttcagggcttcgcagatatcctcactggggaagggacggaaggagcggaccttgatctggcccaccttcttgccctgggcccgcagctcgttgatggcctccttggcggtgccggcggaggagccgatgatgacgatggcctcctcagcgtcgtccatcatataggtctcgatcaggccgtaggtccggccggtcatctcgccgaattccttgcccaccttgcggatcacgtccttggcgtccatcatggcctgggcctgctgccgcttggcctccatgtagtacacgggcgtggcgtaggcgcccacggccatgggctcgccgggcttcagcagcgcgtgggcgggcttgtactcacccacgaactccttgaccttctctgtctccaccagctcgatgttctcgatggcgtgggaggtgatgaagccgtcctggcacaccatgatgggcaggctcaccgcctccgcgatccgcatggcctgcaggtagttgtcgtaggcctcctggttcgtctccgcaaacagcatcagccagccggcatcccgcacgcccatggcgtcggagtggtcgttgttgatgttgatggggccggacagggcgcggcaggagacggccagcgtgatgggcagccggtcggaggccgccacgtacagcatctccgtcatgtagcacaggccgcaggaggaggtggcggaaatggcacggcagccagcagcctccgcgccgatgcaggtagacatggcgctgtgctcgctctccaccgcgatgaacagcgtgtccacttccccgttgtccacgtatgtagagaagtactgggggatctccgtggacggcgtgatgggatacgcgcccatcacatccgggttgatctgcttcatggcataggcgaccgcctcattgccggaaagtctttctctgattcccattgttccttcccctccttatttctcgtccttgaccatagtgatggccccgaaggggcaggtgttggcgcagatgccgcagcccttgcagaagaagtagtcgaagtcctcccgcttgccctcgccgttcaccgggatggacatatccgggcacaccggcgcgcacagcaggcactgccggcacttgtcccagtcgatcacgggcttcatggtccgccagtcgccggtctccaccacgctggacgtgccgccctcataaatgttgcagcccggggtgatgtccttccaggtcacgtccggggtcatatccttcgccagatggctcatcctacctgcacctcctccagagatctcttcagcgcccgcatattgccctcgatgacctggggcttgctggcgaacttgtgcttgaaggagccctccatatccttgatgaactcctcctccccgatgacgccggacaccctcacgatggcggccagcatgggggtgttggggaagttcttgcccagctcctcctcgctgatcttaccggcgtcgatggtgcagacccggccctcgtagcccttcagcaggggccgcagctccgcgggggacttgctggagttgatgacgatggcgccttccttcttcaatccggcggtcacgtccacggcggacagcagggtctcatccacgaccaccacatagtccgggaagtagatgttggaatggacggtgctccgctcggagctgatccggttgtaggcggtgatgggcgcgcccatgcgctcgggaccgtactccgggaagccctggacatacttgcccgtgttgaacgccgcgtccgccagcagcagcgacgccgttttggcgccctggccgccccggccgtgccatcggatctctacaatgtctttcatgcttgatcctcctcgttcggtttggcccccaagcgggggccgtctcgaaatttgccgttttgagtgcttgtcagcatgtatagtatagtccttttctgcgaggaatgtcaattctataacaaattagacagtatagaaatctgtgaatgccagcggcttctttttgttataagtgcgcaaatagctggggactctgttctgtattcctgcctttttgcacaaaaaagagtcctttttttcggcgctttgctcgctggaagtagcatactccagtatggctgacaggctgggcagccgcagcacaggtgaaaagcggctcccggcaccgtcgtgggcgccgggagccgcgggatgtatttgaaagccgcttaccgggccgcctggagcagcttttctgcaatgacctctacatcttcaccggaggccacaaagtccatgacattgggcagggagagggagcggcgcagcagcgccgtgtagtagcgcatcgcccattcccggccggtgacagagcagtgctggatgatttccacaagctctaccagttcctcccgggacaggtcggggatacagggcggttccggcgtcagtgtgagccgtgccaatgtgtccaggtccgtccagctccagtattccgcaaattccacatcagtgtggactttgcccgtgagagcggccaggtcctccagctccgcgccggcggtaccgggttctttgtctgcaatggctgcaatcagggcctccaccgcgtccagcttgccttcgtcgattcggggaaactccagtgcctttctcatggtgcgcctcctctgaaatcttagcgttttcttaactttaccagagttttgcaagtttgccaagactaatccgctgcatgggactcgcaaaccggaccttgcatttgaggacgaggtgtgctatactgcataatctgaaaacaattctcattttcaaaggagatcagactgtggaaaaacgtattcggttgtgtgccgcgctggcgatggtgcttctgttgaccgcctgcggacaggctccggcggagcatgagagggaagagcggctgacagtggtggctacggtattccccgcctatgatttcgcccgggccgccgggggagagctggcagaggtgcggcttctgctgccgccgggagcagagagccattcctacgagcccaccccggcggacattctggcagtgcaggagtgcgatctgttcctctatctgggcggcgaatccgacgcctgggtggagacgattctggagtccgtggacatgcagggcgaggccctgcggatggtggactgtgtggacctgctggaggaggagacagtggagggcatggaagaccacgagggccatgaccacgaccatgcggaggggcccggcctgggagaagtggtgggctacgatgagcacgtgtggacatccccgaaaaatgccgccgccatcacccgggcggtgggggacaggctggcggagctggacccggccaatgccgggacttacgccgccaacacggagggctacgccgccaggatcgaggccctggaccgggaattcgcggacttcttcgccggagtggaggaccggaccatggtgttcggggaccgatttcccctgcggtacttcgcggaggaattcgacatcgactactacgctgccttccccgggtgcagcacccagacagagccctcggcagccaccatcgccttcctgacggacaaggtgcgggaagaggggatccccacggtctggtacattgagttctccaatcatctggtggcggacagcattgcggaggccgcgggcgtcaagacggccctgttccacacctgccacaatgtatccacggacgaactggaggcgggggccacttacgtgtccctgatggagcagaatctggagacgctgcgggagaatctgtgatctgaaaagaagagcgccggggctgcagcggatgtcgcagccccggcttttttatgggaaacggcggagaagcctttgacaggggcgtgcttccgccgtatcataggagtcagagaggagagatggtatgctggcttatacctatttggaaaaaggaaccttccggctgacggacaagccgaagcctgtgctgcgggaacctggagacgcgctggtccgggtgacgctgtccagcatctgcaccagcgacctgcacatcaagcacggctccgtgccccgggcggtgcccggtatcaccgtgggccatgagatggtaggtgtggtggaatcggtgggtcccggcgtccagacggtccgccccggcgaccgggtgagcgtgaatgtggagacgttctgcggcgagtgcttcttctgccgccacgggtatgtcaacaactgtacggatcccagcggcggctgggccctaggctgccggatcgacgggggacaggcggaatacgtccgggtgccctacgcggaccagggtctgacgaaaatcccggagagcgttacggaccggcaggcactgtttgccggcgacatcctggccaccggcttctgggcggcccgcatcacggagatcgggccggaggacacggtgctgatcctaggagcgggccccacaggcatctgcactctgttgtgcgtgctgctgaaagcgcctaagcaggtcatcgtctgcgaaaaggacccggcgcgtctccggtttgtccgggagcactatccccaggtgctgacggtggggccggaggaggtgctggccttcacacaggcccacagcgaccacggcggcgcggaccgggtgctggaggtagccggggcggaggagaccttccgcctggcctggcagtgcgcccgccccaatgcggtggtgacggtggtggcgctttacgataggccccagctcctgcccctgccggagatgtacgggaagaatctcaccttcaaaaccggcggcgtggacggctgtgacagccaggagattctggacctgatcgcggcgggaaagctggacaccacgcccctcatcacccacactgtccctctgcgggatatcgcggcggcctatgacctgttcgagcaccggcgggacggtgtcatcaaggtggcggtggactgcagcatggcgtgaggacagcaggacaacagctccgaagagacagagaggagagaggcagatggatgatgggatgcagtggctggcgggaacgatcctgtcggcggtgatctccagcgtgatcaccgtgggcttcctgtccgcgcttgtgacacggctgcagatccggatcgaccaccggaataacgggatcaagcgggtctatgccccgggagagcacagccgaacactgaaaaagcagctggcagaggcacgggcgatccagcttctggcattgtccggctatgggttcacccatgcatacagacgcatcctgaccgactgcgtggccaggggcgggacagtggaatacctgctggcgcagcccggaaccgcctatatgaaagatgcggctgagatcgagggcagaggggcggactccatctccgaggaggtcggggagaccctgaagctgctggaggccatccggcgggacgccgcggaaaaggcagggaagcagaaagcggagccgggcagagttctcgtcaggtattttcacacggagatgcgcgaacagctgattctctgtacggatcagagcgggcggcgtacggcctggctgtcgctgctgatcccgccgcttccggcgctggagtgcaacatgatcgagtacagggacgcggaggactgtgtggattattatgaggccgtgaagaggcgcagtgagccttgcccagtcgccgtccccggcaggatgcacggaaaggactgagacaccgggcgcgggctggccctcaccaggctatgcggcggtactcgatggccctgcactggcggaccacttgggcacagagagcgttgtaaaattggagatactgtttcttggcctggcgctgggcgcgctgcttctcctgaaacagccgccactgagggcaggtcttgtggcagccctcccggtaggacggacagccggtttggcagggcagcatgggacattcctccgatctcggatattctccgcccggacacggccggggcaggactctgctgtcagtgtagtctttttcccaacggcctgccaccttgaaatggtaaagcgggggtaaaacctctgcgcaggcggaaaaacggggcttgacaacccccgcggtggcatggtaaagtattggctgttcatcggagggcttgtggccgcagtcacaaagccggataagatgctggggggcgcccggtttcttgtccggcttttttttcgcgcctttccggagttgaggagggacatcatggaaacagaacagacctttacacgggggccgatcctgtcgaccctgctgaaattcgccctgccggtgctgctggctttgctgctgcaggccatgtacggcgcagtggacctgcaggtggtgggcaaattcggcactgcggcggacatctcggccgtctccaccggcagccagatcatgcagaccgtgaccatcgtcatcacaggtctggctatgggcatcacggtcctgctgggacagaagatcggtgaggacaggccggaggaggcgggggcggctgtgggcagcggcatctgcctgtttctggtggtggcagtggctgccacagtggcgctggagctggcggcacctcagctggcaatgctcatgcacgccccggcggatgcctttgacggcacggtggaatatgtgcggatctgctccggcggcgcggtgttcattgtggcctacaaccttttgggcagtatcttccgggggatcggagactcccgggtatcgctgatcactgtgctgattgcctgtattctgaatatcggcggcgacctgctgttggtggggggcttcggcctgaatgtggctggcgcagccatcgccacagtctttgcccaggcaatgagcgtggcgctgtccctgctgctgatccgtggaaagcacttggccttcatactccggcggcaggacatccggttcgacggtgccatcattggacggattctgaaattgggcagcccggtggcgcttcaggacctgctggtgaatatcaccttcctggtgatcatcgccatcgccaattctatgggcaccattccctccgccggggtgggcgtggcggagaagctgtgcgccttcgtcatgctggtgccctctgcctatatgcagtccatgtccgccttcgtggcgcagaacatcggcgccgggctggagaccagggcccggcgggcgctgctgtacggcgtgctgtcctccctgatggcgggcctcctcatgggctgggcggcattctttcacggagatgtgctggcgggtattttcgcggacgacccggcggtgatcgccgccgcctgggagtatctcaaggcctacgccattgactgcctgcttaccagcttcctgttctgctttgtgggctttttcaacggctgcgggcagacgctgttcgtcatggcgcaaggaatggtcggggccctgggggtccggctgccggtggcgctgctggtgagccgggcggcggacagctctctgttccatctggggctggccacccctgcctccacggtggtgcagattttcctgtgcggaatctggtacctgcggcgctcccaccggctgaaccggctggggctgatacggaaataaaagatgccccggcaccttcgtgccggggctttccagcgtgcctgtccgcaggcagcgggacggaatcattggagtgcaggacagaagacctgcacttgtccctttgctggacaggctcagtagttccgctccatctcctggatctgctggtacagccagtcgttgacagggacggaaatgccgtgtttggcggccagccggcgaatgatgcctgcaaacagctccacttcgctcttccggtggtttttgccgtcctgccgcatagaggtctcaccgttggagggcaggtggtcaatgatgtccacccatgcggccacgtccttctcagagagcgggacaccctctgcattggccacggcggccacctcccgcatggcgccgatcatggtgtcccggggctttccgggcacctgcagcgggccgtaatcgcactggaacaccagggcggcctggttgcagccggtgttgcacagcagcttgctccacatgtgggtgcggatgtccgccggtacgacataggggaagccgatgctgtcaaaaaacgcggtgagccgctggaggcggctggtgtcctccccggcggggacgcctactgccagttccccaatggggtcgcagacgacgcggttgccctccttcttggcggccatccgctccgccacgcaccagaccacatgctccggaccaaaggcatctcccaggatctcctcgctggagatgccattgaggaccgagatcaggagcgtgtccggtcccaccaggtggcggcaggtctcgatggcgttctgcagaccgccgaacttgacggcgaacagcagtaggtccaccggctctgtgcgagcggcggcatcggtgtaattgaagtcgcagggtgcgtcgttgtaccaaaagccctgcttccggtagcgggcgatccgtgcgccgtctgccagaacggggacctgctccttgccgagcgcccgtgtgaagagcgtggcgtacaggacgccaagggaacccaggccgatgacgccggctgtttgaatgggtttcatcaatcattcctcctgttcatcaaaacagggcggcggaatgctccgccgcccctgttgcttacgcgatccgagccagccaccgcagatcgtagggctcaaacacgaccttttcataggcgtccacatccaggggcgtgccgtcccagtcggagtggatgtcgccgttctgcttgatgaggatgtcgtagaggatgtcgtaggtgacgccgctcaccgggtccgtctccacgatggtggagtaaggcagcgtcttgtggtatgtcagctccattcccttgtagtcgaaatggaagccgcagcgcatccggcagccgtccagtcccgtgtaccgggccaccttcttcagatcctggaggattttgtccccctcctcctcatagaggttctccggtgtggtggcggtgtagtcgaaccggaactgaatggaggcgcccgggagcttgcggaaccgctccatatagggcaccagctgctcggcgggatagttcttgtacagcacgcagttcacccggaagggcaccggcagcttggaaagcaggccgtcgttggattccaccacatagtgctgcatgtggcgggagacgttgatgcaggtgatcttgtgtctgttccgctccgcaaatgccagaatgtccgcctcggactggtgctcggagacgggaagggtggtgttgatatataccttgtgggtagtggggattttgtccagcatcacctggagggactccaggttggcgaagggctcacccccggtgaagacgaagtcgcagtcgggcgtgatggcgtccatccgctcgatgctccggcagatcttctccagggaaaaacctgtcatatccgcatactcgcctttattgatgcagaaggggcagtggttcttgcagtcgtaagggacaaagatcgtcaccgtggcgccgccctcccgcgtcttatagggatgtttcatatcgatcggcctttcagagtaaaatggaaaatccgtgaaaaaatggtctccaaaaaccgcgttgaaggtcttgcagacaatgttatattttaaaggatttttcaacagaggtcaagagtaaaagggaaattccccgtgagaaactccgaaaaaacgctgacacttctggaaaacctgcacaaatcccgcctgcagcgccgccccagtggaaagatgccggtgaaggcagggctgtacatttcccggagaaaatgctataataacaaactatgcaattgtgtttcaagagaggaggcggacccatggagattctgcaggggctgctggacaacctgacggccctgctggcggcacatccgctggcgggggagtggtatatggcctttgtgcgctttctgtttccggctctggccgtgctgatcctgtaccgggcggtccgctctctgctgcggattccccacacgccggagaactggggccagctgagcctgccaaacggcacgtccctgcccctgacccactgggagaacatcctgggccggagcaagacggcggacatctatctgaactatcccagcatctcccggcagcatgccgccctctgccggggcgaagatgagaactggacgctgtacgacctggggtccaagggcggcacggcggtgaatggggagaaggtggcgtcctccgttcccgtgaagctgggggataccatcactttagggggcgtgccgttgatcttcctgcctcagaccgtggcggagcgggaggagcaggaggcgaagcgccgggcggagcgccccgccgccatctggccgtctttcctgtggctgacggtgtttcaggtgctggcctgtctgcagctgctcgtggccgccgggactgaggccaccatcgccatccccctggccttcctggggctgacggtgctgatgtggctctattacgcggccctgcgggccactcgctgcgtgggctttgagatggagaccatcgccttcttcctctccacgctgtcactgtccatcactgcctccagtgcccagagcagtctgttcaagcagttcctggctattttgctggggctggcgctgtttttggtgctgggactgttcctgcgggacctcagccgggtgcagaagaaccgctggctcatggcggccgccgccatcggcctgctgggcatcaccctggtgatcggcaactccaaatacggcgccgtcaactggatctccattggcggcatgtccttccagccgtcggagatcgccaagatctgctatatcttcgccggcgccgccacactggagcggctgttccacaagcggaacctgaccctcttcatcgtgttgacaggcgtgtgtatcggcctgctgggcctgatgagcgacttcggcaccgcggccattttcttcgtcaccttcctggtgatcgcctatatgcggtccggggatttcgccacactgtctttgatctgcggcggcgctgtgttcggagcgggcatcattttgaagttcaagccctatatcctcagccgcttcgcctcctggggccacgcttgggaggccgcctccaccaccggctaccagcagacccgcaccatgtccgccgccgcctccgggggccttttgggtatgggggccggcaacggctggctccataacgtggcggcggcggacacagacctggtgttcggtatgctgtgcgaggagtgggggctgctgatcgccgtgctggcagtgggcgccatcatcacgttggcgtttttcgccgcacgggcctgccgggtggggaggtccagcttttacaccatcgcagcctgcgcggcatcgtccctgctggtgtttcagacctgcctgaacgtgttcggttccgtggacctgctgcccctcaccggcgtcacgttcccctttgtctccaacggcggctccgctatgatgtccgcgtgggggctcctagcctatctgaaggccacagatacccgggagaacgccagctttgccatcgcccgcaagcaccagcggcgcctgacccaggcggcccgccggcgggcggagccgataggggaccccttcggcacggaaaaggaggaacgccatgaagaaaattgagcggcgagcctttatctgtctggcgctggcgctgctgctggcggcgggcctgggattcttcctggtgaaatacttcctggacggcggcagctgggcgtcctccgccttcaaccgccacctgtacaacagcagcggccagcttgccagcggcacggtgctggaccgggacggggacgtgctctccgaggtggtggacggacagcgcacctattacgacaatgccaccgtccgcaaggccactctccatgcggtgggggacctgcagggcaatatcggcaccggggccctgaacgcctttgccgacaagctgaccgggtacagcctgctgaacggcgccttcggcgcccagcgggggaacgacctgtatctgaccattgacgcccggtataactataccgcctatgaggcgcttggcggcaagtcgggcaccgtggcggtctacaactacgaaaccggagagattctgtgtatggtctcagcccccagctacgaccccctgaacgtgccggaggacatcaccaccaacgaccggtacaagggcgcctatctgaaccgttttctgtcctctactttcacgccgggatccgtgtacaagaccgtgaccctggcggcggctctggaggatatcccagacctggcggatcggacctggacctgctccggcagcgtccagatgggggacgagaccatcatctgctccggcacccacggggagcaggacatcgcctccgccttcgccaacagctgcaacgtggccttcgcccagatcgcccaggagctggggccgggcactctggagaagtacacggagcaggcgggcctgaccggcagctattccatcagcggcctgcctacggcaaagggctcctttgactttgacaacatcaccgacggtcagctgggctgggccggcgtggggcagtaccacgaccaggtgaacccggcggcgctgatgatctacatgggcgccatcgcaaacggcggcaaggcggcggagccgtatctgatcctccggaccgagagcgccctgggtctgccgtccctgccacacttcaccaccaggaccggcacgctgatttctgccgatacggcggctgcgctggcggacctgatggccaacaacgtgacccagacttacggcgccagccgctttcccaatatggacatctgcgccaagtccggcaccgctgaggtgggggagggccagacgccccacgcctggttcgccggcttcctccggggggaggagacgccttacgcctttgtggtgctggtggagaacggcggcggcgggtcctctgtggcgggcggcgtggccgccaaggttctggatgtcatcgtcaacggatattgatacgaaagcgggagcaagatgaacgacaagagaaagggtctgctgtttcagaccaagaaacagatgaacaacggagctatcgccacggggttgggattcgtgctgtacctggccctgctggcgatggggctggagctgccggcggacttggtggccgttgccttcggcgtggtgggaattttcaactccctctccgtgctggaggggcggcgcaaggacaaggagaatatctcctacaatctgctgtggggacagctggcgctgaccatcttcctggtggcctgcgcggtgctggccgtcaagcagcggctagggctgtaaaaggaaaagcggcgggaatccatcggattcccgccgcttttttcttattccgaaacggtctcctcttccaaagtggggggcacttccaccggcgcgggcgcgccctccggcagcagctggcgcttgacctttttcatggcccacaggaaacagatcacgtggacgccgaaggtaatagcccagctgatgggataggaccagtagatcgtctggatggtgtggaactggggcagctgaaaaatggtggcgatccacagcagccgcaggccgcaggcgcccaccagggacaccagcatgggcatgatggagtagccgatgccgcgcaggccgcccaccatcacgtccatcatgccgcagagggcataggtggtgcagacgatgcccatccgcaccaatccggcctcaatgaccgggggactggtggtgtagatggacagcagtacccgacctgccagcgtggcggcgttgcccagcaccagccccaccaccagcacgcagccctgggcgcggatcatgatcttgcggatgcggtggtagttaccggcgccgtagttctggctggtgaaggaaatggtggcctgatacatggcgttcatagacacgtatacgaactgctcaatgttggccgcagcggagttgccggccatgatgacctcaccgaaggtattgacggaggactggatcaccacgttggacagggagaagagaatcccctggaatccggcgggcaggccgatgcggaggatctgccgcatggcctgggggtggagccgcattttcttgagatccaggtgcagcgggccggtatccttcaccatgcagcggagcaccagggaggcggagatgcactgggagatcacggtggcgatggccacacctgccacgtccagcttgcagacgatgacgaagaagagattcagcacgatgttgacgactcccgccagggagaggaagtacagcggccgctgggtatcgccctccgcccgcagcagggcggcgccgaagttgtagaccatggtggccgtcatgcccaggaagtagatccgcagatacagcgtggccagatccaacacgttctccggggtctgcatccagatcaggatggtccgggcaccgaagacgcccaccactgtcaacaccaggccgctgatgatgctcagcaggatggaggtgtggactacccggtggagcgcgtctctatctcgggcgccgtagtatttggccgccagggtattggcacccacggccaggcccacaaacaggttggtcagcaggccgatcagcgcggtgttggaccccactgccgccagggagttatccccggcccagcggcccaccaccacgatatccgccgcgttgaacagtagctgcagtacgctggagcacattagcgggatggagaaccgcagcatcttggagagaatagggccgttgcacatatcgatctcataatgagtctgctgcttgcctgccatgtcagaaaacctcgtatatgtcccagaatttgcgctgtatgacgcaagccatattctagcacggagcgtctggaaatgctactggtttccacgaaaaattttacacgattttaacattggaaattctcaaaaagctgtgccggagagacaaagcctctccggcacagctgaattgaaaggaaatgatcttagaaggcaggtactacggcgccgtcgaaggtctcggtgatgtagtcccggatggtgtcggagtggagagcatccaccagggcctgaatagcctcgttgttctcattgccctccttcaccaccagtacgttgacatagggggagtcgctggactcgatggccagagcgtctgtggtggggttcaggccggcgcccagggcgtagttggagttgatgacggccagatccacgtccgcaagcacgctggggatggtggcggcctccagctcctggaactccagattcttgggattgtccacaatgttgttgggagtggcggtcaggttggagctgtcgtccagggtaatcaggccctgggcctccagcagcaggagggcgcggccctcattggtggcatcgttgggaacggcaatgacggcgccgtcgggcagatcctccagggaggagacccggcccgcatagatgcccatgggctcgatgtggacgccggccacgctcaccagatgggtgccgcgggtctcgttgaactcctccagatagggcaggtgctggaagtagttggcgtcctcgtcgccgtcctccacggcggtgttgggcaccacgtagtcgctgtactcgttgaccaccagctcgatgccctgctccgccaggatgggcacgcactggttcagaatctcggcgtggggggtgggagaggcggccaccgtcagggtgacggtctcagcggcatcgctgccgcaggcggccagggacaggcacagggtcaggcccagcagcagggccagcagcttctttttcatgtttcgttcctccaataaaatatcgtttatgatgtatttcaaacgcttgccggattttcaagagacaaacgatgaaaacgccgggggtcacttggtatgggcaaagcggggcaggagatcgagggggccggattttttggcgccggacggctggtccagccgcttatcgatgcgccgggacagccagttgaaaatcagctggaccacctgcaccaggataatcaggaacaccaccgtcacccacataacggaggtgatgccccgctgatggccgtaccggacggcgatgtcgcccaggccgccggcgcccacggtgccggcgatggcggtataggccagaatcgtcaccagggagatggcgccccccaggatcaaagagggcttcgcctccggcaggtacaccttccagacgatctggagggtagaggcgcccatggactgggcggcctcgaccacaccggcgtctacctcgttcagggaggtctccaccatccgggcgatgaagggggcggcggacaccaccagaggtacgatggcgcctttgacgccgatggtggtgcccaccaccatccgggtgaagggcataatggccaccatcagaatgatgaaggggacggaccggccgatgttgacgatccagtccagcacccggtagacgccccggtggggccggatgccgtggggctgggtcaggatcagggccacccccagagggaggccgatcagataggcgaatgcggtggagatcaccaccattaccagggtatcccagacaccatctgtcagcacattaccgtattcggcccagaaggctgcaatagactcaaacatggtattccacctcctccgcagagacattgggctgcgcccggatatagctgagggctttggcggcctcattggggtcgtccggcagcccaagcagcatggtgccgaaggccctgccctcgatgttgcgggtgtcggcacccagaatattgaccttcacccccaggtcgatggcgagagacgcgatcaggggctgatacgccgtaccgccgttgaaggccacgcggacggcgtgagtacctgccggatactgttccaggctgacgccaccggggtacaccagccgccgggccgcatccgtatggggattggagaagatgtcctccaccttgccctgttcagccaccacgccgccgtccaggatcgccacccgggagcagatctcctcgatgacgctcatctggtgggtgatgaccaccacggtgaccccaagcttctcgttcaggtccttcagcaaggccaggatggaggcggtggtggtgggatccaaggcggaggtggcttcgtcacacagcaggaccttggggtccgtggccagggccctggcgatggccacccgctgcttctgtccgccggagagctgggagggataggcgtccgctttctcccgcaggcccaccaggtccagcagctccagggcccgctttctggcctgggcagcgggggtaccgctgagctccatggggaagcagacgtttttcagcaccgtccgctgcattagcaggttgaagctctggaagatcatagtgacgttccgacgggccagccgcagctctttttcgctaagggccgtcatatccttcccgtccacgatcacggtgccggagctgggacgctccagcaggttcatgcaccgcaccagggtgctcttgccggcgccggagagaccgataattccgaagatctcccccttctggatgtccaggctgatgtcctccagggcatggacggcgttttcacccgttccaaaggtcttgtacaggtgctgaatttgaatgatagacacgggacaacgctcctttccggtgaattctggcaataaaaaagtccttgagacaaaagtctcaaggacgacggaattcgccgtggtaccaccttgattcgcacgcttcctcacgaaagcggccttggggagtgcaaacacactcctgcgctgtgacgtgcgcccacgtcgtgacctatgccgggacggcggtcggccacgcaactccgagaccatgttctccaagcccttccagacctcttctcaccacacgaggctctctgcgctgtatctgcctgggtactcttctcttcatcgtcttttgctatcaggttattcaataactgtctcatagtttatctgataacaccggaaaagtcaacagggcaacctgcatagaaatccaggcaaaagacatgtagttctgtaagtttccacaaagcggcgtcgggcgctgtcgaaaccgggaattttttcaagagaagaggcagtatcggattgcaactgctgggcaaaactgctatcataaaatccacaagacccaggaggatggaggaacggcgttgaggcggaagcgggatcggaattttggcatacgctggctgcgggacctgctgtgcggcgtcctgatcggggccggcgccatcctgccgggggtttccggcggggtgctggcggtggtgttcgacatctaccgtccctttatggaggtgctgacccatccccgggaggccatccccaaatactggcggtggtttctgcccatcgggctggggtgcgccatcggctttctgggctttgccaagggcatcgccgcggccatcgacgtgtccagcaccgtcactacctggctgttcatcggcctgatcgtgggcacggtcccatctctcttccgggagacggggaaggagggacgcagcatcggctcttgggtcagcatggcggtgtgcgccggcgccatcttcttcagtctgttttacgtaggaaaagtgatttgcgtcaccgtggaacccaatttctggtggtataacttctgcggcgccctttggggcatgagtctggtgattccagggctgacctcctcctcggtaatgatggccctggggctgtaccagcccatgctggaagggctggcccggctggacttcctggtgctctccgcctgcctgccggggatggtgctgacaatcctgctgctggcaaggctggtgagctggttcttccggaagcactactccatcgctttccacgggatcttcggcatcgtgctggcctccacattggttatcatccccaccagttatgtgggcgcgtgggagattgtgctgtcggcggtctgctgcatcggcggctttttgctggcctacttcatggcccggctggaccggcggatccaggagaacggcagggcctgaaacatgaaaaaagtcccctctgtgttccggcacaggggggactttttcattacagatcgaacacgcccatgatggcaatgcccgccacgatcagcgcgatcatggcgtagtgcttccaggagagcttctccttcaggaagatccggctccacagcacggaggccgcgcagtaggaggcgatgatgggcgcggacatggccagatgctccgtgtccgcgatggcgtagatgtaggcgaactgtccagcggtctcgcagacggcgcccagatacttgggggcctccatcttcggcaccagccggtcccgcttgatgagcaccacatagacgaagcacaccacggcggccagcaggaacgtcagctcataggccacgttggcgctggcctcgtagtcctccacggtgcggctgatgatctccagcacccggctgtcggcaaaggtgccggcagcgtccagcacgcagtaagccgcaggcatggccagggccatgaagctcttggtgtacttgtagttgcttgccttctgccgctcgatgcgcagttcgtcatcttcccgggcctccaccacacccaggcccacggcgcccacacacaccagcgccacggcgaacagggccaggggggagtatccggcgatgccgtcaaagaggatagccagcacagctaccagggcgccggaggagttgcagataggggaggagatggacagctcaatgtaccgcaggcccacatagcccatggccatagagagaatgtacaggatcgagacgggtaggtatgtcaggatgatgtccagattgatgaccgtaccgcccacaaagacctcgtaggccgcgtgaaggcccatgacaacgcccacggccatcaccattttcaggtggctgtacttgtcccgggcatcgcggcagccgattttggaaaagaggtcggagccgctccagcagagcagcgcgatcagagagagccaaaaccacatattacgtttttctcctaaatcactgtattcaaagcgttatttactttccggcagagttaccagacccgcctccaccagcttctggagggacatgaggattcccaacttggcgtggtaccaagtgaggccgccctggaagtagacggcgtaaggggggcggatgggcccgtcggcggagagctcgatggaactgccctggacaaaagcgccggcggccatgatgacgtcggagtcatagcccggcatggcccagggctccggggtcacgtagctgtctaccggggcggcggcctggatccccttgcagaaggccaccatggcctcggcactgcccagggtcaccgcctggatgatgtcatggcggctctccgtggcgttggggacgcaggcgaagcccagcttctcatagatgttggcggcaaagacagcgcccttcaaagcgccggacaccaccgtgggggacaggaacagcccctggtacagggcgggcatcagccccaggttggcgcccacctcttggcccagtcccggggcggagagccggtaggcacaccggtccacgcactccttggtgccgcagatgtagccgccgatgggggcaagtcctccgccggggttcttgatgaggctgcccaccaccatgtcggcccccagatccgagggctcgatggtctccacgaactcgccgtagcagttgtccaccatgattttcacgtccggcttgatccccttgcagaaggcgatcagttccccgatctgccggaccgagaaggaggggcgggtggcgtaccccttagaccgctggatggtgatgagcttggtgcggccgttgatcttctcccggatggcgtcgtagtcgaaggttccgtcgggcttcaggtccgcctgggcataggtgacgccatactccttcagggagcatttgctctctcggatgccgatgacctcctccagggtgtcatagggggctcccaccggggacagcagctcgtcccccggcagcaggttggcggagagggccactgccagggcatgggtgccgcaggtgatctggggacggaccagagccgcctccgtgtggaacacatcggcgtacactcgctccaggttgtcccggccgtcgtcgttgtagccgtagccggtggtggcggcaaagtgggtggcgtttacccggtttttctgcatggcggccaggaccttgccttggttgtactctgccgtctgatcaatgacgtcgaaccggggccgcaagtcccggagcaccgcctcgccgtattcatagaccgcccggctgacgccgagctgttcatacatggtcacaatttccatggtcttcctccgttgttcccaaaatttcatctgccaggtcgctgaggacctggggctttgtcaccaccaggccgctgacctcattgcccaaaatcagcagggtgtctccgggagagatgccaaagaaccggcgggcctcctgcgggatgacgatctgtccccggtcgcccactttggcagtgccaaagacccggtttttggacatgcccagcatgtgtttgcctccaggcatggagctacctccttgaaatcatacttttcacacaagtgtgaatcatagcacaaccggaagaacttggcaagaggaaatttttcaaaacggaaaatggtgcaaaatgctttggagtgtgttatcatacctccaaagatcaaaatgaggaggagcacctatgaattggcggacggtggacatgtcccgggagtcccggcgggaccaatttgcgtattttcagaccctgtccaacccctatgtgggggtgacggtgcaggtggatgtgacggagctggcagtctggtgccgggagagaggaacgagcttctttctggcggtgctgtacgctgcggtccgagcggccaacggcgtgccggagctgcggcggcgcatccggggcgatcaggtggtggagtacgaccgctgcccctcctcccatacggtggctctgccggacgggacctactgctactgcagcctggaggtggaccggcccttccgggagttcctgccctacgcggcggcggagcaggagcgggtgaaggcggcgcccaccctggaggacggagaggacggggagagcctgttctttgtctcctgtgtcccgtggctgtcctacacggccctgacccagccaaccccaacgccggcggacagcaatccccgcatcacctggggccgctggcaccgacaggagggccggactctgctgcctatgacgctgctggccaaccatgctttggtggacggcatccacatcgcccggttctatgagaatctggaccgggagctggccgccctctgcggcggggagaaaacagagtactgaatcaggaaaggagagagcggcaggtgaggcgctgcattgtggtggccgggatcgcatgaatcaaatttgaaaggagaatttcctcatgcagattccggcgaataccatctatccccgcacaggcgaccgggagaccgtctatctgaatgcagtggtgtcagaccccaatatttctgtgggggattacacgatctacaacgatttcctccgggaccccacggaattcgtgcgcaacaatgtgctctatcactaccccatcaacggcgaccggctggtgatcggaaaattctgctccatcgcctgcggcgcgaaattcctgttcaccagcgccaaccacacgctgaagtccctgtccacctatccctttcccatcttctacgaggcgtgggacacgtctgtctcggagatcacggagacctgggacaaccggggggacattgtcatcggcagcgatgtctggatcggctatgaggccgtcatcctctccggcgtgcggatcggtgacggcgccatcgtggccgcccgggcggtggtggctggggacgtggagccctacaccatcgtaggcggcgtaccggcgaagcccatccggaagcggttcacaccggagaccatccaccgtctggagcggctccggtggtgggactggccacgggagaagctccagctgctgctgcccctgctccgccggggtgacctcacggcactggagcgggccgcggagaaattctaatccacacaaaaaccgggcggcacacaactgtgccgcccggttggatatttactcttaaaacttacacctggataccgcccacaaaataggtattgtagtacccgctggtcaggctgctgacgatgacaccgccgctgcgggaagaggaggagtggatgaactgcccatctcccgtgtagataccggcatgggaacatgccttgccggcgttgcggctgggatcgttgaagaacaccagatcgccgggctgcagctcggagatagagtatacccgggtgcccaggccactctgccactggctggtggcggagtggggcagggagtagccgtgctggctgtacacgtacatggtgaagccggagcagtcaaagccgcggggagaggcgccgccgtacacataacccgtgcccaggtactgcttggcggtggccgcgatgtcgctgttggaggaggaagactccgtcaggtccaggaagtcgctgcggatgtaaccctcggtgccgtactcacaggtgacgtcgtaccagccgtccaccaagccgttgaccgtgacgatggcgtcctcctcaatggtggccagcacagagctgtcggtagaggcgtcggagcggacgttcacgccgtcggaattgacgcggccgtatgtagtgaagacattgtcctgatctacgttcaggtagtcagcagacacatagccggtgctgccgttgtaggcgatcttgtaccagccgtccacggagtcatccaagatcgccaccgccacactcttgtccagcgtggtgaccacggaggcggaggtagagggctcggcccgcagccgcagggaagaacctgtggtgcagccggcgccggtggcgatgtccgctgccagggcggtggccgccagcagcattgcggtgagaacggagaggaacaggaccttgcctgctctgcctgcgaagtgcgtcataggtgtacgttcctttcgtcagtcttttgtagcgcggggaaaaggtcctgtttcttacagcttgccagcaagagcacgatccagccagacggtggcgatgtccatcgccgcgtagaggctgtccttctcgctcttcttgaccacacggtcccgggacttcagctccgggtccgtcagctgcagctggatggagaccttggtggccacctccatgtcctgctccttcttggtgttgaggatctgcatcatgatgatatatttctcagccatcgtgccgtagtagatcagattgtccacccggcgaaggggatggcccttgtatgtcaaaccttctgccttcttggacttgctctctgccatggaaacactccttcaaaagttgtaaccgaattgtaacagattttatccgctttgtcaacgtttggtcacaagaaattacagccaattcctgggaagagacctgccttcggcccctggacgcaaaaaatcccgcagggaaggtcgccgcgccattcgcacggatgccctctctgcgggggaatgcagaaggaaaacggttactgccccaaatatctgcggaccagcacctgcagcagctcgtcccggtcgatcttgcggatcagggtccgggcattgttgtgattggtgatgtaggtggggtcctcggagagaatataacccacgatctggttgatggggttatagcccttttcctccaatgcccgatagacggtcgagagaatctgatggatctctgcgtccttctccgtggcaatattgaatttcctggtaaaatcgtccatacagacaccacctttcccgaagggagcaccacttcataatacaaaactagtatactcgttttttgaaaaactgtaaagcgttttccgcatgaaatttgaaaaaatacgccccgtaatcgctgggagggcgctggaccgaaagaacaggggggtccagtgcagcagaacggccttcggcccgcctcacagcgcctccgggagcggcgtctgcatcggcgctgctgggggattggatttgagccgggcggaacgcatccgcccggctcaaggtttctgtctgcgcaatagcacctggacgcgacggcacacaagcccgctgtgcagtccgcaggcggccgcatattaccgcaggacggcgttcagctctgccttcagcgtctccaggatgctcttcacatcctcatcggcctcctgagcggtgaggctgcggtcgtcggagcggagcgtcaggttgaaggccacgctcttcttgccctccgggatgccggagccggtgtagatgtcgaacagggacacatccttcagcagccccttggcgccccggcggatgcagtcctccagcgctcccacggtgacggccctgtcgcacaccacggcgatgtcccgggtgacggcggggaacttgggcagggggacatattccgggtcggcccccttggcattctccagctcgtccatggccagctctgcgcagtagaattccgcgtctacgccatagttcttggccaccaggggatggatctggccgaaccagcccaggcagtcgctgccgctccacacctcggcaaagcggccggggtggtaggagagctcctccggcaggccgctgccgatgcggaaggtcacatccttcacccgcagttcctggaggatcgcctcaatggcgcccttcatagcgtagaagtccatgtcgccgccgtaggcgcccagggtcagtgtcttggactcgatggccaagccgtcctcgccgccgggcaggtacgtccggcccacctcatagagcttcacgtcctgattgcggtagttgtagttccgggtcaggatctccagcatggagggcagggtggtggtccgcatgatggaggtatcctcccccagggggttcaggatcttgaaggagttccgccgctggtaatcttccggccagcggatcttgtcgtactgggtcggggagatgaaggagtatgtgatgatctcatcgtacccgaaggcccggcacacgctggacacccggcgctccaggatctcggcggcgccatagccgcccagggtggtctggccccgcatcagggtggtggggatgttgttgtagccgtagaaccgggccacttcctccgccagatcggcgatgccctccacgtcgccccgccaggaggggatggtcacgtcggcagggccgccggggcagctgtcgtccgctgtgcggatgtccacccgggccagataccggtactgctccgctgcggggatgtcggtgcccagcagcgcgttcacccgctccgggtccatgcggatggtgtggggctggggcacgtagttgaggatgtcgatgacgccgtccactacctctccggcgcccagcagctccaccagctcgcaggcccgctggacggcgggcagggtattcaggggatccagacccttctcgaacttggcggaggcctcggtccgcatccccagggacagagcgcccttgcggatgcaggtgccgtcgaagcaggcggactcgaacaccacgtcggtggtgtccgccacgatctcggagttcaatccgcccatgatgcccgccaggcccacggcccggtgctcgtcggcgatgaccaggtggttggcggtgagcttgcgcacgttgccgtccagggtggtcagttcctcgccctcctcggcccggcggacgatgatgtggccgcccttcacatagcggtagtcaaaggcgtgcatgggctggccgtactccagcatcacatagttggtgatgtccacgatgttgttgatgggacggacgcccatgctccgcagccgctcccgcatccacttgggggagggggcgatcttcacgttccgcaccatccgggcggtgtaccggggcaccagatccgcggcaggggtctcgatgtccagcaggtccgtcagcacgccgtcggcgccgccctgtacctccggttcgtggagagtcaggggctgctggtaggtggcggccacctcccgggccagaccgatgacgctgaggcagtcggggcggttgggggtgatctcgaactccaccacatggtcatccgcgccgataatgggcttgatgtcatcgccgttctggatcccttcctcgtggaggacgaagatgccgtcggggatgcagtgggggaactccttctggtcggcgtggagatcctccagggtgcagatggcgcctgtcttggtgttgtaggccaccaggtccccctcgtggaggttggggcagatggtgtccggcacagcggtggagccgcccaggtccagacaggtgtggaaggtgtagtccggctggctggcgcactccaggatcttggcgcacaccaccggcccgaacaccttgtcaccgggctggatgtcggcggggatggagggcttgtccttgtccagggggtggtagtcgttcaggatggcggcggggacgatagcggcgtaggggaagtcccgctcatccagacccagctcatagaggccgcacatcatgccgttggactccacgccccgcagcttgcccttctcgatcttcttgccgccggggagggtggagtggtccagggccacgggtaccatatcgccggggtggatgttccaggcgccggtgacaatctggatgggcgcgctctggcccacatccagctggcagatccacatgtggtcggaatccgggtggcgctccatggtgaggatggtgcccaccacgatattggagatctcggctccccggtcctcggtggtctccaccttggagccggagagggtcatggcctcggcaaagtctttatcgttggcgtcgacgtgcacaaactcgtccagccactttctgctcagtaacatatcttctataactcctttatatcggaatgcgggagtgccccgcaaaagcctcgcagagtttcacgccgccggcgtgaaaaaatatccagtcattttcggaaggacacgtgcctgccgaaaattccctgactcagccgccttgggcggcgttcaccagtgaccgatgtcactggtgagggggaatctaaaggggggacgggatcccctctttaagaactagaactgttccaggaatcgcacgtcgttctcaaagatcagccgcaggtcggcgatcttgaaccgccgcatggcggtgcgctccaggccgatgccgaaggcccagccggagtatacctccgggtcgatgccggacatcttcagcaccttggggtggatcatgccggcgcccagcagctcgatccagccctcgcccttacaggtggggcagcccacgccgccgcacttgtggcactggacatccatctcgcaggagggttccgtgaaggggaagtgatgggggcggaaccgggttttggtgcccttgccgtacagcatctccaccaccgtgttcagggtgcccttcagatccgccatggtgacgcccttgtcgatgaccatgccctccacctgatggaacatgggggagtgggtggcgtccacctcatctttccggtacacccggccgggggcgatgatgcggatgggcagctccatggtctccatggcccggacctgcatggggctggtctgggagcggagcatcacccggctgtcctcgtcaaagtagaaggtgtcgctccagtcccgggaggggtggccctcgccggcgttcagcttgtcgaagttataggtggccagctccacctccgggccgtccaggaccgtgaagcccatggagatgaagatctccttgatctcatccagcgcggtgtacatggggtgcttgtggcccagcttgtgggccttgccggggacggtgatgtccagcgcctcggcctccagccgctcctccagggccttttccgccaggacggcggactgctgctcgatggcggactccacatctgcccggacggcgttggccagctggcccatgacgggccgctcctcggcggagagcttgcccatctgcttcagaacggcggtcagttctccctttttgcccaggtactggacccggagggcctccagctctccggtgttcccggcggcgccgatggctgccagcgcgccggcgcgaatggcttccagttgttccttcatacgtcagactccttttttgagttaggagcgtggagatcggagataggaactggggcggccgctgtgcggctctattgggatcatccggctttgccggataccaaaactcctatcttctatctcatatctcctatctttgtgataacaaaaaacgcctctcgtcccatccctgggacgaaaggcgaatccttccgcggtaccacccggattcgcgccaaaagcggcgcgcactcgtggccccggtaacggagggcggaccggccgtgtctccacggcggctcccgggcgaaccaaaccgggcgtccgcagtctggcttgcagccggtggccagacctctctcggcggcgtatcacggttattttcccgttcatcgctgataacaattaacacttatagcacagaaacgggacaaatgcaagccccgattcgccgaaattcagcggatcggggcggaaattttcagctcaagagccggccgtccaccaggtcctccacctggatggcggacacctcgccgtccgtgatgaaaaaggagatgtgcttgcagtaggacaggccgccgggctcgtggatcagggcgtagtcggcgccgaactggtcctcgcccaccgcctccatctgcaccgcaccggtgtagacggcttttacatcgtcctccgagtcccccacctggatgcctcccagggtccgcggccccggcaccgtggtggtcatgcggtagatattgtcggttccatccgcatccagatacgccacatccacgcctccaaaggaaaacgtgaagagcgattccccgttgtcccccgtcccggcggactggggcgtctccgggagaccctcatagtcccaggggtatccgccctctttgcgccccagggagaggaactgcccctccgtcaccagacagaaggaggcggtggcgttttccgttgcccgctcgatggcctggggccgggcctccttcagggcgtccagcagggcctgctgggcgtcgttttccggctggtaggtgtccaggatctctgtcagccggtcctgctcctcctgaccataccaggcgtaggtgtcgttcaccggggcggccaccacaatgtcggcgtgctcccaggggctgtccgggaagacggacaacgcatcgaaccaggtgtccgggtcctccaggaaccgcctggttaaatagtcggtggcaccttcggaataagctccgtccgcgtggagcagccagcaggccagcttcaggtcggaccaggtgtcgaggttaccggcgtcatcacgcatgaaggtatcaatatcataggtgaactggaacaccgtctccgcctccaggtccagcccgtcggagggaacaaaggaagtgaatttccagccgtccgccgtgtgttccagatccagcaccgcctgggagtagccgacggtggtactgggtttctcaaaggcccagctgtcggcgtagaaggtgaccgtcaccgtccagtggtccgcatccacctgctccgccgccacggtcttgtccagcaggtacaggttgctccctcggcccccgtcggtggcgtagagaacgccgtcgaagtccttgtagtgatccggggacagggcgaagaggttgtccacaatctccggggagaagtaggactccgccgtctcccgcaggtctgccagggacgtgatcgtgaccggctgcggctgccagggaagcgcactgtccgtgagctctgccacggtagaaacgggcagggagagattctccgcatccacccggtagtaggtcaggtctccctctgtgcgggcgtcctccatgtccaggggcagggtggtcagatcaaaccagtcgtataccgccgacgcggcggtatacatattgataacgtcctgttccgtcagagcggtctccggggcctcatcgggcgaaaccggagattcccgcccgccgcagccggcgagcagcgtgatggtcaggagaagaagcgccccaaaacgcctcatgggcagcgcctcctttcgttcctttttgaagcatcatatcacattccaccggaaaattcatgacgatctggttacaaatgattgcaatccggagcgggaattcctataataggcaccagaaaaccatgaggaacacaggaggttacggccatgaagctgacgacggcggagcagatgaaggagctggaccggcaggccattgaagagcggggcattccctccatcgacctgatggagcgggcggcggcaggcgtggcagaggcggcgctggcgctgctgcccaagcggccggggaaatgtcggggggcggccttgtgcggcgcgggcaacaactgcggcgatggaatcgccgcagcccggctgctgtttttgaaggggctgaaggtccgggcgttcctggtaggggactatgagaagctgacgccggacgccctggaggagacccgccgtctcagcgagtgcggtgtggagctggagcggttcgacccggcggacgaaagccagcgggcctgggtgttggggtgcgacgtggtgatcgacgccctcttcggcgtgggcctctcccggcccatcggggcaggcacgccctttgccgcggcggtggactggatgaatgagagcagggccgccgtggtggcggcggacattgccagcggcgtgtcggcggacaccggcgccgtgctgggccgtgcggttcgggcggatcgcactgtcaccttcacactgcccaagatcggtcaggcagtgggggagggggccgccctctccgggaacgtggaggtccgggacatcggcatcccggcggatctggtccggggccttgtctgccgggcccagacggtggagcgggactttgcccgtgcggccctgccgccccggagggcggacggccacaagggaaccttcggcaaggtgctgatcgtcggcggcgcagtgggctataccggtgcgccttatctcactgccgcggcggcggtgcggaccgggtgcgggctggtgtccctgggggtgccggagaccatctggccggtggaggcggccaagtgcgtctctgccatgccattccctctgccggacaaacatgggaggctctctcccaaggcgaaagaggaaatcctggagcgggctgccggctgtgacgcagtggctctgggccctggactgggccggggagatggcgtcacggagctggtgctggatctgctgcagaagatccagcagccgatggtgctggacgccgacggcataaacgccctggggggacatatagatgtactggacgcccggcgagaccggatcacggtgctgacgccccacgacggggagttcacccgcatcggcggcgacctcaccggcagcaaccggctgggggccgcccgggcctttggagcggcccatggctgtgtcctggtgctgaagggccaccggaccctcaccgccgccccggcggggaacgtgctggtgaacaccaccggaaattccggcctggccaagggcggcagcggcgacgtgctgacggggattgtcgccgccctgctggcccagggggcgactgccgttcgggcggcggcggtcggcgtgtggctccacggccgggccggggacttggcggcggagcgcctgacgccctatggtatgacgccggaggacgtggtgtcgtcactgccggcggccatcggggagatcctataaaagacggaggtttttgcggtgcgcagatgggcttgcataccaatgatgaccctgtgcctgctgctgacggcctgcggcggcacaggcggagaggcgggggatgcggcggatgcccggatgccctatcggaacatggcgggctgcgtcatggaggcggaggtctcctgcacgcaggacggcgcggcctgggaggccacgctccagtgcgactacgtgccggagggggagaccactgtggaggtcctggcaccggagaccatcgcgggcgtgaaggcagtgctctccgacggggaagtggaactggtgtacgaggaccagtgcctgaacgccgggaacctcagcagccaggaggtgagccccatggcctgcctgccccagctgatgagcgccctgcgggacgggtggctgctggaggagagcgaggaggactggcaggagacgtcctgcttccgtctgacggtggaccagaccggagagcagaatgggaagatcctctccaccctctggctgcggcaggaggacggtacgcccctccgaggggagatcgccgtggatggggaaatcattttgacggcagactttacgagcttttccttttatgatacaatagaaaaccaggaatgacttcggcgggagggttcctcccgccgcttccatagactgacggagaaggtgaccgacacatggaggaaccgattctgagacggacctgggcggagatcgacctggacgccctggcccacaactatcagcaggcccgcagaaagatcgggcccaacgtgaagtatttgggtgtggtgaaggcggacgcctacggccacggggccattcaggtgtcccgcaagctggagcagctgggggcggactatctggcggtgtccagcttggacgaggcgaaagaactccgccgggccggcattcaggcgcccattctgatcctgggccacacgcccccggccatggtgccccagctgatcgagtaccgcatcacccaggcggtgtccgccctggccaaggcggaggcgtacagcgccgcagccgtggagagcggcggcacactgaaggtccacatcaaggtggacaccggcatgtcccggctgggtttcctggtgcgggaggggcactttgacacaggcgtggaatccatcgccgccgcctgcgccctgccgggactggaggcggaaggcatcttcacccacttcgccgtctccgacgaggatgacagagacagtgaggcctatacgagagcgcagttcgacgtgttcacccgtgtgctggatgcattggctgcagggggcagaacctttgccatccgccactgcgccaacagcggcgctctggcccgctatccggagatgtatctcgacatggtgcggccgggcatcgccctgtacggtgtgggcgccgacgcgcagcggctggacctgcggccggtgatgagcctgaagtccagcgtctccaccatcaagacctttgatccgggcacggacgtcagctacggtcgaacgttccgcacccagggaaggacccggatcggggtgctgcccatcggctatgcggacggtttcttccggggcctctccaaccggatgtcggtggtgacagcccagggcccagcccctcagcggggccggatctgtatggacatgtccatgatcgatctgacagacctgcccgacgtcaaggtcggggacgaggtggagatcttcggccgccgccagcgggtggatgacctggcggccattctgaacaccatcccctatgagctgacctgcgcggtgagcaagcgggtgccgcgggtgtatatcgaaggcggcaaaatcgtggagcggagcctgcggctgctgtgagcgcagggaagcgcggacacaaatccatacacacacgccttgttccgggcataggatagtgcggggcgaggacgccggaattttgcggcattggcaaagtataaattccgtacctgcgtgggagaatgaaagtggcctcaccgaagggccttcggtgatgggtacttctttcggcggagtgtgaactttgtggatacgagtgtcaagcgcggcgatatttactatgccgatctctccccggtggtgggcagtgagcagggcggtgtccggccggttctgatcattcagaacgacaccggcaaccggtacagtcccactgtgatcgcggcggccatcacttcccagaccgggaaggccaagctgccgacacatatcgaccttcccgtggaccacagctgcggcctgagccgggattcggtggtcctgctggagcaggtgcgcaccctggacaaaaagcgcctgcgggaaaagatgggccatgtggaggagaatgtgatggagaaggtcgatctggccatcgcggtcagcttcggactgccccacgaccagatggtttgagagatccgtttcttcggcaatacacaggccgggcgctgtggcggaagccgtctcctggccgcccggaaatgcgtggtttgatcgaagggtcctcctgaaaagggcgttccgcccttttcaggggtaccgatttttcagatccgacaatcaatacggaggtacataagcgcatgaaaaagaacagatggtatctgcggctgctggcattgctggtgctctgcggcgccttgaacgtgacgattaccgcggcggcggaggccggatcctccgacgacccgctggtgaccctgagctacctgaacgagacgttcatggactccatcatggagcgggtggaccagaagatcgccgcccggaatgcccagttgggcatttcggcaggcagcggagccggtgccgcgtccaatttcactgtggtgaccctcaccagcggacaagtcctcactggggacatcggctgtgaggtaatgctgcgagtgggaacggctgtgtgcgtttctccctccagtcccggtctcattgacgagaccgcagccacagcgctgaacaacggcagtgcgctggtccagaaccacctgtacatgatgaccattgagggccggggcgtccgcgccacggccggcaccaccaagctgctggtccggggcagctacaccgtcgcctgatctccgcataaacggccccgcctgggcataggttgtgccaggcggggccgtttggagagggggcagagcgatggacaagtttccactgatgcagggcggtgtctctgtgggggagctcatcacggagcaggaggcgctgtacacctggtttgaggcccggtgccgcctgccgggagagggcctctggtgcgcctgggcggtgggcgaccggggagagctgcggctgggcgttctggagccctgtggggaccgggccacaatccggcggcggttttccgcgcggctgacagcccctctgggaaagctgcggcagggggagatccgccctgcccatccgccggagccggaggattggacgccgctggagcgctcggcagtgcgtctccgttccccatggcttcgggagcagctgcaccttgtgccgggcgtccttgtccgggaggagcaggggcggcgggagctggcggtgccctatgacgtgggccgcccctttccgctgaccgccttgttctgctttgcccatatccgccgtatccatggccggagctacgccatctttgccttcaacggggaggagcggccggtgttctgagccgtccggcggacagagacattttcagaaaattccaaatgatgtgttccacatttcccgggggtatgatataataaccccaagacggccgtggcggaggggctctccgcccggcctcagacacgggaagacctgccggccgggcgccggcggagcgtttggaggtccagtatgaagtgtccctattgcggttacagtgagagcaaggtcattgattcccggcccgcggacgaaaacagcagcatccgccgccggcgggagtgcctttcctgcggcaagcgatttaccacctatgagacggtggagagcctgcctatggtggtggtgaagaaggacggcagccgccagagttttgaccggcggaaggtgctgggcggcatgatccgcgcctgcgaaaagcggccggtgcccttggcggagctggaaaagatcgccgaggagatcgagcaggatctgcagaactccatggagcgggagatcagcacagaggccatcggcgaaaaagtgatggagcggctgcgaaacgtggaccaggtggcctatgtccggtttgcctccgtctaccgccaattcaaggatatcgacacctttatgacagagctgaacaagctcctggccgacaaccggtgaaggccgtcagaggacgttcttgatatccagccgctccgtctccgccaggagccggagctgatcccgcaggtccgagatctccgcccggaactccgtcagctcccgggtggcggcgaaggccagggcccggcggtacatggcctccgcgtcatccaccgtatcatgccgcgccacgatgtggaggtaggtctggctttccgaccagtcgtcatagctgcctgccagcgtatccacggcctcggtccaggcctctgactgggcttgggcgtccgcctgctgcagctgctcccgccagcggacggtgctggcggtcatgtaggagctgttccacagggaaaagaccaggatggctgccaggatgccgacggatattccatacgccctcatgactctcgctcctttcggacgcagaatacctgcccctgctcgtccagggtcaggaggaagatctcacggggagaggaggctttttcccgggacagctgcttgcgcagccagttctcgtcccggccgcaggcggtcagattgcggtggatgacccgcccgtcgttgatgatgaccatgggcagtgtcacgtcatcctccagccccagtcccagttgttccgccgtgggcggctgctgggctgtccagggaaagacggtcagctggccggagttttccagcacggcgtacttcacgtcctcgatgcgggtgacgccctgctcccgcagttcctccatcagctcatcgatggtaaagcggttcttccgcatggcgtcctgctgcagcttgccgccccggatcaggaccgtgggcgtcccgcagatcagcgcccgcagccgcaggctgcggagagacagctgactcagcagcagtgacagggccagcagcgtcaggatcggcagcaggccagagagcagcggaatgccgaagtcctgcatgggcacggcggccaggtcggagatcatcatggtcagcaccagctcgctgggctccaactcgccgatctggcgcttgcccatcaggcgcatcccgaccacaataaggaaatagagaatgatcgttcggacaaaggcggttatcatggcgaaaatccctccgttccgctagtatctgccggaacgggatttttatccgggataaggctcccccaggagggggagattcttgtaaagcatagaaagaaaatatagagttatacagcaacagttttgagaattaataagaaaaaataatgatggattcaagtgttcacaaacaattacatttcaaatcggtaaacgccgaaaaccgcagggaagttgagggcttgactgtcttttctgagcaggctggttttattgagagtgtaagcgagtgcttgcgggaggcagatgaattggagctgtggcggcctgttggtatttatgacagcgacacgctgattggttttgctatgtacggctattttccagagccggctccgggacagctatggctggatcggctgctcattgataaaagatatcagggaaaaggatatggaaaacaggcggtgctttcgcttcttgacagattgcatacagagtatcagagcggcacggtatatcttagcgtgtatgagaataatccccatgcaatcaagctttatcaacagattggtttccggtttaacgggaaatacgatagcaagggggaacatatcatggagtatcatttttgagagatgtagagccagtcaacggtcaatatgtgctgaatcgtcttaacagacctatttaagatgggcttatcaggcgcatattatagtgaccgcatcaaaatcaaaaaaagaaaaatcgcagatgtgaaaggagtttatgggccgcggcccatcacagcgccagcgcccgccgccagcggcgggacgacgaggggaagggagtatcgaaggattcggcggatgcccttccgtgcccacgggcgcgtacacagccggcaaatatgcgggcaaccgcaaaacaaggggggctgtgaccgtgaagaaagtgacaaatgactgcgtgtttgtccttttgaccattcattacagaatcttcaggaggattatcgaatatgtgcggaatcatcggatttgtaggaaacgagcccgcggcccccattctgctggacggcctggagcggatggagtaccgggggtatgactccgccggcgtggcggtgcggtccgagacggcgggactccaggtgcgcaagaccaaggggcggcttcaggtcttatccgacctgatccacggcggcgcggacctggaggggaacctgggcatcgggcatacccgctgggccacccacggggagcccaatgacatcaacgcccatccccacgtcagcgagaacgggcggatcgccctcgtccacaacggcatcatcgaaaactatctggaaatcaaggagcacctcatgcgccagggcgtccacttcacctccgacacggacacggaggtggtggcacagctgctggagttccactacaacgaatgccacaacatgctggaggctgtgggccgctgcctgcggcggatcgaggggtcctacgccttcggcatcatctgtgcggattaccccaacgccctcattgccgcccggaaggacagccccctcatcatcggctacggtcagaacggcaacttcatcgcctccgacgtgacggctgtcatcaagtacacccgggacgtggtgtacatggacgatggggagatcgctgtcctcaccgccgacagcgtggacgtgtttgacgacgagctgctgccggtggagaagacccacagtctggtggactgggatgtgtccgcagcggagaagggcggctacgcccacttcatggccaaggagatcatggagcagccggaggcggtccgcaagaccatctccccccgcatccgggacggccgtgtggtgctggacgatctgcatctgacggcggagtacgtccgcgacctctcccggatttacgtcatcgcctgcggctccagctaccatgtgggcgtggtgagcaagtacagctgggaaaagctgctgcgccgcccggtggaggtggtgctggcctccgagttccggtactgtgatcctctggtggacgaaaagactctggtcatcgtcatcagccagtctggagaaaccctggacactatggccgccatgcgggaggccaagcgccggggcggccggaccctggccatcgtcaatgtggtgggcagctccatcgcccgagaggcggatgacgtgctgtacacttgggccgggccggagatcgccgtggccaccaccaaggcatacaccacccagctggtgctgatggatctggtgggcctctatctggcggacctgctgggtacggtggaacagagcgagtatgacaccattctctccgagatgcagctgctgccggagaagatgcgccagttcctctcccacacggaggacatccagtattacgcctcccggtacttcaaccacgactccatcttcttcatcggccggaacctggactacgccatgggcctggagggttccctgaagctgaaagagatcagctatatccattcggaggcctacgcctccggcgagctgaaacacggcaccatctccctgatcgagccggggaccctggtggtggccctgggaacctacgcgcctctctttgacaaagccatgagcaacgtggtggaggtgaaggcccggggggccgaggtgctggccctgaccaccgaggacttccgggaaaagatggagaagactgccgacgccactgtctctgtgccggtaacccatcccatgctccagccctctctgggcgtggtgcccctgcagctgttcgcctactatgtggcgctccagcggggctgtgacatcgacaagccccggaacctcgccaagagtgtgactgtggaataacgaattgccgcccggaccatctggtccgggcggtttttttacttgacttatataggaaatcgatatataatggcgctgtcaaaatatatagaatatctatataaggaggaagtctatggaggccgataagagtctggtcagcggcagcatggccctgttggtcctgaagctgctggaggacggggacaagtacggctaccagatgaccagcgagctgcggcagcggtcggaggacgtgttccacctgaaagcggggaccctgtaccccctcctccacagcctggaggaaaaagggctggtcaccgcctacgagcgggaggccgctgccggtaagccccggcggtactaccatctgacaaaggcgggggaggccgccctgcgggagaaggagacggcgtggcacacctatgccgatgccgtgggccgtgtgctggggggaggtgcctgctgtgccgggacctgagagcgtccggggctatctggacgcggtggaggcacaaatccgctggaagcgggcccggactgtggcggcccgggagctggaaactcatctggaggaccagcaggaggaatttctggccgaaggccatccgccggaagaggcggagcgcttggcagtggaggatatgggggacccggtggccgtgggcgcggacctggaccgcctccaccggcccaggccccagtgggggatgctgggcctgaccctggcgctgctgctggtgggcggctggttgcggtacgccctcacccgagcgggagcaccctgggatgaggatctggatccgctgcgctgtgctctgtcagtggtgaccggggctgctgtgctggtcggagcctacttcctggacgtctcccggctgctgcgctgggccaagtgggtgtacatcggtgcggtggccgttggagtgctgtctctgcatctctccccgactgtcaacaacgcatcctatttcacccggtatgtggtgctgttctatccggcagtctacgcactgtggctgtatgcctgccggggaaagggctggcggggcctgctggctgccgtggcgggcggcatccctttgacggtggtctgtatgtgtgcgccctttattcaggggatgattcaggtgatggttattggctgctttctgctgttgctcgctatccagatggactggttcaccgtgccccggcggcagggactggcggcggtgggcggactggccgctgtgatgactggagcggtgctgtggcttctgtttgtggcgggctataatgcagcgcggattcagattctcctgcacccggagatagacccacagggggcggggtatcaggctgtaatggctcgccggatacttggggcatcccgcctgatggggaagggaggagacctctcaatccagctgaatacggtacagggtatggaacttcccccggagatgatgctgccggagtggaaccacgattttctgcccaccaccatggtctacaaactggggtggttgccctatctgctcctgctggcagttttggctgtcctgctgctgtggatgctgcggcgatgtgcctgccagcaaagccagagcggaaagctgctggcactggccgttgtcctgacgctggcggtgcagtcggcctttgcggcggcgctgaatctgggctttgtgctgttcagtgcccagctccctctggtgacgggaaatctccacagcatggtggactgcgccctgatcgggttggcgctgtcggccttccgctcagagtccattttgcgggacgcggtggttccggtcccgcggcccccgcaaacacaaacagcttgaccagaaaagacaagggcggagagggagcccctctccgcccttgctgtatgcaattcgtcagttggcctcctgaatcaggaaggtctggttccccaccccgtccgcggatttctccacttccaggtcctcatgcgcctcctgcaccgccagctgcgcatccgtcataggctcccatgggataccggtactctccacaaaggcccgggcagcgtccggatcggctgtatgtgtgtccagcggcagggtgaacatgcagcccgtcacattgtcccgcagatccactgtgccgtcttctgccagggagaaacgctcataggagggggcggcgaatccctcatacagcgcgagatataccgtgtgatccgaaaatatctccaggctctgcgtgtccagtacataataggcccggccgtcccgcagaaaggaggagcaggcaccgttcagggtgaacacgttgacggcccggggatcatagccggacaccaggggcgtaacagtgaaggccccgcaggggaccacgtcatagttctcctctgtcaggggtgtgccgtccgttcggaccacggacaccacggcataggtgcggctttcctggacatcggcgcaccactgggagatgttggcgccgctgaccatccccatcagggtgacggtgtagtccccaacggtctgggtctcattgaggatcacggcggcttcgctctggaaggcctccgccaacattggatcgttcagttccaccgcaacctgggcgggggtcagccacagcacggcggcggacacagtcacggccaggagggccacggccgccgcagccagcagggtaatttttttcgtgcgattcatggacatcttgttctgctccttttcagatgcgtgccgcatggctgccagcttttgaagagtccgctcctcgaagtccggggagaagtccacggcgtcaaatgcggcgcggtagttctggcgattcattccacatcctcctttaaaagttggcgcagccgctcccgcccccgggagagccgggtccccacggtagggagggggatttgcagcagcttggaaatctccttgatggaatagccctcataataatagaggtggatgacagcgctgtacttcgccggcagggcctgcacggcggaaaggatgggggagggctccggcatctctccgcctggaaggacctccgcggtctccagggggagattccgccgctccgccgcccgggccatgtcgcaggcccggtggagcgtggtgcggatcagccacgccttttcgtgctccaggtcccggaagtgcggccgggtggtcagcagcttcaaaaagacctcctgcaccacgtcttccgcgtcggcgggagaggacaggcgggtcatggcgatccgcagcagcatggggctgtacgcagccaccgtgcggcggatggattcgtcggtaccaaacgaagtcagggtcctcagctcctttcacccataacacggaccagcctgcccggattattcaccttccggaaaaatttgcaaagcccgttttctgcctgcgggagattgacagggagaagcggctgtgataatatgtaaaccaattatagcgtccctccgcactgcggtgggacttttttgggacacggtatgtcgaaaaaacaggaaaggaagcggatcatgggaaaaaaacgggtgtttgcggcgctgctggcgctggcagtgacagtggggtctctggtactgccggcccgggcggcctttaccgatacgacgggccactgggcggagaccgccatcacgaaatggagtgaggagtacagcatcatcaacggctatgaggacggcacattccggccggacaactccatcacccggggcgcctttgcgggcattctggaccgcttcctgaaattccaaagcacctcgcccgccgggacgttctctgatctgagcgggaactactgggaggatgccatcctgaagctccacgcctccggcgtttacctgggcaacaacgggcaggccctggccggggacaccatcacccgccagcaggcggtgaccatgatcgcacgggccttcaacatctcgggggagagcgcaacggtctattacctggatgcggaccaggtggcggattacgcgaagccgtatctggcggagatgtccgccctgggctacatcacggattcctccgacgggtacttccgtcccacggacgccatcacccgggcggagatcgtgacgatcctggacaacatgatcgaggtgctgatccagaccagcaccacctacacccaggacgtggagggcacggtgatggtcaacgcggcggagggggcctgcctccaggacatgaccatcacgggggatctgattctggcccccggcgtcaccgggacggtgaccctggagaacgtgaccatccagggcgcggtacggaacttcggcagcgccgtggtcacggacctctcccagcggccggaggagccggagcagccgccggccatccagcccggcgacgtgtacacgccctcggagaccacaggggagtatctgacatacagcaaccaacagatccccatctacgccggggtggagcggaaccgcttctcccagggagatttcatgtgggacccggaccgtccggaccgcctgatctataccggtgacgactaccggacccgcttcggcatcgacgtgtccgcctatcagaaccgggccagcgccaacaacaccatcgactgggaggccgccaaggccgacggcgtggagttcgccatggtgcggatcggcctgcggggctacggctccggcagcatcatggaggatgctttctacgcccagaatattgacggggccatggcggcgggcatcgagaccggcgtctacttcttcgcccaggccatcaccgtggaggaggccatcgaggaggcggactttgtcatcagcctgctggagggccacgagatcgacggccccgtggcctacgactgggagatgcacgacagcacctaccgggtctacggcaccacgccggagatggccaccgcctgcgcagtggcgttctgcgagcgcatcgaagaggccggctacgacgccatggtctacgccgggcagtatgtcagctacatcaaatatgaccagggcgctctggagccgtatctctcctggtaccccgagtacaagagcgagagctccgagcttctgtaccccaccctgtactatcacatggactactggcagtattccagcaagtgctctgtggccggtatcggcggcaacgtggatgtgaacctccagttcatccggcggtaagcccttctctccaaaagaaatacggcggggcgtctgccccgccgtatggcgattccaggggagttacttgcggttttccttctgggccttgttctggttctgctggctgttctcacggttctccttctgctgagtctggccggcatcgcgcttgttctggttgtcgcggttgctcatcaggacacctcctttcgcctgcttgagtacatggcatagtctcaccgccagctgcggaaattatacgcggaggctggaaaaaaccttgtcaccggaggaaaaaatggattgacaaaaggacaaaagggtgctatactaatccagcaaaacaaagaaggctgactgcatccgcctcacctccagcgatttggcaaagaggtttacactgctgtaatcagaccaccgggcggtggtttgttgttgcgcggatgcctgcatggtatccgcgttttgtgattctgagatggaggtgcttcgaccattagtaaagtagtgcatgaactgaacgaggagatcagagacaaggagattcgcctgatcggttccgagggcgagcagctcggcatcatgccccctgcggaagctttgaagatcgccgacgagcagggcctggacctggtcaagatctcgccgcaggccgttccccccgtgtgcaagctgatgaactacggcaagttccggttcgagcagagcaagcgggaaaaagaggccagaaaaaaccagcacgtggtggagatcaaagagattcggatgtctccgggcatcgacatcggggatttcaatacgaagctcaaaaacgcgcagaagttcatcgccgacggcaaccgcgtcaaggtctcggtccgattccgcggccgggagatggcccataccgacatcggtagggacctgctggaccggtttgccgcacaatgcgccgaaaccgccaatctggataagcccgccaagctggagggccggatgatgtccatcttcctctcccccaaatccggcaagtaatctgatttcaacgatacggaaggagcaaccattatgccgaagctgaagacccacagtggtgcaaagaagagatttaatctgaccaagaccggaaaggtcaagcgcgccaaggcctacaagagccatatcctgaccaagaaggataccaagcgcactcgtcgtctgcgtgccggcggctatgcggataccaccaatgtggatgccatccgcaagatgatcccctacaagtaagacacgagacgttcaaataggaggtttttgaaatggctagagtcaagggcgcgatgatgacgcgcaagagaagaaataagatcctgaagatggcgaagggctactggggctccaagtctaagcacttccgtgtggccaaccaggccgtgatgaagtccctgagctatgcctacaccggccgccggctgaagaagcgtgatttccgctccctgtggatcacccgcatctccgccgcctgcaagatgaacggcatgaactactccaccttcatgcacggcctgaaggtcgctggcattgagatcaaccggaagatgctggcggagatggctgtcaacgacgccgccgccttcacccagctgaccgagatcgccaagaaggcgtaagatccctttccagactatgtgagcagcgccctcccaaatgggagagcgctgctttttgtatatccaggacggaggggaggcaatccccgttgtgccccttcggtcaggctttccggcagaagtacggcccgcggtccgcctcatggggctgcgcaaacgtccaggtgaaatccttgtctaccacgtaccagtccgctccgggaatggcgcgtgcatctgcgggcagggtaaccagctcctccgccgtcaccggccgcaccagaggctcaccctccggcggctcttcataataaaagaggtatttctcaccggatgcctccgacagagcctgccgggccgcgtcgccggacaggcagggcaccaggttccaggagaagagatgccacaggtaattcccatccgacagcacatgcctccccaactccgcgtcggacacgccgtcggcaaaaacgtccagccagcggttcttcacccgccgaatgtcggtggggaagggttcctcccagggaaccatggtggccacacaccggcagatgggcagcccctgctcatggaacttggcctcgtagtccgtcatgacgcccaccgggccattcgcatggaggtcccgggtgacctcggacagctcaaagccgaacagaggcagctcctccacggagaaggtgaagaggtcctgattgtccgtcttgaagtggatctgcccgcccatcttcagcacctggcggtacagccgcaggaagttgccgtgggtcaggcggcgcttggcgtggcggttgctgggccagggatcgcagaaattgatatagatccggtccgcctctcccggggcaaagaacaggggcagctggtcagcattggcgtcgatgaagaacacgttggtgagcccctgggccgcacaccgctccatggccatgaccatggcatccggcacccgctccacagcgatgaacagcacgtccggctccgccgccgctgtgccggcggtgaagcggcctttgccgcagcccagctccagccgcagctcccgggcctggggcatcagctcccgccacttgcccggcatggagtagggctcccggatcaggcggtcgccgcagcgctccatccgggggatcagattctttttctttcgcatccgcatgtgtcaacatcctcctgggtcggttcccgatccgatttcaggaagaccccgccggggagtcctccgtacattcagaatgctattgtaccatacagacccggcgctgtaaatggcggcgtggatttcctgcttgcgcggaaagcaaagagatgatatgatagcccaaatgggaggggggagcgatgtgcccaaggtgccctactgcggcagaagcatgttttatcaggaggcgggcgagggcccggtcctgatctttctccatggcaataccgcctcatcccggctgtttgagccgttgcttccactctatacgcctcatttccggtgtgtgctgctggactttctgggaaacgggcgctccgaccgggtggagtcgtttccggcggacctgtggcaggaagaggctcggcaggccctggccctgatccgggcggcgggctatgagaggccctgtctgctgggaaccagcggcggcgcctgggccgccatgaacgcggccctgctggcacccggcgcagtaggcgccgtagtggcggacagctttgacgggcggagccttcacccggggtttgcgcgggatttgacagcagagcgggaccgcgccaaaagagacaaggcagcccgggaattttatgcatggtgccagggaccggactgggaggcggtggtggaccgggacacggatgccctgttgcgatgcgccgcctccggacggccgctgttctgcggcccgctggagcagatgcggccgccagtgctcctgatggggagccgggaggaccccatgtgcagacaggatttggaagaggaatacaaggcgatggcggcgcagatgccccatgccgccgtgcgcttgtttgcatccggtgggcaccctgccattctttcccgggcggaggcggctaaggaggagatcctggcattttggctccggtgcgaggcggccgagaggctgtgagatttccggcagatacaactggaacgaagggccttgtgaatgcattaacaaaattgtataaagtttaacgaacaatttgtatgaagtgtaaaaaacgtgaaatttttcgcaaactgcacaaattatacttgataaatgccgccagtcaccctataataaagtttgtgagtaaattggcaatatcggaatgactctgtgttctcccggaggggcggcacagcccggccccctggagtgccgaaaggcatgaaacaaggaaaccaaacaatttattcaaaaataacaggaggaaaaatcatgaaggttgcagtttttggcgcaggtaccatgggcagcggcattgcgcaggttttcgcggcaaagggccacaccgccctgatgtatgccagctccgtcgcttccgcgcagaagcacaaggataagctggctgcttccctgcagaagcgggtggagaagggcaagatgacccaggaggctgtggacgccctgctggccaacgtgctggtggaggagaagtccgcctgcgccgacgcggatctcatcatcgagtgcgtcaaggaagacatggctaccaagaaggagctgctgaatgagctggacggcctgtgcaagcccgaggccatcttcgcctccaacacctcttctctgtctatcaccgagatgggcaacggtctgaagcaccccgtcatcggtatgcacttcttcaatcccgtgcccagcatgaagctggtggagatcatccgcggcgccaacaccacccaggagaccttcgatttcgtctataagctgtcccaggagatcggcaaggagcccgtcgaagtggctgaggcccccggtttcgtggtcaacaagatcctgatccccatgataaatgaggccatcggcctggtagagaccggcgtcgcctccgtggccgacatcgacaaggccatgcagctgggcgccaaccatcccatgggccccctggctctgggcgacttcatcggcctggacgtgtgcctggccattatggagaccctgtacaatgagaccggcgactccaagtaccgtcccgcgctgctgctgcgcaagatggttcgcggcggcctgctgggcaagaagaccggcaagggcttctatgattattccaagtaattgaagtcagcaccaacaagaaaaggagttaatggtatatggattttcatctgacaaacgagcagcagatgctccggaagatgtaccgtgaattcgccgagaacgaagtgaagcctctggctgaggagatcgacgaagaggagcggttccccatggagaccgtcgagaagatggccaagctggggatgatgggtatttacttccccaaggagtacggcggcgccggcggcgacgttctgtcctacgccatgtgcgtggaggagctggccaaggtctgcggcaccactgctgttatcgtttctgcccacacttccctgtgctgcgcccccatctttgagcacggcaccgaggagcagaagcggaagtatctgcccgacctgctctccggcaagaagatcggtgccttcggcctgaccgagcccaacgccggcacagacgcctccggccagcagaccctggcggtgctggagggcgaccactacgtcctcaacggttccaagtgcttcatcaccaacggcaacgtggccgataccttcgtggtgttcgccatgactgacaagtccaagggcaaccacggcatctctgccttcatcgtggagaaggacttccccggcttctccaccggcaagcacgagaagaagatgggcatccgcggctcctccacctgcgacctgatctttgaggactgcatcgttcccaaggagaatctgctgggcaaagagggcaagggcttcaagatcgccatgcagaccctggacggcggccggatcggcatcgccgcgcaggccctgggcctgggcgagggcgctgtcaacgaggctgtcaagtacacgcaggagcgtgtccagttcggcaagcgcctgagccagttccagaacactcagttccagctggccgacatgcacacccggatgcaggctgctcagtacctggtgtacgctgctgccatgaagaagcagaatcacgaggactattccatggacgcctccatggcgaagctgttcgccgctgaggctgcctccgatgtcacgcgccgcgccgtccagctgttcggcggctacggctacacccgcgagtatcccgtggagcgcatgatgcgcgacgccaagatcaccgagatctacgagggtaccagcgaggtccagcggatggttatttccagccgcctgggcgtgaagtaagataggaggtaaaggttaacatgaaaatcattgtttccatcaagcaggttcccgacacctccggtaaggtggcggtgaatccggacggcaccctgaaccgtgcgtccatgcagaccatcaccaaccccgacgatatgaacgccctggaggcggccctgaagatcaaggacgccaccggctgcaaggttgttgtggtgaccatgggtccgcctcccgctgccggtatgctccgcgaggcgctggctatgggcgctgacgaggccgtgctggtgtccgcccgcgagttcggcggttccgatacatacgccacctctcagatcctggctgcggccatcaacaagatcggcgtagaggctgacgacatcgtcatgtgcggccggcaggccatcgatggcgacactgcccaggtgggtccccagattgccgagaagctgcatctgccccaggtgacctacgccgccgacatccagaaggacggcgacaccatcaccgtcaagcggatgctggaggacggctacatgaccatcaaggtcaagactccctgcctgatcacctgcatcaaggagctgaacgagccccgctatatgagcgtgggcggtgtgttcgaggcttacggcaagcccatgaccacctacgactatgaggcgctgaaggacgatcccctgatcgacgccaccaccatcggcctgaagggctctcccaccaacatcttcaagagcttcaccccgccccagaagggcgccggcatgatgctggagggcgccgacaaggcgacctgcgagaagctggccgacattctggcgaagaagcacatcatctgagaaaggggataaacgaatatgtctaatttcaacagcgccgatatcgctgctttcaaggatgtgtgggtcttctgcgagcagcgcgagggcaaactgatgcccaccgactttgagctgatctccaagggccgcgacttggccgacgagctgggtgtgaacctgtgcggcctgctgctgggaggcgagggcatcgagtccgctgccaaggagctgggcggctacggcgccgacaaggtgctggtgtgcgagagccccctgctggccgtctacaacaccgatgcctatgccaaggtgatctgcgacgtgatcgaggagctgaagcccgaggcgttcctgatcggcgccaccaacatcggccgtgacctggggccccgctgcgcggcccgtctgcacactggactgtgcgcggactgcacccacctggacgtggatgtggcgaactacatccagttcctgcgtgagtccagcaccctggacgtg
